United States Patent Application Publication US 2014/0230087 A1 - sequence listing, part 9

SEQ ID NO: 5480 - DNA, 6904 bp, Arabidopsis lyrata
  Intron number 6 from transcript 470213 (locus 470213) deri ved from phytozome v7.0 (chr-ID scaffold_1; pos 657358 to 664261)
atcaacgtgatcatcattgtggttgcgggttcaatgtaagtaaaagccttgacaatcacctttatatatatgtatgatgtgagattcggattcctaacagttatgttctatttttttcttgtttaggtcgcttgggcaaacatctccatgtgtaaccgcatttgcagcgggtcaagctgcagcatataagatgtttgagacgataaaaagaaagcctttgattgatgcttatgacgttaatggaaaggttcttgaagatattcgaggagacattgaacttaaagatgtgcatttcagttaccccgcgaggccagacgaggatatatttgatggattctctctgtttatcccgagcggtgcaacagcagcgttagtaggagaaagtggaagtggaaaatctacagtgatcagtttgattgagaggttttatgatccgaaagccggcgaaatactcattgatggagttaatcttaaggaattccagttgaaatggatcagaagcaaaattggattggtcagtcaagaacctgttctgttttcgtcgagcatcatggagaatatcgcctacgggaaagaaaatgcaacggttgaagagattaaagctgcgacagaactagcaaatgccgcgaagtttatagataagttgcctcaggggttggatacaatggtaggagaacatgggacacagctctcgggaggacagaaacagaggatagcgattgcgagagctattcttaaagatccgcggattttgctgctggatgaagcaacaagcgcgctcgatgctgaatccgaaagagttgttcaagaggctttagatagagtgatggttaaccgaactactgttatagtcgctcatcggttaagtactgtcagaaatgcggatatgattgcggtaattcaccgtggaaaaatggtggaaaaaggttcacattctgagttgttgaaagattctgagggagcttattcgcagctcattcggttacaagagataaacaagggtaatgatgtcaaaccatcagacatatctgcgggatcatctttccggaacccgagtttgaagaaatcaatagagggatcggttatcagtggcggaacctcgtcggctgggaatagcagccgtcatcattctttgaatgttcttggtttatctgcaggactagacctcagtaacggtagccaacgagtaggccaagaggaaactggaacgactagtcaagaaccgctcccgaaagtatcactcacccgaatcgctgctcttaacaaacctgagatcccggttctccttctaggaactgtagcagcagcaatcaatggcgctattttcccgctttttgggattctgatttcaagagtcatcgaagcgttcttcaaaccagctgaccaactaaagaaagattcaagattctgggcgattatatttgtagctcttggagtaacttcgctgatcgtctcaccgagtcaaatgtatctgtttgcagtagctggcggaaaactgattagacgaattcgatcaatgtgctttgagaaagcggtcacatggaagttgggtggttcgatgagccacagaactcgagtggaacgatgggtgcaaggctatctgctgatgcagctttgattagggctctagttggagatgcattgtctctagctgttcaaaacgttgcatctgctgcgtctggattgattatagcattcactgcgagttgggaattggcccttataatcttggtgatgcttcctcttattggtatcaatggctttgttcaagttaagttcatgaaaggattcagcgccgatgcaaaggttcgtacatcaatcggtttggttccattttttttcggttctccaaaaatcctctgttttttttcttttgaatcaagaaacttactctgtttttggataactatgcagtcaaagtatgaggaggcgagtcaggtagcgaacgatgcagtggggagtataagaacagtcgcatctttctgtgcggaggagaaagtgatgcagatgtataagaagcagtgcgaaggtccgataaaagatggaataaagcaaggtttcatcagtggattagggtttggattatccttcttcattctgttctgtgtctacgcgacaagcttctacgcgggggctagattggttgaagatggcaagattactttcaatgatgttttccaggtgaatcactgtcttcatcactgcttaaatatttttgaatatctctgtgacttagtaatgaaaaataatggatcttgatctggatcttgcaggtattctttgcgttaacaatggcagctatcgggatttctcagtcgagtacttttgctccagattcgagcaaagctaaggttgctgctgcttcaatctttgcaatcatcgatagaaaatcgaagatagactcgagtgatgagtcagggacagtgttggagaacgttaagggagatattgagctgcgtcacttaagcttcacttatccagcaagaccagacattcagatctttcgtgatctttgcttaaccattcgcgcaggaaaggtaaacaaatcatcggactaaacccaaactttctcttatgaaatattatcactcaagtttctgtctctctttgtttttctttcagacggttgctttggtaggagaaagcgggtcggggaaatcgacggtgatctcgctcttacaaagattttacgatccagattccggtcatataactttagacggagttgagctcaagaagctgcaattgaaatggttgagacaacaaatgggactagtgggacaagaacctgtcttgttcaacgacacgatccgagccaatattgcttatggcaaaggaagtgaagaggccgcaaccgagtctgaaatcatagccgctgcagaactcgccaatgcacacaaattcatctctagcatacaacaggtaagaaaagaaaataattttcaaattatttttcttctatagaaactctgtttttcaaagtttacttacgacgcaagcaaaacattttttttttagggttacgacacagtggtgggagagagagggattcaattatcaggaggacagaaacagcgcgtagctatagcacgcgccatcgtgaaagagccgaagatattgcttttggacgaagcaacaagcgctcttgatgcggaatcagaacgagtggttcaggatgcgcttgaccgagtgatggtaaaccgaaccacgatagtggtggctcaccggttatccactattaaaaacgctgacgtcattgccgtcgttaagaacggtgtgattgctgagaaagggactcacgagacgttgatcaaaatcgacggcggggtttatgcttcacttgttcagcttcacatgactgcttctaattgatacattttgatgatatatttttggtttatgagagctaaaaacttcagtttttggcttgagtcaaaactagcctatgtacaaaaaggttttgtatttattttttgttttgtttccataacaacatatattgttgttgtatacaagttaatgaagtgatatatattgtctttcaagcatgcctgtttcttgaatatcttgaatttttgttgacttttaagcttagttgctgccatggaagttagtcaactttcggtaaaatgaaaatcctctcagtctctgttaatttgtgtaaattatctacggaattattgtctgttctccacttatttcctttttcaatttctgattgggttttgtgttttaatttgatctctgattttacgagtaagccaaaagcatgtgactcttttcccctttaattaacataatctgttcatccaattactataacaaatcacttctctaataactaccactctctagtctctccatctgtcacatgtctaagtcttaaattctccttctttctcttaattaattattttcactattaattaaaagtaaaaaaaagaatcttattcattactactataaattgatgagaaattgttaaaaatgcccctttttcaataccccttttcaaaaatgccccctttgagagtccatttttaagtttgccctcttttaatttttaatgaccattttacccttatttgaaacaaaattatgtccacaaaatacaaaatattttttggcgggaaaagtgatcccgcaatttttccgccaaaacacttgtaaaaacctttaaaaaaccttgtaaaatttttccgtaaaaatttttcccgccaaaaaattttcccgccaaaaaaatttttttgcgggaaaagtgattccgcaattttttttgcgaaatttttttggcgggaaaatttttggcgggaaaaatttacaaggtattttaaaggttttttacaaggtatttacaagtgttttgtaaggttttacaatgtattttaaaaggttttacaatgtacttttaaggttttataaggtatttataacttgtaaaaccttataaaaaacttgtaaaaccttataacttgtaaaaaccttataaaatagcttgtaaaatcttataatatcttataaataccttgtaaatacgttgtaaaaccttttaaactcccatattaaaactttcttaaataccttgtaaaaaacctttaaaaatcccttgtaaatttttgggcgggaaaaattttcccgccaaaaatttaacgccaaaaaaattgcggaatcacttttcccgcaaaaaaaatttttggcgggaaaattttttggcgggaaaaaattttacgggaaaattttacaaggtattttaaaggttttacaaatttttacaagtgttttggcgggaaaaattgggggatcacttttcccgccaaaaaatattttgtattttgtggacctaattttgttatattttccttatatatttatgatatcttttattaaaagaagggtaatttagtcattttgtacataaaaggggtatttttaaaaatggacatccaaatggggcatttttgaaaaggggtattaaaaaaggggcatttttgtgagtctccctaaattgattaaaacaaaaaagtatcaaacgatgaaactttgttactactataaattgataaatttcattttttgttagacctaattttatttccattaaatctttgtactaaactactaatataatactatacattagtaatttaatatttttaatttattcaacattcatatataaagttataaaataattattaaaaaaataaaattttacctaaatttaaatttatgctcatactagttggtgataatttgtgggaactgtttagattgaaatttaataaaaggaccactctttacacaaatcacaactcacaagtggggttttctgggttttaggaagaagaaagctatagtctttatcattatataatatataccgtcgatttcgatctgggaatgatcagatttcttaagaaaattctgaattgtgtcagcgccggaaaatgaaccgtgacggcgctggagaaggcgactctgtttcatacgaaccatcaacagctaaaagttctaaagaaggagaagagacgaagaaagaggaaaaaagagatgaaaaggcgaagacagttcctttctacaagctatttgcgtttgcagattcctttgatgtgttcttgatgatatgtggctcaatcggagctattgggaatggtgtgtgtttacctcttatgacattgttgtttggtgatctcatagattcctttggaaaaaatcagaacaacaaagacattgttgatgttgtctcgaaggtaaaaatcaaaactttctaaccttatgattgtatccttagatcacattactaataatgtgtcttcgtataggtttgtcttaaattcgtctaccttggacttggaagacttggagcagcctttcttcgtaagtcatcacctgcgatttgcttgtttcgagaattgaggaagaaaagttttgttcttttggtttccccattgcattttacttaagggttagataattaaggagttgatgttgttcttgttcttcttgttgtagaggttgcttgttggatgattacgggagagagacaagctgcaaggataagaagtacgtatctgaaaacaattctgagacaagacattggattcttcgatttggaaactaacacaggagaggttgtcggtagaatgtctggagatactgttcttattcaagatgccatgggtgaaaaggtaatgcaatggatatacaagcttatatataatgattggattcgtttttgaagtttgttacttttcttaaatcttgcaggttgggaagtttattcagctggtatctactttcgttggcggatttgttttagctttcattaaaggatggttactaacattggttatgttaacttccatccctcttctggctatggctggtgcagccatggcccttatcgtcactagagcttcttctcgaggacaagccgcttatgcaaaagcagcaactgttgttgaacagactatcggatctatccgaacggtaaacctcaatctttctaagctacaaaacactctttaactcttttgttacttgattttttcttttgttttggtttgaaggttgcttcgtttacgggagagaagcaagccattaacagctacaagaagttcataacatcggcgtataaatcaagcattcaacaaggtttctccaccggtttaggacttggagtaatgttcttcgtgtttttcagcagctatgctttggctatttggtttggtgggaagatgatactcgaaaaagggtatactggtggcgctgtgatcaacgtgatcatcattgtggttgcgggttcaatgtaagtaaaatccttgacaatcacttctatagatatatatacttaaagatgtgagattcttatttttttctttaggtcccttgggcaaacatctcc

SEQ ID NO: 5481 - DNA, 13401 bp, Arabidopsis lyrata
  Intron number 1 from transcript 473492 (locus 473492) deri ved from phytozome v7.0 (chr-ID scaffold_1; pos 15303492 t o 15316892)
gagagccgtcagagagagcaaatcaaaggtcggagaagatgaagagagagagaagatataagaataagagatgctatggaaactgatatcgatgtggagagagacatgatatgcgctgaaaaaaatagacatgacgtgcaaattttgatctatatgtaattaattatgtaaactttgtacctcatgtttacttttaatcaatttatttatattgacaaaaaatgattcacaaatcacaatgatagatcttgtttttaaattatttaactaaaaattatattaaaatagattaggaccgtctgatgtgtgggttttaaaattttttaattacattctttgaaaatatatatataatctttaagttagagaagataattatatatatatatatatatatatattttttttcttcaattaaaaaaaaagttatttatatgttcgttttgctttaacttatttgcatctttatattttaaatttattgtaagatttattacaataaactagtacatttaaattaccaatcttcaaaacttttgccatatattcatcattatttttatcgtcaaatctcgagaacgtagtttagcaatttcgcgtaaatgattctactacttgagaaactgctttacatgcaaatcatcggtaagcttatttcaatccatttacaaatctactatctacattacaactaaaaaatgtatctatgaacacattaagcctatccatttcaatccaatcatattttactattgaaatatgatttctatcaccacctacaaaatgtatctatgaacacattaatccaattatatgtcttatttttttttatgtccaactatatgtctcttcatttttacttttgcatggtttctttaaccactaaattttttgacttaaagaatattttgaataaaaaattatattatatagcaataatttatgatgtatttataaaaattaaaataaataaaaactacttgattagaatgcgtttatgaccaaccaataaactaaaagttgagaaattaaaagaaattaatttgacgtaactaaaaagaatagaaaactataaacacgataatatatgagtcttagataattcaaagatagaaatataaattaaaataaacaatctaaaaattcaaccattaaattataaatattaggaaaataaatagcatatattgatcttacctactaactataaaagaaaattcaaaaatataaaaaaattattttaaatcaacaaaaaattgaaatatataatgtaactactaactttgaaaatcaaactttatctaataagattataaagtattatatactcataatttaatctaatatttgtggatgtcggattcacacactcaagtattttattaagtaggaaagattattcttgagggacaaaaaataaatatgtaaaaagcttatgagttgctacgaaaatcgctatattctttctttctcaagaggccgatcccctttttacatggtcattggccttttatttatacatagagaaacgacattaaaatgaataattaagtacaattattccttcttaaatgcgtccgttttgattcttcgactttaatgctcaacgtttgaatttgagttgactctggtcttcttgggcctcgcctttccggcccaagtgtccttgaaccgtcttacccgtgtctacatcgaactcatgtcacaatgtagtcacttcggactctcgaagtggtgacaaccacttcgaccgttccttcggctcatgggtccgatgggcttcatcctttatgggtcattaccttgactacgtggcaatctttggttggtctcgtatttccggtgcgggatccgacaccaacaattagccccccaagttcttcgaagtgctattccaattcggaggactttaaatgcttaagtggccaaagattgcgctcgagaatctttctgatttcccgccgaaaatcacatcactcctttaatttcggcactagccatttttaaccaagtgacatctgtcatcattatgaccgtatattgattaattactattaaaacggaaaaaaccttcccacttcccacacgacttccgaggcggtttcatcattagcttgaggtaacttcttttcaccattactctcttcttttacttttgtgctttaatcaaaaactctctctactttccttcacaaaacctctcttcgccggatcttgaattttcctttcttcccaatgacttccgattccgacagacccgaatctccgtcttttgatgagaggcgttctagcaatgacgagtgcacccgccctaacgatattgccggtccgcactatagatccacctgcacccttcagtcccttgaacgattgaaagagctctgccgaatcccaccggaaattatggcagaggcgcagatagctgatcctacggagtccccagaaaaccatcgcgacggctatttctgtgtatacgagatctattttaagggttgcgggctgacctttcctcttcccgaagccctagttctatacctagcggctcttgaaatcgctcttcctcaattaacccccaaccttctccgtactattcttggaattataacaatcgcggcggaggccggttacgttgtcggagttactgaactaaatgagcttctaagcgtgagaagttcatcgaagaaaacgggatatttctcagcatatcctaatgccaacaggaacatcatttcgcatcttccgaacaaggatgaaaattggcatcatccttggtttctgattaagaaaactcccgcttcgattggaaatcttgcagattttctcccttcgaagtggtccgcgaaacccggtagagattaggtcacccgtatctttcccagttgtttctttatctttattgactaacatcgttgtttcatttcgcagctttcgtcgcttccactctcccatctgaagagttcatcgaattcttcaaaataattcttgaaggggaaaccctttggaattctttcactcttgaacgattcctagaagctaaccacagactcaagatgagtccacctggtcatcttcaccaaattccgcctcctccctcaattcaggggatgtcatctcgggctcttgcggccaagcgtaagatgctctccaagccgatggctgaggcttgcgaggagaagaaaaagtttctcgcgacttctatagacaagaaggactacagtaggaccctgctggttgatgatggcagcaccgaaggggccagatccgtcgcttctttcagattaactcctcgtcgcgatcgtcatgattcacattctcctcggagggaccgatctccttgccgtgatttacctcgtcctccccgagatgatttcagcaatgaaccaattaagaacttggttcgccggaagagagacaagtcctctcgcagtgattcttccccgcgaagggaaaagtcaagggcccggactgatagttcacctcgatcatctcctcctactgaaccaatgggtcctccacgaccggttgatatgtcttcctcttcccagtctgatagtggaaagactgcccggagcgcatctccaaaaaagggagattctgaatctcgagatgcttcctcggggttaaaaccttctcttgttcctcaagtcaaatcgctttcaggtttggtgattcatacagtcttcgacgttttatttccattaagattccgatttttacaactcttcttccatcgcagctatggagaaggaaggcaacgttttctggtgcttcaagacccgatcgggttcgatcttgccagactttaacaagtggcgccctgcgatccgtgaacgctatttgcttcatgctcatcattcatcccgggttagtttagttttaatttatacatatactttttattgcattgctattcagcgaactgactcgccatcccgggtttatgtataataccaggctcacggcgaacttaacgacatgatcgaacactatgaagggctggtccttggtcgggaaaaggagattgacgcgtggaagaaaaagctttatgctcttgaggctgagttaagctcttctaccggctccaaacacgaactggaagacaaggtcgacaatctaacatccgaactggcgaagattaagggggagctgcagggccagtacgaccagaacttcaagctccaggaagagttttctggtgttcagggtaggcttcaagaatccgaatcaaacgctgattccctgaacaaccaacttatcgagcttaacgcgaagtacaaggcgattaccaaattgcgtgactccgagttggcgaggtcggcatcaaaagccagaaaggaggttaagggacgcgggatggagttgatccaaggggccatccgattcatgcagactgagaaggctaggtctgatttggaatcagacatcaaggagcacgagagcaacctgatcctgctggatcaaatccatgatacagatttctccgaggagcaagaaaggaccgaactgtcggctaatctttctgaaaagcggagtcgcttggcagctcttcctacttcgatcttcaaccctcgggacttcgatgaattcttcactgaatcacctcctataagtgaatcaggtctagactgggcaggtaatgcttggttcctgacatttactaccttttcctcaccttatgtatggggcaaaatacaagttgactgggtctgtccttcccaggttcaagtgagacggaggatgttgtcccacccgaagtacccgcgacaccggcggtcactccggaggaaggttgtaatgtagagggcggaccaagagctccatccgaccaagcaccagctaaagaggtgaacgaaacttcggttgctgagccggggtccgaggtggatattactccgtagtggctgcgtccactttaaattgggaattgtcccatttattttaaaacttaatttcgaacttgtctttgcctaagaaggctttattattttcttttgaacaagatatttgcctgaggaggcttttaaacctttctaggttatgacccaagggggtttggttaaaatttgaacgcgggtttgcaaagtccgcttttaaccttttgtgaccttgtggttatgctttcgagatttttaggctgatcagacctttctcttaagaacgcgagagctgagctcggcttaaagcgagttccccatttcgggtttagtcaactcgataaatttattgggcttgggccttagaaacttttgtagttaatgcgacggttgctctttcccttctcaaggaaaacggctcgtcttttaatgcaataattgccttttctcgtttttccaaaaatggtttaaaccactcggacactctaccattaatggatttatggttccaagacaaaccctaaatcattataaataaaggcttacctacctccaagctttatttaaacatgattttagaatcttacttgagaaatatttcgagaatggaaaacgaaacagtagcccccatcgatcccggcagcccacttttcttgtctggcgacggctttgaaccggccggcgttctcttccctcacgccgtctttcactttccttcaaaggagaagaaagaggcttgcgactttatcgacaaggtaaatatttaaagtttttgaaaaaactttttgtttcatcttattcactcatctctatgctaggtcgccgacaagcaccgtcgcttgtgtgaagagaggtagcggctgggcctcaaaaggcaaacactcgaggctcgcattgctcgggtggaaaggaagatacgggccttggagagtgatccctttcaatgggagtggcggaacttcgactccgtcgctgagatcccgaagatgtttcggatgtatctccgcgctagaggagtcccgggtcccgtgaacgcccccgtctgcgccgttccatctgacagctaagaggaagacgatttggaggaagaggctagcaccggttggaaacgcgtttgggatcgttccgaagtggacatcaaggacaaggcgtccacttcaaaagttaaaccggcaatgaaggagcctgttcccgagcctcttccttaaatgttccctaactctgctttcttttctctttttttttttttttttttttaaactcgtaatgggcttcggccccttttttatttatggaaatatttgcaactttcctttcttttcaaatattctcggagatgcgccttttaatgcaggatctgttcgagggcataaatctctccgtgaatcactccattccttggatagaatccgcagtttgttagggatatgacgttcctataaattatagtcttaatttctctttacttctcaccattcttttcattttggtaggtacggagttcaatcttcgctgttcagaatctatgcccgacttctccagaatcggaatgatgagcgaagatgttccaaatgagccaaacaggcagcctcctccacttcgcggcttcttgagatctcagatccgagccccatgtgctttgatcaggaatctcccaatcagagaccgaggaacagcgacggcgttcatagaggcactcgagcttcaacaccagaagcttatgtcggaaaagaggagactccggaagaggattaaccggatgcaactcaggcttactacggtgtcaagaaatcttcacatccttgaatctcaccccggagagtggattgagcttggaatctctgactttgctcgaattccggactgcatgatgccaatcctcgatattgctggtcaaggatttgaagtgttctgctcgtcaacaaggttttcgtagtccgaagtgtacgataagggacattccatttttttttttaaataacgctctatttcccatctcttgtatgttcgcatagttcgaacctttatttgcttcacttgttcggacaatcgaacctttttcctttaataaagaaataaaacaaatttttattaatagctgaactcgttttcgagctgcctacgtacccatctcgggatcaagccacaccgtagttcatgtacataaacaatgtatgtagctctaaacataaaacttcttcaggttgatcacattccaaggtcgcttgactggattgtcttctaagtctttcaatctataaacaccgttccgaaccacttcggtaataatgtaaggtccttcccaattaataccgagtttgccggcgccttcttctttcttattgtcaaagacgcgccttaatacataatctcccacgaagaacggcctacttttaaccttagagttgtaataccgagctgctgcctgttggtaattctgaatccgaattagagcttgatcacgcttttcatttatggtatctagtgaatcgttaaacattgctgaatttccttcttcatttaacggtgcttctgttcgacgaagtccgggcacattgagttcagctggtactaccgcctccatgccgtaaaccaaagaaaatggagtttctccagtaggccaccgaggggttgtacgataggcccacaggacgggttggagttcttcataccatcccccctttagatgacttaagcgtttcttgagattgcttaatattgtcttgtttgcggcttcagcttgaccgtttccttgcggatatcgtggagtagaataactaactttgattccccagtccgcacaaaaggcatcaaatttgtgtgaaatgaattgtggtccattatcagtgactatttcgtatggaactccatgtcgacatataatgtttttccaaataaaggtcttcaccgccgaatccttgatactaacatacgcctctgcttcaatccattttgaaaagtagtccgtaaggactaaaaggtattgtacacctcgagttgatttgtgtaatggtccaatgatgtccattgaccacctcataaacgggtatggggcggaaatggaggagaataattccgacggttgatggatcaatggtgcatggagttgacagcgcttgcatctttgggcgaacttaacacaatctgtgatcatagtgggccaaaaataccccattcttttaactttaaaagccatagctcttcctgatgaatgactcccacataatccttcatgcacctcgctcatgacgatttcgacttcgggcccaaaaatgcataataggtaagggtcactgacacctcgtctatataacgcatcctttgacagacaaaatttcgcgctaacgactttcattttcctggcctgccatttattctttgggagctcacctgtcatgatgtagtgctttattggctccctccagtcagccccccagtctttagccggaatttggtcaaccttgtgaaatactcgtggctctggctcgggatgttcgtttggttcgagagcatcctcctcgattaacgattcggtttctaatactgtttctgaactcacatcttcagctaagacaacgggtcccttgttagatgtatttgatcctcttgactttctccgtttgttgggtggcggttcgatctctggtttgccacggtcgtgtgccgccgctcgagaccttgtaatgacgagggtttctttgttgtcttgaatgcttcgctccgaaatgcattccactggaataactcttttcaactcaggatctgatgttgatgccaatgcggcaagcgcgtccgcagttgtattctctcctcgaggtatgcggattatttcaaatttcgagaaatttttagataaatcctttaccacttcgaggtacgcttccattcttgaatctttggcttcataatctccattaaattggttaactactaattataaatcgcaataagccaatatttccttagctccaactccttgtgctaatcgaagtccggcaatcagggcttcgtattctgcctcgttgttggaggcattgaataacaaccggaatgattgttctagaatttctgacgtcggagactccaacttgattcccactccggatccttgttttgttgaagacccatctacgtgtaatttcgaagtttggttctccggttgttctatccttccaggtattggtagttcggtcaggaaatctgctaagacctgagccttcatactgatccggcttttgaactctatgtcgtactcgcttaattccaccgcccatttcgccaatcgtccggactggcttggactatgaagtattgttcggagtggctggttggttaatacctcaaccggatgggattgaaagtacgggcgtagctttcgagccgatatcaccactgcgagtgcgagtttttccatcattgtgtatctggtttctggatccgtcattgacttgctcacatagtaaattggtttctgctccccactgtcttcccgaaccaagactccactaactgcgtggtttgaaaccgacacgtacaaataaagtttttcatccacttctggtttggacaatataggcggagtggttaagtatgctttaagctgcccaaaagcttcttcacacttctcgtcccaaaggaatcctttgttcccttttagaatttggtagaaaggcaacgacttatctgttgatctcgagataaaacgattcagagccgcaatccgcccagtcaaccgttgtacttctttgaagtttcttggagagggcatgttcagaaaggcgttgatttgatttggattggcttcgattcctctttctgtcacgatataaccaagaaattctccggacgggactccaaatgtgcacttcgccgggttcagcttcatttgatatttattgagaatatcaaaacattcctctaaatgcttaacgtgatcctctttctttaacgacttaaccaacatatcatctatgtagacttccattgttttcccgagatgattatggaacatcttgttaaccaaccgttggtaagttgctcctgcatttttcaaaccaaaaggcattaccttgtaacaatagatacctctatcagtaatgaatgacgtcttttcttgatcttcggggttcatcattatttgattataacccgagaaggcgtccatgaatgttaacaactcgttcccagcggtggactctacaagtcgatctatatgtgggagcgggaaactatctttgggacatgctttatttaggtctgtgaaatcgatgcaaaccttatctttcacgttcttctttttgacgacgacagtgtttgctatccattccgggtattgcacttctcttatggatcctatctttaaaagtttatctacttcgtcatttactattttggctcgctccactccgagctttcttcttttctgttttaccggcttgaagctcggatctacgtttagctcgtgacaaattatacttggatctataccaggcatgtctgctgctgaccatgcaaacgatgttttatttatctttaaaagttcgatcaaagcttcttttatttggccagtcagagttgctccaattcgaattttccggtcaggcttgtcttcttccaaaaccacttcgattactacatcatctttcttctgcccgctaggaaattttgttcttagtccctcttttacgggcttcgttagttgctattgaatcttcatacggtggctagctaggtaacacgtccgtgaagcttcttgatctccccgaattgtttccaccccatttgatgttggaaatttgatacattgatggtatgtagaggggactgctttcattcgataaatccagggagtcccaaggatgatgttgtaagctgcaggtttgtcgaagacaacgaagtccacgatcttcgataccttcttggcaaggaccggtagcttgattgttccgagagacatggctgactcgcttgtgaacgcaactaacggagatgggggtcctactatgtctcctcggctgattcccattctttctagagtacttaaaaagatcaaatccaccgaactgcctgtatctataaggatccttgatacttcgaagttagccacgtcaagggtaatgactagagcttcatcatgcggccttttgaggtaccgcgtttcttcttcattaaatgatattgatgtaccttgaaaatctacttcctcgcttaagcttgctttgagtaggatatttcgtctatgtttcttgatggaacttatcgaatctccgcaaaacttggaacctcctagaatcacattgatcttacccttcgaactctttggttcttcctcgttggataaccttggtcttttggaatcttgatctttggagttttccttcgcttcgtggtattccttcacaaaatcttttatattgaatttggaaagatctccactggcccaaagctctgcgaggtgctttttaagaacgctgcaatccttggttaaatgcccggttactttatgaatatcgcaatatagactttcatcacggacccaagtgtttgatcttcctttcccttggaattgctttccgacggtactgttgaagggttgcgacccaaatttccttggtcctttgctctccctagactcgaacttcttggtagggatggtgattgccggcttttcttgtttattccttttggcaaaactttctttttcgtcctctacctccatccagttattcgcgcggaagagtgcatcctgaattgtgtctggtttatgaagtattaagtcttctttaaaccttgaatcatgtcgcaatccttttcgtagagcagataaagctgattgctgcgagattcttgggagctttgatagcactcctttgaatttggtgataaaaactcgaagtgactcattagatccttgcgataagttccaaagatcggcatccgaaacgcttttatccatgaggatggagtattgctttaataatacggctgatagttcgtcgaaattgctgatcgaacccggctctaattgggtaaaccacattagagcttggccacatagattctccgaaaaaagcttgcagtagcctgcgtcctcatcagcttcatccaactcgactcttccagcagcgatcagaaaagctgcgagatagctttttggatcctccaatccgctgtaagggtccaacttgagtttccggaaatctttgatcctcaaacttgcaattcgcgagatgaaaggtgttcgcctagcctcttcaatgactcgattgatgtctggctccgaacttgtagcttgatgaaattttgatttcatttcttttaattcctggctaaccttcctcatggtctcaaactggtcgaggttctcctgctcgtattgagctgcaagttgttcttcatctccgagctgtgtctcttcttccaacgtctgagccacgttattagtagcaccaggagttgtttgttcgctggtttcatttcgtgcagcggaacttggcgagttgaatatccctcttcggattcccacaaggtttcctgcacttaaagagcgaacacgagtttgtatagtattgacgttttgactaagagatacctgggatgttttcaacgtatcgacggctttttccacatccgagaacttttgcgatatgtccgacatggtttgctgcatagctttgagggtttcagccaatgatgtctcaacggtgtctcctccagacattgttgcttatctcggaagtgtgataaaggaaaaatctgaccactcaagaatcctaatctctccccacaggcggcgccaaaatgtggatgtcggattcacacactcaagtattttattaagtagaaaagattattcttgagggacaaaaaataaatatgtaaaaagcttatgaattgctacgaaaatcgctatattctttctttctcaagaggccgatcccctttttacatggtcattggcctttttatttatacatagagaaacgacattaaaatgaataattaagtacaattattccttcttaaatgcgtccgttttgattcttcgactttaatgctcaacgtttgaatttgagttgactctggtcttcttgggcctcgcctttccggcccaagtgtccttgaaccgtcttacccgtgtctacatcgaactcatgtcacaatgcagtcacttcggactctcgaagtggtgacaactacttcgaccgttccttcggctcatgggtccgatgggcttcatcctttatgggtcattaccttgactacgtggcaatctttggttggtctcgtatttccggtgcgggatccgacaccaacaatattattaggttgaattctcttttttttttgtctttaaagcaaaaaaaaaattattattgggtcgtgccgaaaacggactgcttccaaatggaccgggccagcccacagactaactcatttacatataggaaaccctagggtttcttctatcctttctttctctaaaagccgccggcgagagagagagcaaaacaaaagattggaaaag

SEQ ID NO: 5482 - DNA, 11898 bp, Arabidopsis lyrata
  Intron number 3 from transcript 911962 (locus 911962) deri ved from phytozome v7.0 (chr-ID scaffold_1; pos 9138529 to 9150426)
gataaagaagagctcgcaactgtgcaaggcactctcggctacttagacccagaatactacaacacagggttgctaaatgaaaagagcgatgtttatagctttggggtagtcctaatggaactgctctcaggtcaaaaggcattgtgctttgaaaggcctcaaacctcaaaacatctggtgagttattttgcctcggccacgaaagagaataggttgcatgagattatttattgccacgtgatgaaagaggataatcagagggcgatgcagaaagctgcaagaattgctgttgagtgtacaagattgacgggagaagaaaggccagggatgaaggaagtagctgcagagctagaggccctaagagtcacaaaaaccaaacataagtggtcagatgatcagtatcctaaagcaatggatactgagcacttggttggtattcaaaacttatcagcacaaggcgaaaccagtagcagcattggctatgacagcatcaggaaggtagcaatattggacattgaagctggccgctgatatttccatcaaactctcactaaatgacttaacactgttggccacattccgttcgatctgatcaggtttcttccctcttcatactcatattaaatatttgattaaacttaaatatttgattaaaccctgtaaataaaaaagataacaatcaaaacctttgtgcttgagacattcttgtttcgccagatcatcaatcgttgtgtttataactctccttttcatttgattaattatctccttggttctcctccaaacagtgtatcaaattcttcgatttaaggacgcatatattgtaacatggttttttgggttgaataaatttaacattcattaaaaaaaaaaaaaacagtgtatcaaacattgcattcaggaaatgtatggattggtggtttaagatcatcaattttatatttgtgtgtatataaataaatcccttttaattggaatggtacacttcagtatccaatttggtatttgaagatttagagttcttactcaaaatcaagaattcatgaacttgaatctattatgaatatatgatgatgtctctctacggtgaaaaaaatcgaaataaagcatcaaaagaaaacagagctcaagaacctgattcgtgttatttggcccgtttatcagagcatgagcatgattcgtgttctcacactgccctagttctttgttaaaacagataaaacgcgaaaagcttatccttctcactctatctatcgcatctttggcaccggaaaccgccgtacatatactccggcgcagtatatcaaactcccggaatatcatcagctcaccgagtcactcgaatcagggattcatatggaaagacgatactaccctcatatcactgtttaaaatgtttaagggtgatatcgtaatttcagttctaagattttgatcctccagttctcgagatttttctcttgtatgcctctagagcttcctgtaatgaaatctttattatgagcgattttggtcacatgttgttacttcccctataattttggtaatttttctgatcatctaatgtagctctctttaattgttttaagctgaaaacaaatctccttaatgagcccctctgaatatctaaaatgtaaaatgttattattttggtccagtggtaaagaagagaaaagtctccgccacctgggttcaagtagcattggccaccggagttcgaattttaacatggttttcccgggctccaggattagtttttgggcctataaagcctttaggatcacctatgtcaagcaaagaagagaggacatagagaagttgacgaagttcttcaaatgattgaccaatgtagcaataatggacattgaaaccggccgctaatctgatgtgtttaagaacctttatgcttgagagaatattttctcgtgaaaatatcacatgtattcaagagtttcagattgtgaaatatatatccccttcagaagtatataagtttgtaactgggaattcagagttctaattcaggatcccagtttcatgaatcggaaaatcaatctatgatgtagtaaaactagaaaggatcaaacacaaaaacagagaatgttatcaacttatggtcaccaacctgctccctagatccttcaaaggaagaaaatcttcgacgtcttattcgtaaaccagagcataggcttaattagaaagatcgaaccaagcattcttttcaaaactgcttttacactcaaggataggcctgggcattcggatttcggatcggattcggttcggatttattcggattcggataattcgggtaggagagtttattatccgttcggattttatgactattcggattgggtttggttcggatagtgtcgaattcggatcggttttcgagaatgaaaaaaaactaaaaaatgtacaatttaaataaaaaaaatagttcaatcttactaaaatttggccaagttttacaaaaatatgtataattttaacaaatataactaaaaaaatttccaatatctaggttatttaaaatatttttgttatttgttataaaattatagctaaatataactaatatttttggatatataattttattttcggttttcggatatcctttcggttttcggttcggatcgggttcggttcggataattcggataggagaattcatcatgtgttcaggttttgtcactattcggttcgggttcggagccggattttacggatcggttttcggatttcggattttatgcccaggcctactcaaagatatcattatccaacatgttctaattgctacaacatttcttacaacaatatctcctaatcatgttcataatctaataaagtcgtaaagataggtatcaataactcaaaaagagaagccagcatagttgtactcttttctactataaaacgcacaaatggttactcgataattcataaactcaactagacgagagctcaaatgactataatttttttgctgtcaaatgggttactattctaaaatatctaaagcacattgtcagattccttaaaccaaccacaaaccgttatgatacttgaatccttctatataaaccaaaaaaaaattgttaagacgtaacgaaagggaaaagtagtgacaatgagagggtattatatgtgctgaaaaggaacaattgagctccctctttcattacactgacattgtcagattcttactttttcttcccatctgaagattccttccaccaaccgttatgatacttgaatccttctacagagaagaataaataattgttagatgtaaccaaagggaaatgtagtaacagcgagaggatattatatgggcatttaaagcacacttggactcccctcttgcattacactaacaatttcttcatcacttgacctatacttaaatagaaaataatgtctcgactcttgagagtgtggttggacatgaattatatatagaattgtagattctctgggaatgagtcttccaagtaagaaaaagagaaggtcttaagagagggatttgtttagtcgtcataaaaagccttaaatagatttaagaaaagaagaaaaagtttggagaaaaaagtgtgttgatcaggaaagagagagagagagagagagagagagagagagggagagagagaaataggtagaagatgaagctgcagggtctgttgttcgtggcaatttttaatcttgcttatacccagctggtgaaggggcaacctcgccaggattgccaaactagatgtggcaacgtcacagttgaatacccttttggcacttctccaggttgttactatgccgaagatcctagtttccatctcccttgtaaccagacaaagaaaatgttcgttgatgacatggaagtgataagcatttctcagggcggccagctacgcgtctggtctcctgtaacatacgcatgctacaacaacaaaggacatctcacaaatgacactagcagactttttggcctgggtaatctctctctctccaacaacaacatactcactggagtagggtgcaccagttacgtgtatctgagaggttatggacgtaaaattcaaacaattggttgcatatcagggtgtggatatctcccggaaaaaggatcatgttctggtgaaggttgctgccagatccctatctctaaaaatattagcagtatttatagggtcttgccacgtaggtttgagggacagtctaatgatttcgaaaactttaatcgttgcacctacgcatttctcgttgaaactggtaagtttcacttctctgctttggaagatccgaaggatatgcggaacgtcacagagttccctgtggtactagattggtctattggagaaaagacatgcgaacaagttggaaacaaaagcatatgcggtgggaacagcacatgttctgattctacacgtggagaagggtacatctgcaaatgtaaagacggctacgacgggaatccccacattccaaacgattgccaaggtacttcaactttttctgttgctcactaatgttggtgttttcttctcacagatttctcttcttcctttgtcagacatcaatgagtgtactgaggataaacataactgtgggaacgaaaaatactgtatgaacaaggaaggatcctttgagtgtaagtgcccatctgattaccgctttgatattgcaaagggctgcacacgtaaagagtctaaagactttcaatggactcccattcttcttggtaagctcccctcacctattaaattgcatggcagggcataaaaccatgttttaattttatgttttggcaaagtgagaattggttttcaagttttgacaatttagccaaaatctgaccattttacctctgccagcataactatgtactgtttattgtacggttcagttatgcggttcaattacgtacactgttccggttaggcaatatattttcgttttttattgatttttgcagttgtacagtaaaaaatggggattaataatattaaaaaacaatgaaacatcaggatttaatgcccaaaaaagtttagacatgactcatgtcacaattaatgcaaagtcatcattactttttctaatattagtttatatgtgtgaatagttgtaagagataaacatgatccatcaaacaaacaaattagtctgaaccaatgtgatgttggagaagttttgatcttcttgatttacaaagtttagagccaagacaagcattgatcgtgtaagtaatgaaattggttaagaagttttttgttataacacactagggtcttgattgtgttcgaaatcaacattgtttttatataaaaacccagaatattgttattttcaatttttttagttgaaaatgctaaatgaggatagatttatgtatataaatgtgtagttgggaattctttttgttttttgtagatataatcatgctttcatttgcatttaatggggttctgctgaatttatgatgcatgtggataatggatattcccgtatttactatggtgggtgagtggagattcaaagaagaagaattgaaatttgaaccatgggaaggctggttaatttggtcgttgtgtacgtttaatgaaaccatgacgtacactgaatttgtacgtatattatgcgaggttttcagtttgaagtccaccgaatgcaatccaataattagttactgaatgccgggaaagatgtcagtgatgatagaaagtaaatgccctcctgtctacattgtcaatcaaatgagcctggataccttctttttgattcgtggtggggatcctagtgtcactttgtttgtctctttcattacaaaggcactcgggaatactgtccctaggaccgatggtgacgatggtgagagttaccgtgtgtgtgggagtacaacgacaccaaatcccatcgtagcggcttcaaatgtagatggaaataatgaggccgtagatgagcaagacgacgttgaagacgataaaacagatgagaatgaagaagaggaggaggataacgaagatggtgctgggtatgatgattatcagggtgatgatggatctatgggggggaagtaccctcgatcctactatagacggtagtgaaggcagtggcgaagattacgattacaacaagtggaacgatgtaattgttgaagaatatggaataaggaatgttgaggaggacgtcattctcactcaacaaacggttcaacatccaggagaatccagtcgtctattggcagagtgtacgtacacaagtcatcgtgtacctggcggagataactcggttgaccgtacaccaaccgagtctccaagacgtacgtgtcaacatggtttgtactaatgtacgtacacaacagaatgtgtacaagatacaggctgcgaaggtaacaccgataccaatatttccactccttaccatcctcaaacaagtggccaagtggaaattaatggtatagacaaagtctctgggaatgatgttatcgaccatggtattggagcttccccaagtgggacactgaatcggctagttactgcacctggcggagataacatttctcattcgggtgaccgtacaccaaccgtgactccaagacgtacgtgtcaacatggtttgtgctaatttacgagatgatgagacacaagttgaactgagtacgacaggtgagactttgtatgtggggagtgtttttaagaacagaaaagtcatacgacaaacaatgtataatgatagagttcattcgagaggtcctaatgcgatggttcgcagcgaagagaaaaaaagtggctaggtgtaaatctttagtgacgcctgaggttgatgagcgttttctccaagatttgcctgcgtcggggaaatacgcggtgaagatgtctggaccgtggagttatcaagttacaagcaagtcaggtgatcattgtcatgttgttctggacgagtgtacgtgtacgtgtcttaggtacacaaagttaagaatcccatgtgaacacggtctagcagcgaaaatagaatttggaattaatctgaaggttgttgtcggttggtgctatggcattcaaacgttttctgattctttccaagaaccgattctacctatcgcggatcggaaggatgatgtcatcccacaagatatatcggatatgatattgattcctccatacagtagacgaccaccagggagaccaaccaccaaaaggatggtgataccatccagggatgaaaactgggtaagttttaacattctaacatgtgcacatatttgcctatatctatgtttagagtataagatgcgtcgtttgttaacttattgttgttgtcactactggaaaaaaaacaaaacagaaagactctttctggatcagtgtacaagatgtagacaagcaggtcataacaagaagacttgcaaaaatcctatttagttttatgtccttgttttttggtaccgtgtagacagtgtacgtttatgtctggaccatgtgtaccatattttttgtcggtgtacgtacgtttaatgtttgccatcatataactatgtacgtttctgatatgtctgtgtacataaaataattcgatatttttatgagaattgcccctcccttggtacaatacttctcttttcctgattccataagccaatcacctctataaacttttgttgggaaagaagccctaaaatcgcctccatcgcctttctctcactacatgaatattgatctttcgcagcgtccaaaaaacgctatctaacgatactattgcgttttaacaaacgctctatcatcgcccgttatagtagatcgaagacataatatagcagtttttttcattgctatcatattttcattaaatatagtgtttttttttaatatgcaattatatattttatatggatctgattttaatttataattttaaattttgatttttattttgaattacgaattcaaaaaaatctaattttaatttataaactaggatcggacccgcggtctaccgcaggagaatattgatttacatacgttaattttaatattgtgcgtgtttttagtagaacgaatcgtgtaatgtacttataaatattcctaataacaaattgtaaagaaaatattaaagtgtttataattaaaccaatcgtattaattatgatttataaaatggaattttgtgttttagaattcaaaaattagacgaatcatgagaattaaagcagtcaaaataggtcaaaaatcgtgggtcgagcccaaatcatctcactataggccagatttgggaaaatatattaaacccgcaaataagcgggccacatggattgattcgcagtgggtcatcggtttttgtccgggggttggcggatcaacccgcatgatagtatttattgataaaaatataatttattcaacatgtggtagtttaaaaaacttttaataaatgaaattataatatttataaatataatgatatataagattattttctctaaaaacattttaatttatttattttagtagaattttaaattttggttactctaaaattatttaaacaaaatccacagataaccctgcaaatcagcatacattcgcgcgacggggttgtgtttcatatatgctacccgcgggtcgtgcagacagactaactacatgccaaactatattttgcctattgcaaaacaggcttaacgggtcgaatcaactcgttttgacagctctaatggaaatattatttagtcatacaattcaatggagtttggacataggaattatagaatatgtatcttatttgttagattagagattgaaaggtgaaatataatgattaaaaataattaatattaaggtgaaatataataattaaaaataattaatatttttcatgattcacaaaatttaataaatatttatcatcttgttgaataattctaaaaatcatattcaagaaatctttataatttgaaaattaaacttctttggtaaactataagtatgattgtatgaaaataccataatttcgataaattaaaattagttacatagatttcatatctatttaatttacacgaccaaaataaaaatatctatttaattaatttataaaatagatgggttagttgtgataaattttttagaaatctctagaagcaagtaagatatcttttaattaatgataactggctaaaataagcaaaattaatgagaaaaacgttgattgttatggaattagttccaaaagtatatgaacaaatatattatacgtaattaatgtataatattgttcggaatatgattttataattagttaccataagtacaatcaaattttatttgatttccataaacatttgattttagttcgatttttcattattaattcgaatttatatttcaaaaaaatttcaaagatccgatttcagaatttcggatcaattttctgattttgacctgacccatttacatttgtacttctcttttaatagtatagagatagaaaaggtaataatttaaaacaaaatttacaaaatatattttgtatgagaaataataactaaaatatcacaaaaaaacaaaaaatatcttctactctttctctccgaatccctttgccttctcttcaattctctgcagatcttcaagtctttgaataccctttgccttctcttcaattctctgcagaacttaattctttgaatacctgaaagacttccatattcttcagattccgatcatcctatcaataaaacttagcaacatataaatcaaaatctgtaaataacaagatttcattgaaaagaactcatacaaatcaatcatcacaaaatcaggaaaaattgagacactaacctcatcaaggcctttaggaccaaagactaacaaagcgacaacaccaataactaaagcctcaggtgctccaacagcaaacaaagacgcaaaattcatcgtacacttacatcttctcttcttctctgtacacaattacccaaacctcagaaaagtgaacatctttacaaatacccagaaacaaaaaagaatcaattttgaagatttgggagaagaacccatgagagaaaaccatgaagagaggttaggcttcgaagcttgaaactttgtaacggtttcgaagatctgggtttagaggaaattgaactaagagaggatctccttagtggatataggattagggtttcaaagaggcggaggcggcggtaactgagattgaacagaggaacgaaggcagcggaaaacggagaggaaaatagagcgattgggagagacatcgaagaacttagatgtcagaactgttggtgaagagcttgggctctcgacgattcgaaagaaaaccacaatattggtcccttcccatgaccagaacctttcaaacgggtcaccgaacaccaccgcaatcaacctaagaaccctagaatccaattgatacccacagatccgaccattgaaactccatggaggaccaaaaataaaccgatccaaatgcctctgatcgaaaaccatcattgttgggaaagaaaccctaaaatcgcctccatcacctctctctctctctctctcgttcttcttcttcgtttctgcgcaagattttttttttaattcaaaaccaaatcgtaaaacaaagaaaaagtaactaaaccgaaaccaactgtgccatttggtttaagtcattaggggtattttcgtcagattttgacttaattgtcaaaacgtaaaaaccaaatctcactttaccaaacactgagagaaaatctttttttcagcagaaacgtgaaaatttctttctagattattggttttctcaaacaactcaactctaagtatatccgtttatgtgctatgcaaccaggaaccaccattggcttcttggtcctcctgcttagcgggttctgtataaattatgggctaaggcaccagaaggataccaaactccgacatcaatttttcgagcgaaacggtggtgtcatgttgagagagcgactctcgggagcagggtcatcaaatgctgatattaaaatctttactgaggaaggaatgaagacagcaactaatggttatgacaagttcagaatcttgggtgagggtggccaaggaacagtctacaaagggatattgcaagacaactccgtagttgctataaagaaagctcggcttggagacagtagccaggtagagcaattcatcaacgaagtgcttatgctttcacaaatcaatcataggaatgtggtcaagctcttgggttgctgtctagagactgaaattcccttgttggtttatgagttcattaccaatggaacccttttcgatcacttgcacaattccatgtttgattcttctctaacatgggaacaccgtctgaggattgccgtagaaatcgctggaactcttgcatatcttcattcatctgcttctattccaatcatccaccgtgatatcaagactgctaacattctcttggatgaaaacttaactgcaaaagtagccgactttggtgcttcaaggctgataccgatggataaagagcagcttacaacaatggtgcaaggtactttgggttacttagacccagaatactacaacacgggattgctgaacgataagagcgatgtttatagctttggagtagtcctcatggaactactctcaggtcaaaaggctatatgctttgaacggccaccacactcaaaacatttagtaagttactttgcctctgctaggaaagagaacaggttggatgagataattgacaggcaagtgttgaatgcggatactcacaaagatattcaagaagtggccaaagtggctgtttggtgtactagattgacgggagaggaaaggccaaggatgaaagaagtagctgcagagcttgaggccttgattgtcaagacaaccaaac

SEQ ID NO: 5483 - DNA, 26109 bp, Arabidopsis lyrata
  Intron number 9 from transcript 480175 (locus 480175) deri ved from phytozome v7.0 (chr-ID scaffold_3; pos 14073064 t o 14099172)
tttgtatttgttaccgagaatactaactcagctctgatatttgactgtaattcttagatagtgctattgtttattatctaaatcagattcatcttgtttaaagagatatctcagatgcggatgaaagtttgaaatctacttgcaatctacctgatttgttgtttttaaactgtgagatctgaaattctatattttgtttacatgtattgtacatcattgtcatatatttggttgctttaccttttatgtgtgttagagagatttctgaagtgaattagagagtgagaaagcaggtctttgagaaggatatgaccggaagggttgcggtttttgaaaatggtcgggaaaaggaaattttgttcagtgaacgtcctcttcagtttgtgggctgcggtttttcttcttccaaaagggttgtttggaaaaggttgaacaaatatgtagcttttcttggagtggcgctcctaattctttaagaggggctaaaatttcttgggaatcggtctcagaagacttcaggattaaagcactgtcttcggtctcaagcttatttggctactatttgctggtgcaggattcttatgggtttcttggaatcagaaagctgtcattacgggcagactagtcaagctgcgctccctagctcgtccttatatctcttgtcaacttcaatctggttcctctgcccacttctggcacgatgactggattggtttaggtctgtttattaacctgccatgctcaaatggtcccatgactgcttgtcttgtttctcaagatactggtaatggctcttggcttttaccgtgtggaaggcacccattattggttattcttagggcttgtttaccctttcagctgccagttctatctctcactgcctctgatttcttcttctaatgaacctcttgcaatcttctcaactgcaaagtttttgggacagcttgcatcctcggtcagcttatgttccttggtttaaatcagtctagttcaagcaaagaatccccaaacatacctttatactttggctgaatattcgttatagattaacaacaagagaccgactcaatgaatgtgccatccaagtcttctctgttccgcggtcttggaaactaaatcatatctcttctttgagtgtcctcttgtcgttgaggtttggagttccttcttcgcttacaccactctttctcctccatcttcttttcaccttgttgtgaatttgggtaataagatcagcttcatcaaactcaaatcccaatataatgtgtaaattgatattccaagcatccgtcctacataatctgaaagagcggaattctagaccatacttcattctaaatcaggtgaagcatgcatgttatttttgagaaggaagcaattaaatactctcttcaacaacacctttacataaaactatatatatagtataacttcttaactaacaaaagatccgctgtagcacattggcttaagcaaacattctagtttaatactggatcaaaattccgggttcgaagcccggcagcggaaaattcctttttattatttttattaaccagattttaaaccgcgggacgatttgttttcaaaattagtgatttttaaaatttaatggttatatattatataaaaatttttgcaaattatattattttataagatatttatattttatagtttacaatcgttattaagtaacgttatatcacaaacaatttttgttttatacaatttactttaatcaggatcattcgatatgtctaatattggtgatgttaaaaaagtaataaaatgaaaatttaaccgtattgaagcagcatgttaataatgttttaaaatttttgattcaaactcgtctcgtcatataaccccgtcctgcaatataaccccttcctgcaatataaccccgtcttgcaatataaccatcccatgttattttaactctttatatatgttaaaatgtttttatattataaattttttattgattttaaatatatgaattataatatttaaaacttcttaaaaactcgtcccgttatataaccttgtctaccaatataacccgtctcgtgttattgtaactctttacatatgttcaaatgttcacaatattataaactttttattgattttaaatatataaattatattatttaaaactttttaaaagtttaaaatttaacatttccggtaaaattaagtagttaaactaaaaaaccgagtgaaacggtatctaattttaaatttggatgcttattaagttgagcttcttgttctttcgggatttggattcattttgatcttatttataatatgattttgaatcaatatctaaacattttagccgatataggacgttaaacacacacctttttcatcaattgggtaatatatattcatttcaaaaattttgaatcccaatatatgcagaacaaaaattgagatttttttaactttatggattatatgacgattcaaaacagttaaaaaaatgttcaaacaaagatgataggagaattttatttctaaatcttaaccaaatcttgtaaatatctatatttttaaatatggaatatccggttcataatttcggatatgttttgacccgatccaaaaaagatatgaactatccggtgtaaaatttatgaagtaaatttttgatcgggtcaggtaccaaatttgtcggataacaatttaacccacccgctaaaaatatacttcaaaaatactagtatagatgattcggttgggtcgtgtgtcggatcggataaaacagttgtattctgattcgccaagtataaaatgctttgctaccgaatgtgaaagagatcataggtatacggaaagctttgctatatctgtatcttgtaggccaagtgaagatagttagttcttcatgatagctagtttatgtcttgttgcataggattgttatggtttgataatctgattaatcttggggaatgttgttgtaatgtttgatataaaacacgttctccaacgggagtgcatacagaaaagaacagccaaacctctctgcgttcttctaagcaagcctaatcagcctttttctctgtttagcccctgctccaatcgattttgatcaccggaagacacaaagcccatttttcacaacttacggattagtttgttagatcaatgattgagacaaacatgagagtgcaacgctttccctcggagctggttaaaccttttattgccaactatatatgttgcgtgggaaaaacggtctatttccccacgagaactatgacatcataacagatagagcccaaactttaatccgatccagatgtctctgaaacaatacttctcaatttatatttccccgaatcgatagttttaatcttatatctccctaaaataatagttctcatctaattatccacagccattggttttgtttggtttaatgttggtttaaccaatttacaaagataataaaccggattaaacctaatcaaaacccgattacaactgattccctaataacccgactataaaccgattctctgataaacccgatttcaatctgttttggggattatcatgttcgtcatcatgaaccagatcgggatcgaaaaatgatttgtttcccggtttgattctttttccccttttgtgatattgggttggaatcttgagacctggatcttgaaaaaggttgaaactttacgtggtgttgatttgttcttgatgaactgattttgatttggtgattggttagattcggatttgaataattacatgtatctagaggatgatgatgatgtctctgagaataataaggtcggaattggtaaaagacctttggaggttgttggtgagattagacagaccaaatcacttaaattaatgggtttttcgattacttatgaatttgtacctcttgagttggattctccattattaaaaaagcttcttctcgtgaagtgcatatttcatattcgaattgatgacgatgataatgaaaagaagctgaacgatagatctctgtttcgtctttttatgttaattttatactattttttgcttataattttaaaaataaattcgatttcgacaagtggtgaagccattaaaatgattcggtgaagaagaagaagaataaattagatgacttatggttgggttttagattgggtcggatttttgaattgggtcaggttttagttttggtttaattgaatttgtgtggttttttatcaggtttagtttgtaaaccgattaaacccagttctgtggggttttagctctcgaactattgactcgaggacattaaactatgaaactttcaatgggaggggaaataggaatagattttttattttatggacatttggaccgaagttaaagtttgggctctatctgttatgatgtcataattgtcgtggagaaatagaccatttttccacgttgcgtgtgtatcagagttttgcccatttgggctctgttttttttttctggcagcatgctatgattcttaatttatagaagttttttaaaaaaaaaacaaacaaagaagactatgaagtgtgcaaagtatagtccactaaaaaaaaaaaaaaaaattggagttagaataaaaaaagactatgagtgtgttaattatttaataatgtttaaagagattttaatattttttaaaaggatttttcagaatactaataaaattataaaagatcaaaattacatattttgtttctaattctcaattatttaaaaatataaaaggattttttaaaattacaagacaaactgaaatcactaaaccgtagatgactatacaaaccgtgagagcgtaatgcttatttgattattatgtcaagaagtcaatttgaattcctaagttataacgggtataagtaaattaacaaggggatgacaaaaaaaaaaaaagtaaattaacaagggtattttaggtattctcgtctaaacctcaatgatctagaagattaagcaagggtattttcgtattcacaaatccaatcatttaacagtataaataaagatgttttctttctctctagtagcaatccctaattcacgactcctttgcaaattaaatcgtttttcgaacggtcttctctttttgaattctccgattcaaatccgttaacgttccgatcaaaattcaaaattctctcgacatctcttctttctccggtgaagaagatcgatcatagtggtggatccaacggacgagatcgcaattggggaatctgtttgtcaccgaaacagaagtataatttcttttctcaatttttaggtttctttacttcaaacaaaagtagcgaaataggaaaattagcgatgtagaaatttgtaatgatttctcgtttctttgtcttattcatcatcatgagacgaacctgttataagttttttgatggttcatgttgctaattttcactataattgtcttgttcatcgttaagttacaagatcaagaagaactctagtgatttcttgtgacatctattgtttgttcttttcactataattgtcttgtgacatctatttttctattttgatcattatttcatcgctggagttgcatttctaaatctattgcagtgttatcgtatgattatgcaagaaatcaagttcaggtatcattttatgttgtgagtttgtattgtgtttgggtgttttcttatcaaatttcagccttaaacttttcttggtagtgtataagtttttccgtttcctcagttaatgatattgtgcgtatatgtgtttgtttttctcatgttatatgttgagtggtctactgaatctgaatacgttttttggcgttttgcattcactgacatcacttatggtatttcactacttttttttttttttcatcaggtatttcactacttacaaagctcttattcttgtaggaaaatcttagtgggttatgttttaataatcgtatgtataagtattcagtttatatgtaaattgcaggaggggcagccccggctcacatggatgggcggaggtgcgacggcctaaggtttttttttttaataaaaattttacatagaaaaaaggcccaaatatttttaaaaaaaattattagtatgagaattatatttcaagaggcttaattctttataaaaaaaatataaaaaggcccaaaattttaatagaacaatttttactgtaaagaatctgtaatttttttttgaaaataggtaaatttttttttttatatataataataggctaaaaaaaatttttttgccctaaggctcccaaatatattgggccggggctgaggagggcataagcattgtagagaaactgaaaggagttgtttaaatctctttgaaaggtacgcactctagtagctcatatttgtttaaaacacataaaagttctataaataactatattgtttttagagaacgccactgggttataagttagtcaaataatccatttttataactgtattcttggacaatatgtaaggaaacatacattgtgtacttttgaattgggttagtttataatttgtgtttattcacactacgtcaaactctctccttgttattgataatcttttttttttttttctttcaagagaaggaagggatccttaagctttaaagaacaaaagccccggagagaccattcactagccaatatgaataaggtgtgctttatttgttctccctctcgtttttccaaaaatgagacagaccagtcctctggtctggcttgttctgcatttattttacatgcttagcgggttgagctcatcaactcttattagatatggtagtaaaagcacataatataagacatacaaaacacgctcaaatggtaattcaaacccaaaaacacaaaaacacatatctaaacacaaattctaacacacaaaacacattccatcacaaaaatatatattttttaaaatggtcgttaacacaaaacaaacaaaacacgcacgctcaaacgtaattcaaacatacgaaaaacacaacacacaaacacacatctaaatgcaaattcaaacacacagacacaatacacatttcatcgcaaaaacacacagaaactggtttgagaagcaaaatcgaagagttgtgagattaacttgtgtacgatggtggtttggattcgacgatgaagaaaaattgcatgtgtcatgcctatgttgccattgatggtatgttagatctcatttcctccatagtcaataaatcgatttgtctcctttggtgggatcattaatagtaatttcgattcagcgaaaatgaagatcaaggtgaactgttttcaattccaagacgagtagtggtttcaatatttggtaaaatagtagttaattcttactggtaaaagtagtttgtaagtggtggtgtttccaatttcagggtgagctcgtaacagtggcggggaagatattactgatgatggtggtgaagatgatatgtggaatatcacgtcaagagaaacatcaatggacacgataagttataactcaacgattaacaagtataatattgtactatatactagttaccgaactaaataaagaataaataagtattttatcagttaaaatataggtaacttgttataaaatgatgtatttaatatcttagcacgttacaagtatgtgtagtccgttaatatatattattgttatgactatcattataaataatctcttataataatttttattaaaaataataaaaaattaataatattaaattgatatttttttattaatttgtatgatattaaatggtttaacacaataaatatacatttaacaaataatatatgaatttatcgagatagtatactagttaacatgttaatcaaatagttatccgaatctatcgcgatactatactagttaaaatgttaatcaaatagttatccaatcaaattacaaaatattttatataatccggtggtaaatagtgttcccgaattcaaatgaatagttttgtgaggaggttaatgaacagtatcacgtgtatgaggttaatgaacagtatcacatgtacagtatctcgtattgaacagtgtttttggtagtggcatattgtgtaaattaaacaaaataagaaggacatgtatggttttaatttctttctctttcctacttacctaattctcatatttctattaccaaatcttacattatctactcctctatggttttacatttatatgacccttataacaactattaatgttgcattcatttaaaaaacgtttttttttttttatgaatagaattttacattcatacaaaaaatcaaaaatcaaaaataaaagaacataagccaacttgattgctcacttaaccgcaaggtagtcttctataccgagaagatccggttcaaagattctccaaacggcaacgtttcgtctttctccacaaccttcgtcttcgcgatacactctcagatcccaacactaagcggccatggaatgacgaaaacggtagcaaacatacagaagcagcaagaagaaacagaatcagggatattcgaggttgatccacaagaaccaatggtacgctaaaaaattttgagactcagttcttatctagagcgaaaggttgttttgtttggttttaaaatttgtaaaataaaaatgcaaataaatagacgattaaacttataaattaaaggcattggggtatagggtatttcaaaacacaatgactagcaggataaacgaaacaataaattcagttatgaaaaaccattctcaaacatgaacacaaatctagactaactctctctcaataaattaatcaccaaatttgactacccaactactaaactctcatttgtagtttcctaatcaaattcgcattaacgagttggttcacaatgcgtcacattgcttaatttacattagttcaggcattctatcgaacacttttgatgcatagaaaaaattatattctaaaacaaggtgctcaatcctattctagtattaagaacacgtatatataagaacctaaagatggagaattcctaatgacaatctattcactaattcattgactttcgacttagaaccctaaacccaattggaagactactcactcattgcaaaagaaataacacaaacagatgtaaaagaaaacatgattcaattgaatagaaatgaagtagggtttagaaatattctccaatttgttaaagaagatgaatctctaatccagagtactagtttacaaaggagctctcataaaaattgcagaaaagaaacgtgtcgtgaaaaattaggtctttgggttttcatacccaattacagaaaataaaagataaatccggttaaaaaaaacctgaactaggcatcaaggagttgcccgatgagatttgtctgatgtcattcatcagcaggcttgggcaggaaaatcggaattggggcatcgcgatgaggtttgctcgatgtcattctctagcggagttgtcttgaatcactattttcccgtttcttctcttaacacctgtttttgacaagaaaagcctctaactccaacatagcttcctaaacctgtacaagactcaagatgcgatcaaaaagacacaaaatacgaacaaagatgcgacaaacgattcaaaacgaatactagacaaatgacaaaagacgctaaaaacgcaatacatcaatggagccagaatgtgacttagaatcttcatctaaacatagagtgatttcaacttgttgccttcaacttcgaagtttccttcacctccatacgccaaaaactcattcatacatatcaatgtctctagggcttggttcacaatgtaggggcgagatcaaagacgaacaaacggttatcaaaatatatatatttaggtgtatgtgaatgttttattacaaacttgagatttggaaaaattctttacaaagatgcaaagatatacgttggaggttcgccttggaaaacaagaaacgaaggtttgagtagcttcttcgaacatccatgttaatatgatatgtaataaaaacgggagggacgatcagagggttatagttttgtcacatttagagatgctgaatctgcaacttatagttttgtcacatttagagatgctgaatctgcaactgagagttgcgagaaattaagatttgtcttataatcatatttttttagggaattttgccaaatgtaccatattttgggaaaagcctagcaaatgtaccacatttgaaatggatttagcattcataccacttttggtgttagtgtggcaactcttggacgattttgcccttctctgtgcgtcaggaatgtgtcagggaaaggagctacagtgagacgccggttgggaaacagggagcggctgcattaaatggatgtctacagatcttgtccccgattgaaaattctctgttgcgtctagatcttgtccccgatttcatcagcttgctctattatcatgaatctcagatgatatggttttaccagtctgcagagatctggatttactcggggacaacatctcttaattatccatcgccagatgatgtggttttactagccagatatctggattaactcggggacaacttgatctttattttattcttccagagagccgatgacgaagatctggatttactcggggacaactttgttttaccagccagagggacgaaaccggttaccaatgcgccaggagagagaaaaaggacggcagaaagttgtcccatcaaccgtaggatcttgtctcagaaagttggagggtagaatcgtcttttcagatgacaaatatagtatggataataagtgggctgtgaaagtggtactgggtctaaactttctgagaaaagtggtactgggtctaattttccctttttttattaactacacattgacataattaatagagcttggtttttttaagaggtttaagacataaacagattgatgaagaagatagttccgcctatatttccatcttctaatccattctttcaaaagtcttggggatataacaaaattatacagccataaaaaaagaatttggagatggaacttgtgcgtcgtgtttgaggattctgttttatatcaaacactagaacattttccaaaattaatcagataatcaaaccataacattcaagtaatggctgagaggatcagaggacacaaactataaatcaatacaaaagctacatatagattgatgctattaatcaagcaatggctgagaataaagaacgatatgaggaatagcaaagctttccaaatacctatgatctcttacacattctatagcaaaacatcgtatacttggcgaacaaaaaagatttttttccactaccgggttttgaacccaaaactcggattcagtcagtattaaactagaatagttgcattagacaatgtgtttcagcaggtcttttgttaatctaagaatttatttggtactaaaatcgcaaacaaaacatagctatcatgagaactacctatcttcacttggcttacaagatacaaagatagcaatgttttccgaattcatatgatctaatctcttgcacattctatagcaaagcgttttatacttggcgaatcagaataactgttttatccgatccaacacacgacccaaccgagtcattaataaaaataaccaaaaaaaaaaatttccgctaccgagcttagtacccagaattctgatctggtatttactagaagatttgctttagccaatgtgctacagcggatattttgttagttaattaagttatacggtatatacagttttatgtgaaggttttgttgaagagagtatttaattgcttccttctctcttatatattcatttccttttctgcttccttttccgtttttgttcttaaaaatatcgtgcatgcttggcctgatttagaagattaagtatggtctagtattcctctctttcagatcctgtagacggatgcttggaatatcaaatcgtggtgtgagctttgtttcttatctccaaactccaaagcaacgaaaatgataagtcttggatgataaagtgtggtgtgagcgaaggaggaactcaaagaagaggtatgatttagtttccaagaccgcggaacagagaagtcttggatggattcattctccatcccttgagtttggggattcttggtagaactaaactgatttaaaccaaggaacataagctgactgaggaggcaatctgtcccaagtttttgaatttgagaagattgcagtcagaaatagaactggcggacgagagggtaaacaagccctaagaagaaccaataatggattgggtgccttccatgcggtacagtaagagagcttctagttaattttgaggaattgttgacattacaagagcttctagacctagtcaaacgtcacttttacactccatgccgttctacttatcaacacttaaacaacgcgccgttttactcttaaaaatcaagatcattgtcctcatgattagcgtttaaactctttgatgtaacaatgcagcatttgatttctagaagaataaaacaacatcatcattctatattgaagaaccaagctttgcattgctcttcttccttggactattttgtgacgggtcgacgacctttgtccggaccaccaattacaccccattcctcaaactgtgtctgcctcgctcttgccctttctttctcctcttcggatttttcggagtaacagtaaggacaagaaactccatactcgtactctgaagcttctatgacttcatcacttataggttgcttgcatccatagcagagtttatgtgttccttgtgctagaccatgttccacagatacacgcttgtcaaacacaaagcattcaacttcccacaagctctctgttttagggacttcttcaaggtactttaatatcccacctttcagatgatacacatgataacaaaaatgctttgatctttaagtacctttggaaccaacagctcaatggttagatgttatattagattacctcttcgaaaccttggctaagaaggaagcttgaagctttctcacatctgattcctccagtgcaatacatagcaattcgtggcagcgtctttggtttttcagcttttcttctttatggatgatctcagaaaaatcctctttgtccacctttgcttgtgtttcattgcattcttgcttcaatgcaaattgattctccacccaagatgggaaatttctgaaagctgtggtacatggatccacagctcctttaaacttcccaattctagtctcataggtattgcgcacatcgatcactacttgaaacacaaaagtaccttgacaatgtgttatggaccaaagttttttaagcaaaagcttccttttaatccaagcctctttctagagaattaggttaattgttggagcttaatttctaattgatcataatagacccttatataggtttccatacaacttaatcataaccctaatgcataaaagaaaacacttaaacgtaaaaaggaaaatatgaaaacgtcctaagcctaccctaatcatcctaaccatagtcttgtatcacaatgtcaaagatctgatatcgttgatctatctaccacaagatttaaacaagatagtaaaaagaggcctcacagtttctggatcactgatcagttcgttccattcttcggggctcacactctttcaattggcgagacactaggcatgccaagcgtaacaatctgcacagacataacaaaaagtgaacaactcttgacaatccacaaaactcctccagtctcaacttcaaagactattgtgtacctctttcttgagtttcccatctaaagggagcatcttcaccagttgcaagaggagtgctactgctatgtccatggtggattgcttcttgctcgggactcacaggtgtctccacttgcctcaaaccattcaatcggatatctctctgtataaatgccaacactctctccactgattcacgaatcccacagatacttccattgatcccttctggtgcaagaatgattccacctgaaacacgctgatgaaaccagacaatccaatctattactgcttcaaaatcaaaaccaaattgtcttgctcaatacaaacactcttttgtaaagacttaacctttcgtatcagacagacactaataatctacaattctgattgagatagaagaaacggcataccaattcttcgcagagatccctgaggggcttcctgaaatcagcatgatcagtgggaattcaaccaaaccggaataaaccaaaacgtgggtgtttaagaaaatagaataatatacgtctttgttaccatggaatatgttctttttttgtcatctgaagttttattaataaaccaagagatcgttacaagatgaaatacatatgcgggcggacaatatgaatgtccccagatacatttgcctaaaagagggaaacaaagccctaacatacagagaaactaattaaaaccaaacataaaaacaaaaatttaaagagaaaacaaacgtcatggagaaagagcaatttaagcactataattgaacaaaggcacgagagacactcacaaagcttccctatagaacctgtaaaagccagaagcactaataagaccagatagacttcacaccgaagacaaaccagaagcaaaccggcagggaggaaaataagaatctaacgcgaccagagacacaaatacaaccaccaacacacctcaccagcaaatcagagagagcaaggaacactagggtcaaggcaaaaccttgaaatcgactggagacaaaccacgaaagctcaataattcttacacgcggacactcgtcgaaccagcttcagccacctacagacgtaaaactgacgacgtcctcgcaagagtataactagagaacgaatccactgcttcgactagaactaactccaaaacttccaaaggaaacttaaagagaggctagtaggtgactcagcagcaaaataccatcaaaatggctcacaccaagaacgaacctagagcaaatcgtaacccctaaccagcaagaggattcaaaggagaggtagagcaaagatccaatttcaaaaaccacaaacaaagccacctccatcaattcaagcctcacagaccacaacaatacctaaaagaagcaacctaaaacgattcaatctaacccatggaatatgttctagttaattttttatttttttattattttattttttgggttagattctagtttttttttcttgttaattgcttacaacatgttctagttaactgcttacaatttttggattagtgacctattggctctttcttatacaatggagataccacttccactacacaatcattcttacttttaactaatatacatgcaacgacgatatcggaatcttaccatcttttaagcttttaattaaattaaaagacatctaccatagcgattgcttccacgtacaattgtatattcactgtatgaattcacaaaacgcgacaaatatttgaatccgcaacatgttttacaatcggaaatcaatctcggaaatgaaccttaggtatatccattctaacctcaaaatgtatgttcgaaacatgcataagttccaataagaaagagtcgtatgggtcgaagagtattttaggcattttcttttcttttcttaaaatataatttcctaaataacaaattgcatgcattttcacaactttttttttattcgaccacatccatttccctaacttctttccattttatagctatcttagtagtttccaacttgaaccataagattttaaattttgttcaacggcatttaatgcattttaaatagttttgagtatattgggttaggttttttaatagtagtcaaatatcatattaagaactatgaccaaaatagatatcatatagaaataaatctctgaatttaatatctttgaaaaaaatattttggtttctttattcaatggtttctattatttgaaatagtattaagaaaaattctacaattttattcaaacaacatttattactcatgatttaggatctgtttttctcgtttataaacaaagaattacgacgtgaaacacgtgcattttaacatacatacatatggaaaaatgtcaaatttcgtgaattagtgagagaaaaaaaacacaaaataaaatactgaggtgtatataagttgatacatcaatcacaaatattattctactcaaatttattatttgaaaagaagaaaaatgcgagggaaaaaaacaataatcacaagtgaagatgtgaagctacttgtgaaaatcattggtacaatcggagtcaccaatggtcgcccatatcaatacaaggttgaagcttggacaaatgaaaacgatagatatgaaacaaaggttgtaccaaccgaaggagatcctgagttcaatgaagatctacaaatctttcaagataagaattttccagcagaatctttatatgtagatgttttcaaaacgaattcagctggcacctatttcgttgggaggggagtcacattgttgccaacagttaaaggggttgatttttaccgtgaagttgagctctctggtcctgaagaaactggaattcttcaattgtcacttaatctcatggaattcgagatacttggttatcttttttcataatttatgttgttgtgttcttaatttgatattgttatgaataatgaataatgcatactgataataaggtatcataaattaaatcgtgcatgtttgcctatgtactaatgataatatgaataatggaattcaaggaaggtgttttgattaatttctttggatcttctaatgatcaaatgttgtaacggcatctcttcttcttcgtgaatcatcatcatcgatggttgtgttggaatattgatattataatctagttaatgaataatggttctgcttaaaatctttttttttttggtattttactaatgataaatatgaatcatggaattcaggcaaggtgcttatcaagctacatcattaacaacaaattacatatacggacaatgtgttaatgttttttatatttcgacgatttaatgctttggaggcatttcttcttatgctttgatgatgtcgtatgatgattcgtgaaataaaggtgtgtttgctaggtaaagtaagattagtgtattcgaaacctaaaaatccaatttcataatcaacccaataatcattattcagaaattagcaacaacgacagtcaagttttaatcttgaccgttcatatcagtgcttggtttggcttgatcctcaatttatcgccgtttctccgatttatgattagatttatttttgggaaatttggatataaaggataaataattttattattgtctatttatgcattctatattcataattgattatatatatgctttaatattggtcatatatgctttaatataattaaaatcccattttattcctagttttttaaaatcttgctaaactataaaaaaattccaaaattaattagatttctttctaaaaactatttggagaaaatatagggcaaaaacaatatttatttacttaccaaatttttttgcctagataattccaaatcttcttcttgtttgattttttttttacgttaactttttcaattctttgacggaaacttcttctttgattttctctatcggtagttttttggatttcttcaattctttggagcttgtatatccagataaggagaacgaaacgaggagaagaaaaaataaggaacaaaagaagagacgtcaaagtgggaaaataaactagggtaatctattcacttatgtataaagcattctaaactaattagaatgtatgttctaaaatttgtagacgtaatcttaaccttaatattcaattttatcagatgtaatcttaacaatattcaatttctttatttaaagatttattttcctttttaaaaaagaaattctaaattatatagaattttgttttctattttttgtagaatatataggaaaatataagcattgaatatgttgctccagcttcatccacgtgagaattttcaaacacgccgactgtatgtatacttatcaaaaacatcctatctaaattcatcattccatatcagggtacaactgccatcattgtcgtggttcgaacccattgttttccataattggctacatagtatgcatttgtggtttgttgacagcttcgtgttttcattgtctttaggattctatgttccagcttagctatcatgggattccgtagttttgtatctgtagctctcaaatcactacagtaatttgcagattcatgttgcacatgataccttccttccaaacaaactttagtcgtgctaacatttacgagtatcaaagcgattaaaaataaaatactctaattcaacaaaaataaaaacatcattaaaactcaacattatcgtcatttaaaaagggagactcacaaaaatacccttttttcaataccccttttcaaaaatgccccatttgactgtccatttttaaaaatacccctttttatgtacaaaatgactaaattacctttcttttaataaaagatatcacaaatatataaagaaatataacaaaattaggtctacaaaatacaaaatattttttggcgggaaaagtgatcctgcaatttttcccgccaaaacacttgtaaaagcttataaaacctttaaaatatcttataaaattttcccgtaaaattttttcccgccaaaattttttttttgcgggaaaagtgattccgtaatttttttggcggaaaaatttttggcgggaaaaatttacaaggtattttaaaggttttttacagggtatttataaggttttacaacgtatttataaggtatttataagatattataagattttacaagctattttataagcgtttacaagttataaggttttacaagttttttataaggttttacaagttataaataccttataaaaccttataagtaccttgtaaaaccttacaaaacacttgtaaatactccgtaaaacctttaaaataccttgtaaatttttcccgccaaaaaaattgcggaatcacttttcccgcaaaaaaaaaattttggcggaaaattttttggcgggaaaaatttttacgggaaaattttacaaggtattttaaaggtttttacaagtgttttggcgggaaaattgcggatcacttttcccgccaaaaaatattttgtattttgtggacctaattttgtttcaaataagggtaaaatggtcattaaaaattaaaagagggcaaatttaaaaatggactctcaaagggggcatttttgaaaaggggtattgaaaaaactcaaactagaaaacaatataataattgtaaaacatatatatatatatatatatatatatattgaacagaagttgtaaaacattttttttttctttttctccacaaaattagtaaccaaaatttcaaaatcaacgtttctaaccaagatttcaaaataagattacaacttaataacgattatttgcaatttttgggaaaaaaattgggtaaaaaaattcaaaaaagtagagtaaactaaaaaaaaaagtaaaagcatgaataatatcttaactacatattttgttaaaagtaaaactatagaattaataaatatatgcccttaaattttccaaataaaatgattattagttgaccacacttgttaaatcctaattttgtattactgtaattagtttgtaaaaaaggaaaattgattaaaatagcactaaaataagtttttcttccaaaaatagcactatatttaaaaagtttcacaaatagcactataaactttaattaaatattaaatatgaataattagtttatttaagagaaattcttcaaaataacactaaaacaagttttatagataattatattacacactccataaacttccaaaatagcactagttgattaactattaagtttttgttctaaaaaagtttgtcttccattcgtccctctcaatcgacttttctcttctatatttgatcgaggcattaatgtaagttcttggtgtcactttaagaaaaggtgaaggtccagtaattgaagggatttctgggtatgaagaattcaaaatcatcttaacatcttgtgagagaatcggcaaaatatcgtacccacctggccacctccgcgtaatgaaaagaatatatgttttagagaaatctaagaaatgtgccacacactgtagcatttcttaccaaaattgccacaacccacaaatccttttcaattgtgccacaatccaatttctaacccaacttgcaaagtccaatttaccctttagagagaaggctttttggttcaatctccattcttctcctttctctctcatctctctctctttttctttcttctaaaaaatgaagctcaatctccctagatataagagttcttcacgttttcgatctaggaatacatcgttggcgatttagcgagatagaaaatctgggtctgaatctggtttggaaagtgggagcgaatctaaatctgagaaggaagaagatacatgtggacaacatttcttgtctaccaaaatttttgaagtatgccgtttccaattcttgtccaccaaatttctttgaagtctgtttgtttcaaatgtggacaatatttgttgtcctccagatatattctcaatctattgtttcaaatgtggacaacatttcttgtctaccaaaattttcgaagtatgccgtttcgaatttttgtccaccgaatttctttgaagtctgtttgttttaaatgtggataatatttgttgtcctccaaatatcttctcaatctatgtttcaaatatggacaacatttcttgtctaccaaaattttcgaagtatgccgtttcgaattcttgtccaccaaatttttttgaagtctattgtttcaaatgtggacaatatttgttgtccaccaaatatcatcacaatctgttatttcaaatgtagattatattttttgtctaccaaaatttttcgaaatatgttgttttaaagttttgtccaccaaatatctgatatttagatattttcgtctgagggtattttcgtctttgtctgcctgccataaagtggagaaatggcacattgagaaaggaaaactttttgtggcaatttgtataagttttgttacagtgaatgacacattagaccaaaatccctatgttttatcttcacctatgtgaaagagacagtgagacttgcagatttgatttagtgaactgcaaatcaattcttatactaagattctccatggaattttcgtatgttttatgaactttgtaagtattggtgtatgcaaaacctcgatagtctctagctttttggtagtatcttttttaaaaaaagtccctagccagtttaccatccaacccgaagaatatgaatcaagaaacctacaaaccattttataatgcaaacaaactgagagacattatattaatattatcaaacattattccacacatttctgaaggaactgcattacaaactcaccatggtttatttttaggcatacacataatacataagtgtatatatagatgcaatcatgcatggtggtgaatatatgatatggttttaaacacccggctgagtctgaacaggttcgtcgttaagcccgtggcctcctcctccgtggtgtcctccacctccgtagtgtctgtggcctcctcctcctcctccgtagtgtccgtggcctcctcctcctcctccgtagtgtccgtggcctcctcctccgtattgtccacctccgtatccgtcaagtccgtggccccctcctcctttctgtcctccatgtccgtggccaccatgtcctccgtggccatggccatagccttcaggttgcacagtttcctcactctctggcttcaccatgcctgcccaaaaaaaaacacgttatttaatttcaaatatatttttaagaacatcaaatatgaattcctcttcctgatttcaattttgtttcccagcttaaattcttttcttaaataggtacataaactcgaaactttagtttttatatatacgttcgaaacacagtttacacaaaacttactagggcttccacatcacttaggtgaagtatgttttgataaatagttggataaatttatcaaatggtacgttagctaaaatttgattaattagcctcacgaacatatatcttaaaaagataaaaataacttagtttattttaagtagagtactgaaacgtattaaataatttgacgtacccgactgccttgcggcagacacttcggagacgacgaaaagaactgcgaagagccctaacagaatcaacgccttggaagccatttgttttcaagttctaataactctcttagtatgttaagtaagtgatgagtaaaatgttacgctgcatgccctctatttatagaaattgaagaggatagggaatgagaaaagtcaaaaaattactccgtagtagaataaaaagaaggcaatattttatcaaaagtaaagttaaaggaaatttatcataatagaaacaaagtagtaagaagataagtatcagagttttaatacacgtgttgcgtcggggccttttagtccgttgttagattcattgtaaccaaatatgaatcaaagtatatggcaaaaaattggaataaaaggataactacttaaaaatttgtctatatatcccctttttttgtagattggtcaaatagattttttaaaaatcaaaatccaattttaccctcattttctctcaaatttcattaaaaaaagccttcctaatttatttacaaaaacctagctattgattaataactaattacttattcagagatacatttacattactatatatatatatatatatatatatatatatatatatatttgtttccatggataaagtatgatatagacgtgtgatattaaaatatgtaattaagaattagactatggacaaacgttttaacgtttaagcattgtaggaagtttatgtttgccgatcatgatgacattagagtgaggttaggaatttaaaatagtggtaagacgacagttgaaaaatattggataaagaatatatataattggtaacatgttcatgattaaaaaataaaataaacagataacaaaaaacattatgttgaagtgtttatttggtagtcaccaaagtggttaatctccgatcacaacagttgttggcttgttatcataacctaaattcttgagtaatagatgaattttttgaaataaaattatgatacttatgtttgtattccaaaaaatgaattgcatatggttagattatacttacgtgggaaaaaataaattgtaaggaaaactggatccaatggtcatttgtttagttcttgatgttttatatgtttttttttttaaaaagaattcttcagaatttttgtaagttttcttacatgcttttgcaagttttttggtaatgcaacaatctcccacgtttttttccatcaataataagtctccactttttcttgtcatacaatctccacacaaatcgttgcaaaaacaaaaaatgaatttgaaggaaaaacgcaggatatagcaaaaaaatcgaaagtggtggcttagcttagggtttagaaaacgttttaggtttttatctttgtctaaaaaacgtagacaacaacttttacatcttgtagatcgtaatttaaacaataaatattcatttaaaacataatctacaataaatatttagtttatttttctgaaaatttactttctatagttagagcattctaaaaattacagaaaacgaaatctacaataccgtagaatttacattctaaacgaagattacaatttctaacgatggcagaagatgtagaaattattagaacggctattcaaaaaaatttagaacatagagcaaaacgtagaatgcatgttctgaatattttagatatatgattttcggatttctaaaattttcagaacaaaaatctagtctaaaatatgtagaacatgtacaaaaatgcagaatacacactctgaatttcgcagaactctagaatacgtgttctaccaaaattagatgaaactttatctataaaaaaatcaacttttttaaaccaaatctaaaaaatttcacttcaaatcacctctactcttgtatatctacctatttttatgattattttttttttaaacatgtaaattagggtggatgggtaaaatcgtccaaactgacaatctcacaaaaaaggtgtatatagacaaatttttaagtagatatcctttatttttaattttccccatatgagattgttatgtgtttttttttggttaaaagtatttagattgttatgtatatatgttgttattattatttggacggaaaagtcgtccactattgatacttgttaaggatccttcttctattctctgccgacagagggaaaaagacaaaactctacactgaataagagtaagtagcataaaggagtactacgtagaaactactgagaacttactttagacccagggtgcaaacgtgttgtttggctataatattattccgatagccttttccgcattttcagacgtggccaagaaaccttgctttttttctttgacacagtcaatttttgttatatcctttcatgcttattgtaaatactatctagaaggttaggtgggataacaaaattttggagtaagatttttccatgcatatattaattttgaaggacgaaaaaaaaaaaaatgttatgcgaagagcaatcttttcaattaagtatatattagtctctatatatttaaatatgtcaagttatgatttaacatcgttaaatgattatgtaacaccagttaacggctgttaaatcacgggttccaatccacaaataatttaaataatgtgtttagaccaataatatttgaatgagatattttattccaaccaaaaatattaggtattaaacatccaaattaaaaatatttggggtttttttttttttttgaaatttcccctttaaaattaaactagatcctgacccgcacattcgtgcggggaaaattttttaatgaatgtctttgcataaagtttgtattaatatattattttgttggttagtgaattatataatagtatagataccctaaacttagcataataattgtagaattatgttttgtgttttaaaaatagtttggtgcataagtttgtgttttctatttgattagttttaaatttagaattgaaagttgagagttttaaaaataaattagcgtcagatttaagtaattttatatgtgtttttttaaaaatatatagattggtgcataagaaataatttgaacagttggagaagttatgtgtctaaaagttattatacaaatgttaaaaattgaaagaatataatattttaaaatttataaattaaatagttggtaatgcaatataattgtttataaattactattcggtaattctcaaacatttttacggaaatataatttactggcacaataatcaagccgagatatttttttgtggacggaatataatgttaatgttgacccaattataaagcttccttcacccatttaatattttcgtttaaataaattgatatttagtatattaatgaattttaatttatttatttggacagatttattttttattttagaacaatcgttattgtccttgttgcttcttaatgcctaacacgtgtctgagtgaagatatctcttcttcttccttaacgtatcatcgactggacttttaatgggccgcttaattttgtaagatatctttatgtactcttgttgatgtatgttgtcttatatcaataaaattcagagaaaaaaaaatgtcgaaaagaataatcgttgtctcatcttaaaaaacaaaaaaaaaaaaaacccaccgaacaaaagtaagaacatggctcgatcgaagaatcaattgcgacagctatttcgtctccgtttatacagtgttgcaaatcgtgaattctttaaagaggtaaggttgttatcgaatcagatctatagttttactgcctcaattcccaatctgtgaattttt

SEQ ID NO: 5484 - DNA, 33821 bp, Arabidopsis lyrata
  Intron number 15 from transcript 494100 (locus 494100) der ived from phytozome v7.0 (chr-ID scaffold_7; pos 23695628 to 23729448)
aaacgatctttgatagttttcaatcttgtaatgttcgactgcatttctttttggtcacaacataagcttaacaatcagcaagtggacatcaaatgactagaaagtgaaacaatagacgaggtcattcatcatagttgcatacacaatacgcattttaaatacttgtgacgcattcatcaaacagtatcagcaagaagcttttgacaaaaggaaagcgtttgcccgaaaaaaaaacggcaggtagttgaaccaacaacccaaaaaaacggcagatagttgaaccaacaacccaaaaaaacggcaggtagttgaaccaacaaccgttgaaacaacttgtcacatggtcccgggaaatttgcacgtcgttaaaacattggactcgtcgagtgtctgaaaagccgtcttttatccgacttctccggggattcccaatccttttcttatctttataaaatagaattgtcaacagagagagagagagagatttctctttagatccaatcatggagacaacaacctctcctctgctacccaatgatcgtggccgatgcgggtggctccgccgtcgtctccgcctcaaaaaccctctttcttctgaactctccggcgctgtcggtgatctgggcactttcatccccatcgttcttacactaactctagtctccaatcttgatctgtccaccactctcatcttcacgggtttctacaacatcgccacgggtctcctctttgacatccctatgcccgtccagcccatgaaatctatcgccgccgtcgctgtctccgaatccccacacctaactccttctcagattgccgccgctggagcatccactgccgccacgctccttctccttggcgccaccggagccatgtctttcctctacaacctcatacctctcccagtcgtacgcggcgtccagctttctcagggtcttcagttcgccttcaccgccatcaaatacgtcaggtttaattacgacactgccactctcaaaccctcttcttctcctcgtacttggcttggcctcgacggccttatcttggctctagctgctctgctcttcatcattttgtccacgggctctggcaacgacagagacgccgccgaagatgaagatgaagattttgccgagacttccagcaaccaaagccagtctcgccggaggagacgactgcgtcttctgtcttcgattccatctgctctagtcgtgttcgtaattgggatggtgctctgtttcatacgcgatccgtccattttcaaagaccttaaattcggtccgtcaaagttccatattctgagaatcacttgggatgattggaaaatcgggtttgtgagggcggcgattcctcagattccactctctgtattgaactcagtgatcgccgtttgcaaactatccaacgacttgttcgacaaggaactctccgcgactactgtgtccatcagcgttggggtgatgaacttaatcgggtgctggtttggcgctatgcctgtctgtcacggtgctggcgggttagctgggcagtaccggttcggggcaaggagtggattgtcggttcactacaagaaaacatagcaaattccgacaaaccaaatagtcggaaattcgtcggaaatggatgtttccgacgaatttccgactacaccaagtttgtcggaattctctggtcggaaaacaatattcgtcggaaattcgtcggcaatttctgtcgagatgagttgtcggaaaattcgtcggaaatatttgttggaaaatcgtcggaaatattcgtcgaaagcccgtcggaaaggtgtcggaaatgtccgtcggaatagcgacggaaaattgccgacgatatcccgacggcatattccgacgccattccgaggagattcctacaaacgacgccgcaagatcgagtacgattccgacgattttccgaccacaaatcgtcggaaattcgtcggaacgttccgacgaatttccgacgaatggatgtttccgacgaatttccgacaaaatataatataataatagatttaatagtttccgacgaatttccgacaaatcgtattttttattattttccgatgaatttccgacaaaatattatattttattaaaaaatatatatatttatattttattgttaattaatataattaattaaattaaataatattaatttaatttaattgtaataattcaataaaacaaacacaaatattatataaaaacataattaaaaaaaataaaattcaccacataatataaaaaacataattaaacattaataagttcttaaacaactaaaaattattacaaacgcgaatattatatattatcaaatagagtgtcaacgttatttgtttcattttgatttccgggttgatcttggcgagaaggcggaacgatgtcgggatgaagacgggccatcatatccatccaaaacttacaatcttttaattgagtcttcaactcgatgatttcggctacgttttcttgacaattcacgtgtgcatgtgaatatgacgaacttccgcccatgtcttcgtcaaacggaatggaaccgaatccaaatctacgtccttttttaacttcaacttgctattataatgaaaatgttgttaggaaataaaacatattatctaaattataatattttaattactattacttaccgatcggaaaatatcgtttttttctgcttgggtgagttgataatcatcaggcgtgtccgaatgttgactcatttgtgtgagtttctctttctccatctcccgacatcgacgagctattgcctcagcttttttatcaacaaatgtcccgtccgatttccgtttgtgagtctcctccatgaatgtcaccatatcgggatactcaccggtttcgggattacgcttgcatttaaaatatttattagttaaaaatttacaataaaatttattataatgcaaattgaaatgtaaaaaatttaaatttttatttaccattttttcctttttccggacatatggcattgatccacaagtatgtttagccatgccatagcctccgcgttcactcttgcgattttgagaattagtttcactacgggacttattttgctcttgtaaccaatatgcaataagcccttgccaaacgttttctcgcatccattttggcttttctttcccgttaagccatttctttttccatccataaacataatccaataaacgtaccccacatatctcctcaaatttttcttgtacttcgcccgtaagaccataatcccaattaaagttttgctacaatgttaaaaaatttaaaatatatatatttttagtgttgtcaaattttaaaatttaatttttttagctaaaattataaacaaagtaaataaagcataaattttatttaaataaactaaccgcaaatgccttaaaccaacatttctttgtgtctccggagaccgacgtaatattcggagcgggctcggagaaatcgctctccatgattttcttgataatctttgtgaatcctttatcgaatctatacctataattaccaaattatttaattgagattatctacgtaaaactataaattaaataatacaatttcttaccaagttgttccgttcatacggcttgggtcgatctttttcaatttatctcgacccggagcacggagtaattggtctagcgtcatagaatcgagtggatttgcatcatcattccgtgtaggcatcgccaatggttccgtctccggaacttccgtgtcctccatgggaaaatcatccggtggttgggtttcggaaccaagattcaaatccggagcaaacccacgttcattacaatacgccatatatccactccacgatccattatccatctccttaatcaaataaaaaatttataattagtcttttgaattttataaacaaaattatgaagaaaataaaacttaacatcttaccttaagatgtgagaagtgtgagaagatgtgagatgtaagatgtgagaagtgtgagaacttaatcacgtttgaagtgagaagtgtgagaagtgtgagaaatctgtgagccaatttccgacgaagtttccgacgaaatttttaaatttcgtcgaaaaattcgtcggaaattaaatcttgcgggaacattttccgacaaatgttccgacaaatttttaaatttcgtcggaaaattcgtcggaaattggttacattaacttctctaacgcccgggaaaagtaaacggcaataaatttaagacccaatctccgacggaatttccgacgaccatatttgtcggaaattggacattaaatctcccgagtctcgtaaatgttcccgcttcagtatttctgaaagaaaagtaaaaaaaataaattaattcaatatagcctaattccgacgattttccgatggagaaaataatgtcgtcggaaaattcgtcggaaccagggtatattaatttaaataattttaattattttgtgtcaagtatttctttaattaaatataccctgttttgtatcaagatatatttaagcggtacaaatttaatctcaaacgtttcatacgacagttccgatgaaagtatgaataaaataaaatattagaatggtttaattattataaaatagaaacagatttttttaacaaataaattataatgcatataatatgataaatttaaaagcatttaaacagattttataaaatatatatataaaactaaagacgatatatttgatttactcagaatcggaagaataatctgaactagcagaatcattttgatcttcaaactcttctccatcctcttcgtcttccgcattttcccatatctgttcgagttctatgttctcaatatcaacgaggggaatgtcaccgacagattgatctacttgcgtaatttcgtttactgcaatttgttgtagcggttccttttctttcaccccatcaactctgcttcttggatttatttgatgagccgtaatccatggatattgtcgaacacctacttgtggatatggtatgtagcaaacctgtgctgcctgagatgcaagtataaacggatcgtactttcttaactgcttagtcgagttgatctctgtgacaccatactttgtaagtctaacacctcttccaactctaggatcataccagtcacacttgaagagtatgaattttgtttcttacttctcgaatggtatgacatcgtcacaattccggaggatgtaagtatgaatgtgattaaattcttgatctgtaaaccatacttcttttttcttcccactcagtctcccgatttgagaaaagatatctgggacagatgtatggtaaaaaggccgcacacccccatcatcgtacctacctggttttcttgcttttgtttggacatttggagcaaaatagtaggccgaaaaatgagaagtctcctcgtttatgctttgagctactattgatccctcaactttgctaagatttttaacttttttcttcaaatggaacataaaacgctcaaaaggatacatccaccggtactgaactggaccgcctagtgctgcttcacgaggtagatggataggcaagtgctccatgacatcaaagaatgatgggggaaataatttctccaaattgcaaatgataatcgggatattatcttcaagtgtatgtagtccttcgactgttagagatcttgaacacaaatctctaaaaaatgcacctatccctgcaatttaattaataactgtaaacaaaaaaagaatatatacataaaaaataacatattaaaataattgaaagataagttgtttgtacctgcaattgcttcatggacaacatttggtaggagttgtgtaaacgcaaatggtagtaaacgctgcatgaagacgtgacagtcatgacttttcatcccagctaatctaccactgtgatcatcaacacaatatgatagatttgatgcatagccatcaggaaatttaacatcatcaattatccactgaaaaaacttggtcttcttgcttgcatctaatctccatataggaataggacctactccgtctgcaagcaaatggagatcctcgcgcgcacatatatcgggtaaatccattctggatttgatattatctttagtcttacccgcgacatttaaaatggtgttaattatattgtcaaagaaattcttctcaatatgcataacgtcaagacagtggcggagtagatgatttgtccagtacggtaactcccagaagatactttttttatgccaattatgatgttctccatatccatcaattcggacatggccattaccgcctaccgatgatgtacagtcaacatcaaaatcacgaaattaattcaatatataatcaccatcatactcaggtggcggtggatcacggatactcttgttcttgcggaacaacgtcttactacgacgatatggatgatttcgtcttagaaaacgacgatgacaatcaaaccaacttgatttccggccatgtcttagttggaaggcatctgtattatcttgacaatatggacacgacagtcttccatgagttgtctaacccgataacatgccatatgcgggaaagtcactaatagtccacatcaatacagcacgcatgttaaaatttgtctttgtggagacatcatatacccaaaccccttggtaccataacatttttaactcttctataagcggctgtaggaacacatcaagtgaacgacgagggtggtttggaccaggaatcaaaatggttaagaaaagaaattctcttttcatgcaaagggaaggtgggagattgtaaggggtgactattactggccacaaagaatattttctacctgactttccaaatggattgaatccatccgtgcataaaccaagatagacattccttggttcattagcaaagactggatatgtagaacaaaaatgtttccaggccgatgcatccgatggatgtgaaatctccccggtgaattcatgttcagcgtgccatcgcataccctccgctgtccgatctgaccgatacaacctcttcaacctatcagccaagggcaaataccacatacgcttatatggtattttgtttcgcccactagtaacctgaaacctttcagcaccacagaaacgacattgagacatatttacattatctccccaaaaaatcatacaattttctctacacacgtcaatcatttggaatggtaaacctagcccagataccaatttttggattgcgttgtatgaaactggcgataaattatcttccggtagataatcgtggataaaatcagcccacgcatcaacgcaatcttcacttaaattgtagtctgttttgatgttcatcatacgtgttgcggcggataaaggagaatgaccctctctgcatcctgcatatatcggatgatttgcagcatctaacatatcgaaaaatccctgtgtttctaagttgggttcctccgcaacattagtattttctacgttatcatgaaattcaccactaccaattacattatcttcttcctggtgaatatgctaatcgctaattataacgttttcatctcttctttcacgactactactaggacccgatctaaaatcctccccgtgagaaaaccatatataatatcctggtgtaaaacctccccaatataaatgattccaaacaatgtcttttgcaagaaaatgatcattacaacatttgacacaaggacatgccataataccttcgatacgcgtcatttcttgattagatgcaaactgcatgaattccattaaaccttccttgtactcctgcctcatagctccggtctcatcatctaatcgattatacatccactctctaattttataaatattatgagaagacatttttttttccaagattttcttgtgtttctgtttttttttttcaatttttttcttgtgtctatgattctttcgttgtctagtatatatataaaacttttccgactaacattttgtcggaaattcgtcggaaattctaaagtggttacctttaatatttccgacgaacttccgacaaaatgtcgtcggaaaggtttgtcggaaattcgtcggaaaatctaaagtggttacctttaaaatttccgacgaatttccgacaaaaatgtcgtcggaaaattgtcgattacgtcggaacatgtaaactggttactttaaatatttccgacgaatttccgacagatcttcccgacgacattttgtcgcagtttccgatgacattggattgtcagaattttccatgttccgacaacttttccgactaattttttcgatcaagttgtcgggattacgtcggaacatgtgcagtgaataatcacgtgtttacctcgttgtttccgacaaattttccgacaagtttccgagcagtttccgatgacattggattgtcggaattttccatggtttccgacaaatatttccgacgaatttttaatcgtcggaaaagtttttatgtttccaacaaatttccgacgaaatattattttcttggaagtttgtcggaaattccccggaaatccgtcggaataattccgactaaatatttcgtcggaaatgttcgtcggaaattgctatgttttcttgtagtggttatctttctcgggatcgggaaactcattgtgggtttggtgtttggaaactcttttgtaaggattctgagccagtttccgattggaattgttggggtcggattccatcctttggcaccgagccagacttagaacacctcgggagttttacagagatcacctcgggatatcgcatcatccaccccgggttatccacccaatcgcctcggagtgcccgagcccatcgcctcgcgggtacccggacacgacattggggatacccgagcccaatcgcctcggagtgcccgaacccatcgcctcgggggtacccggacacgacattagggatacccgagcccaatcgcctcggagtgcccgagcccatcgcctcggggtactcgaacaagacagctcggggtacccgagctagtctctcctatatacccgagccgattgcacaagttctccgaggcgaagttttcaccatcacccgaggcaaagacttggtaaatattcatcttcaaagtatcatttccaagcaaagcgtcatttccgatagacccggaaatgataggggagaatctcgaaagatcaactcaaatcaggaaaccttccgaaaacccccaaaaaataaggaaactatcctaatccgcgatattctgagccgactccaagataaatggaaatcttccgagaatatcgctggagaggcggtttatcacccctatataaagagattcaaggctctcgcagaaggcaagcaatatcgctctagaatttacactacgcaaagctttcacagcacaaacacctttttcttttacgatcaaactcttgtacgatcaaagtcatctttttcttaataatatcaagaacaccatctttggtatcaattgattctgtcgttctttgagaattctcgcaaatcgtatccctaaattgaaaccctagacaaatcttgattgtgttagtttcgacttccacagtttggcgccgtctgtggggatactttagaattctcttaccctaagacgcagaactcgattaccgaaaaggacgatgaacgaagacggtcgtcagacaccaccagctggaggagggaccccgaaccctccgaaccctcagaatcctcaagccgatccgacgatcatagcgactctagccgaactgaaagacctgatggttaaattccagaagaaagctgacgaccaagagaaagctaacaaaaccttggcgcagcgagtcgacaaaatcgcaacacgtgggcaacaaaaaaccacgcgtttccagactcggccgccacgagctcggagggacttgcctggcatcaacccaacaagactcacgtttgcgacaccaaccgacaacaccagagtcgcaacccgagccgaccctgccagacgcgagaaccaagatgatcccaccgagccagacgcagtggacgtgacggacgagccagatgatttacaagacgagcgcacccgagccggagctaactccgccgtgcgaacggaccttactgatgacgaagaaactgaggaaaacataaggtgggccgaagaatccgaaagagaagacgagctaagcaagatccgagcctccctagccaaggcggaagctgatatgaagctcgtcaaaacccagatatatagcgtttcatcctccgcaccgaacatcgaccgaattttggaagaatctcggaatatgcctttcaccaaaagaatttccgaaacgacgatgtccaatctgggaaagttcaaaatcgactcttacaacggatcaaccgacccgaagtgccacattaaatcgttcgtgatatctgtggcccgagccaggttcaagcccggggaaaaggatgcaggtctatgcttactgttcgtggaacacctcaaaggacccgcattagagtggttttcaagattggaatgaaactcgattgacagtttcgacgagctgtcgacactgttcctcaagcaatactccgtgctcatcgactccggaacctccgacacggatctgtggtccctgtctcaacagcccaccgagccgttaagagatttcctcacaaccttcaaatcgacgctagccaaggtcaaaggaattacagatgtagccgctctttcggctttaaagaaagctctctggtacaagtcagaattcaggaaagagttgaacctgtctaaaccgacaacaattcgcgacgcgctgcatcgagcctcggatttcgtcgcccacgaagaagagatggcgctgctagcaaagaggcatgagccaacgaaacaggcgccccgagccgagaaaaccgagaaagcccaagcgacacctccggtccagaagaagacacgtgagagcggtacgtatacgcatcacgaagggcacaatttctcaggataccataactaccagattgacacgccccgaggccgtggccgcggtagaggccgaggccgtgggcgaggaagagagtccttcacctggacaagggatcagccaccgagcaatgatcaagaatattgcgaacaccacaaaattttcggccaccatacctcgagatggcgaagcctcggagctaagttagcaaccaaattcctagctggagagctcgggacgaatgtcactcttaaggatctcgagccagagccagagcccgagcagaccaacccgggaagagaccccgaaccaaggaaccaggagtctcagaaaagaacccgggggtctgaagatgaagaccgagatggtacgcggcagaaggttcttaccataatgggtggatcgccatactgtcctgacaccgtagcggcaatcaaagcttatcaacgccgagccgagacgcctagcaactggacaagatgcttcgatcgacctaacgacgtgatcacattcgaagaaagcgagacaaacgggctcgacatgcctcataacgatccaatcgtcgtcacattaacgataggagaccatgatatttaccgagtattaattgacaccggcagcaccatcgacgtaatctttcgcgaaacgctccgacaaatgaacatcgacatgtcacaggtaactccgacctcgaggccagtccttgggttttcaggagaaactttaatgacgcttggaaccatccaattaccagtccgagccggcggggtaacaaagatagtcaacttctcggtcaccgaccaacctaccatctacaacgtcataatggggacgccatggctaaatctaatgcgagctgtcgcatcaacgtatcatctctgtgtcaaattcccgacccccaatggcgtgaaaacgatctggggcagtcagaaaaattctcggatgtgtttcatggcagcacacaaactccgaaaccctgtcactgaagcgaaggctgaaaccgatcacaagaaatcaaaacttggccggagtgaagagaaggctatatctaaacagttatagcaattacagattgaggaggcgcgcgaggagaagacgaacagcccgaacgatgcgtggaaattggcagcgacttaaccgaggaaatcaagaccgagctcatctcattcctcaaagagaacatcaacaccttcgcctggtcagctgaagatctacctggggtaagcatcgacgtaatctgccacgagctgaatgttgacccatctttcaagcccatcaagcagaagcgaagaaaattgggtcgggatcgtgcagatgccgtgaacgccgaagtagaaaagctcctgaagatcggctcgatctccgaagcaagatatccggactggttagcaaatcctgtcgtggttaaaaagaagaacgacaagtggagagtctgcgtcgatttcaccgatctgaacaaagcttgccctaaagacagttttccactcccacatattgatcgcttagtggaggcaaccgcgggaaataagttgctatcattcatggatgctttcgcaggatacaatcatattctcatgcaccccgacgatcgcgagaagacagcattcatcacagaccgaggtatctactgttacaaagtcatgcccttcggactcaagaatgctggcgcaacgtatcaacggctcgtcaacaggatgttctcggagcagctcgggaagacgatggaagtttatattgacgacatgttagtcaaatcccttgaagaaagcgatcacatagcccatctacgcgactgttttcgctagctcaacaagcataacatgaagatcaacccggcaaaatgtcatttcgcggtaaagtcgggagaattcttgggatatctcgtaactcaccgaggcatcgaggcaaacccgaagcaaatcgaagctctactgaatatgccctcaccacagaacaagcacgaagtccaacgtctcaccgggagagtcgcagccttgaaccgattcatctcgcggtccactgacaaatgcctggctttctacgatactctgcgcgggaacaagaaattcgaatggaccgatcgctgcgaagaagctttccaggaactgaagaagtatttggctaatccaccggtgttggcgaaaccagtcccgggcgagccattatttctgtacatcgcagtctctgatacggcgataagtggagtcatagtcagggaagacagaggagagcagaagccgatattttatgtctcgcaaactttcaccgacgcggaaacgcgctacccgcaaactgaaaagctcgccctcgccgtagtaatgtcatctcggaagctacggccatacttccagtctcactcaattgtcgtcatggcgcccgtatcactccgaactatcctgcatagtccgagccaatcgggacgcctggccaagtgggcagtagaactcagcgagtatgacatcgaatacaggaaaaaaacatgcgcgaaatctcaagtcctggccgattttatcatcgagctaccaacagagaacgcccaagaagagtcacccaacgctgtttggatcctccatgtcgacggctcatcttcaaaacaaggctctggcgtcggaatccgcctagcatcgccagagggtgaaattcttgaacaatcctttcggctaaatttcgacgcgactaacaacgtggctgagtatgaagcgttgatagcaggacttaagctggctcggggacttaagatcaacaagctgcgagccttttgcgactcccagctcgtggctaatcaattcaatggagaatacgcggctcgcgacgaacgaatggaagcgtatcttgctctcacgcaagacttggcgaaacagttcggagagttcgagctaaccagaatcccacgaggtgagaacacatcggccaatgccttagcagctctagcttcaacctccgacccaaatctgaagagaatcatactggttgagttcatcgaaaaaccgagcatcgaagataatagcaaggaccaagttctaacggctcgggagacagtagaaccggaagaaatggacgtcgaactgctaaaccagcaaactacggacgcaactgagcccgaatacggaagcgacgccaaatggatcggagccatccgaagctacatagccgatggagaagttcctactgaaaaatgggcagctcggaagcttaaggcaaaagcggctcggtatactctgatcgacggagaactctttaaatagcgattttccggtcccctccttatctgtgtcgaaggaaatgaagctcggagggtcatggaagaaatacacggcggatcttgcggaaaccattctggcgggagagccatagctataaagatcaaacgccacagatatttttggccgacaatggtcaaagactgcgagaagttttctcaacggtgtgacaaatgccagaggcacgcaccaaccattcatcaacccgccgagctcctctcttccatcacttcgccttatccgttcatgcgatggtccatggacatcattggacctctatacaattccaagcagaagaaactcgtccttgtactgacagactacttctccaaatggatcgaggcagactcctacgccagcatcaaagacgcgcaggtcgagagcttcgtctggaagaacatcatatgccgccacgggataccttacgagatcattacagataacggatcgcagtttatttcggctcggttcgaaggattctgcgagaaatggggaattcgcctcagcaagtctacgcctcggtaccctcagggaaacggtcaagccgaagcggcaaataagacgattctcgacggaataaaaaagcgcctcgacgcgaagaaaggccgctgggccgacgaattggaaggagtactatggtcgcacagaaccacgctgcggcgggccacgggagaaacgcctttcgcccttgtctacggcacggagtgtgtgattcccaccgaagccgagatcccaggactaagaagacgttttctccccgagcaggaaaattccaacactcagatgatgctggacgagctggacttaatcgacgaaagaagagatatggctttaatccgtatgcagaactatcagaatgcaacggctcggtactacaattctcacgttaagcatcgccgtttccacgaaggagatctcgtactgcgcaaagttttccagaataccgccgagcagaacgcaggaaagctcggcgcgaattgggagggaccttacacgatcacaaaggtaatccgtcccggcgtctacgaactcatcaacatgaatggcaaagcggtacctagatcctggaacgcaatgcatctaaggaaatattaccgctaaaaacctaaggtacgcatgtactcgaactacggggtggcttgatccctgaaaagggtacgtaggcagctcgtcctcggacgagttcagctaccccccctaattaaaaaaggggggagtgggtccgtatacatatatactcccactaaatttttcaaattctctaagtttttacccttcggattttcaattttatccacctcgacatctatcccaaaattcatctcgggaacctttacggtctccttatcgacccacaacgccaacagttcgttcggacgatggccatgtccacgaacagagagctcatttcaccgcttcggttacagcgcgctatataagcattcaagacaattcggtgggagatatcttgccataaagaaatttgtcttcagaaaacccagttaacttcgacactggtaccccagttcgcatctaagcactggaaatcgactatatcagctcgggtcgcaaccgataaagattagtctcacatgaccgaaacccaataacattaacattggcgtatatttcggctcggaagttaaaacgtttgaatttaacttctcaacgagcaaatcataaacctagttaacttgacactggtaaacgatcttttttgtttttggctcggaagttaaaattattaggcaaaacttttaacttctcaacgagcaaatcataaacccagttaacttaacactggtaaactatctttttcgtttttggctcggaagttaaaattattaggcgaaacttttaacttctcaacaagcaagtcataaacccagttatttgacaatggtatcggattcagctcgaaatattttaaaagtactttaacataatattcagtggataaagccgtccaggcatgtcttacaaaaaaaaaaaagggagcaaaagaaaggataaaaagacatctcgagatcagatcgaatcttggttaaccggcgaaacttgagctgcctcggaatctcggttagaacccgactggtcggtaacacctactgcggccgcggtgccttcgatcgatcggttcccaaagctatcatcgacagaatccggagaaaccggtggaagcttcaggtcctctcgcagctcggttccgagacggacgtactcttcctcggcatccccatattcagccgtccattgaaggacctctgccttctcatcctcgacctttttcccttcctccagcttggctatcagctcggcatttgcctgcgcttgcaccaagtacatatagcgcgcggataccttcccgtactggtccatcttcgcctcgatagccctgaccttctcggcaaactccctcttggctgccttcctttccctgatgatctccttctcccggagaaccttctcctcggtaaataaccgatgtgggcgagcgatcttggcctcgagctttctccgagttcgtaggctatcctccgaagccttcaaccgctccaccttctcggccttggccgatgcctcggcctcctgtttagccgtaatcgcctcagaaatcctagcctcaacctcggctcgcgagatctccgacttttcacgagcaagctcggatttccgagctccagaatcgtaggctcgaaccatggaattcatcgagttaaaggcctgaaatcgaacgggaatcatcagcaaacaagtatggaaacgatagaaaaacacgtaaggaatgaatcgataccttcagaaatccagcagcggtttcacggtagttttgtgcctccagcaaggcctcgggagcggaaagcggcggacctgaacaagaagcgataagattagccgaagctatcttatccttgtagatgggagcctcactacggctcctcttctcctttctgcgtcctcccgagctatcacctcggggcctcttcaatttcgccttagccttcgcctcggcactcagagctacgaccgctaaagcccctacctcgggaacttctacatccggccgaacgtcactggaggcctcgggtctggatgaatctgcagcgacccgagcctcctcagtcgcctcggtaccatcggcaacctctggatcattgttaacctcaggcggagttggcggtccgaaagtcgtctctaaaaccctttctttcggcagctttcttcgccctcaaagactgcgcggctccttgcatttcaatgaggtgatctagacgatggtcggatgattccgaagaagactggcagggagctccgtgcagcaaacgcaaggctctctcaattctttcctgggagaagtgtttcgtccaatcgcacttccgagctataagttcgtcgtggagatctagaaagccttcgggaacgtctacgagaaatgacggattccgatctgcatgaacaagaaaaacggtcagtgaaaaggttaaagcaaaacaaaacagcaaatacggcttcgggcgtagtaccaatttttcgccactttccaacaactttccctaagtagtcctcgtggacactatactcattcaaggctacgtaaaagaagttatcggtgtacttctcatccttgctcgggaaaccaccgataaccctcctatttggcctcggagatatgtaaaatctctcaacagggcctggtatgcgccggatctctaggagattcctcaagtggctgagaccgacaatattgacagtctcaatacttcggactaaaatccccactagatgccgcaagcctcggtcgttatctgggatagagcaatcttgtacgaccacagaaacgccaaaatcggcctcgggattggaagccaaaggtagcaatggtagaagaacccctcgtaaagggtgaaaaacccctcaggcggatcatctgctcgctcattcggagttggaagtcttagctcgattccctcgctaaaaccgaaccgggccttgagatcccgaagggagtcctccgtgcataaggtggaacccgggggatcgggtttcctagctttcttggctcgtcttctcttctgttgacccttggctgcttgaactttagcttgaagcaacctggccgcctcgtcagagtcataatgaacctcctcggccttaataggaagtagagacgcctcgggggcattttgccagcatgagactccagcttcaccaactgtcggtggatgtatccccctcctattcaaaatcgcttcgggatcatcaggcaaatcctgatcccgagccacatctgcaatcgcgtcttcccgagcgatgaaacggctcgggtcttcttcctgtgaagccgactctgcatcactaccacggtacaactcgatctgacggtccgtggtatccgcctcggggtcgctcgaagaactccagaccatctttctcttgtagacagggagatgagtgttgcctcggggcgaatcactggaatcagagagagacattttttggctcgggagattgaagaagttgatcagaggaacaaagcttgacagatcggagaaatcaacctagatctaatgacggtggcgctacgacggaagtataacggaaaaagtacaaaatgcaagaactcaagatcagagagagaagagaacgaaccttgaaaattttcctttgcagttgcgaaatgaaaaaatgagtcggagacttaacatttatagagatttagggcgcgtcgggtacgaacgagccaaataaaacacatcgtatccgcgtctaaggcgcgtcgggcacgcacgaattgagtaggatacttcgcatccgcacgaatctcgggaatcagcgaaaggacctttccacttctcgagaaggaatcccaaccgtcacacgccaagagaagatgaaacgacagaggaattcgaatcgccaaaaactttaaagggaccgaactgtccaaagtaaacggctcggcctaattgtcataaagctcgtcacgcttggttctccaaactaacgagctggggggctaactgttggggtcggattccatcctttggcaccgagccagacttagaacacctcaggagttttacagagatcacctcgggatatcgcatcatccaccccgggttatccacccaatcgcctcggagtgcccgagcccatcgcctcgagggtacccggacacgacattggggatacccgagcccaatcgcctcggagtacccgagcccatcgcctcgggggtacccggacacgacattagggatacccaagcccaatcgcctcggagtgcccgagcccatcgcctcggggtactcgaacaagacagctcggggtacccgagctagtctctcctgtatacccgagccgattgcacaagttctccgaggcgaagttttcaccatcacccgaggcaaagacttggtaaatattcatcttcaaagtatcatttccaagcaaagcgtcatttccgaaggatcatttccgatagacccggaaatgataggggagaatctcgaaagatcaactcaaatcaggaaaccttccaaaaacccccaaaaaataaggaaactatcctaatccgcgatattctgagccgactccaagataaatggaaatcttccgagaatatcgctggagaggcggtttatcacccctatataaagagattcaaggctctcgcagaaggcaagcaatatcgctctagaatttacactacgcaaagctttcacagcacaaacacctttttcttttacgatcaaactcttgtacgatcaaagtcatctttttcttaataatatcaagaacaccatctttggtatcaattgattctgtcgttctttgagaattctcgcaaatcgtatccctaaattgaaaccctagacaaatctcgattgtgttagtttcgacttccacaggaattttgggggttctgttgctattcgcagggatcgaactggcaatggcttccaaagacatgaactccaaagaagattccttcatcatgttggtctgcgctgctgtgtccatgactcgctcgagtgccgccttaggatttgggtgtggacttgttctttacttgttactgaagctaagaacgttagactgttcttcggttactctgttttcccggtccattgatgtatcgcaggttgattccgaagccgctcctcgtgatgtctaagtttgatattggtgataagcaagataaccaagtaatatggaccgttaaagttcatttatgaaatgaagccaatgaagcccaaacattagaatattccatatctctatattaattcttgtagaagctatttttttatgtgtttaagaaagtttacattatgtgggtgttagcattatgtttatgttaatgttgacactatatatatgtatcttgtatctatatataacaatatttgaaaagtgtttttgctgacgtgtcagactctcggctcttgttgagcccttaattttgcgtaattacttaaataccctctattaaattaattcgaatattaattaaaattaaaaaaaataactgaccctaaaatataaaaattcaatatattttacatttttaaaaatagtaatattcttaaacacgaaaaaatgaaaaaaataaataaatttggatcaaatgtagtttacatacctttttatgacggtttatcgttcgaccaagaacatccaatgaccaccaagaacttgttatcctaccataaaacatacattcatagcaataacagaaatttggcaatttaatgatagaaaaccaccttttgatatgttgaatcatcatagaaaaccatcatattggccatcctttgtctttaaaccatcatattgatatgatcttgcatcctacaattgcaaccaatcaaacaaactattcttttaaattaccttagataataaagagactaatgagtctcgtgggaaagattttcaggatattcgttttggagtatgcacaaaatcgacgggtatattaatctccaccaatctaatcatggtcgtgagtcacatacaattacgtcggagaaaggattggtcgtgtcttcttcttttctcttccttttccgtgttttcttatcctttttggttctttttgtttttttttcaacaaaagatgtatctcataattaatcgtttaattatatttttgatatattaatgataaatttatgttgtgataattacgagccaattgtttttaaaagtaaaatttacttttctaaaatatatagatattgccgataatatcaaaacaactatcatatattctttaaattcacaaatctgataaaataaaagcaactttcttttatattttataccgataatgatggtgtatctaaaaaaatgtcaaatataattgtaaatctaaaaaaaattatgttattgttccattttttaacaaataaaataaggaatattttttataattaatatccatagtaattattaattgtttttaggaatattaattgttttgataaagatttgatctaacacaatatataaatcttcctttcttgttgttgtaattatcatcaaaaattaaaaaatttagatcgtacaccgcctttcagtttaatataaataccttctctaggtttcactttcaaatcataactaaccccattttttttgctttctatttttttttttgcgttttattttatttggctttacacatatgaattcatggtgtttatgtatggttataggttacggatgcaacgtcgttaaacaattccaggacaattaaattgttgattcaatcgaacatatggtgagtttttcactttagtactttcatgtttaatatttaaattatgcttggatgtattgagaaatctataagctttcccataatattttgcgagcagcttagatttcatattcttcactaaaaaaaaaaaagctttgattttgtatttaccatattcttcactaaaaaaaaagaagctttgattttgtatttacataatttgatatcagtttgattattgcttccatcatgatgcaaattacggcctctcaacaaccctaatagactataatcgttgggaactcttctttttctcttgcttctctctgattatctttcaccaggagtctcaattattattatttctttgtattgatgcgatcagaagttttatctcttttttaaatactgatctctttgtggatttttcatttaggtatgaacatgttcgtttcacggggtgtttcggtgtcttgccttgaatcaaggcgtgtaaaaacgtaaaacttgtttttatctatctatttttattgtcacgtctttatccatctatgtaacgcttaatcatcaattattatattaaacttcaataaaggcaacaacatcttggttggtttgttttatctgattagtgtaccaaattcaattggaactatatcagatccatgaaattattgattattgatacatgcaggttatgtgtgatccttatacaccagctggtgttccaattccaaccaacaagaggcacaacgctgctaaaattttcagacacccatcgttgcctccgaggagcctctatatataacaatatttgagaagtgtttttcctgacgtgtcggactctcggctcttgttgagcccttgattttgcgtaattacttaaataccctctattaaattaattcgaatattaattaaaattaaaaaaataactgaccctaaaatataaaaattcgatatattttacatttttaaaaatagtaatactcttaaacacgaaaaaatgaaaaaaataaataaatttggatcaaatgtagtttacatacctttttatgacggtttatcgttcgaccaagaacatccaatgaccaccaagaacttgttatcctaccataaaacatacattcatagcaataacagaaatttggcaatttaatgatagaaaaccaccttttgatatgttgaatcatcatagaaaaccatcatattggccatcctttgtctttaaaccatcatattgatatgatcttgcatcctacaattgcaaccaatcaaacaaactattcttttaaattaccttagataataaagagactaatgagtctcgtgggaaagattttcaggatattcgttttggagcatgcacaaaatcgatgggtatattaatctccaccaatctaatcatggtcgtgagtcacatacaattacgtcggagaaaggattggtcgtgtcttcttattttctcttccttttccgtgttttttttatcctttttggttctttttatttttttttcaacaaaagatgtgtctaataattaatcgtttaattatatttttgatatattaatgataaatttatgttgtgataattacgagccaattgtttttaaaagtaaaatttacttttctaaaatatatagatattgccgataatatcaaaacaactatcatatattctttaaattcacaaatctgataaaataaaagaaactttcttttatattttataccgataatgatggtgtatctaaaaaaatgtcaaatataattgtaaatctaaaaaaaattatgttattgttccattttttaaccaataaaataaggaatatttttttataattaatatccatagtaattattaattgtttttaggaatattaattgttttgataaagatttgatctaacacaatatataaatcttcctttcttgttgttgtaattatcttcaaaaattaaaaaatttagatcgtacaccgcctttcagtttaatataaatactttctctaggtttcactttcaaatcataactaaccccattttttttgctttctatttttttttttttgcgttttattttatttggctttacacatatgaattcatggtgtttatgtatggtttataggttacggatgcaacgtcgttaaacaattccatgacaattaaattgctgattcaatcgaacatatggtgagtttttcactttagtactttcatgtttaatatttaaattatgcttggatgtattgagaaatctataagctttcccataatattttgcgagcagcttagatttcatattcttcactaaaaaaaaattaagctttgattttgtatttaccatattcttcactaaaaaaaaaagaagctttgattttgtatttacataatttgatatcagtttgattattgcttccatcatgatgcaaattacggcctctcaacaaccctaatagactataatcgttgggaactcttctttttctcttgattctctctgattatctttcaccaggagtctcaattattattatttctttgtattgatgcgatcagaagttttatctcttttttaaatactgatctctttgtggatttttcatttaggtatgaacatgttcgtttcacggggtgtttcggtgtcttgccttgaatcaaggcgtgtaaaaacgtaaagcttgtttttatctatctatttttattgtcacgtctttatccatctatgtaacgcttaatcatcaattattatattaaacttcaataaaggcaacaacatcttggttggtttgttttatctgattagtgtaccaaattcaattggaactatatcagatccatgaaattattgattattgatacatgcaggttatgtgtgatccttatacaccagctggtgttccaattccaaccaacaagaggcacaacgctgctaaaattttcagacacccatcattgcctccgaggagccttggtatgctcatcttcttcttttttggctatacatattattttcgttactataaattctaatagtgtttgtttttttaaacgattgtatgttttggatgaatgaaagcaaccacgatgcatgaagaagattcaagtgatgtttcaattgatcttttatctttaatttatcgattttctaattttacaaaaatgttctcactgagtagaatatacttttgagttttgagttaaatctttcacagtctgttgtggattagcaacgtttcaagccatattaactattgtgttgtggcaattcgaaagattcatataaattggactattgctacaaaaaaaacagaatcacaggttcaattctatcaaaggagataaagcctcttatctctactgtctttgagggtaaagatgctaatgtcatcgcccacggagcaagaaattgcggaaaaacacatctcatacatgtattgaaagcaatcccattaaggtattgactatcagacatgatactatagatgaaaaatgctaattattgtatcgtatggtttgtagggaaatgatagggagcttggtttaaccgttcttacaatgtctgagatgctatccatggctgtatcagtttacgaggtttctcaggaaaccgtgtatgaccttttagaccaagagaagcgagtggttgctgtactggaaggtgcacaagggaaaattcaactaaagggacttcctcaggcaagtcatttattgttcttgatcattaagtcttggaacgtcatatgtattttgcagattagcatcattaatatttcaatgtttctgctttcaggtacctatgaagtcactctcagaattccataaaggtgtgatgatacatgttaccactggcaacgccaatccaggctcccttgggaggaagaactttcttgatatggcaggttgagtattttaatatcacattttaattgtcttttctatgtgatgatcttatgtcagcatgtgatttgtgttgtctttctctgataggatatgaggattctgatagaagcagttaaaagactaattactatttactaaggtttcaatttaaccaaggtttattatgagggtaaaccatagttggtttagcttttcttgtttggtctatgtctatatatatataatgtgtgagagagttgtgagggtcttttatcgagtaattggagaaatcttagggggagtgggaggagctccattgtcaaattcctcgagtccttgtaattctcgtcttgataatctatgaaatacccttttctataaactactcgtatcagattccaggaaacaaaacagtgctctagctcctctagagattgccagagttaatactttgatatatgctttacagaatgtcatgtatgctctcaacggaaatgaatcccatgtgccatatcgggagagcaaactcactcgaatgctgaaagattgtttaaaaggatgcaacagacgttgctgatcacatgcttgatatacttttcttgctgttgagttcgttttaagtttatgattcactgaatgtaactgcaggcgatgctaacccttttgttttttttttagcctcgagaatatagccaaaactccttttacatgttaaacttagcatcacagatctgtctaggtagtaaccgagccatgactaatcctactaagaagaagatcaacggtcttgaaagatctatttcattatgctctgctgctcaaaggaaacagacacctttgactgtgtctgctacttctagaaaacagacagtgctaagggaaaatgtgacagagagaaaagactaaaatcaacactgctgcttctgcaattaaagcaaggtaaatctttcagaaacaactttgtatcaactctaagcctcaatatccatgatatacctgcatctgctctgttgttcagttttagaacatcaaataatgatgattttttttctcaatgtttgaaggaaactgttccgggaagcaaacgattcggtgaaatgtaaaaatagcatgttggaaaatttaattaatacgtcatgaagttgaacaatctagattcttcctttacaaagaggtaaaacagagggtataaaaacagagactaagagaccaagagtcttaattaaggaggtttggtataccacttaaccctaatcaatccactacttacttgataaagacatattctcatcatgtatatttgattagattagctaggctcgtaatatgggacaaaaccccgaagatgagcaagaaatgctttgaaagattttatcgtagcatgagtgtcatatctacacccttcagtgctcccttgtaaaatcagagtatctgagtatagatacttaataggtttaagtgttcttcgatcttggacgatatgttccaacttatactgatacagaggttatacagatttttggtttctctaataaaataaattatttgctgaaagattgctatacctttaacaattttattttgtttgttagggtcacgacatacatactataattgatagagagtattatcgtcatcgtggattcaggtttttccaaggacgatggatacatggccggccctatagacatcaacaagaaacttttgctgtagtccaaattttgtttctgaaattcttcaacaaaaattatttacgaaacggccctaattttatttattttactataattggccctaaattttaaaacctttcaaaataaccaaaattttttttttggagtatttggcccttcaaatctcagggcaggccctggatggataacacttagagattttgattcatgttatcggttcgcttagtcctactttttatgattttaaaattcattggaatttatcaatctttgtttcacatataccttccttgggtgcgattgattactgcgcattcgcatcttttaggaaaattgatacttagttttgagtatgtttatttccctggtcccataatatcttttgtttggatattttattctttgcattgttatggtttgatctattaatttaaataattatatttaattggttgggtcgtgagtgttagcaatattgaagacggaaaaccaataataaagtgtgggatcaagtttatgtggaattagaagatgaattgtaagttattaatttaatcaaaattagatttgttatagtttaatttgggtagtatgctaaaaacttaattttataataaatttacgtctataatgtcgactacatggtggataatgttgtaaatttttgagagaacggagtaaacaatgcgataatatcaccatatttatcatgagattcactagaatagaagtcactggaggtattcgaatattgttgtttttcatgtatatataatttctgaatatttattagtcgatcacgtttctatgatattgtttcttatggttttggctactattgtttgcaatggcacccgaatgatgctaaaaaatatgtgtgctgaaagttgcaggaatgcggagttgttttgtgctaaggatcacaaaaatttttattagttactaagcttatctatttttttgtttccatttttccgaattattttttcctaaacatgtaaatatgatctaaaatgaagtttgaggctttacaaaagataaataattacacaaaagcaaccttggcaaaaaaagagataaaaacaagactacagtagagtaaagaaagatttggaaatagattacgaatccaaataagcataagctttgttcatctcgaaatgatgatatttcgtagctccactccaccatcttgaaaatgatttgagcagcaagccgcaaggagttatggagaatgttattacgatgtcgccagaacttatagaccaccacttgagatgctacttttctaagaaaagaaggcacatgactggaagagcgtcatgtccaagaaaatagctcaatccaagagcaaaacaacctttgttgcggaaaaatcctagagaaaactaaattccacacctggaaagagctcacaaaggagcagaaggtgatcatgagacttcgtaacaaaaatgcaaagacgacactcatcagattgaagagcgttaggacaaagaaagtaactcagcctaagagcaaaacaacttttgtcgagaacaaatcctagagaaaactaaattccacacctgggaagagctcacagaggagcatgaggtgataccgagactctgttgcaaaagtgtaaagacaacactcatcagattgaatttgttcccaagaagccagtctttgatgagaaggcaattctttaaaagtgtaaggagaggaagagcgttgggtccaataaagtagctcagcccaagagtctaacaacctttgttgaggataaggcctagagaaaatcaaatttcccacctcagaaaagctcacagaggagcaggatgtgatcctcagactccgtagcaaaagtgcatagacaacactcatcggattgaatttttccctaggaaaccagtctttaacgactggagaggacgattagagtgagatttatttaagtgtctcaaccgaaaaagagcgtcaggtgccaaaaagtagctcaacacaagagcaaaacaacctttgtggaggataaatcctagagaaaaccatattccacaccttgaaaaagctcacagaggaacacgaggtgatcccgagactccgttgcaaaagtgcaaatacaacacttgcccccaagaagccagtctttgatgagtgggcaattatttaagtgactctcgacggttcaagaaagtagctcaagccaagagcaaaacaacctttgtcgaggacaaagcctagagaaaactaaattacacacctgggaagagctcacagaggagcaagaggtgatctcgagactctgttgcaaaagtacaaagacaacactcatcggattgaatttatctccaagaagccagtcttttacgagtcggcaattatttaaaagtgtaaggagaggaagagcgttgggtccaataaagtagctcagcccaagagtaaaacaaccgttgttaaggataaggcctagagaaaatcaaatttcccacctcgaaagagctcacagaggagcatgaggtgatcctgagactccgttgcaaaagtacgtagacaacactcctcgaattgaatttgtccccaggaaaccagtctttaacgactggagaggacgattagagtgagatttatttaagtgtctcaaccgaaaaagagcgtcaggtgccaaaaagtagctcaacacaagagcaaaacaacctttgtggaggataaatcctagagaaaaccaaattccacaccttgaaaaatctcacagaagaacacgaggtgatcccgagactccgttgcaaaagtgaaaatacagcacttggccccaagaagccagtctttgatgagtgggaaattatttaagtgactctcgacggtccatgaaagtagctcaggccaagagcaaaacaacctttatcgaggaaaaaccctatagaaaactaaatttcacacctgggaagagctcacagaggagcaagaggtgatctcgggactccgttacaaaagtacaaagacaacactcatcggattaaatttgtccctaagaagccagtcttttacgagtcggcaattattatgtgactctagagagaaagagtgccgggtccaagaaagtagcttagtccaggagcacaacaacctttgtcgaggataaagcctagcgaaaactaaattccacacctaggaagagctcacagaggagcatgaggtgatcccgagactccgctgaaaaagtgcaaagacaacactcatttgattgaatttgctcccaagaacccaatctttgacgagttaacaattatttaagtatctcatgggtagaagagcgtcggtccaagaagtatctcagtccaaaatcaaaacaatctttgtcgaggataaatcctagagaaaaccaaattccatacctcgaaagatctcacagaggagcaggaggtcatcccatactctgttacaaaagtacaaaaacaacactcatcagattgaatttgctcccaagaagccagtcattgacgagtgggcaattatttaaaatagtctggagaggaagagcatgatatcaaaattaacgtaagagttttgacatcaatatctttaggataatggaaggagtttccaaatgaacataatctttaaacttcaatgtcttgtaaaaattgaaggattttgtaagttaacataatattgtcgatgtcacattattgtcattgtcacattattaaattcgaagtcaagaactattggtaccttcgaaatttctgttgtttgtagttgtgagcgtctccggtatcgactaccgtggttttatatcaataaatttctcgctgagtggaggcaatgtattgatgacattaccatatgtatattcagatttgcaagaactgaaatgagtgaaagtattttgttttggttttgttatttaacatgtattgttggggtttgagacattgaaactatattcctttgataattaaggtagacgaagaggtactgcttcatacaagtgttcgcagattctattcaatcattcttgtcattatgtaacgaggatgcgagatatcttttccaacaagaagaaaggacaaatgtcagacatccaattttgatcttttgattatctttggttgttgatgagcaaaccaaaactactaaatttatactttctggttctaatgattttagttttctgttttgcattttactatattcataggataataatcactattttctcgcaataatatatcaaacgttatggcgttttaccataattctatattaatgtcgttataaaaattatactcttgacaaaattaaatcaataattgtctaaaacttataaccctaaatgactaattctggttttaatcaacatacaactccgcgccgggcgcggagacctcccctagttctcatatgaaatacaattcaataatatattatatatcataatatttgacatttgacttaccaaaatgacttgatgaagaagtacttacgggtgtgtggcggcttcgagtgcgtcttctgtcttccattccatctacggtcatagggttgatgtcatgtttcattgagatgtgaaaccattaatcaatactagtatttttgacttcacaaggtcatagggttggaatcccttgtgaatgtacaattgactttgacgcctactgaattacatgtttctataaatgcaatgctagagtaatctctaaattcatcatcacctgaccttttgtctatctactccaatggactcacatgaagagcaatgcttatctatcctcgatttctcccacaataaactagtgccaggcccgagtcactggatcacgacaagggacaatgtcagaagagccatggaggagcaaggttggtttttgttgtggcagagttcaatggtgcctcatctgaccttagagacaacttgatggccgacatgaaggagatgtataatctcccataccaaatcaaaatcaagaacgagaaccacaaggcctcccatggctacatgtctatggtcgttgatgattaccggatccatgagagcttgaggatagataatgcaaccgagctctatgcttgcaaagacttctctaaactactctggccacaaggaaacgatcccttctggtaaaaaaaaacacacaaagactttcatttcattcatgtctttgttgacacatctcaggtttgatatatgattttgcagtcaaaccacacataagtatgcaacggcactagcttcctttgattctttatggttcagtgatcatgattgattagaggcttcttgaatgttgtatcgtgtttgcggagagccaaggaagtgatgatgctgttagaaccaaccccatcgaattggatgataatggtcttatattcattctggagattgaagtcttacaatgatgagcaaaacattttgcttcaaggtgtgaaatattttgcaaactctttgtttgtcttcacaatagtatggtaactataatctcttttctttgtttgtatgtggaatgaagtatgtcctcatgagaaatggttttccttcagctctgagcaaaaaccagagatagagaaatacatctcttccataaggtgaatcattttatttctctcttaagctcaaggaatttattaagcataccatgaaactatttagaggttataaaaatgcttgattaatcttgaatcacatctatatatatataacctgcaactaaaccatctatccacagactaacagtataagttattcatcagttaaaattatactttgcatggaactgtattttggttttcttgaacttttgatcaacgttaatttgttcatgggtttgtattttctgcttcgcatctcatttcttcttttgaatatgttttgcggtataagtaattgatgcttcactggaaagtaaatacttttgaatctttcagtgttgcaattaatcaaacttctttgcatagaactagttcatgggttttgtactttagttcatgggttttgcatctcattttttccttctgaatcctatgttttgtaggatgaaacggcttggagcacaaaagaatgcaaatactattattacttagcaatgatgattctctttggccgcgagcacataagaacatgattctgataagcgaagaggaaaacggctgactcaaaactcttcgacatgtgattttgaatcgcattgagtattgctttatcaacaacccaaaaagctctgtttgtatgctaatgttcgttcggattcccttaagtatgaaacgatcttttgatagttt

SEQ ID NO: 5485 - DNA, 1488 bp, Arabidopsis lyrata
  Intron number 4 from transcript 475808 (locus 475808) deri ved from phytozome v7.0 (chr-ID scaffold_2; pos 12154607 t o 12156094 reverse strand)
tcccctccgttgaacagctctcaagtcttacttcggtacgttcttttcactcacactatcaccttccttcgtcgttttttaatggaacaatggttaattcttatcatttgtcttactttagcttaggcatccgaaatcatggttaatatatttctaatatcttaataataaaatattaagaatgaaaagaaatatctaaaaaattaacatcatatttttaattttatgcaaacaaaatattaaaaaataaataatatatattaaatataaattccagttaatctttgattgattgattaggcgttatgtccttctcgaaagttcgattagtgcctaatgaattataaaataatgatttttattcgtgtttaacataaaaccgcagcttttagagtctttcttctttctattttgttttatatctttgtttgtctaatcttgaggtaggtaattttctcgctcgtaaagctagaattcgttatctgtttttttttctttattggttcgcctttaaacctacgcaaataaataagtaaaggttagttgacccaaaaaaatcagaagtcttttgaatatttaaaagcaaacggaaagagaaagatcatatgagtttcacgtttccattacgattttacaaaataaaataatttcttaaaaataaaaatatgagatattaaaagaagtagtataacacttcaaacaattgaaacatatgtgataatgtcttatgcgttgttatgcatatacacatgtctactaaagttttgactttggtcgagaattaggatagaatcacaattatatctttcatttaaaaaaaaagttttttgattgtaacgccaatttttatgggtgcgggtggggtactacgttcattcaacacactacaggcaatgccactaagtcgtagtgcttcttccgtaactaaatttcaattagtacatatctggtcaactttaatatgatatatctacaaaaattgttaatgtattattgatttatttcattaattgttatatatagtttcaagtcagatcattcatttcatgtatgacatacaacaaattgcagatatttattagttattagactaagtgaaattaacattggcattgcttcattttattagatagaccaatagagagactcatgatgaattgcctttccacatttaaattgaactaaggtatattttaataatgagataagtaaaatattccacttgttgaaaagattaacactacaacatgctttgcataaaatactaaaagaaatcattcattaaacgattttgacagattgaaaggcaattcttaaaatcaagtaaagatccttgagaaagagtcataaggcacttcacaagattgttagatatgatatcttaaaagggttttatatattttaatattcaactaacttatctttctctctttatttttctttttttcaacagttaaacaaagtgataaacgagtcactaagacttta

SEQ ID NO: 5486 - DNA, 2968 bp, Arabidopsis lyrata
  Intron number 1 from transcript 481302 (locus 481302) deri ved from phytozome v7.0 (chr-ID scaffold_4; pos 2862462 to 2865429)
taaccgcttggtctcaggggcggacccacgttggtggaaaggggtgcaactgcaccgggtaatatataaatagttttgattttacattaggtatattgaagcaattggcccagtggttaatagatacacccttaaagcatgaggtagtaggttcaattccccacaaatatgtttttttgcactgagtaaaagttttggctgggtccgctactgcttggtctcatactccaccgtcagggttggacgaatttatcatagacgggaacgatgatagcttcacgagtctcggatcttaccgggatccttctcgactaatctttctaaacttccaaaactttgaaccaaactacgtctatcaacttctcaaaagccaactccacgatcatgtcttgtccgaacaaatagcttatcaacggctaagaagtcaaagttctgaattgccacaacaacctatatccatgagagtcaccgtcaaattgacacagaaggtatacgacgttgtgtcttgtagttctgctccgtctacaacagatttgggcaaagaagaagaatcggagacatgtgccatctgtttggagaatctgttgaggggatcaaaggattaccgacaaatgcctaattgttcacattgttttcatgaacaatgtgtcactaagtggttggttcctcaaaataactcttgccctctctgtcgccgacctattaaaggagtggatacagaaggtaggatcgacgatccccatgctttagctattccatgatggtcacggatgatccaaccaccaatacccttagaagtcccaatatcaaaacccgcatcaaaattgcatttgacaaaagaaggaggtggttttgtccaagttgaagtgataggtgtagcatgacttgaactcaatgtctgtgtactcttatttgcaaaattgttgatccacgccataacgtcagcctgggcttgtaaaacaactcttgagggactttctctgaatttgttgaaaactagattgttcctcgccttccatattctccatagaagccaaaagggagcaagcttttgttgttctgtaaaacctgtgttatggtaacaattgacaaggagagagatattttcttcagcgtcattcgtgaactgatgcattgataatagtggtgtgttcgatagtctccagatgatgtttgcatagggacatttaaaaagtacatggcatatggattcctcttctttatgacaacgtgggcaataaggatctatgttcatacctcttttcacaagcctagaacaggtcggtagagcctttgaaacaattctccaaagcatatgtttcatttttggtgtttgagtttccaaattctgtttttgagagaaacagagccatgaggaatagccggtttattttgtgtatcacctggatcatgtgtaagcaaccaatacccggatcgaactgtgtagtttccatcagtgttgtagttccaaatcaacatatctggcagctcatatcttgatagatatattttttcaatatagttttgatccaatggatcaattgttacagaaattttctctttattccagaatcggtatgagccttcattagatattaatgtatgaattgtatcattaatctcaggaagtatagtttgcaaaggacgtggtggatgtgcttcaacaaggttatccttgtcaattctgatatttctcccgtctcctactaagtatcgagttccttttttgaggactgaaattccttcaagtatagtgatgaccaaccataggattgataagaacaagcttttgcatctaatatggagttatctagtatttggccttcattatgctaagaaaagaggaataccatggattgcttggctaataaggcatcattgaatttagcaagatctctgaaccatagactgccctccttttttgagtattgaagtcttttccaagcaatccatggtattcctcttttcttagcattattctcccaccaatagttcataaggacactttctatttctgagatgactcccgccggtaatttgaaacatgacatagcatagaccggcattgccatagcaacagatttgagcattatttcattccccgccggcgataaaaactttgcactccaactagctgttcttttcttgactcgtttcaattatgtaatcaaacatttctctttttttttttcttccaaactgttttggcaatcctaaatactttcctccgccaccatgtttattgattcccaatatcctctttaatctgttttgagtggttccatgaacccctgatccaaaagttatcatcacttatgttttgtctaagcgacgaactaagagcctaattagggtttttcatagtttaggtatctgtttttgttggcaacatgtaatgaagattaatttgatttaatgaacttcagattctctatactcgaatttcacattaacatgatttcatttacaagtttgattttattatgcgacacatatctcatgcaacacacaacacaacactgacttaaaaccaaattttgtttgaaataaaagaagcatatttgaacttttgaaggtggcttagtaatttatccaacaccagacttcagcatgatcactaccaaagtttacttcttattgttatagcaaatattaattacagttttcagaaagattctgttttctttttttttgttcgtggaataattaagctataaaaaccacataataaaccggcaaaaataaaaaaaaaaataaaaaacaaaaaggagaaaaggaaacaagaaccgaaaaatggaaaaagtggagataaaaaggaaattgcataaacgcgttagaagttagaacaaattataatcagacctatgcttataaaaacataacattacactttaattctccacaatttcgtatccaatctcttacgaatcatcttttctctctggttttgtttaatttcactccgaca

SEQ ID NO: 5487 - DNA, 5332 bp, Arabidopsis lyrata
  Intron number 2 from transcript 488773 (locus 488773) deri ved from phytozome v7.0 (chr-ID scaffold_6; pos 7891647 to 7896978)
tggtattggaggtgaaggtgggattctcggtactattaacatatatgtataatggttattgttggagtaaagtttcctttagcttactctaagtgtatataaggaacatgtgtatcaacattctaatcaaggagattaatatcatatttttacactctctctctagttaatatggtatcagagcaaaattgagattttctctctctataacagaaatctcaaagcttcttccgcaatatcatcatcttcttcttcttcttcttcgatttcagctcaaatcaatgaaatcaccatcgttatcatcctaaatcttccatttcttgtttcgtcgagctccaatttcatcaatggagatctcgatttcatcataatcgcaatcgatttcgcgaatcatttttccattcatcacagaagcaattgctctaaatctctttcatctttctgatcgattcgtttatctgattcatcacgaaagatcgtatattcaacacgatttcatttctaacatcaatttttcatcgattcttgaatttgtctaatggcgatatcaggctccgatttggattgctcgcgtccatcgattgatcaatatgagaatcctttctacttgcacagctcagatcatgcgggactgaatcttgtatccgatcgtctcactactggagctgactttcattcttggagaagatctgttcgaatggcactcaatgtgcgcaataaacttggattcattgacggtactatcactaaaccatcatctgatcatcgtgattttggctcatggtcacgttgcaatgacatggttgcaacgtggttgatgaattctgtgtgtaaaaagattggtcaaagcttgttgtttatatctactgcggagggaatctggaataatctcttagctagatttaaacaagatgatgcacctagggtttatgagattgaacagcgtctgagtattattcaacagggtgctatggatgtaagtgcttattatactgaacttgtgacgttatgggaagaatatagaaattatgtagagctacctgtttgcacttgtggtaggtgcgagtgtaatgctgcattgttatgggaaaaactgcagcagaggagccgtgtaaccaaattccttatgggactgaatgagtcatatgagtctacaaggagacacatcttgatgttaaaaccgattccaactattgaggatgcttttaatatggtgactcaggatgaaagacagagaagtattaagccttctacatcagaacctgtagtttttcaaacttcaggaccaaatcaagcatctggatcatccaaccattattctcaagatgtttcttcatatcaaggtcagctggataatacagcttttgctattcagaatggatatcgtcctcgtgcaccacgacctatctgtactcactgtggtcaaactggtcacgttatacaaaaatgctttaagcttcatggatatcctcccggctacattccaggatttaagagcactttctctaactatcaacctcagagatcatctgctccatctaatttccagcctagaggatattctccaaacactgtctctagacctcattcagttgccaatgtgatgactagtcctattccctatactccaccatcagcaatagatgctatgaatttggatattagcaagctgaatggagatcaaattcagacattgattcaacaactctcaagtcatattcaagtttcagagcctttggcaccttccccatccacatcaaaagtcacagaacatggtataatggctgttcaatcatcatcgggtataattccttttccttcttcatctcttcgatatgaaaatgatcaattaacattccaacatcaatgtctctcatctttatactctaatcttcctcatggtagttggattatagatagtggtgctactacacatgtgtgttctgacttagcaatgtttggtgaaactactacagtttctggagtaactgtttcacttcctaatgacactagagtaaatatcacacacacgggcacaatatcactatctcattcactcattcttcatgatgttttacatgttccttcattcaaattcaatttgatttctgtgagtagtcttttaaaaacaaatcattgctctgctcatttttatgttgattcttgtataattcaggagtttattcagggcttgacgattggtagaggcatacttctgcataatctctacatattacaacttgatccaccttctactcatgatgaattctctggatccttgatggctgatggaattctttggcaccaacgccttggacacccatctgctgacaagttacaatgcatttctggtactctttctttgtctaagtctgtttttaaacatccatctcattgttccatctgtcacttagcaaaacaaaaaagattgtcttatgagtctcataatcatttgtcttcacttccatttgatctaattcatttagatgtgtggggtcctttctctatagagtctgtagaaggatataaatactttcttacaatagttgatgattgtacacgtgtaacatgggtttatatgatgaagaataaaagtgaagttacacaacatttcttatcttttattaagcatgttcttacacaatataaagctgtcattaaaatgattagaactgataatgctcttgagcttgcatttacttctattgttaaagaacatggaatgatacatcaattctcttgtgcatacacacctcaacaaaattctgtagtagaacgcaagcatcaacatttactaaatgttgcaagatcattgttgtttcaatcgaatgttcctattgcatattggagtgattgcttgttaactgctgttttccttataaatcgtttaccatctgttttactcaaaaatttatcaccatatgaacttcttacaaaaagaaaacctacttatgattttttaaaatgttttggttgtctctgttatgtttccactttacaaaaagatagaacaaagtttactcctcgttcagaaaaatgtgttttcttaggttactcttctggatataaagggtataaagtacttcatcttgaatctaacattgtttcggtgtctagaaatgttatattccatgaaactattttcccttttcatgataatccagcatcttcaaattctgagatttttagtaacactattttaccattacctattcatcttcataatgatttgcaagataatatgcatgcttcatctagtcaatcatcattgcctaatgatcattcagctgcatcatctacattaccatcatcacttacacactctagtgtcacacctatttcacaagaaacagttacaacagagactgctgttgtttcacttcctgttgctcggccaaaacgcacaggtaaggctcctagctacttaactgactatcactgttctttcacacaaatttcttctccacctaaaaaatctttccctccactcaaagtctttaccacaccatatcccatttcttctgttttatcctactctgccttaaaatccccatatcaggcttttactctttcttactccattgaaacagaacccaaaacctttaaacaagctattgtatctgtgcaatggactaaagcgatggatgtggaacttgaggctatagaattgaataaaacttggagttttgtgtctttgcctccagggaagaatgttgttgggtgtaagtgggtttacacgattaaatacaatcctgatggtactgttgaaaggtacaaggcgcgtttagtagcaaagggattcactcagcaagaaggagtggattattttgacactttctcaccagttgctaaattggccagtgtcaaattaatacttggtttagctgctaagaaggcttggagcttaactcagatggatgttactaacgctttcctgcatagtgagcttgatgaagaaatttatatgagtttgccgcagggttatacaccagtttctggttctcttcctcctaatccagtctgcaagcttcataagtccatctatggattgaaacaggcgtctcgtcaatggtataagtgtctttctaaagcacttttggatgcaggattcgttcaatctcactcagatgaaacactgtttgtcaggctgcaaggtacatcattcattgccattcttgtgtatgttgatgacattctcattgtcagtaatgataatgagcatgttacttcagtcaaagcacatcttgcagatcattttaagataaaagatctaggtcaggctagattctttcttggtcttgagattgctaggaattcagaaggcatctctgtttgtcaaaggaaatattgcctggaccttcttactgatgcaggattattgggctgtaaacctcgttctgtacctatggatccaaaagtttctctaacaacagagactggtacattacttgagaatgcaacatcatacagggaattgataggccgccttctatacctttgtgtaactcggccagacattacctttgcggtacataagctgagtcgttttctctcatgtgctactgatgtgcatatgcatgcagctcagaatgttttgaagtaccttaaaggtaatcctggtcaaggactattctactctgctaaaacagatatttgcctcaatggctttgctgatgctgactggggaacctgtttggattcaagacgctcagtatctggagtttgtatatttcttggaacttctttgatttcatggaagtctaagaaacaagaggtttgcagtggtagtagtacagaggctgagtatcgcagcatggctcaagctacaaaggatcttctctggttcagttacatgttgaaagatttacatattgaggttgaaacaaaggccaagttattctgtgacaataaatctgcaatgcacattgcgaataatccagtcttccatgagagaacaaaacatgttgagattgattgtcatacaactagagatcaagtgaagtttgggttcttacaagtgcatcatgttgatactgagaatcagcttgcggatatactcaccaagccattacatccgggtcctttcaaatccatacttggtcgtcttggtgtttcaagcctcttccttcctcataagtaattcggcttgaggggggctattaacatatatgtataatggttattgttggagtaaagtttcctttagcttactctaagtgtatataaggaacatgtgtatcaacattctaatcaaggagattaatatcatatttttacactctctctctagttaataggtactattcttcctgacgtcggtggttatcttccg

SEQ ID NO: 5488 - DNA, 12076 bp, Arabidopsis lyrata
  Intron number 2 from transcript 494170 (locus 494170) deri ved from phytozome v7.0 (chr-ID scaffold_7; pos 24445875 t o 24457950)
agaaaccacgaaattcacgtaacggaagattattcctcgtttttgacactctccgctataatcatctatttgccttgcggcctaggaagttgcattctttgggtttgcgcaatcacggatgtttcattatgtggagacgcctacctcttcggacgcatcagtcacaacatgggatttattttcttcctagaactcctctattgtatttctccctacttggctctactcattggtctacatgtaggtctaccttgttggctatggtatgtaacttccatgattggaccgtctctatgggaagagatgcaagctctacgaaattggtggaagtttgtgaataaaccacaatcagttggtagcgttcaacgaggctattcaacaaaaaaagtttattgaatttgaaagattttaattgaaaacatatggttttttcttaagtttattatttattgtagaaaataaaaagattgaataaacatttttttttttttagtaagaaaacacatacgaacaattgtgcactagaaattggaattttctaatgggattttttttcctgagataaatattagtttggagctttgttgtcacagtaaaaaagatttcttgaagtttaaattgggaatgaatactagtttaaggatttttttcctaggttgtttaaaataattctgaataattgtgatgacttactttcaaatgaacctcccaaaaaaaaaaaacgatcgtcggaaattataagaccatcaagttctcggaaacattaagctaaagtcatttggttcaagggctcggtgtcgaagcacgctttcacattttggacaactaatctaaaccacctcccagttagatcacgtcttccactgcacaagaagctgaaaatatcattgtgcttattgagaataattttggatctatattttctaaagattacgaagatttatttcctaattccccaattgaccctgcgaatcaaagagagataaaaacaaaactctaaactttataaatttagatcatgaatggctaaaatcttaaacatattaacaaaaccctacaaactgtaaaactctaactcaaaagaaaaaaaaaatatattctcatttgaaatacaataataaattaaataagaaatatttatcataatattaatttaaattatgtgcttaattatgagaatgccttcacaaaaagaaatatgcaaccaacaagactccgaatgttcttgtgatatttaagtgtattgaatgttcgttagaactcatagttagcctaaacatatagttttgatagtatatatatatatatatatatatatatatatactagatcatcacccgtactacagtacgggttaaattttatttataacaaaatttatatattatatattttagaatatagttgtgatatattataatagtaattgaaaaaaatttagatttttgtcagttcccatatataatattagaatgaatatattttctttttttaattatactcaattataggtatattttttaagatatgaaaacggaaaataaaattattttaataaattaatatggtctcaataatgagttaatttatattaacaactacaaaatgagattgcatataattcagttagatcaaaaatcaaaatattataaatgaatcgcttctaaaacgtagattatttttaattaattaagaaagttagatattattttgaattaatttaggaaattcctttttcaatttctaattctttggttgttgaaatagatatttgtttgaggtaactacggaatttaccaattattcgcgtaatcgaatatgttatgaacatatatttagtatataatatactaaattcaacatgtgcgtgaagtctatatttttattttagaatcctaatgaaaatattgcgtgcacaatctattattcgttattttcaatattttgtggtgtcaactttatttaatctatctgatcatataatcttaacatgccgtctattataaggatcataattttatatcatataatatattatatttaatattccacctactataactattttaaataaagggaatattgttgatttgggccttttttggtccaaaaatttgagaaatggaatgaatacccatacttactcatttagatattttgggcttcgtcaaaagaccgttttgcccctgcctattcttctccttcattctctctcgacaccaaccctgcggctcctccgaccaaaatttttgattccgaccacaaccctccctttctcagtcaaatccatcaacaccatattcgtgctccctcaacatcatatcggttactttcaacaccacctcttttgtttccgaacacacaaatccgaaacacaaaacctccgccgctaaaatcttttccgatcccatgaattcaatcaattgcgttttgaataaagaagctaaaccctaggggatactatctagtaaacccaagggttcaaatcgaaacgtaaatcaaataaaaactacttaatctatctttaaatctaaacaaaatttgtcattggatctcatcatctcctcatccgtcactggatctcatcatcatcaccaccattttgtttacagtgtcttcatctttgtctcgtctcttgaccaacaccaccggatcttgatcgacaccatcatctccgacatttttcacaaacacacacaaaactatgggtaagggtaatgtagacatttcaagtcaggagaaaatgcctaaaacctaatgcttgaccgacgtaccggaattggtaattttggttggaataaagcacaacccggtaatttttttagaaaattaaattaaagtatttataatttatttttattttaatctattaaatatttatgatattcattaaaatattaaattaaactatttttaaatgttccaaattaaaatctttaaaagtatttcttgtagtatataaaattatgaatttcaaaaaagaattacatgaaattaaatagaaatattcaaacagttttttttttaaaaacatctaaatattcaaacagttataaggatcataaatcatttgttaatataatatattatatttaacccacctattataaatatttgttttaaaaaaatcaaattagagtatttattgatgatattctttaaatattgatgatattcttgaaaaatatcaagtaaaactaattttatatgttgcaaattaaaatatttaaaaatcttattgtagtatataaaataatacatttcaaaaaataaatgtatgaaattgaatataaatattcaaattctgacccgttactcagtcgaaatttttgttgaacttatttttggttaaaagaaatagggagactcacaaaaataccctttttcaatatccttttacaaaaataccctttttagctgtctatttttaaaaataccctttttatgtacaaaataactaaattacccttcttttagtaaaatacatcacaaatatataaggaaaatacgagaatgtgcacacatcaaaattaaaaatttgattttgtaaaaacttgtaaaacctttaaaataccttgtaaaatgttcccgcaaaaaattttccacccaaaaaatttcccgtcaaaaatttgtttttgcgggaaaagtgatattgcaataatttttggcgggaaaattttttgcgggaacattttttgcgggaacattttacaaggtattttaaaggttttacaagtttttacaaaatcaaatttttaattttggggagtcgaaaatcatgatatgatgatttatttgtttcattaaaatagaatcataaaaagatgagaggtgaagtataatgattaataacaaattaatatagtaagttggatatcaaatcttatatgttcattttgattggtcattttttttttaaagttaataatatattttcttttttaataattaaattgcataaattagtatttgtcttgtttatctttaatgagctgaattgatttactctttaaatttttatctctaatggcattcgaatgtaataacttacaaagggaaaaattattaaaggataattataaattgtactcctcaaataatagtatagaatatatatatatatatatatatatatatatatatatatatatatacttgtattgttttggttctaatgaatcgaatttactatggaatgattatgattgtgtttaggctaacgaatatgagttctaatggtgtggtcgagactctatatttatagtttaatatctaaggcaaacagtcataattatctcttaaaatttaatttttaaaaattagaaatttttttgatacaaatatcggtaatatatttagaatttatcttactattttcaaaaaaacaaaagaaagattccatattatccacacgtttttatcgttttaccctcacaaaaaaatagaaaatcggatttaaaagtgtattcattaagggtgattaagagaattcattttaatataattacaagaaccatttttataattatataaataaaataaataaactcaatcaggcttggaacgggctaggttaacaagaatcctatatatacaaactagggtttaactacagagccacgtatcataactgagttttcttctacatcaataacaacaaatcaattatggaagaagccatgactaatgatactacaatcgcccatgaatctcctagcctccttcgtgcagtaagtctacatattaatgattttctttttcacgttttttttgtccattactatataatatacgattgattatatgaatttaatcttctaaaattatatttttatggttggttgcaggatgaacaagaacctacgatacgatgttgccatgagcagcatcattctaatcattaatattgcagcgattgtgtatatgataacccacaagatccccttaaataaagctgatccagctcttttaattttggttgtttccattattttctacgtctcgttcggcatagttagctgcatcagttgggttatggcaatcgagaatgtccgcctagcatctgaagcttacgtctatggacgtataggtcacacgtctggctttggtatattcctagacctcctctattcgatttctcctcacttggctctacacttcggtctaccttgtttgctatggttcgtagccgccatgattgcaccgtgttgtccctatctatggaaaggtctatgcaaaagagtgcaagaactacgagattggtggaagttggtgaatcgaccacaatcgtctgttgttattgtttaaggtcgtcttttcttgtttaagatgtgaattttagggtttttttttcttttttttttttgctttcttttttccttttaagaccatcgattgtagttgaaattatttgataatccttaaatcacgtttttttggtaacatcttttatcatttaatcaacttggaatatcaatatttattttgtgttcatgaacatttttttgagcaaaataaaactttcattaaatcgaaattagggttcattacactctagaccaagagcattctttgccaaagaatcagcttggcgattatgatctctaggaatgaaattaaaagagcaaattgaaaaaactgaagatagagccaggatatcgaagggaatcccgtggagatcctttgaaaggagtttccgattgagagctttgataagcacttgcgagtctgaagcgaagaagatattggtgaagcccgattcgattgcaactctaatcgctgaaagagttgtcatcgcttcggccaccaaaggagatcggatccgagatactgcgtagagccttgttgagtggttctttcaccttgatctttgaagatccatccgaggccagcctttgaatcgtctttccaggctacatctgtgaaacattggacggtatgcggctgaggctggagaggggtcttaagtggcctccttaatgattctctcgctaatggctctttacgatttgctaggaactatttcttcgcaaatagcatgttttcttgtaatgcgcaaaaaaaaatattgcctgtcaatttctatatatatattttttgttttaaattcgagttttttcgaagttctttcttttatttttggaacgacaatgtatttctcccccataactttcgtatagccccacttccacccaaactttcactctctgtcttattctccccagaatcatagttctatatttaattacccccaaatcttaagttcgagacctagttgtacatagaggttggtttattgggatgaagacgtaaaccggatacgaaaccaagaaacccatacgtcaaaccgaactgaaaaccagagtcgagttaataccggacttataacccgcaatatcaacgtttgtttaaaaatccccaattccagaaaactaagaaccctaaaaaaagctcagaattcaaatcatcacatcgaagatccaatttcaaatcatcacatcgaatctctgatttcttgtatcacatcgatatgaacaatgagtaatgcatccggaatttatacttgaacgtcaaatccccaaatgcaagtagagaaagagatctttgaggagagggtagaagatgtatagtgaaaagcgagattgttgatgttctaggttatgtgatcatgtttggtttgaataaagtgcttggttgattcaattgtgatgtaatgctcttattgagaaaaaaaaaacagagacgcatttggttgttatttaaaaaaaatgcattcaacagagagaaaacagagacaaaatggaagttaaaaatgcattcaatatgcataatttggctcagaccagttcataacaaagacaacaattaagaagcttgaaaaacaaagacaaattagactccaaacaaacccaagacacatttagtttaaaagcctgaaaaacagacattagaggcaagcttcttaatcctagaaaacagaccaaaagctttaacaaaaaaacagaccaaaagcttcttctaagctctataccagctcagttcaacctcatttcctgcgtgacagttccttgagaaggttcaccttgaggaacctgtaataacaacacaaacaaaagagttaaacaacacacataaaacatagtacgtagacacattagaatatgaaacacaaacctctttcttcttcttatgaaacctagagttgtgattagcctcaccacataccccacaatgcataactcgttttagaagctttggttgcttcttcaaaggagactcattttttcctttctttcttttcaccttcttacttttttttttcctgccaggctgtggaggctcaggagctggatgcacttgaggagttgttccaacaggccaaaaccttgcacctcttaatggaacaagaccctctgtatagttcttcttccattgagttgtacgaaaccagtggcagacataatcctcaactttaagtttcaacttaaggataacaccatatgcatgtacacaagggattcctgtgatgtcccatttcctacagctacaagtcctctgattcaaactcacacggtaagaacaaccatacaacatagctaaaaacatcttgtttgtacttcggtgaaccttaacttctgcagcatcttcaagctcttttgcaagatattcttccacatatggtgtacataaacccttgtgatcatgagatttaacacttcttttggcaatacgtaccattgcaagccgagcaatcatttctaacataggcaccagtggcttctctcttgctttgactatcgtgttgttaaatgattctgtggagttgttctcaacatcttcaacatagtggccaattttgtagaaagctctacaccatctcattgggtttgacttcatcacatcctcataaacacccatatcatactgcttcaatctctctaggttttctctatattcagcctcattataactccatgctagattccagataaacggctttatctgtgattttttaccatgatttgccttcaaattcccatatatgtgtctgacacacatcctatgttcaatctgtggtaactctatctccacagctctaatcaatccctgtaacataaccacaaattaaagcagagaaaacatagtagaaaaacaaagtaataaccaatacaaacattaataccttctcacgatccgagatcaatatgtatccttcaccatcttttagtcccaaatcagctttaaccttgttcacaaaccacagccaattagggccattctccacttggacaacgccccatgccactggatatatagcgttgtccgcatctcgtcctaaagctactaacaactgaccttttgtttttcctcttaagaaacagccatctactcctaatatcggcctacaagactctcaaagcacacatagaatctattgaattcatcttcaccattctcattcgtgagggtatcaatttccaccgtagaacccggatttgattcttctatctcaacaccaaaatctctaatccgtgcaaattgctcatcatattctttatcaatccatttcaaagctttaagcctagcatcttggcactgaggcctcgatacactaatcttccatttttgcattatcagttcttcaatcttcattggcataaagtaaacaggttcatcccggatcttgtcaagaaataatcttgcaattactggcactttcatcagctcacactccccattaaccgtacaactatgcttttccttaaatttcttaacttgccacttatcagacttagaactaactgagcagtagatacgccattcgcaaccatcagcattacaacgatacccaagctttgttttatcatacctgtactgcctgatattcctacccgatcgaagagcgtagtcgaggacagcttctttaaacgcgattttattgtagaacacttggtccttgtacaaattcccatcaccacgtctgatatcaatacgatctctcccccgttgaacatcttcgtcttcgtcactatcactctcgggaatgacatcgtgacgaatacacggttcatcgacgaattcgtttactgcttgctcgaggttgaattcacttcgtgcggtttggtcttccaaattttcatcatcgggttcctcatcaatatgaacattgttcatctcgatctcgagtactgacatcggcgaagataaacgaactcgcgattagaggttttgggtcactttcttttcttcgatattgcaaaatcacgattacgtggggaagggttttgtatttgggatttttcttgtttagtggatttatgatttgggggtaatcgggtctagatttcaagttaaattggtttaggtccggcttaagtttgtttatgttggttaaaacttgattggtctacagtaaaccaatattaatccagcccgatgtgtaaattaatttcgaactttcattttatgtggagatatgtatcaaattttagatctggggagaaataattatagaactattttgttgggaaaaaatagagagagggtgaaactttgggtggatgtggggctatatgaaagttatggggaggaaatacattgtcgttcctttattttttatgtaacaaactgaacatactctttcgctaaagttagcggccttatcctagatgggtctttcccagctatatgagcccaccgtcgcatgtcaaggtcggtatgtgccggactaattgataggaactaggcccaaatggagtccacaagacctttgagtagaaaattcccaatgttaactttagattttgggtgtccttaggtagttaaagacgagaaaagaaacaaaaacttgagaagcaaagttagtggttgggaaaaacagacaagaaatcatatgccaaaatgctgttgtgtacatggagataatgtggtaaaagatattgcgaggtaagttgattcacaatgttggttattaaagatattttaatccaacgatgcaagtaataatatagctatgattggtaacacgaaaaatggcggaatgacgttttataatccgattatgcaagaactttaccaatcaagaaaatttgtatgatatttaccaaaacacaaactcaggatttgagtttcgcctaaaaaacttcaagtaaaactcattgtgcagataaataaatgagtatatagttgcttatttcatcacacgatttttcattttgcgagttttcattttgcaaatttttatcctgcatgcgacttttcaatatccgatttatatcattaggcgattatgcggtattcccaatcatagccgatattctgattcaaaataatttttgaaatgattcaacctaacatgatatttgaatcattttcaaagaatctacaatattaaataagtgaagaaccagagctagatctaaaaatcataccatgttagggttgaattcgttcatcagttgaagttattttagctccaccttaagcatctcgagtacttactgcttctcacttttttacaagatgctttgcatctaaggcttatgcatttaaccctagtgatccagattttcgatcttttcccgttcgaaaagagttctttaaactgaaccaacttatgaaaccaaactataacatttttaaaattttgaattgatttaaatcatgcattattctttggacatatgttgttaaataatttaattgtaattaactttaggaatttttttaacataagtagataatgttattgtttctcctttatctttttgtataatatatactaacaaatcttctaagaggatcttatctaactaattagtgataagcttccttatcaaatatacatgtggcaatgtgacagtatatatgtaatttgtttcacaggtaatatacaaacatgtgttatatatattttataaagtaataaaaccaacaagtatttttcattaattaaataataagaaaattaaaacaaaatctcaaacaagcatgaaatgggactagctagaagagacctatatatagtaggcatcattaagatttaactaaggagctacgtctcattacatagttttcttccgcgtcattagcaatcgaagaagacatgactaatactaacgttgctggtactaagcctactgcaacaaccgtccatgaatatcctagccgcctacgcgtatggtggtgagactccatatcattgatttgttttgttcgtccattactctatattgtattatgtaaactaaattgaatcctcttaaactatattaatggttggttgcaggatgaacaaggacttacgatataacattgcgatgaacagcttcattttaatcctcaacatcgcagcgatattgtatatgattacccacaagattgcggttgaatcagatataactacagatttgctaattggtttcggtgtttcgtatatcatttgcgtcctatttagtttcataagttggattgtggcaatcacggatgtgtcagcatgtgaagtaggatacttttctggatgtgtcagtcacaactttggcttcgttgttctcctccactttctctattgtatatctctcaactttgccctactcgttggtctattatatgctctaccttttttcctacgtttcctatgcaaagcaatgcgagcactacgagattggtgggagtttgtgaatcaaccgcaatcagttgttgttgagggggttatatgcaataaaaataatttaattgaatttgaaagaattcaattaaatgcataagttacaaattaaaatattaataaagacttttatttttgtaagcttttgctatcgagattagattttgtagaataaatatattagtttgaagaacaaatgatattttatatgatttttctaaaatatgtgaatcttgaagaagaaaaaaatattttctatattatttgatctcgagtaacatactttatatgagaacccacaagattcccttaagcaaagctaaatttgtttttccaactttgataatttccatttttaactacgtcagtaccggcatactagctgcatatgttggtttaaggcaatcgaga

SEQ ID NO: 5489 - DNA, 1872 bp, Arabidopsis lyrata
  Intron number 5 from transcript 897578 (locus 897578) deri ved from phytozome v7.0 (chr-ID scaffold_5; pos 13144393 t o 13146264 reverse strand)
ctcctgtaaccgtcgggtttgtgttttagtccgttattgtcatcgcgtttttgcgttagtttgcagagaagctgtaggcgctttatccagaggttttgaggacgggcttctgatagggtttgctcgtggcaactaagatgggactccagctccttcgagttgtggaaatcacgcaaatttctgagtttggctactcggaatcggtgtttcttctttcgcttctgctctggtcttacgctcgccttctttgttgttttgttttttattgtttattctgtagattttgttttttccgctacttgtattctttgtaatttctgtcgaaacttcgaaaatggtataaaatcttcacattttactaaaaaaaaaaaaaatatcagtttattttgttacccttttttctacatactattgtgtcacttcatatttgacataactcgaattgttggacgatggaggccactaccacatgttcacgtggtcgtgagtattgatcgcattattcttatttttttgactaattaagaagatctcattatttgtcacatgtcaatgttaaactaggtaactacatacgtcatgtaggaagtaggataaattgatgggaaaaaaacttgtttgactctaattattagataaactcataaaaggtatgggttaatctagttatttttttgaccgaaataccatttgtctctttgacaggaaaaaaaaaaaaagtcaataatatactcttattatttcaaaacgtgtttgatatttttgccaaaaaataaatctaccgtgaaaagtttgtcggcctagttgtgacagattaattttcgacgacagatttaatggtccacgacagattttttacggcagtttttttttctctgacagatttatttgaatatggttatgacagattttaaaattgtagcagttttttttcttcgacagactaatttgctcttgacgccacagacttccgtaattttgacagttttatttcagtgtatagcagatttttgtttctagtgtcagcagactaatatttttcagaacaaatctgtcataaagcagcagatttgttaaagaaaaaataattgctagtttgactttttagttgtgacagattgtttttatgttatgacagatttttaaatgtcaacataaaatctgcagtgttatagcagatttgttttttaaaaataaaaattgctagaataacatatagtcccaacaacgttatgatagtttttttttatgttataccagatttttaaaaagtctggtgtttcatagcagattttttaaattgaaataaaatgattagaatgacctatttagtgacagcagatttatatttgttatgacagacttttattatattatgacagatttttaatatttatttgaagtcggaatatatgttgtaaatatcatgtgtggcagttttttttaaaatctgaaatatagcgacaccgcagacatacttgtaacgtgacagactttttaaaattaactgccaaatctgatttaaaaaaatattaattacgatcataacttaccatattttctagggttttgtggcatcagttacggtttactttctcctccattctcactacgacgccacaatctttttctacagaaaacgttcatctcttttagggttcctattcaagtagatttgttaaattttttccatttttggttaattctctttaccttttctttcaatccacgttttattatacgatttggagttctatcaataatgtttcaaaccagagggagtggattggatatgaatcaggtgatcctagtatgtggcaaatggattttcgagaaaaatatatgatcgtttgtcattgataacaatagggg

SEQ ID NO: 5490 - DNA, 4590 bp, Arabidopsis lyrata
  Intron number 1 from transcript 895784 (locus 895784) deri ved from phytozome v7.0 (chr-ID scaffold_6; pos 23848528 t o 23853117 reverse strand)
tggtgagtcctccgaattcatcaaacacccatctcaccccgatcacactcttcagcttcgaagtgaaggttgtaatacctgcagtttatgtggaaggatcatcaaggatctattctatcgttgtgatctctgtgacttcgatgtggatctatactgtgccaagaacccaccaccagaggttattgacattcccgagacgcatcaccacaagctcaaccttcacaaggagctgatccagttcaactgtgatgctaaatgcgggaagattactggtgctgagtttccttacgcatgttatgaatgtcaattacctttccatgtggattgcgtatggcgcccatcggagctaaaaaacccgtcggaggtaatccattcttatcactccctacaccctcttaagctcctcacaggtcaactaccggacaattctgatggaaaatgtcgtctttgcgcaagaaacattgatgaaagattgttttatcattgttctccctgcaacttcaccttggatatgcgttgcgttttaaacccaccacaacaatctcttctgaatttgaatgctcatgatcatcaactcacccttctcccaagactcttttcatttacatgtaatgcttgtgggctggatggagatcgaagcccttacatttgtgttcaatgtgatttcatgattcatcaaggctgtcttgacttaccacgcgtcataaacattaatcggcatgaacaccgtgtttctcgaacttctgttcctggtgttgtgaattctaagggagtgttactaccggtttttcacaagcatctaatgatgccttggaatgatctgaggaaaggcgattgttgtcaaagcttggaatctgacactgacggcttctattgcaaaagctgtgatttttttgtccacaagaaatgtggcgagtccttcgaattcatcaaacacccatctcaccccgattatagtcttgagcttcgaagtcatcgtataaacagttgcaatttatgtggaagggcggaaggtatgaatgcatggtatatttgttatcattctctattccatttggatctatactgtgcaaggtacccaccaccagaggttattgacatttccgaaacgcatcaccacaagctcacccttctcaaagaacatatcgagtttgattgtgatgctaaatgtggcatgattggtgatgggttttcttacaaatgtcccgaatgtgatttatccttccatgtggattgcgtatggcatccgccagaggtaaatcaccctttagaggtaaaccactcttaccacccctggcaccctcttaagctccacacaggccaaccaccggactattctgatggaacatgtcgtctttgcgcaagaaaaattgatgatagattgttttaccattgttctttgtgcaacttcaccttggatctgcgttgtgttttaaatccaccaccacaatctcttctgaatttgaaagctcatgatcaccaactcaccctttttccaagactccgttcttttacatgtaacgcttgcgggttgagtggcgatcgaagcccttacgtatgtcttcagtgtgactttatgatccatcaagactgtcttgaccttccacgcgtcataaacattaatcggcatgatcaccgcgtttctcgaacttctgttcttggtgttatgaattctatatgtggagtttgtcgccagaaggtggattggacttgtggaggtttttcttgtcagcggtgtcctggatatgttgttcattcacaatgtgccactagatctgatgtgtggaacgggaaagaactcgaaggagtacctgaagaaacagaagatatagaaccatatatcgtaatagacgacaacacaatacaacatttcagccacaaagaacattacctaagactccacgttaacggttttctatgtgacgacaacaagcggtgcagggcatgcacccatcccatctgtctccaatccttctacggctgtatggattgtgacttcattctccaccaaaactgtgctggatttcctagaatgagatggcatgtgctacacaatgagcgtcttactttagttactgacgagactaaaaactttaactgtaatgcttgtgagagattgtccaatggtttcaggtaccagcatgggtatacgtcatttgatgttcgttgcggttcaatttccgagccatttgtccatccaagtcatcccgatcatcccttatattacactttaccagatggagagattttctgcaatggctgcaacaagagttgttattatgtgctaaggtgcattgaagatgattgtagatttttcttatgctttgaatgcgccacttttccacaagtggtaaagcatagagttgacgatcatcctctctcactatgttatggcgaaaaggctagtggtaaattctggtgtgacatttgtgaaagagaaaccaatccagagacatggttctacacgtgtaaagaccaccgggctagtttgcatacaaagtgtgtgctcggagactgttcacagatcatgcccaaaagcataattaagagttgggtcagatcttttgaggtggtgctcaataatagtgtatctcgtccatattgctactggtgccagttgcgttgcatttttccaatcatcttgaagacggttggaacctcagatgaatactattgctctttaagatgcattcaaaagagggtatcagtatcggctgtagaagaagccagactgttaaagcgcagactgaaataaaaagcatttgaaaccaggtttttcttttagatttcttgtattacttctttgaaacgacttacatgtttctaatgtattcagcctttcgatttcttcagaatcttgcgataaaattgaaagaacacaatactatcagtcttgtctgttgaaaatttgaagactaaaaacaagaaattgcgatgactacctttaggaatcatctagacttttggactcgcagaatcaaactgtaaataatttcaccttgacaaatgacaaataatatcagtcttgtctgttcaaaaatcataagaccaaaaacaagaaaattgggaatttactaggattacttttatgatcatctacactttttactcaacaactatttaagtaaaaacgccaacaattcatacaaacaattgttaactacaaccactataatgaaatatgcagtactcacaaaaacgtaaagagtttttgtagttgtacattttggatattgtaatctatcgaatcaacaataatgccgtaattgatacacaaacataagaaaactaattcctaccaaaaaaaaataaaaaaacataagaaaacgaatggttgagaaaccaacaaaaactctgcaatccatcaatgtgattcatatcccttttactgagtcagctcgaaacctggtcaatcacaagagctgataagtccttcattatatgtgcaatgtcattcacggatcccaaaacctaaagagaaatctaaagtgaatcaccattgaaatgtgaagcacgcagcttcctaaaatatggttgagtaactaatagcttccaagttacctgctgtatgcctgtatctctcgttccctttccgctgaggtatgcatgttaccctttcttcaacttgatttgtctgatgttcatcaaaaccctaaaacttgttgaagactaactggtgattctcattacggtattggcagaggaatgaaggcaatgataattgattgggaaaactgaatggctttagcttgattaaacaaaacggaacgaacaagaaccgatacgacatttcggatacaaatttcatataatcatatgatctcatccactcaatgaagcatacgacttaattagtacttacgtactggttggttagaatcaatctaagtagaggtggtgaagaaaaagctggaaaatatatttattgcaaagcttcggagtgagctagagtctccgaaacacaagtagtaaaataagcacgtgagaagcacgtggagtctgttaaaattttcagttacaactttttcaatactctgtttcggtgagctataaaccgggaagaagtgattctgtgattgagagcgattgccgattcagcattgttgtacatttgagcttgagttgataagagaatcacgtaggtaccagttttggtgttgagctcgtaaatatatatagcgtgtcacacgggaactgtaagtgattcgagttaaatccaaacaaattggtatcagagcccataatgaagaaatcacttgagcgagggaacaaatggtacatttgacctttggatggctaccaattcagctaaagaatcaaaactgactattcttttatcgcaagtggtttgttttaataaaatcatatgatttccaaaaacaccaatgatatcttcgtctatgacgttagtcatctagttgacactgtcaattaaccataattattatctttctatttaaatatgtctactaattctacaagaacattcttgagatcaacgagaagacttttgcgagagaaagaaacgtggaaagagcatagctttgagatttactttcagatccacctttttcttcttccaaatcaacc

SEQ ID NO: 5491 - DNA, 1738 bp, Arabidopsis lyrata
  Intron number 2 from transcript 475136 (locus 475136) deri ved from phytozome v7.0 (chr-ID scaffold_2; pos 2035535 to 2037272 reverse strand)
tccttttcgaggtttggtaattgcattgatttgtcatgtattctctgattctccatggaagaaagttggtcgaattgcagaaatggcgacatttgagagtttcagtgcaaaaggcatctcctttatccaattacttctcctctgctgctgatgcaagccttagagatgatctaaaagggaacaactttacagtctcttacctctttgattctttgggtttacctaaaaaactcgcagaatcgatctcaaggaaagttagtttcgaggacaaggcaaatcctgagtctgttctgaatcttttgagaagtcatggtttcactgattctcagatctccaccatcattacgaattatccaccattgcttacattagatgctgagaaatcacttggtcccaagcttcagtttctgctgtctagaggagcttcaagctctgagctcactcagattgtatctacagttcctaaaatcttgggaaagaaagggcacaaaactatcagcctatagatatgtggaaaagaaaaatttgaagaaaccctcaagaaggttgttgagatgggttttgatccaaccacctcaaagtttgtccaagctctaagcgttgttcaaggatttagccacaaaactatagaagagaaagttaatatctgcaaaagattaggtttttttgatgtatgggcaatgttcaagaagcatccttcttttctgaatttctcggagaagaagatatttaactccattgaaacatttcgtggcctaggattcagcagagatgagttgacgacaatagtcaaacaacaaccgatctgtcttagttattcagcagagtcggtcaagaagaagacagagtttttggtgaagaagatgaactggccactaaaggctgttgtttcgaacccttcgatacttggatatagcatggagaagaggattgtaccaaggtgtaacataatcaaaaatctcatgtccaaaggattgctcaaagacagaggaggccaactccctccaatgcggtctgttttgatgagtaccgatcagcatttcttaaacttttatgtgaggaagcacgttgacaaagagcttgttgctgagttgatgtcaatcttcactggagatcatgcttcatagatcttaaggccacctactcacgacaacgatcaggaactttttgtcgttgaggagctttaatggatgagttctatatagtcttgatagggaatgaagaactttatatgttgttgctagactgacgcacaaggacgattcagtttcgtttgtcacacggcttgttgaatttttcttctccttaagttcaatgttcttgttcccttgggtgttctaactaagcgcttgacatcgacaggatatgtaattcaatgtcacgactaatacagccctccggttgcttggttattaaaagatcactacacgcactctaatcaaacattttagattttactgtcaaaaaaaaaaaaaaaaaaagctgtaactctagtgataagacctaggttcgaatccaactagctacaaaactcttttgtagttttaaaaatttatgaaaaatgaggatcaaagaggaatcctaattgaaattcattagggtttatgggtgagagaaacttatcataaagccttatttcgttatttcctcccccaaagtttcgatttttgcgattctctgtttttccttctcctctgctctgtttctggttctgtaatcgcatagcctagtctttgtc

SEQ ID NO: 5492 - DNA, 767 bp, Arabidopsis lyrata
  Intron number 5 from transcript 921415 (locus 921415) deri ved from phytozome v7.0 (chr-ID scaffold_1; pos 10443711 t o 10444477 reverse strand)
agatattagacaatttattatcgcttggcacagtgaaacgccctaaatcccgtttggaccagttatatatgttgttgtaatcttactttattatacaatctatttccttaaacaagatatcattctgttgttttttacttaaatgaaaggtaaatttttgtcattcctttgcatatgaaattttagtgtttccaactagaatctccatatactaacggtcaaagttgactagacatgttttagaaaaaaacattagaccacaactggcattaaccaaatccctacatttgtagggagcgggactcgttttttggtgtaatggtgcatgttctcagcggacttatcatttgtcactagactacggttacttcacgactaaagttgattctgataaggtttttaggcaaaaaaaatttggttttttttttttgcagaagctacaaaattcttaatacaagagatttttctttggcaaaaacgttaaaaacaaggaagaatctattagaaggaaaaaatcttttgttttttttttcctttttttttttgaaaaagggttattttcttacaaaatctaattttacaattaagagaaaagaggatgatttaggttttctcagtaaatcaaacggagaggacaaaagctatcgtgctcttgtttctttatttttctcagaaacaaatcaaacttggacggatttatcgacctttgatctcctccttcttcaggtttctggtagatctcgcttatacgtcaagaactcacggga

SEQ ID NO: 5493 - DNA, 5821 bp, Arabidopsis lyrata
  Intron number 1 from transcript 902360 (locus 902360) deri ved from phytozome v7.0 (chr-ID scaffold_4; pos 21272518 t o 21278338 reverse strand)
cggtaagtatttgaatggtgtgaaactggtagaacagggtaaaactatgtgtatatctgggtactactggtagaacagggtaaaactattgcaactgaggtataatgtgtgtttgaattctatggttattggtataactggtagaactgggaatactatgtgtttgaattctgggtataactggtaatactagggcattactatatgtttgatttctgggtaatactggtattactagggtataactatgtgtttgaattctgggtgaaactggtattactggggtacaactatgtgtatattttcagggtaatactggtaatactcgtaatactattcgcagaataatgatatatggatgaatgtctattctgttgcaggagatcgacgaggaaacaatagcaataccaccgctgagtatgtatttcccgccttcagaatatgtgaagaaaatcaagctatcaactcggtgctatattcacgaagtgttgactacattcgatgagttggagcctccgatgagcaagtctgagagggcattttttgagaatcatccgagttttcaacacgtcttccacatgccaagagacccacaagtcaccaagatgacgactcggagcaagagacagcttggttgactgatttgtctctttgatgtttggatttgaacttggatttgttatgttaattgttttggatttgttatgttaggatttgaatttggatttgtcttgttaggattttaatttggatttgttaagttagttttataaatttaattaaggaatacgggtaaaacagctattactaattaagaaatacgggtaaaactagtaatactgataatggtaatactggtaatactagtaaaactggtattactaattaaggaatacgtgtaaaactagtaatactgataatggtaataagcttacaaagcataggaaagtctcacaaatcataaaaaagtcttacaaagcatagacaagtcttacaaagcaaaaaataagcttatacattagtgagcgactaactccgaacgcatttctccgctagatgagcgactaactccttcagtttttggatctccttaccattacctttcaactccgaacgcattttttcttgatagtactccaagctttgaatctttttgtgatgggtatcaacctcctcccttaagttagtcacctcttcttccatagctttatcccaaagtttccgaatgtgtaaaccatcattctacagtacaagaattctatatcgagatcaattattcaacatacatctgggtaatactagtgtaactagtaatactacatacatctgagtaatactagtgtagctagtaatactacatgtttacgggtaatactagtctaaccagtaatactacatacatctgggttctcagagatctaccagttcaacaagttctaccagttttactttcgggtcaataatgatactatctatttaccttatacacgttgcattgatagtatctcttccctttgtcaccatcgttctcagagatcttgtcgaggatgcgtccaccacaaggacatctattcggaattccttccatcattccgacttcttctaattgatcataaatcttcttagcgttcttcatctcatcataccatggatctctctcacacaatcgatccataattgaaaaagagagaaagattgaagagaaggaaaaagttggatctcgttttcttgagcttggagagagagagagagtaaattgagagatagagagagagaggagaagtctcgattgtgaattagaagtggagaaaaaaagaattttagttatttgtttttgttgattttgggtttaattgattttggggggaaaaattggagggaaaaaaaatttggggggagaaattggaattatatgcccacgtgtgcgcactcaaacccacgtgtgcgcagtcaaatccacgtgtgcgcagtctttgtgacatgtgcgccgttttttttaacatagttgtaccctagttttcagttgtacaaattgtccacatagttttacttttggtgttttcaaatttaaccagtattacacatccttaaaaatgatttatctagttgtacacttgaggaaactctattattattgaattctaaaggtttaatgtaataaaatgttaaaaatatataaaattgtaaaatatcaatcctaaattggagtttatatcaaaagtgagcttaaaagtataaggaatatgttggatgtagtctcataaaacaatcttacatgaaaatatttttttttccctattcttacttcgttttaaatcatttgtaagagtttattatcacttaatagtctatgttatagttggtgttgaaaaattagaaatatcaaatttcataattttcttcagtagttatactagttataccagtgttacctaattttttcattagtaatacatgttatactagtattacccttacgccagtgaattaaaacctagtattacaggaggcaaatctagtgttacatagttgtacaacgcaaatatggtttacaaatcatcaagttcagataaaatcaaatactatggttgccaaataacaaccattgcagcgattgcctcggcctccttttgttttgagtcctttgacgttttggacgcctttccccggtggatggaagcctcaatacttttgttctacccttcttctttttacgaggcagaggtaataccttcaacgctttgatctcatctgggatatcccactgtgacttatccgggatcagtccaataccatcttcccattcttttttaaactgaccagcttctacaacaggcggtggctcaacgtattcatcacccctatcatcacatctatccatagattcatcacgtgatccaatctcaggatcttgagtatcatcaacctccattattgcctcatttggtactattccttgttcctcctcgcattcgcacaaaacgatggcagcactatctctcatttcatcctcatttgaatccaattccacatagtttttaccaacagaacttttattgaggagctccattctcgacagttgctcgggcaattctggtggagtgatgacgtccacattcaaaacatatctacggtaattttcacctgaagatatatagacacctacatcctcatcatcactaatgtaaatctcttcagttggtcccatcagcacagcattgtatctcatttgcaatttaaccttactttcatctaatccaagcttcgtgcatatcctaccttctaacatggagagcgttattttcccctccgatgtattcatcatcaagctatacatgcgacctttgcatttaaaatatatgatcacgttctccatcattgtatcctgcaaaaacaatacaaaaactctgtcagttatactagttgtactagttgtactacaattcagggtaatactagtataactagtcatactacatgtaaatgggtaatactagtgtaacccttgttttaaaaatcgctaggcgctagtcgggcgctcggcatgggcctagcgattaatcggaaaatcggattaaaatcggagattaatcggggattagttttagggttattttaatatttttaaaatatattaatccaatattgtaaaaatttatgatttttattacaaatttatgatttttattaaaatttgaacacaagttattgtaaaacatcacaaactctccattcaaatgattgaataacaaaaataaaaagtttttttatacttgcaatctaaaaaataatcggggtatataagattaggcggaaagtaatcggattaggcggtgaataatcgggttactgattttttaggggattagtcattaatcgaggcggatagggtgggcctagcgattaagcggggagtaatcgggactaggcggggatttttagaacagggagtgtaactggtgatactacatgtaaatgggtaatactagtgtaactagtcatactacatacatctaggtaatactaatataaccagtaatactacgtatatatttttcaatagattcaggtacaattctacccagttctaccagttgtactttcgcgacaagaactcaaatcgaatggtttcgggttcaaaactacaattcactatgattcagttgctgtaatccatttcttacccatttacagacctattcgacccagaaactatgcataaacttccaatgtgcatatccaaacacaatttgcttaatctcaaatctaattgaattgaatctcctacatttctaaatcaaaaacttcaatttgaaactctatgcagctcgaacaacatacattttctctctatctcgacgcagctcgccggaggagaggatacggctgcaatggcgactcaaatcgaattttccggcgaggagagctcgagctcgcgttcttatccgcgttctcacgtttttttttttttttttttttttcatttcacaaaattaattaattaaaatgagggaaaaagaaaaagaaagggtaaaatcgtcagatcacatttcattaattgggaaggggatatgtagacataaaagggatataagaggtttataatttacaaaaggggagttatgagacattttctcactttaaataaaccaagctggaacaattaacgagaacaaccaaacagaccaaaatcgatcccaaattcagaagcagcaaaaatatttttattttaaaaattttaagtgttaaatttatatttgtcgaaaactaagcggacttagcatctcgtttttttggttcgtaattggtgtcataagtttaacatgtttttacgtgagaacatttgctcttgtttctagtataatttttcatcttcataaccgtaactaatctgatctacttaggttttgttggtattcttggtttttttttttgacaaatcatggtgatagtaagctagagccaagaaataacgaatcattgagtttaaaacatgtcaactttggttttaaactgaaagattttgaatgcaacactcaaaatagatttaaatatagatagaaaaaaaaagatttttgatctaattaagattttcttatttagaaactaatgaactcaaaattcgaaactcaatatactgctatattcaattaattaaggttatgttttatttgtttactaataatcactattatttgagctatattctattatagaatatatagaatatgtttaattttaaatagataaggaaaaatattaatataatagttaattgatacgatctagtagtttagtgaaatgtttgtaaataacacaaaaccaaaaaaaatcttacaccaaccataatcagttgttactgtagaactagtcatacgtttgaaatgtactaaattttatgatttttttttttgtcgtctagatttattattaattgcaaattatgagaactgttacatagacgattctacaactgacaattccttccgacccttactagattcacgacagactacacttccttcttcgtaatcttgatgaataccttcaatgatccacgacctcgctacacttccttctctgcgtagaatcctgacgaacggctataattgtacatcgctggagatctcttgcacacttgcctccattaatctgcaaatttgttaataaatcgcaatacctgggactcgaaccccagactttttggtgtagaagcattaatcaacccttggtcaaccaatgggccaagggggcttccaccaaattttatgattaaaattaggatttgaatgattataatagatagcgccatatagaataa

SEQ ID NO: 5494 - DNA, 17378 bp, Arabidopsis lyrata
  Intron number 4 from transcript 474474 (locus 474474) deri ved from phytozome v7.0 (chr-ID scaffold_1; pos 28547842 t o 28565219 reverse strand)
aaagctttgatcggaaaggtgagatgaagagattgagagagtagagagattttagagatgggaaagattatttctctttcttactcaatttggtaaatacaaaggttccttttaaggacacacaaacggaatatcctcaaggatatgccatatgtacaacggtcacaaagagataagacgcgtcataaagggataaagcgtttcttgtcttcttcttcttttgcgaggtaacggctccaaggggaagggtctagcggcttctagaaccttggtgaagctttggataagcttaggaaggctggagatcccaatgggccgagtggacttgaaatggtacggacggcccgaaggtgatcgtacggacgagtggtgatccgtacggacgagtgtgaaccgtacggacgagaagcacaagatggtttcctcgacccggatgcttcctcacttgattctactcgtgccaagatggatcttcttcttcatttggttcaatactccccctcaagtttaaccggagatgaaggttaaacttggacccaaattcaaccacctcattaaaaacctaagtgtagaaaacctcatgggataaaaccacacttagggaaaaagagtatgggatatttggctaaggggattgtggctgagttaagtcaacaagacctaacttttggtgaatgtactcacacaccttggtgctagctcctttggtgaagatgtcagccaattgttcttcactttcggtataatgtggcaagatgactccaagttggatttgctctcgaactttgtggcaatcgacttcaatgtgcttcgttctctcatgaaacaccgagttggttgctatgtgaatggcggcttggttgtcacaatgcatggtgattggttgaggcgtgtctatcccaaagtctttgaggagagcctttagccacattagctccgtagtaagctttctcatggcccggtactcagcttcagcacttgaaagagacacaaccttttgcttcttgcttctccaagtcactagatttccaccaatgaaagtacagtagccggttgttgatcttctatcattcttgtctccggcgtaatccgcatcacaatacccaacaagctccgtgttcctattgcatcccatccaaatgccttgacccggagcgcctttaagatacttgagaatgcggttcaccatattccaatggtgttgggttggagcttgcatttgttggctcactacattcacggcaaagcaaatatcaggcctagtgatggttaaatagatgagcttacctactagcctccgatacttggtaggatcttcgaaaggtttgttgtcatgctccccctttcgtctagctttgtagtcatcttccaagggagtctttgctggtttagcgccaagcttacctacttcatcaagaagatcaagagtatactttcgttgagataagaagagaccctcctttgatctacatacttctatcccaagagagtattttagttctccaagatctttaatatcaaagacacttttaaggaaatctttagtattttgaataccaaccttgtcattcccggagatgataatatcatctacataaacgagaatgactactatacattcttggctagggagagtgaagagtgtatgatcagcttcagatctcttgaatcctcttcctagaagtgtggtgctaagcttgtgataccaagctctcggagattgcttaaggccatagattgctttgttgagcttaagaactttcccgggtgcttctttatcttctagacccggtggtggtctcatatacacttcttcctctaattctccttgaaggaatgcattcttgacatccatttgccaaagatcccattccaagttagtagccaatgaaagaaccactctaaccgtgtgaagtttggccaccggggcaaaagtatcaaggtagtcttctccatatttttgagtaaaacctcttgctacaagtctagccttgtacctctcaatgtctccatcacttttatacttgatggtgaatacccatttagaggtcacggctttccttcctctaggtagatctttttcatcccatgtgtggttgtttatcatggcttgtctttcggcttctatagcgtctctccacacttgatgttgcatggcttcttcatatgttgtgggaatccaatgttgatcaactttgctaaggtagacttgatgttcttcgggtaggtgagcaagagtgcacacggcttgaattggatgagctaccgcattggcattgtagtagactctcttgtctttccatgttgagggatgaaagcgaagtctttcacttcttcttaaaggtatcacttcttgagtcacttcttgagtagtatcttcttcctcttgattcactacgttggagccatcaccatcgggtatatgatcttcttcttgagtgttgagatcattctcttcattttgagtgtcttggacttcttcctcaagactttcttcttcttgttcttgagtctcttgtccttgtggcgggtgtggagcttgagtttgtgaaggttggtagttctcaattccaagcttctcaagaataatccgaaggttagttgctctatccgatggtgagctagacaaatccttaagactttcccaatccttcttgtcatagaatcccttgtcttccacaaacttcacatctcttgacaccaatactttccttgactccggtacataacacttgtaacccttttgagttgttgaatacccgatgaacattcccttagtgcttttggcttggagcttgttcctttgatctccgggaactaagacatagcaaacacaaccaaacacacgtaagtgatcaagggaaggcttagtcttagtgagtacctcaaatggagacttgtcttgtagaatctttgttggagttctattgatcaagtaacacgctgtcatcacggcatcactccaaaatctctttggaacattggtgtgaaacattatggaccttgcaatctccattaggtgtcgattcttgcgttcagaaacaccattttgttgaggagtgtaaggacaacttgtttggtggatgattccgtgtgatgctaggtgctccttgaatgcttgacttgtatactccccaccattgtcggatctaaaaatcttaatcttggcattgtattggttagtcacataagtatggaagtttttaaaagcttcaagaacacgatcttttgaaggaaggagagtaagccaagtatactttgatttttcatcaataaatgtgacaaaatatttttggttttctcttgataaacaaggtgaagtccacacatccgaatgaattaaatcaaagcaactttcataaatagtagaagacttaggaaaaatagctttgcaatgtttaccaagaatacaagcttcacaatcacgactttgaaatgaaacttttggtagcattaaacttaaagcccgaggatggggatgacctagtctagcatgccaaatagcactattcgcaacgacaatacttgaactaaaatgagaagataaaggttcggatagctttgtgtcttctagaacataaagaccatcctttgtaactccttgaccaagcaccctacttgattcaatatcctgaaagtaaacatcattaggtccaaatatcgcataacaatttaaatcggtcgttgctcttttaacggaaagcaagttagaagtaaaatttggcatgtaaaaggctttagacttcttatcaaatagctctaaatcacctattcctttaaccggaattttatccccattagcaattaccacgtttcctaaagccggttcaatattgttcattagcctagaatcactaatcatgtgatgagaggctcccgaatcaacaataagaggttttagagtatgagcaatagcatgataggatttaccggatgactccttaagagccttaatgagagcatcgagatcagacttcttcacatactccgaagacgccgtcattgccactccaacaccattagcttgagttgagggtccgggtccggagatgtcttgagtctcttggctccagttcgcttgatgagctttaggatccttccatttacttggtcggagatggggatggagaatccaacacttctccttggtatgacccgtctttttgcaatgatcacaagttaggcctctcttgttctcggacttgtagcttcccttgttggcggtggtgagctctcctttgttggctgtagcaagctctcctttgtttccgaagagaccaagagatacttgctccttttggatttgagagcacacttcttctaggttaggtagcttctcggctcggagcaagtgcttgatgagatcattgtaggtggagttcaaggtgagaaggagaccaaagaccttgtcttgttcacgcctttcgttgaggatcgcgggatcaatggtgttaggccttagcatctcgagctccgcccaaagagacctaaacttgccgaaatgttgagtgaactccatgtctccttgagagagatcgttgatggccttcttcacttcgaacacccgactcaagttggagagattcccaaacacattaaagagagtatcccaaagctctttaggagtttcacaataggagtaagcttcgagtatttgttggtgtcggatcccgcaccagaagtccgcgaccaaccaaagattgccacgtagtcaaggtaacggcccataaaggatgaagcccattggatccatgagtcaaaggagcgttcgaagtggttgtcaccacttcgagaatccgaagtgaatgtactgggacacgagttcggtgtagaagacacgggtaagtcggttcaaggaaacttgggccaaaaaaggcgaggcccacgaagatcagagtcaactcaaattcaaacgttgagcattaaagtcgaagaatcaaaacggacgcatttaagaaggaataattgtacttaattattcattttaatgtcgtttttctatgtataaatatagaggccaatggccatgtaaaaggggatcttcctctcaagagagaaataatatagcaattttcgtagcaattcacaagtttttatacattcatttttgtccctcaagaataatctttcccacttaacaaaatacttgagtgtgtgaatccgacatccacattttggcgccgtctgtggggaattataggattcttgagtggtcagattttttcttttctacatttccgagataagcaacaatgtccggaggagacgctgctgagacatcattggccgaaaccctcaaagctatgcagcaaaccatgtcggacatatcacaaaagttctcggatgtggaaaaggccgtcgatacgttgcaaacatcccaggtatctcttagtcaaaacgtcaatactatacaaactcgtgtccgctctttaagtgcaggaaacccggtgggaatccgaagagggatattcaactcgccaagttccgctgcacgaaatgaaaccagcggacaaacaactcccggtgctactaataatgtagctcagacgtcggaagaagagacgcagctcggggatgaagaacaactcgcagctcagtacgagcaggagaacctcgaccagttcgagatcatgaggaaggttagccaggaattaaaagaaatgaaatcaaaatttcatcaggctacaagttcggagccagacatcaatcgagtcattgaagaagctaggcgaaccccttttatcccgtgaattgcaagtttgaggatcaaagattcccggaagctcaagttggacccttacagcggactggaggatccaaaaagctatctcgcagcttttctgatcgctgccggaagagtcgaattggatgaagctgatgaggatgcaggttactgcaagctcttttcggagaatctgtgtggccaagctctaatgtggttcacccaattagagccgggttcgatcagcaatttcgacgaactatcagccgtattcttaaagcaatactccatccttatggataaaagcgtttcaaatgccgatctttggaacttatcgcaaggatctaatgagtcacttcgggttttcatcaccaaattcaaaggagtgctgtcaaaactcccaagaatctcacagcaatcagctttatctgccttacgaaaaggattgcgacatgattcaaggtttaaagaagacttaatacttcacaaaccggacacaattcaggatgcactcttccgcgcaaacaactggatggaggtagaggatgaaaaagaaagttttgccaaaagaaataagcaagaaaagccggcgatcaccatccctaccaagaagttcgagccgagggagagcaaaggaccaagaaaatttgggtcacaacccttcaacaataccgtcggaaagcaattccaagggaaaggaagatcaaacacttgggtccgtgatgaaagtctatattgtgacattcataaagtaaccagacatttaaccaaggattgcagcgttcttaaaaagcacctcgcagagctttgggctagtggtgatctttctaaattcgatataaaggattttgtgaaagaataccacgaagcaaaggaaaactccaaagatcaagattccaaaagaccaaggttatccaacgaggaagaaccaaggagttcgaaggggaagatcaatgtgattctaggaggttccagattttgcggagattcaataagttccatcaaaaagcataggcgaaatgtcttactcaaagcaagcttgagcgaagaaattgattttcaaggtgcctcaatatcatttaacgaagaagaaacgcggcatctcgaaagaccgcatgatgatgctctagtcattactcttgatgtcgctaacttcgaagtatcaaggatccttatagatacaggcagttcggtcgacttgatctttttaagtactctagaaaaaatgggaattagccgaggagacatagtaggacccccatctccgttagttgcgttcacaagcgagtcagccatgtctctcggaacaatcaagctaccggtccttgccaagaaggtatcaaagatcgtggacttcgttgtcttcgataagcccgcagcttacaacatcatcctcgggactccctggatttatcggatgaaagcagtcccctctacataccatcaatgtatcaaatttccaacatcaaatggggtggaaacaattcgaggagatcaagaagcttcacggacgtgttacttagctagccaccgtttgaagatccaatagcaattaacaaagcccgcaaaagaaggactaaggcaaaaatttcctagtgggcaggaaaaagaggatgtggtagtagaagtggtattggaagaagacaaaccagatcggaaaattcgaattggagcaacgttgactggccaaataaaagaagctttgatcgaactcttaaggaaaaacaaagcatcatttgcatggtcagcatcggacatgcctggcataaatccgagtataatttgtcatgaactaaacgtggatccaagcttcaaaccggtgaaacaaaaaagaagaaagcttggagtggagcgggcaaaaatagtaaacgacgaagtggataaacttttgaagatagggtccataagagaagtgcaatatccggagtgggtagcaaacactgtcgttgtcaagaaaaagaacgggaaagacagggtttgcatcgattttacagacctgaataaagcatgtcccaaagatagtttcccgctcccgcatatagatcgacttatagagtccaccgctggaaatgagctgttaacgttcatggacgccttctcgggttataatcagataatgatgaaccccgaagatcaagaaaagacgtcatttatcacagatagaggtatctactgttacaaggtaatgccttttggtttgaaaaatgcaggagcaacttaccaacggttggtgaacaaaatgtttcacaatcacctcgggaagactatggaagtctacatagatgatatgttggttaaatcgttgaagaaagaagatcatgttaaacatttggaggaatgttttgatattctcaataaatatcaaatgaagctgaacccggcgaagtgcacatttggagtcccatccggggaatttcttggctatatcgtgacagaaagagggattgaagccaatccaaatcaaattaacgcctttctaaacatgccatctccaagaaacttcaaagaagtacaacggttgaccgggcggattgcggctttgaatcgttttatctcgagatcaacagataagtcgttgcctttctaccaaattctaaaagggaacaaaggattcctttgggatgagaagtgtgaagaagcgtttgggcagcttaagacatacttaaccactccacctatactgtccaaaccggaagtggatgaaaaactttacttgtacgtatcagtttcaaaccatgcggttagtggagtcttggtccgggaagaccgtggggagcagaaaccaatttactacgtgagcaagtcaatgacagatccggaaaccagatacacaatgatggaaaaacttgcactcgcggtggtaacttcggctcggaagctgcgtccatattttcaatcccatccggttgaagtattaactaaccaaccactccgaacaatacttcatagtccaagtcagtccggacgtttggcgaaatgggcggtggaattaagcgagtacgacatagagttcaaaagccgaatcagtatgaaggctcaggtcttagcagacttcctaaccgaactaccaatacctggaacgatagagcaaccggagaaccaaacttggaaactacatgtagacgggtcttcaacaaaacaaggatccggagtgggaatcaagttggagtctccaacatcagaaattctagaacaatcgttccgattgttattcaatgcctccaacaacgaagcagaatacgaagcccttattgccggacttcgactagcacaaggagttggagctaaggaaatattggcttattgcgattcgcaattagtagttaaccaatttaatggagactatgaagccaaagattcaagaatggaagcgtacctcgaagtggtgaaggatctatctaaaaatttctcgaaatttgaattaatccgcatacctcggggagagaatacaactgcggacgcacttgcagcattagcatcaacatcagatcctgagttaaagagagttattccagtggaatgcatttcggagcgaagcatccaagacagcaaagaaatcctcgtcgttacaagatctcgtgcagcggcacgcgatcgtggcgaaccagagatcgaaccgccacccaacaaacggaggaagtcaaggggatcaaatacacccaacaaggaacccgttgtcttagctgaagatgtaattccagaaacaatattagaaaccgaaccgttaatcgagggagatgttcttgaaccaaacgaacatcccgaaccagagccacgaatattccaaaaagttgatcaaattccggctaaagactggggggctgactggagggagccaataaagcactatatcgtgacaggtgagctcccaaagaataaatggcaggccaggaaaatgaaagtcgttagcgcgaaattttgtctgtcgaaggatgcgttatatagacgaggtgtcagtgacccttacctattatgcatttttgggcccgaagtcgaaatcgtcatgagcgaagtgcatgaaggattatgtgggagtcattcatcaggaagagctatggcttttaaagttaaaagaatggggtatttttggcccactatgatcacagattgtgttaagttcgcccaaagatgcaagcgctgccaactccatgcaccattgatccatcaaccgtcggaattattctcctccatttccgccccatacccgtttatgaggtggtcaatggacatcattgggtcattgcacaaatcaactcgaggtgtacagtaccttttagtccttacggactacttttcaaaatggattgaagctgaggcgtatgtcagtatcaaggattcggcggtgcagacctttatttggaaaaacattatatgtcgacatggagttccatacgaaatagtcactgataatggaccacaattcatctcacacgagtttgatgccttttgtgcggactggggaatcaaagttaattattctactccacgatatccgcaaggaaacggtcaagccgaagccgcgaacaagacaatattaagcaatctcaagaaacgcttaagtcatctaaagggaggatggtatgaagaactccaacccgtcctgtgggcttatcgtacaacccctaggcgacctacaggagaaactccgttctctttagtttatggcatggaggcggtagtaccagctgaactcaatgtgcccggacttcgtcgaacagaagcaccgttaaatgaggaagaaaattcagcaatgcttaatgattcactggataccataaatgaaaggcgtgatcaagctctaattcggatccagaattaccagcaggcagcagcccggtattacaattctaaggttaaaagtaggccgttcttcgtgggagattatgtattaaggcgcgtctttgacaacagaaaagaagaaggtgccggtaaactcggtattaattgggaaggaccttacattattaccgaagtggttcggaacggtgtttataggttgaaagacttagaagacaatccagtcaaacgaccttggaatgtgatcaacctaaagaaattttatgtttaaagctacatgcattgtttatgtacatgaactacgatgtagcttgatcccgagatgggtacgtaggcagctcgaaaacgagttcagctattaataaaaatttgttttatttctttattaaaggagaaaggttcgactgtgcgaacaagtgaggcaaatagaaggttcggctaaacgaacatacaaggaattggaaatagagcgttatttagaagacggaatgtccctcatcgtacacttcggactatggaaatcttgttgacgagcagaacacttcaactccttgaccagcaagatcgaggattggcatcatgcagtccggaattcgagcaaagtctgaaattccaagttcaatccactctccggggtgagattcaaggatgtgaagatctcttgacaccgtagtaagcctgcgttgcatccggttaatcctcttccgaagtctcctcttttccgacataagcttccggtgttgaagctcgagtgcctctatgaacgccgtcgctgttccttggtctctgattgagagacccctgatcaaagcacatggggctcggatctgagatctcaagaagccgcgaagtggaggaggctgcctgcttggctcatttggaacatcttcgtttatcattccgattctggagaagtcgggcatagattctgaacagcgaagattaaactccatacctactaaaatgaaaagaatggtgaggagtaaagggaaattgagacaacaatttataggaacgtcatatccctaacaagctgcggattctatccaaagaatggagtgattcgcggagagatttatgccctcgaacggatcctgcattaaaagatgcatctccaagaatatttggaaagaaaggaaagttgcaaatatttccataaataaaaaggggccgaagcccattacgagttttaaaaaaaaaaaggtaaagaagttaaagagcatttatgggagaggctcaggaacaggctccttcatcgccggtttagtcttcgaggtggacgccttgttcttggcatccacttcggaacgatcccgaacgcgtttccggcagttgctggcctcctcctccaggtcctcttcctcttcactgtcggatggaacggcgcagacaggggcattcacgggacccgggactcctctagcgcggagatacatccgaagcatcttcgggatctcagcaacggagtcgaagttccgccactcccattgaaagggatcactctccaaggcccgtatcttcctttccacccgagcgatgcgagcctcgagcgtctgccttttgagtcccagccgctgcctctcttcacacaagcgacggtgcttgtcggcgacctagcataaaaataagtgaataagacgaaacaagaagttttaaatcaagaactttaaatacttaccttgtcgatgaagtcgcaagcctctttcttctccttcggaggaaagtgaaagacggcgtgaggaaagagaacgccggccggctcgaagccgtcgccggacaaaaagagtgggctgccgggatcaacgggggctactgtttcgctttccatccttaaaatatttctcaagtgagattctaaagtcatgcttaaataaagcttaagagtaggtaagcctttatttataatgatttagggtttgtcttggaaccataagcccaataatggtagtgtgtccgagtgatttaaaccatttttggaaatcgagaaaaagcactttttgcattaaagacgagccgttttccttatttataagaagggaaagcgcaaccgtcgcattgactacaaaagtttctaaggcccaagcccaacaagtttatcgagttgactaaacccgaagtggggaactcgctctaagccgagctcagttctcgcattctaaagagaaaggtctgatcagcctaaaaatctcaaaagcattgccacaaggccacaaaaggttaaaagcggaccttgcaaacccgcatataattttaaccaaacccccttgggtcacaacctagaaaggtttaaaagcctcctcaggcaaatatcttgttcaaaagaaaataaagcctccttaggcaaaaaataaattaagttttaaagttaaagggacaatccccaatttaaagtggacacagccactacggagtgatctccaccccggactccggctcagcaaccagagtttcattcacctccttgactggtgcttgatcagatgaagctccctgaccaccctccgcggtacaaccaacctccggagtgacctctggtaccataggagctgcgggcgggacaacgtcttccgtctcacttgaacctagaaataataattccagtcaatcaaaggtacaaggtaagaaaaaggtaagccacaggagccaagcgttacctgcccagtctaaacccgattcacttataggaggtgattcagtaaagaatgcctcaaagtcaagcgggttgaaggccgaagtaggaagagctgccaagcgactccgtttttcagaaaggttagtcgacagctcggtcctttcttgctcctcggagaaatctgcttcatggatttgatccagcagaatcaggttgctttcatgctccttgatgtctgactccaagtccgacctagccttctcggtttgcatgaagcgaatggccccttggatcagctccatcccgcgtcccttaacctcctttctggccttcgatgccgaccttgccaactcggagtcacgcaatttggcaatcgccttgtatttcgcgttaagctcgatgagttggttgttcagggaatcagcgtttgattcggactcttgaagcctaccctgaacaccagaaaactcttcctggagcttgaagttctggtcgtactgaccctgcagctccccctttatctgcgcaagctcggatgttaaattgtcgactttgtcctccagatcgtgcttggagccggcagaagaactgagttcagcctcaagggcagagagtttcgttttccacatgtcaatctccttctcccgtccaatgaacaacccttcgtaatgttcgatcatgtcgttaaattcgctatgagcctggcattatacatgaacccgggatggcgagtcagttcgcagaatggcaatacaataaaaaatatataaaagaaaacggaactaacccgagatgagtgatgcgcgtgaagcaaatagcgttcacgaatcgcagggcgccatttgtcgaagtctggcaagatcgaacccgatcgggtcttgaagcatcggaagacgctgccctctttctccatagctgcgaagaaagaagagttgtaaaaatgggaatcttaatggaaataaaaaaaagacgttgaagactgtatgaatcaccaaacctgaaagcgatttgacttgagggacaagagcatgttttaatctcgaggaagcatctcgagattcagaatctccctttttcggagacgcgctccgagcagtctttccactatcaggctgggaagaggaagacatatcaaccggtcgtggaggacccattggttcagaaggaggggatgaccgaggtgagcggtcagtccgggccctcgacttttccctctgcggggaagaatcactgcgagaggacttgtctctcttccggcgaaccaagttcttaattggttcgttactaaaatcatctcggggaggacgaggtggatcacggcgaggagattgatccctccgaggagaacgtgagtcgcggcgatcgcgacgaggagttagtctgaaggaagcaacagatcgggatccctcggtgctgccatcatcaaccagcaaggtcctactgtagtccttcttgtctatagaagtcgcgagaaactttttcttctcctcgcaagcctcagccatcggcttggaaagcaacttacgtttggccgcaagggcccgagatgacattccctgagttgagggagggggagggatttgatgaagatgaccaggcggactcatcctgagtctgtggttagcttctaggaatcgctcaagagtgaaagaattccaaagggtttccccttcaagaattattttgaagaattcaatgaactcttcagatgggagagcggaagcgacgaaaactgcgaaatgaaacaacggtgttagttaataaagataaagaaacaaccgggaaagatacgggcgacctaatctctaccaggtttcgccgaccacttcgaagggaggaaatctgcaagatttccaatcgaagcgggagttttcttaatcagaaaccaaggatgatgccaattttcatccttgtttggaagatgcgaaatgatgttcctgttggcgttaggatatgctgagaaataccccgttttcttcgatgagcttctcacgcttagaagctcatttagttcagtaactccgacgacataaccggcctccgccgcgattgtaataattccaagaatggtacggagaaggttgggggttaattgaggaagagcgatttcaagagccgctaggtatagaactagggcttcgggaagcgggaaggttaatccgcaacccttgaaataaatctcgtacacacagaagtaaccatcgcgatggttctctggggattctgtgggggaagctatttgtgcttccgccataatttccggcggaatccggcaaagctctctcaaccgctcaagggattgaagagtacaagtggatctatagtgcggaccggcaatatcatcagagcgggtgcactcgtcgttgctagaacgcctctcatcgaaagacggagactcgggtctatcggaatcagaagtcattgggaaaagattaaaagatccggcgaagagaggttttttgtgaagagaagaagagagagtttttgattaaagtacaaaattaaaagaagagagtaatggtgaaaagaagttacctcaagctaatgatgaaaccgcctcggaagttgtgtgggaagtgggaaggtttttcccgttttaatagtaattaatcaatatgcggtcataatgatgacagatgtcatttggttaaaaatggctagtgccgaaattaaaggggtgatgagatttccggcgggaaatcagaaagattctcgagcgcaatctttggccacttgagcatttaaagtcctccgaattggaaaagcacttcgaagaacttggggggctaattgttggtgtcggatcccgcaccagaagtccgcgaccaaccaaagattgccacgtagtcaaggtaacggcccataaaggatgaagcccattggatccatgagtcaaaggagcgttcgaagtggttgtcaccacttcgagaatccgaagtgaatgtactgggacacgagttcggggtagaagacacgggtaagtcggttcaaggaaacttgggccaaaaaaggcgaggcccacgaagatcagagtcaactcaaattcaaacgttgagcattaaagtcgaagaatcaaaacggacgcatttaagaaggaataattgtacttaattattcattttaatgtcgtttttctatgtataaatatagaggccaatggccatgtaaaaggggatcttcctctcaagagagaaataatatagcaattttcgtagcaattcacaagtttttatacattcatttttgtccctcaagaataatctttcccacttaacaaaatacttgagtgtgtgaatccgacatccacagtattgaggactcaagcgagtttcggaggaggaccaagaccgattgatcttcttggaaccatttcccctcatcaacaagaacaatttcttgtccatctcttgtggtcgtctcctttggcgcctcttcgttcaagatatgactccaaagtccccgactacacaaggcagatcttgtggttcgtgaccacagcaagtagtttcctcccttgaggataaccggaatgattttcgagtgtagagaactcatctcatcatagaatgaactcatcgaacgaaatcaaagaaaagagagagttttggtgcggaagtaaatgaggtgggttgaatgaaggatatggagcttatggctctgataccatgttagattatggagctttaggtttcgatgggacaagaaatcaaccggaaaagatgaaagctttgatcggaaaggtgagatgaagagattgagagagtagagagattttagagatgggaaagattatttctctttcttactcaatttggtaaatacaaaggttccttttaaggacacacaaacggaatatcctcaaggatatgccatatgtacaacggtcacaaagagataagacgcgtcataaagggataaagcgtttcttgtcttcttcttcttttgcgaggtaacggctccaaggggaagggtctagcggcttctagaaccttggtgaagctttggataagcttaggaaggctggagatcccaatgggccgagtggacttgaaatggtacggacggcccgaaggtgatcgtacggacgagtggtgatccgtacggacgagtgtgaaccgtacggacgagaagcacaagatggtttcctcgacccggatgcttcctcacttgattctactcgtgccaagatggatcttcttcttcatttggttcaataccataaggctt

SEQ ID NO: 5495 - DNA, 454 bp, Arabidopsis lyrata
  Intron number 4 from transcript 497408 (locus 497408) deri ved from phytozome v7.0 (chr-ID scaffold_364; pos 740 to 1 193)
tctcgaacgagggagcgtttacaattcatcatctggtaatttccatcctctcttagtatcaaagcttatctctctacaatggtggttgcattttttctgtcttttgggtgaaatttgtactaatgcgttttctgtgagcattgcttggtttctggattctctgctattgatgtttttttttttcagcttgtctctagaattagagtactaatgcacttattagtacttaacttggattccagttttttgtcaaggagaatgatgttaaacccttagtatttggtagatttcgtagtatacttgtctataagctttgtttctgtgtgcttttatagaattgtgatgcttatagggagttttatggattggaaatttagattagttaatgaaaccattgaagtttatttgttttgttatagctgaggctgtgcctggatcagcagcttggttaggc

SEQ ID NO: 5496 - DNA, 2417 bp, Arabidopsis lyrata
  Intron number 3 from transcript 488958 (locus 488958) deri ved from phytozome v7.0 (chr-ID scaffold_6; pos 8705048 to 8707464)
ggcggtggtaacgatctcaagcggatacgtttcaggtacgttactatgcaccttacttcatcctacggttatgattcttttgttgactctgttatttgatcgtacggtgagttttagtttggcttcgtcgttggctcgtttttttttttaagcacgttttgttttggtcgtgattttgtcgaaaatctactactaatatttttaaaataatatagtatctcgaatttacaaattgaatattgcaaatttctataggagataaaataacagggcccaagtttgatcttgtttcatgtatgtttttagagaaattatactagataatctaaaaaaaaaaacaaaattaaatatctaacctctaacccctctattcactctctttctctttctatctctctctaccttctttctaaaaaactaatttttctttttttttggttattcacctaaatcaccctaaactaattcatttggatgatatgtttatgtagggaaaataaaacaaaatacttagaattaaaatcgagtaaaaaagtcatcaaataattttggtttatttcttttttttttcatcaattttggtttatttctaaactgataaattaaatcgagtaaaatgcattagctgaggttaaaataaaaataaataaaaaattattaacccaacaaataaactagaagaagggtaatttctgagtgtgaaaatgagaaaaagtaggtaaaaaatagagaatggggccagagttgtcgacagtaacgcttcacgcctaatgagaagcaaaggccgtaaaggtccaaaaagcaaaattgggtgtctccttttttaagtgctttcttgggtcatctcttctcattctgtcttttgtttttgcttttttcaatataaacttatttgactgataatcattttttctcctctgtttgttttcttcaaaattgttcttaaacatatgaattatcagtaatattacatggtataaaacatcattcgtcgataagtttgcttctaacttaattctgtatagatgttacaaatgtttctttctttattttttgtttaatcaaacattccaaatcattgtttggtacatgttaatcttataataatttttcaccaatactttttaacgtttttctaataaataaagaattttgttttattgattccttattctccgcgtctttgtcctctaatgacattattgctgttgttggagcatagaaaaatatggttcttcttattattccaaaagacaaaaaaagtagtactatatattactctaaaagacaagaagatatattataaataaacaaagcaaatagctttagcctctttagcacagttttgttcactcctcctatgtcgcctattgataacgacaagacaacttcaacgtatttcgtctcttccttagttcgattctttgtcttttttcatattattcacacttctagttctagcactcactgtctgttttgtcaaaaccttctctttctttttgctctctatgggttttcttttcgatcagtttagttcctgagggcgtaataatgtgtggttagattgagtcctctgttacatgtgtttattgttttgttttgtttcgatattggtacacaaaaataaattaaattgaaaattgagtttgcttggagaaattctcttctacccacctccaccattattttcttttactgtgtaggccacaatcatatttcttaattataagctttgaccattgctgtcgctatttcttcgtccatgtcttttttctttatttctacgaaattttttgattgattatttattgctatcagcagcctaccatcaagttagaccctaacaaaaaaaaaaaaactatttccaagtttcaaaaggttgtatttgtgtctcctgttttcaactctctttcttagcctatatgtgttcaatttgtcaaaaggttctattgaattagctatttttattttgtctaatctccctttaatccgccttcgttaatgcccactttggtcctctggttctggttaaagtcactcttgactaatattttatgtaaccattacaattaccttagaatctcatgtgtcagaaaatcaatgtgagccaagttgtgttagtccggaaatgggatggagttacaattaaacatacattatacttttggtcactgctaatttttagctgataacaataattaccaggattagtctgacaatttactcttgctatgacatttactaaaatcacctcttaagttaggcttttcaatctttcatctcctgctcttggactgctgtaatttgatcatggccttttcctagtagcattttgaagaaaattagcatgtttccaaaatgtatctgtgtcttaacttttgttttggattttttatttgtctttgattagccgagac

SEQ ID NO: 5497 - DNA, 751 bp, Arabidopsis lyrata
  Intron number 2 from transcript 473935 (locus 473935) deri ved from phytozome v7.0 (chr-ID scaffold_1; pos 24314360 t o 24315110 reverse strand)
atcattctcgaactccattctcgttggggaaatcggtatgaaacctttatttatatcgacatatagacatacagtcaatacattacttgaaatagaaaaaagggacatatatacgttgaagagagcaaatttcgaacgtctctatgaaataaataactcattattcaatgtatcagtagataattgacaaaatcaatttgatgcgtatttgaaatttcttggttgaattgtgattagtatatgaacagaattagtagataattgacaaaatcaatttgatgcgtatttgaaatttcttggttgaattgtgattagtatataaaatttgtatcatattcttatcaaaaaaaaaaaaaaaaaaaaacgtgtatcatatttgaaattaagataagacaaatcaacgtctttttatcggggtaactagctattaggaaacaattgtaacctttaaatcatctgtttaatctagtaaaaaacttaaaaaatatttacaccgtcattttagagtttttgttacaaagaatgctgttttttttaatattttcattgcactaattcaacttgttttaattgtatattaacagaattaatttaaaataataattatagtattcacaaagagtatatttaaaaaatatgattttcatttattttgataatgatgggttataaactaaatgagatttcaataatttaaaatttcttctattttgaaggtggtcaaagattgctcaacatttaccaggaagaa

SEQ ID NO: 5498 - DNA, 643 bp, Arabidopsis lyrata
  Intron number 1 from transcript 495092 (locus 495092) deri ved from phytozome v7.0 (chr-ID scaffold_8; pos 13838814 t o 13839456 reverse strand)
cgagctattcgagccaggtgaagagtttctactgtgttatggaattggaatcgtaatatgaattgaaatttgtattatagcttgctggattgatctagtaaagggtttagggttttaggtagttttgagtggaatttgtgatttctgatcgaagctatcaccggagtttgaacttagtttcagttgctagcaattgtggggactatgctgtgtggatagcctcatgagagcttgaattgggaactttgcttagggtcatagttattttgtttgtgctttaatatttaggactcaaaattattgctagcaattcaaacattgtagattacaagaaatgtttatgaattgagaaaaagatctagattatagatgagaatggagacttgcttgataacacagctactaaagatccataaaaaaaatgctaaaagctgaatagctagttcgtttttatgggggaactaaaaagatacagaattctcagattgaatttttgaacatccttagcgactatgataaatttagatagttctgtctgattttcgtgtgatgcggatgcaagtttcatgtttaaatagattttgttaaagccctgtttatggtcttaggtacaatccatacgttcaggcaagaagcaggatag

SEQ ID NO: 5499 - DNA, 4464 bp, Arabidopsis lyrata
  Intron number 3 from transcript 905359 (locus 905359) deri ved from phytozome v7.0 (chr-ID scaffold_3; pos 10502044 t o 10506507)
ttccactaaaaactagtcaacaagatgtagataataaatcaaaagctgatggtccatcaagaagaagccagcgaagtcaagtgccttccatttattctcagccaccttacacggcagagaagaagaagcacccaacacttcacccctttgcaaaagttgacacaaaaaggtttgaaagtttatgtgaatggaagaagtcgacaaaaaacaagtgagttttaagtttgtaaaactcataataatattcataacgtattttaaaggttttacatcatctctgacttttacaatgtattttaaaatgattttacaacgtattttaaagattttacattgcctcattggatgttacattgactcattggatgttcttataattatatatatatatttgttgtagggtgctaacagttgggggaatcaaagtagattccaaatggttcacaacactagaaacgcaggggaaaccaatatcaggatcggtatgtatgattttctttcaagtattctaatcttgtaaaactttaaaaaaccattgtaaattttaaagttcatatagactagcaaacatgagtaatttgttttcctttttgtgtgtgtttttcttagcatgttgatgcagctttacacttgatcaaaactagaagggaaaatcatccagaaatgtaccttaacaaaactgttgtttttgttggatcatctttcttaaatgcgattgacgatgagtatgctgagtttgtagtcgcaaaagatgattttcagtttagttctgaagagataagtaagctggagattggaagcaagacaaattacatatatgctcctatgtgcttgaaaggaaaatgttgggttccagtagtgattaatatcgagagaaggtctttgatcattctcgattacgcgacatcatttgtttcagaaaatgttaaaatgatgcatgtggttgcatattctgttgcgatgccgtacatattgcgcaagctcctcaacaaaacagatatggatgtttcagcattcaaaatatctgtagtggacaatatatcacaggtaatttttgtgataagtgagattgtagattgtattcattaaaaccttttttatatgtctttttttgtttttgatgctaggctgaaaagattgaagatactgggatgtacatgatgaagatgatggaatgctatgctatgcatattaatgcaaatgagaaactttcagaaggaaaaattggagacatgagaaagaaacttgcggttgacatctttacagaaataacagatttctaggtaagacttctctcaggttttaacatgtaaattaaaaacctacaactaagcttatatttcttgatttattactttgatcaggggctaattgtaagagctgggaagaaaagattgctggggaaaaatgatctattctttttgaagaaaacgttgctgttttacaaatttttaatttttgctgagaatatctgtagtgattttcgcatgaattttactttgtataactctctagttgtgaatttaagttttttttttctatgtacctgcatctataacatccaatcttcatttataccattttatcttttgatgttaatttttaaaagctatctaaacattttacaatgttaagtcttcatctataccattttaatgtttttacaatgtatatgattatatatagaaagaacttttaaaaattttacaatatttataagcttatgaaaataaaaccatcttatttatatttttatcaaatttttcatgattctttaaatttacaattgttttacaaagtattttcaagtttttaaaagatttttcaaaattttgcaaggtaattttagttttataatatatttttcaaagatttacaatgtgttttaaaagtttataacgtgttttaaaatagttttacaacctgtttttaatcgaactaagaataagatagttgtaaatagttgggccgaaataaaaaagaaaaaacctttaaaacactttaaaacccatttgatagagaaaaaaaaaaaagaagggggaaaaaaaaccgattctctcagtctccttctccgttgagtacaagaagaataaattaagggttttcgcttagcttcacggctttagattctacagttttggttccatctcggcttctccgttttcataaggttcaatctcgtcttctccgttttcataaggttcaatctcgacttttcggcttcttcgatttcatctgcctagggttttgggttccgtcacatcagtcgattctacggttaaattactttaaaacttcgttacttttttgattcatatgccaaattaggttatttccccttcaaaatcgagtttttgtgacattggatgatttttgagattttgtgattttttttttgtagatccgtttttattcttacaaggacttaaaaggactatagaaattcaattaattttacctttgttttaaaatcttttacaatcgattttacaagcaatttaaatggttttcaaaagggatctaaatggtttgattctttgagaatgtgtttgagtattgatgagacttttcacttttcacaaagcttccaagtaggtaatgatgtttgcaatgtactactctatttgcatttctagagttgttcgtttacatgatttaattttacatgcgttttaaagcttcttaaagctgttttacaagcagtttaaaagcttacaaaggggttgtaaatggtttgatttttttgagaatgctttttgatggagatgttttaattgtttttctatctttcctgcaacagagtgaaaaatgagtcaacctacaaagaggctgtttctcccaaaaagactgattgacccagggaatgaggtggataatttgaaaagaatatcaaagtattcttcagagaaacttgtattgaatgttgtcaaggattcacttagtcccactgagttcaatcggattcagaattctttcttgggaccaatcatagattttgcggaacgtgaagggatctgtttctcatcacagctggtccatcactttcttcagagaagaataatggttaacaatgaggagttgtggtttgtcttctcagaacaacccctcagattttctctgagggagtttgttattactacagggctgcctttgggtgatgatgcatcacaaagccagtcaatacgaaaaaagagaaagaaagaagatacatggatgaaggatggtttaagtttgaaagatctccttaataccttgtctacaaaacgcaatgagatggatgctgatgagagggttaggttaggtgctctgattctagtggagggcatcttaattgcttcaaaccctgtaaacaatatagagaaagaacatctggtaagagctagtagtttcacagagttctgcaagtatccgtgggctcgcattgtttacgggtctttggtggattgcttgaagaagataactccgactcaattgtttagaaaccaatgtgggcttcctgggtttgtttttgcaatccagatttgggctttaaccgcagttgcagagttgggacagaattttggcagtcgggtcctagaacccaacgacaatcgtccactgatttcgcaatggatgacaacaaaatgcccaactaagaaagatatagcaaaagttacaaaggttgcaacggtatgacagtttttctctactacttttttccaactaataaggtttacaattgttttactttgttatacaagaattttaagaagtttacaagggttttaaaaaaatggcaagatttttacaagacatttttaaaggttttacaagacattttaaaagtttttacaagctttaatacagattgtaaaacctttaaaatagatagtaaatgctttatgaaataattgtggttcacatttctaacttaaattcatattcttttttatgcagtttgatattaaacatatcattggcgatcctgaacaatattctcatttggttctccccccaaatccagaagacaaggactggtttgaagtctttgaccttgtagtccaaggttataggatgaccaggcaacaatggattcatggatggattgaggttgcagaatggaaaacgcaaaagcctgtgaatcagcctagacaaaggcaaccaaagtctgagactgtaaatcagacaaaaccaaggaaatcaatgtctgatagtgaaacactagaattgatctacaaggcatgtttagaattgaacaagagaatgttggtggtggagaaacatttagggatcaaagaacctgatgccagggatgatgaagaaaaggaattcccagcttcgtcaagtggagttgtaagtggaaacaaaacgatatctttttaaatatatctttgatctataggatggtcaaatttgattatgtttaaatatatttttggtgttacaacagaacaaaaagactgaagaagagtttataattgtctc

SEQ ID NO: 5500 - DNA, 1955 bp, Arabidopsis lyrata
  Intron number 4 from transcript 491763 (locus 491763) deri ved from phytozome v7.0 (chr-ID scaffold_7; pos 5060781 to 5062735 reverse strand)
tcacctctcgtctctccaccactctcttcctccaggtcacacactctctctctctctctcaatttttttttgtttttatatcttatttgacaatgtgattactagtacaaactacaagattctaaatgcatttagagaaaaatatatgtgcctttatttggtttgatgctcatttcgcagtgatcgagcgaaattataacatgttaacgaaaagatatgataatatagtttagaagattctgcctaataaacaattttagattaattgtaagtagctataaaaattagttttaggcacatgtaggactataaaacacaccaaccaaatatatttgtccatttttattttgtcgcaactattcagacttttatataccaaatttaaatcttactattttcatttctttttgttattttgggagaaaaattgtcgtctgacggcacgtagacaaatcctctagtggaaatcaattaattatatgaataaaaatcatactactaagtgctttagtaaagtggattgttctttttttttggttaaggaaaaaatatgttatccttaattcattatacaatagtccaacaatgtaaaatcactatcaaatttaaaagggcaacctttagacggacacatttaattactactttgttcccacctgtctccatttagtggaccttaattcacattacaccttaagtatttatattaatatcctaatcaatcaattaaagctccaattattgaggtggcctcgagcccatcatatttttttcgattttcgccttgacttttttttgagggggttagattctctcaaaagttaaatgtcatattccataaaaaataggattaacaatcaaaaaattagtgtgtgaaatctcaagtgcctcgtgtcccataaagtgccgtccaagcatagtagcactagaaaaacgtggctaatttataacctcacgcggttcaacgtttggctctttgacgcttttagcacgtgacttttccctcactacactttagtttaattctttactcacaataagctaaaataaagtatagccaattagcaagttttatctgttttatatccagaaaatttgttgtttatttcaaatgagatgatttaaaactagaagtatatggttcataagatctccactcttcattatactaatcattatggtacatttttatttactccaaatgatatccatagaaggtcttcatagtagacattaaggtttgatcctttataatataaggcagatttgttgagagttattatttttgctatacttttaaaaaaattcctttcatcatttctctatctatctattttttatatcatcaaatactaggacttggtgtaaaaaatctaactttcttgcctaacaaatgaatacactattatgttatttttctttgacagaaacaagatttatgtagtttttgcccaccttgataacattttcttaataaaatttaatataatcagacgctaaaaatacagtgaggtgtagaccagaccagtggagtcatggagagttggtgaaatcatactccaatcatttatcaaataaaaagtcgatcaattcattttcaaacctgtctttatctgtccttttaaagattatgcaaaaacattaaacaatgattttatccacgaaatgtcattttccaccggaaataattatagtagtaatgcttgtaggtgtatacgaatttatcagttctagttttcttataacgatcgagttgccaaaaaaaaaaaagatttttggtccgattgtgtaaaacctaaacacccctaatttccataatctatactgaggttggaaaaattcttaaaatcctaatttagttttaaatatatgaaaagatatcgtatgaattaacatatatcattgtttttatctgtgatgtatttaattgtggtaaatcttgaatttgcaggcgg

SEQ ID NO: 5501 - DNA, 2150 bp, Arabidopsis lyrata
  Intron number 1 from transcript 480491 (locus 480491) deri ved from phytozome v7.0 (chr-ID scaffold_3; pos 20877206 t o 20879355)
gaaagtggaaacacattattattaggtacttatcagcttcacataaaataagatgattttcgtataataatagttaattttcttttgttcttaatatatttgatatgtttttttatatgaatgatcaaatattacctatatttctaatgacttagttttaataattttgcatagaaacattcataagaacgttctgttgatagcacatggataagttttaatatatatttctcttaattctcaaataaattcataggagacttttttttttcaggtttttttaacaaaaaaatcgagacctaaaaaatgacaacttatgaaagggtaatattattgaatagccaaattagacacacaaattaagtaaatagcaaagagaaattttttttgttgcaaaatggccattgtcccacgttgtcagaagaagaagaagtgaactaaccaaaccatctttcatttgttgcgagttcaaccgtacgcaagacaatttcgtgagattttacaaaatagcatgtaacatttaaatttcacatattatattgaacagaaagacatgatatttgaaaaaatacagtaagttttttagaaaaaatattgttatgaaaaaattaacctgaatagaatcttttttaaaaaaaattacatgtgatcttaataaaaatcgtgtattattacaaaataagaattttttaaaaagaaatcttatgtgattttaagaaaaaacgtgtattactacaaaacaacatgataaagagagatattaaactaaatagaatattattttcaagaaatatcatgtgctctttataaataacgtgcaatacagaaaaataacatgataaaaaaagatatattatgctatcacatgtaattcgagaaaaaaatgtgttacataggacacttacgtaattacacatgcattctgacatgttatcgacaagttattgtacctcatggttagtttgtatattctttttgaatccatggttactttgtatatattcccaggtaaaagtccgtaacacgaatcctctgaacccggaaggtaattaatgttttgtatattatgacagtggtcactggtcggtggtaacttctaaaagtaatttaatgtttaatgttgcaaagtacatactatacgccctaaccatatgcaataatatcatagagtatatactattcgaaagtatctactaaataatgcttataaaattcatgtgacatttgatgaattagagcacgaggccgttgaaaaataaaacctaagttgaaaacaaaacagtaactgagaaacaattagtttttgaatggagaaaaaattagtttttgaaaaaacaaaatccaaaaactagtgtagaatctactaccattcaaggtcacattgttaaaccatcgactacgcattgacaagtgacaacaataaaacaaacagattagcatcattttcgtcgcatccatgccagctacagaaacaccaatgaggtcatatacttgtttttgattttaattatactaccgattaggtttttttttttgataaaccctatcggctgatccggtcagcctcggtagaaacgcaccgaagtgcttcagagtggactactccccgaaggaccaccacacagtctgtcctgagtttggaatgttttccgactaatgccaggggtagccagatcgcctgttaatggactaccaggtaaactgcttgagccttttggttcaagcccagacttcccacacaaatgtatttttttgtttccagcgtggattgaacctgattaggttagacaaatgttatggttctgttctgaatttaatgttttgttggtttttttttttggtttaatgtaaaagttttgttggttttgatataatagtgtaatatatgacaatagcttttttggttgatatatccaacaccagtatttcttcttcaaaagtgatacaatagaacatggaataaatttgtttcgtatgaatgatcaaattttacatatatttctaatgacatagttttaataattttagaaacattcttaagaacgttctgttgatagcacatggataagtttttaatatatatttctctgaattctcaaataattcatgggagacttttttttcaggttctttaacaaaaaaatcgagac

SEQ ID NO: 5502 - DNA, 1427 bp, Arabidopsis lyrata
  Intron number 5 from transcript 915786 (locus 915786) deri ved from phytozome v7.0 (chr-ID scaffold_8; pos 3483375 to 3484801)
cctttggtggtaggcgaattgaggtaatcttaattacctcttttttttttcaaattagatgatggtagatgatataatgctctatatgataaagacctagtattaggtaataactaataacgatttgcttttattattttaaagtatatctaaaagaattgcatgtgaaaccaattccagtaggtgggtaacctttttaacaaaattgtaactaattaagtttcatggatattatgtttttttcatcaaaaaataattgtattaattggttaaattgttacacaatagtccgttcagccatgtaggcaaggttagaccatccttattggaaggtgcttaacttggttcaaaagaaattaaaattaaaggtttaattgatgattttgctaaggaatgactcttagctaagagtcaaaaattgggctaagaaccaaaaaaattactaagaaccaaaactaagcacttcccaataatgttgctttattacaagaacgtttaacaaaattaaatcgtattgacctaaattttgttttccaatagtaaatatcttgtaaaaaatttgttatctaggtcatgatggttgccctttattgtgtaagcatgtatccaagtttgttgcattgcggctaacaaggcttttgtttcagcaatcaatggtgttagtgctactccatacctttgctactccttgatgatcgcgtataatccatcctcctcgagcctggaaagacaaagtatccaatcttgcgtcaaaattaattttacatgagaagaatctggctttttccaggagagtgactccgttggtggacgtggtttggagaataaacggagtcgtgatgtcgcattgttctgccattctctagattctgcttttgctttgaggaccacattagaggaactttctctgatttggttaaacactaagttatgtcttgctttccaaatccgccataaaagccaaaatgggataagtttctattcatttgttggattgggatgatgaaagtaatcaagcaatgtagagggatcaaggttcgaaagaaaggagagtgaatgacatatatagaagataaaaacgtaaaactctatattcaaacgacaaacaaaggaaacagagttttacaaagcgatagcacttgaaggctctttacttgggtatgaagaaaatagtttcattaacagtcaaatattctttctttcttttttcttttaatcatggttccttaaatttagactttgacgatctatctcaaacctagaagagttgtagcaaggacataaaattaaagaaggcagaatgagagtttgttttatatgattgacggattaggttctttgtttttaatcccaaattgaaagtttaagacatgtgaaaacattaatgttagtgttacactcaggaagttaagaaagaacttgagttg

SEQ ID NO: 5503 - DNA, 4885 bp, Arabidopsis lyrata
  Intron number 1 from transcript 899011 (locus 899011) deri ved from phytozome v7.0 (chr-ID scaffold_5; pos 19872922 t o 19877806)
tgttccctgttggtgtaagtttgaaaagaagactatgaagattaaaggcttgaggcccaagacattatgaaacaagtcggtttcataagaagattctagagatagttttaagacctaatcctaatgtgtttaaagtcggtttaaagactctatatatagaggtaccaaggtgtggtaaccctatgagtttttagagagtttagagattgtgtaagcttagggtttttgagttagttttccttgagcaataaagaaaagtgttctttagattacatagtccctttcttatatcatagtgtttgattcaataattggtatcagagcgtgattgaatcatactacttaggtatacgatacgaaatcggaactacaaacgtgtgtgtgatacaagaatacgtgttcttgtacaaaacctaaaacatgggagatatagtccctgtgaaacctaaagagatcaattcttcctctatacaatggccgatgctcactgctacgaattatacagtgtggactatgaggatgaaaccgatgcttagagtaaacaaagcatgggaagctatcgaccccggatcaactgatggagacttgaatgacttagcaaaagctcttctcttccaattaataccagaatcactaattctgcaggttggagaatacgaaactgcaaaacaagtatgggatgccataaaaacaagaaatctaggtgcagatagagttaaagaagctcgacttcaaactctaatgtctgattttgatcgtcttaagatgaaagaaacagagagtattgatgagtttgcagggaaactctcagaaatatccaccaaagctgcagctttaggagagaaaattaacgaaacaaagttggtcaagaagtttcttggatctgtaccaagaaagaaatacattcatattgtagcctcacttgaacaagttcttgatctcaagaaaacaggttttgaagacatagtagggagacttaaaatctatgaagaaagagttcttgatgaagaagaagaaccaacagctgatcagggaaaactcatgtatgcaaattatgagtcacagtcataccaaggtagctatggaggtggaagaggcagaggaggacgatatcctcaaggaggaagaggacgaggtaggtttaataatcaacaaaacggaaggcaagaaagggacaaatctaaagtagtttgctatagatgtgacaagctgggtcactttgcttctaattgcccggatagattgcttaagcttcaggaagcacaagaaaacaaagatgatgaaacacatgaggcagaggagttgatggtacatgaggtggtctacttaaatgagaagaatttcaagccaagaaactttgaaactcaagaagatggaaagaatgtttggtatttggataatggtgcaagcaaccatatgtcaggaaacagagaattcttttcaaaacttgatgaaacagtcactggaaaggtgagatttggagatgattcaaagatagacataaagggaaaaggatcagtctggtttgttagcaagaacaatgacaagaaaatacttgcagatgtatactttataccggatttaaaaagcaatatcatcagtttgggtcaagcaactgaatcaggatgtgatgttaggatgaaagaggattatcttactgttcatgataaagaaggaaagcttctggtaaaagctaaaagatcaaagaacagactttacaaagtcttcatggaatctgagtctgaaagatgcctgcaagtaaaagaactgagtgagtcagccaaatggcatgcaagattaggacatatcggattagaaacaatgaagacaatgataaagaaagatttggttacaggtttgccaattattcaaacagaaaaggagacctgtgtctcatgtctacttgggaaacaatctaggaaagtatttcctcaggcgacttcatacagagcaggaacaaagttagaacttgtgcatggagatctttgtggacccattacaccatcaacattggcccggaatagatatgtcttcgtactgattgatgatcattctcgatatatgtggtctatactcttgaaataaaaaagtgaagcatttgagaaatttaaaaaattcaaaagattagttgagcaagaaactggtgctactattaaaacattcagaacagataggggtggtgagtttatatctcaagaatttcaagcttactgtgaaaatgctgggatacagagacatcttactgcaccatacaccccacagcagaatggagtcgtagaaagacgtaatcgaactcttttagaaatgacaagaagcattcttaagcatatgaatatgccaaactacttatggggagaggcagtgagacatgccacgtatttgataaatcgggttggaactagaacattgattgcaaagacaccatatgaagctttcaagggaagaaaaccaaatgtggaacacttacgcgtatttggctgcacaggatatgcaaaaacagaagctcaaaacctaagaaaacttgatgatcgttcaaaaccattagtgcacttgggtacggaaccaggcacaaaggcttataggatgctggatccaactactcggagaataacagtgagtagggatgtcatttttgacgaaacaaaaggctggaaatggagccatctgggaaaagatacaggagaggaacttggaacgtttaaactgagtgtgaatgttggagtttttggaaataatggtcttagagaagctcaaaatactcaaactcaaaccacaaatgagactaatgaagttgaaactgttgatgaagaaaacagtgaaacagaggaaacagaggaaagagatgagttttgtgaggaagaaacagaggatactgagatccatgaacagaacccagagcaaatacaatcaccgcctgccagaagaacctcacaaagacaagttacaagaccagagtacttaaaggattatgtactgttggctgagtttgaaagtgaacgcctcttgttggctttggatgaagaaccatgggattatgaggaagcaaaagaaatggtagaatggagagaagcctgcaaagatgagatctcatcaattactaaaaataacacatggaacttagttgatcttcctagtggagctaaacctataggactgaagtgggtgtttaaaatcaagaaaaattcagatggttctataaacaaatataaagcaagattagttgctaaagggtatgtgcaaaaacatgggattgactttgatgaagtatttgctccggtagcaagaattgagactattaggttcatacttgctttagcagcatcaaacggctgggaagtacatcatctagacgtaaaaacagcgttcttacatggagagctaaaggagactgtgtttgtctcataaccagaagggtttatagaagaagaaaagaaagataaagtatacaaacttaacaaagcactctatgggcttagacaagcaccaagagcatggaataataaactaaaccagattcttcaaggtttaggcttcgtaaaatgctctaaagaaccctccttatacaggaaaagaaaggatgaatgtcttctagttgtggcagtgtatgttgatgatttgctagttacaggctctaactcagaacaaatttatgaattcaagaaaggaatgtctgcaacgtttgagatgagtgatttaggcctgttgacctattatcttggtatagaggtagttcaacatgaaaagggcattactatgaaacagggaaggtatgcagagaaaatactagaggaagtaaaaatgagtgaatgtaatgcagttcacataccaatgaatgctggcttgaagttgtcaaaagcagaggaagagaagagtgtggatgagaaagaatttagaaggatcattggatgtctcaggtatttacttcatacaagacctgacctctctttcagtgttggtgtgttaagtagatatctataagatccaaaagaatcccataaagttgccttgaaacaagtacttaggtacttaaaaggcactctgaactatggtctctcatttactcggggaactcaacaaggtctggtaggttatagtgacagtagtcacaatgtagatgaggatgatggtaagagtacaacagggcacatattctaccttggagattgcccaattacttggtgtactaagaaacaagacacagtggcattgtcgtcttgtgaggctgagtttatggctgctactgaggctgccaaacaagccatttggcttcaagatcttttggaagaagtaaccggagaaaggtgtgagaaggtaatgcttcgaattgacaataaatccgcaattgccttggccaagaacccagtgttccatggaagaagtaaacacatacacaagagatatcactttatacgtgaatgtgtagaaaatgagttagtcgatgtgaaacatgtgccgggagaagaacaaaaggctgatatcttaaccaaggctcttggacggattaaatacaaggaaatgagagagcttgtagggattggagatgtgacaaaaggtgatttcaaacttaagggagtgaatgttggtgtaagtttgaaaagaagactatgaagattaaaggcttgaggcccaagacattatgaaacaagtcggtttcataagaagattctagagatagttttaagacctaatcctaatgtgtttaaagtcggtttaaagactctatatatagaggtaccaaggtgtggtaaccctatgagtttttagagagtttagagattgtgtaagcttagggtttttgagttagttttccttgagcaataaagaaaagtgttctttagattacatagtcctgttcttatatcatagtgtttgattcaatattccc

SEQ ID NO: 5504 - DNA, 9482 bp, Arabidopsis lyrata
  Intron number 9 from transcript 492744 (locus 492744) deri ved from phytozome v7.0 (chr-ID scaffold_7; pos 9319614 to 9329095)
tttctgagttaccctacaaaaaaagtccacattgatagcataccgtaatagcacggtttaccaaactgctgttgaagatgttatgtaattatggttgttatatgatagcatttcataaacgctaagatagaatttcaatgagcgggaacccaaaatccctaattccaccaaacacttggtcaaaattccctaaacacgcgtttaatcacttaagcacaaaacacgcgttatctcatccctctttctcgaaaaccctcagacagaactctctcaaacctaactctctttgaagacgatctgactcttccaatcgccgattaagccctctgtcgccgccgttgaaagtcgccgtgaaactgaacctgacgccggcactatttccgccttagatctgtcggatttgagctcaaatcgaaggcatgtcctttattcagttgattttttcttctttttcgtatttcttctaggtttctttctttcaaatctagctcaagtctgatgttctaggtacaccaaatctagctaaagtctaatcgattcttgttttgcatgcctctgttatttgcgatttcagaacgatttcataacattattgtttttgtggtttgatttaggcgtatttgaacaaaatttctttaaaaacttggatatgtgctatgtaattcggatcttcttttcgttattgtcagatagaaattgagtataaaattgctatgaaattgtgttttgatattgtcatatatattctcttgattgttaattcaataccttaataatctgtttttgctatgttggattccgccttacttgtgtttaccctaaacaaaaccaaacatcataactggcatgttcacttgtgtttcttcagacatcataacttgtgtttcttctgacatcataacttgtatctgattttttagtactttgaaaaagaaacaagaactgagcagtgaattgcggggaccagtaacaggattaaattgcatgttcactaaactcatactatttttctgtgtttggtcccatcttcttactctagtatttgtcctttttccagttttgtttcttactgagattgtgtttatctctttcgtttgattggcaaatttatcaggtataaagttcagtttttttttttgtattctaccttgtttgttgtctgaatcttgtttttagtgttagatcgattaagttattttttttagtcaaactttcagtgattcactttcttgcataaccttatactcactctataattttgttttgcaagttttgctgagtgaaataatgggactttgaagcttatcatttgctcttatcatcacaagacaggttagtaccatcttctcttacatgagtttgattgtttaccatgttttttttgattataatacattactgtgaatgtcttgttgtgtatgctactatatatgaggacaggttagtaccgtatttcttgtttctagcatatgagtttgattgattacagtgtttcttgttttcagttttatttgttttaaatatgctactaaagttgagttactgcacttatcttgtctgatattaaattattgagatttaaaacacttaatctagtacattactgttgatgtcttgttggttatgttactatatatgaggacaggttagtaccatgtttctagtttcttttatatggtttttgattgataaccatgctttttgttttaagtttaatttgtcttaaatatgctactataactgagttagtgtacttatataatctgatattgaactattgagattgctttgattgaatattatatatgtatgagttatttgtttactagtctgaatatattttgagttaattgcttatggtattaaaggtttatattacggtatcaacatataatgttggacaaggattgggtgcatcttggcaggtaaggactttaattatataggttaggtttcagtaggggtttcagagactttacttcttctttttttccccttttattctgcaatgaagagctgatcctgcttatgagagaggggctacaaagtttgtacgggctgtggctgcagctttgggagacgtcgatatgattatatgtccttgcattgattgtcgtaatatagatcgtcacctaggtagtgtagttgttgatcatcttgtaacaaggggaatggatgaagcttataagatgcggtgtgactggtatcatcatggagaattgaatgcagtggctgaaagtgaaagcaaactaagtcactggaatgacgaggtatttgagttatatcaagctgctgagtatttggatgaagagtttgcagaaaagcttgacttggctgagattgcagagggtgatgacaagaaagaagatgagtttcttgcaaagcttgtagatgctgaaactcctttatatccaagttgtgtgaaccatagcaagctgtcagctattgtgtctttgtttagacttaagacacaaaatggatggtctgacaagagcttcaatgatcttctagagacattgccggagatgttaccagaggggtgtgtgctacacacatcattgtatgaggtgaagaagtttttgaaatcttttgatatgggttatcaaaagattcatgcttgcgttaatgactgctgcctattcagaaaaaagtacaaaaagcttgagaattgtcctaaatgcaatgcttcaagatggaagactaacttgcacactggtgaagtaaagaaaggtgtcccacagaaagtattacggtactttccgataatcccacgccttaagagaatgtttaggtctgaggaaatggctaaagatttaaggtggcattttagcaacaaaagcagcgatggaaaactccgtcaccctgtagattcagtaacatgggatcagatgaatgccaaatacccttcatttgcagccgaggaaaggaacttgaggcttggactttccacagatggatttaatccattcaacatgaagaataccaggtatagttgctggcccgttttgctagtaaactacaatttgcctccagacttatgcatgaagaaggagaacatcatgttgacattgttgattcctggtccacaacagcccggtaatagtattgacgtctacttggaaccacttatagaggatctatgccatctgtgggataatggggagttgacttatgatgcttttagtaagtcaacatttactcttaaggcaatgctgctttggacaattagtgattttcccgcgtacgggaatcttgctggctgcaaagtaaagggtaaaatgggttgtcctttatgtggaaaaaatacagatagcatgtggttgaaattcagcagaaaacatgtctttatgtgccatagaaagggtctgcccccaacacatagttttagagggaagaagtcatggtttgatggaaaagctgaacatgggaggaagaggagaatattaagtggccaggagatttatcaaaacctgaaaaactttaaaaatagctttgggaacttgaaacaacatgcaagtaagagaaaacgtgttgaatgtactggatcaagttctgatagtgatgatctatctagtgagtcagaggaggatgaagaggaagaggtaacagtagatgaggaggagttatcaagatggaagaaaaggtcaatctttttcaagctatcttattggcaggtgtgtccttttttcatgttattctagtattgtcttggatttaaacaagtaaactttgtgtaacagttttgttgttttttgcattctggttataggaactcccggttagacataacttagatgtcatgcatgtggagagaaatgtggctgcgagtattgtatcgacattgttgcattgtgggaaatccaaagatggtctaaatgctcgcaaagatctggaggagcttggtattagaaaggatttgcaccctaaaatcgaaggaaaaagaacatatcttcccgcagcactttagtctctgtccaagacagagaagaagattttctgtaagcggctatttgacttcaaaggcccagatgggtactgttcaaacatatcaagaggcgtctcattagatgactgtaaggtcacaggtctgaaatcacacgattatcacgtgttaatgcaacagcttcttccgattgcacttagagggttgttacctaaaggtcctagggtagcaattgtgcgcttatgcacatttttcaatcacttgtgtcagcgagtaattgatatggagcagcttttggtaatggaagctgagattgttgaaaccctttgcttgtttgaaagattcttcccgccaagtttctttgatatcatggtgcacttgacagtacatttaggcagagaagctcggttaggtggaccagttcatttcagatggatgtacccgtttgaaaggtatatgaaagttctgaaggattttgtgaggaacactgcaagacctgaagggtgtattgctgagtgttatctagctgaagaatgcatccagttttgtagtgaatttttgaagaatacaaccaatgttaaggaaggtgtagatagaaacactgagtatgaaaacaacactatacttgaggggcgtccaatctctgcaggcatctcacttaatcttactgaaatggagaaaaaaatagcccacatggctgtcatccagaatatggctgtcgtggagccttatgtagagtaagttccacattttgctagttcattcattaattatatttaggataaatgtctgattatttctttttcactttttcttttaacagtgagcacctacagcatctacacgactccaatggaagatgcagacgtgatgcatcactgttatggagtatgcacactcagaattttgcctcttggcttaaagaacaggctagttatctcttacataaacacctaatgtaattcagtttatgtatataggtgcctgaccttttctatttacttttgttagatacatcttgattcaaacagacatggagaaacactgaaatggttggcatatggtccacgtagctgcgctaggtcatatactggttacatagtgaatgggcaacgatttcacacaagatcagttgataagaaaactcagaatagtggtatttactatgaggccactgcagtctgtaggtctagtgcgaaggacacctcacaagtggttgatttggtatcatattatggttgcataactgacattatcttgttagactataatgtgttttatgttcctttgttccgctgcaactgggcagtaaagggcaatggagtgaaggaagaggatggttttacacttgtaaatctgaatcatagtcaagtctcctttttaagggatccatacatactagcctctcaagcaaagcaagtgttttacctaagggaagatgactcatcaacttggtatgttgcaatgagaggtccttcgagaagattcagtcagaaagagtttcaagatgcagttgcagacattgggccattgccaacaagtgttgacattgatgttgacttggatgaggctgaaaatgagagatctgattgtgaagggatatatgtgtgaaatgtctgattttttaccttagctcaagtctgatgtctgctttttttttttttaattgtttttccattgtgtgtttgatagttattatgtttgttttgctttgatgtctgcttttagttctctttaatctactaactctttcttctttcatttttattaggtgatttaaaatggctgggcgcaagaaaaagcgaggaagaaacactaaaaaaaaggatgaggaggtagagtatgtgggtacaatggaaccacaacaagaagaaccagctgaagttcaagctgaagatccagatcatttggaaccacaacatgaagaaccagctgaggttcaagtagaagtccaaatgggtgataaagaacctgatgtggaagagcctgaaggagagatagaattttctgagggtcatgaggttgctattgaacctaagagtaagagacagcgaggaccaactaggatgaaagacatagccaaggatccaaataccagagttagagtagagtacaatatcatgggagagcctattggtaaagggtcagttaagctgtcatcatatgttggtgcatttgtccgagaacatgttcctatcacaattgatcgttggacaaaaataggtgaagaaatcaagacacttctttggaaatctgtccaggtatcatttctctaatttttcttgtattgcattacgttttatcagatattgtaattaaatttactgttttttctattgagtgcaggctaggtttgaactagatgaagagtaccaaaaggttgcagtgcttaagcagatgggatgtttgtggaggtcctggaaatcaaagcaagttacaaacatcagagaagctaagactaaccagcagaggatgaatctgcgacttaaaaatgtttctccaaccgattggcgtaaatttgtgaagctcaaaactagccaagaatttaaggtatgcatctggaatcaggataattaagtttatgtactatatagtatattacaagttaacattcatctgttaggttgtaagcgatagctacaaggaaagaaggcgcaaacaaattcctcacacttgtagtcgcaagggaatggttagactagcagaagatatggtaatcacatgacagttatgttgtttatattgctcagcttctttttaaaacacttattaatatgtaatgatttttgtttggtttagaaaactggtagtgcagacccatctgaagtgacaaggctaaaggtttgggttaaatcacgtaccaagaaagatggtacaccagtaaacactaatgctgctgaaaagattgtgagtttaaaattttgcttctaatgatgtgcatattggcatttgattcttaatctgctattgaatctgtatcttatgagttgcagaaaaaggcaaatgagattgttaacagtgatgatccatcgattgcaacaaatgaagcacaacaagattcacttagccaactgttagggcctgacaatcctggtagaatgagggcaatgggtagaaatatgaataagaccaagttagcttgtttccaagtgaagcacaagtgtatggctcaaatgcaagagaatcagattcagctccagcagaaggtcactgagttagaagatgtaattctgaaaatgaagaatcaggttagaaacttatctatttatacattgtgaagcttatctatttatacataaagaagctcaaatagttcatagtatttgactttgttttttatgtaacagagacaatcacctgaggttggtgaaaactcagctgcaagagtaagtgacttatatcaaatgtttttgatttctttgttactttataatctaatatatttttcttctaattacttttacagagtgtgaataaaagatcacaaccaaagtgtgtcttgattgattgggctggttctgaggaaaaagttgctgaggggcttattatgtcttctgatcctgatgaattagttaatgaaagtcgcttaggccctacggatgttaaagtcttgattgtcactgctattgtaccagaagcattcctttggagacctgcgattaacatgtgcaccattgagaaagctgttggacatatggtggcctagccatctagtttgtgtgttaatctagaagaggagctccaaccagaagacattgcaaccctggtaaactttatcactcattctcatactcatacatagaaagtatatgttaacactggttgaatgtgtttgacagggatcaagacctaattctgtgaacaagtgcaagctactggatttgtcttcatatgatgttgttgttgcagaaggacgttggcagacacaagatgccaatgcattagttaatgggcttcctctcggaccagcagcagtgaaaatatttgtggatgcagtgattcaacctgagacatttatatggaggccaacgattgatgtcatgtaccttgaggactgtttacagtcttctgtagcttggcctgccaacaaagttgtctttgaaaaccatgcagatgcaacatgtcagaagtctccacttcatcaggcttctgcatcaactcatcaaacaacaatagaaaaggcagcagcatcaggaggaaaagcaccatcatcaggtccactaaatgcagcagctggttataagtcttctgttgagatatcaaaatccgcagccacaacaaaaggaacgaaatccgcaaccacagtttcaaaatctattgttgagaagtctccagcaacatgttcaaagcctcctgtaaagaaaagtcagttagcttcacactcccctctacgaagatctccggtaaatttagcagatgttgttacttactgattccggttattattatacatgaattaaacctgtttatattgtaatatggcagcgtaaaactggagctgaagttatcaaggctaatcagaagtgcaagttaatggatattagtggaaagaggcgggtggttggtgaaggacgtgtgcattcaatcgacccagaccaaaaggtacaccatgttcgcttgggggcaaatgcagctagagtttgggtagatgtagtgaagatagatgatgcagcagtttggaggccatcagatgaaatcgagtatatgagagattcacttggttcatctattgcatggccaatggataagttggtcatctattgagtagatgaagaaactggggtaagttttgtaattactgtgatgcttgtgttttgcttttatatctgctactgatatgagactttgttgattgttgcagggaatgaagaaactttggtccagattaggtagttttaattagtttaagactagactaatcagcttctgttatgtactttggaatcagacttgttatgtcttttggatttagacttttgttatgttgaatgattctgtataactttctaacttttgaattggaatcagacttatgttacaatttatattcagacttatgttttcatgtttatattatgcaaaacaggtatagaatcaaaatatatagctctctgaaaatatatataatagcaaaattaaaagccataattaaattaagtatagcaattcttcactgtcattgtagaaaatcagatattatagcacaaaacatgaagctacgaaaacaaattaaacagcaagaacaaattgctaacgtagaagaacctattatagcacaaaatttgaattgtcgttactttttaacaaaaatttcagctgctatatcaaaataaataacagcagttaaataaagctattgtatctaaaactatcatagcatatcaaaataacgctatcgtaggggaaacacctaccatagctgccgatgtcacagcatttgtgatttcgctatcaataacgtaagatagcatatggtttgcgctatcaatgaacgtttttcttgtagtgttatctcctcgttagaaagcttaatctgcat

SEQ ID NO: 5505 - DNA, 4925 bp, Arabidopsis lyrata
  Intron number 3 from transcript 899919 (locus 899919) deri ved from phytozome v7.0 (chr-ID scaffold_4; pos 3649397 to 3654321)
cacataatcaaaatcaaaagcaataaaaaacaaatgtaagtgtagccaaggctttgcgtttagatgtaagtgtacatatctctacaaaattgggatataaaaaacaaatgtagggaaaaaacttttgatgtttttatgatctcaaatctaacataatttgtttgatgaaataattttgattgggtagggaaatgaattggtcgaacttcatgtaagaagcgataaagaaacaatgttgagtcaagaaaaaagaaaagccatcttcgatcgacagatcgggcggtcggatcctgttactccagttaaataaatcgttgccaatggtcatgtttgtaggatatgtggtatcgatgacaaggttagtgattatctatttttttacaggggttagtgattatctaattatgttataaatttaaaatattctttttacatgactacaatagtttaaaaactgaattagaagaaaccgggaaaacgtttggatatcggttcaatctagtttgaccggccaaaccggattcacagtgttttgtcatatataaattaaaaataaatatatatgtcttaggtaattaatatatctataataataataattattattattattattattattattattattattattattgttattattattattataataataataataataatttctttgtaaaacatattttagttagatatataataaaaaattaagcacatattataaatttgaatttttttaaaaaaacattattatacaagattcacaagtttgttttacggttttaaaggtttttataacccaacgtaatcactaatctagttagcggtcaaaccgctagctcgatccaaaaaaaagaactgcctgattagatattgacttttgttcttttttttttttttgtcaaatattgacttttgttcaatttaatgatcttaacttttgttcaatttaaagaaattttcaatttgattagaagattttaaagtattttctctttttgtgaaaagtgaaaaccaatcaaactatagtccttttctcatccaagttagataattcaaatcaggagctttctatattttttagataaatctaacttggatataaaaccattttatcttttttatagtatcaagtattaattaattgtcattatactcttagcattacatattcagatagtcattatttataatacactttatatatatgcacatcaccttgaacatgtttctgtttaaagaaaaaagataatgtagttagatggtaaacatatttatcatttcaaaaatgattgaaaatgatgatgtgtctatgctggacatatagttttgtactaactaatatgaatataagtttggggtttatatatgtggggtttaggctatccataaagatatatattctacatagaagcgtacacatcgattgtttaccataaacctttttttttttaattgcctcttttactctgcgttcttttgtgaattgataatctaaaaatttaatctttgaaggagctttaaccattgaaatttcttaaatcttttcatggtgagtaattctctcttacattacatgatacactattatttagattagttatctttgcgattttgaaatatcttaaatttacatttttgttggtaatagattcatgatatgtcatatgtttagtgatattcaagcttttatttaagatatagactatgtatatattctggtaccaacaaaagtgtaaatgtaagatattctaaattcgcaaagataactaatctagataatagtgtatcatgtcatttaagagagaattacttaccatgaaaagatttaagaaattttaatggttaaagctttgtcgtagaccaaattttgagattatcaatacacagaagaacgcatagtaaaaacggcgattaaaatagataaaattaagtttagggtaaacaatcgatgttacacatctatgtagaatatatatctttcaaatcccacataaacataaagcccaaagcttatacgcatattagtacaaaactatatgtccagcatagacatatgtttaccatctaaatatatatatatatatatatatatatatatatatatatatatatatatatatatatatatattttcttaccatctaaattaccttttgttttaaacagaaacattttcaaggtgtgcatatatatagtgtattatgaagaattactttgttatatatgtaatgctaagagtataatcccaattaattaatacttggtactatgacaaaataaaatgattctatatccaagttagatttatctaaaaaatatagaaagctctttatttgaattatctaacttggatgagaaaagtactatagtttgattggtgttcacaaaaagagaaaatactttgaaatctttttattaaattggaaatctctttattgttttttttttttttttttgtcatcaaatttaattcctggtcagccggaaatctctttattgatgtgactaaaatctcatacacatttttattgggaaaaatgtcaaataaatcatgaactttcaaatttgggacgattaaatcatgaactacgaagaaaacatataaattgtaaagtttttgttgactttaaaattaattaacaaagtttggttgattagccattttagtcatagcgttaagtagggtaacagaaaacgattacggtgttaaacacccatttaccttctctgttatgtcaaaacgatatcgtttactgtaacgacaaaacaacgttgtttcgacgatttggggaaacttaaacctaaatctccaaatcgatttcattctttaaccctagaatttctctctcgctccctctattgaacaaggaagaagttggtgaagagggacaatgggacatggtatgtgttccacaagaaaacgaaagaggtggtgtcgatacagaagaaaacgatgtaggtggtgtcgaggcagaagaaaataatggaggtggtgtcgaggcagaagtaatcaatcgaggtggtatggaggaggaagcaaacgatggaggtggtacgaagaagaatttctagggctaagaaataaaatccgtttggggatttaggtttaagttttcccaaatcgtcgaaacgacgacgttttgtcgctacagaaacgataccgtttggacataacagagaaggcaaacgggagtttaacaccgtaatcgttttcagttagcctatttaacgctatgtctaaaatagctagtcaaccaagctttgttaattaattttaaagcctacaaaaacttaacgatttatatgtcttctttgtagttaatgattaaatcgtcccaaatttgaaatttcatgatttttttgaaatttttcccatattttattacaaaacgtatggtttttccaacataaaaatatcatgatttaatcctaaaatctaaaaaatatcacaaaagaaccttcaagtcaagaaaaaaaaaagagaagaagatgatatcttctatatacatttttgcaacactttatgaaataaatcctcaagttgcaacttatttacaaagaatgtcattggcattaattattatcaattaattaagattcttaattactagcatttctttatctaatatatttccatcaattctaattacttaagaaaaggagaaatcttaggatattattaatattatactttattgaaagataaatattatagttatttaaattttattaaacgtttagaatatttaacggaaaaaatgtgtagaatatatataatatgtgaacgaaatctataaaaattaaataatcatttgaaagaaaactttaaattgatttgaattataaatgttttaataaaagtattattcaaacaaaaaataatgtttaatttcaccgaacaggattagatggtatgacagatttataatattataatatatgaaatttacaataattaaataaccatttgaaagaaaacttttaaattgatatgaattatatatattttaaattaaagtattattaaaacaaaaataataaaataatatttaatttcactgaacgggattagatagtaggacgggtttggctcgatagtaatacgagacggtataccacgggtgaaatccattagatatgtttaatttcactgaacggtattagatggtaggacaggtttgggtcgatagtaatacgagactgtatactacgggtgaaatcctagatataacaatcaaaatacaattatactatcttaaacactaaacaaaacaaacaattttaacaaaataaatataatttaaatttaagttatatagttataatctagattttaacttaatgaactgtatgttattgtttctatatttttaaacagtaaaaattaaacatagtaattgtacactaaaaatatatagatataagaattgtacatttaaaaaatacaaaacattaaatcatatatatttttaatctactaaacaaattaaatttttattcttaaaaaaaattatagtcccgcggtgtaccgcgggttataatctagtaattactatgatcacatgagctcataaagttatgagattcaaatatttgaaaacaatgtgaaatcaaatgaatagaaaaatcttaaaacttatttttatttcaaaatacattttgaatgcataatagatttcgatatcccttctttgatttttgcctcatggtgtcttcttcattcaactcatagctaaactgttgcaaggctaatgaagttgaaaaaaaatcacagagtcaagaaccttatatactaacccaaggtaaaactaggtaaaaaaaattatttccagtccaataaattttgggaaaaaaaaatttttccccgtcccatcaaactaaaagcctaaagccaaaaaaaaaaaaaaaaaaaa

SEQ ID NO: 5506 - DNA, 2948 bp, Arabidopsis lyrata
  Intron number 1 from transcript 896961 (locus 896961) deri ved from phytozome v7.0 (chr-ID scaffold_5; pos 6645109 to 6648056)
gtgctgaaatcggttgtcttggtttggttgcttcttgtgttgagcttgttagctcccctctatccttatgtctctctttgagttattgcttttgtttaagctttttcaattgctcgactaacatattagtcgttagcttgatttgtttggcacttagtagtcttttgtatcctcttctcataggcaaaactcttctaagtttgaatgaaatctcagtttgtccaaaaaaaaaaaaaaaaaaaacatattaaattacagaaattaattaaatcaacaagttaaatgaaaaaaaacagaataaattgcagaaaaaattaattaaaatttttgatcagaactccacgtctccaaagctggtaagagttcatgttcttaacaaaacttcaacaattaatcagttttcgttagtacaataacgaaaattaaagaattaagactgtacaaccacgatttctacgatatggcaaactgaaaaattgttgtaaataatgataaaatacagaatcaaaaactataaattcgataccgaacaaagaacgatttgtgtggaggcgagacactttttctttaattctttaattgtccggtatgatggtcttacgcaatcagaatctcaggatacaatcacaccatcaactgtttcgcaacacccgaaaacagaagctaatgaaccaaaattttgtgttgcactctccaacacaaaaaacaagagaagagaagagagagatttttatgttgattcactatcaatctgctgagcaaaggagaagaaaacagactatgactatatatcgaagcttgtcaacgtgtacatggaggagaattttacgactttaatgtcgtccattgatcatgagcattggttttgttgttactcaaatcaatcaattgaaaaagatatttgatgaattagtcaacaatataactttaataaatttggacaaatatgaataactatttgggctataggcccattacacaaatcccaaaactcaattctcaaatcctgtatgattcggtacggtatgacatgacaccacatgatatggtacgcatatccggtttgagtttttcctttaacttccaaagtgcaacatttaacctttagtcaaatttcaagcttttcaaacaaactccgtttttgacgttccaatacactaccatgtagtgcacgcagcaacgatttcatcatgcctaagaaccagtcattctgataaacgtcttcatcggaaaatccaccgaaaaagtagtcacaaccactttgtcattacaagttccaacattaagaaataaagattaacgcactaacaattcgtgaaactacttagcctaactaaatcaagttgttttcgggttttgttttcctttttcaaaaagaaagaagcaaaattaagtaataactagatccggacccgcacgtacgtgcggggtttatattttacgatatgtgttttataaaatatgtttttcataaataatatttaacaaattattttctatttttgtagtgtattagataattgtatataattcatataattataaatttgtagtgtattataagattattttgtgtttttaataaattttggtacacaaattggtttattgtttgatagaatataaattttgaatagaaaagtaagtataattgttttatagaattagtatattggtttgggtgatcgataaataatttggacacttgcagaatattggtgtataatagtataaatgtataatctagtatttgtgatggtaaatgcttaaatcaatttttttacatattattttatgacatatattatgtacttatgtttggtttgtgaatattataataggatacaatatatttagtgagattcggaaaaccaaaaactgttttagtttacaaaagggaatttgtacattttgagaagtataatgtgtagtagggaaaataaaagttcaattttgtaagaaacttacaatttaataattgtataattaacattatgttgaattaacattatagtttagttaatcttattattaatttatgaaagcctcgaagactgttatgttaattatcaggcccaacttcttcttacaattaacattcgaatgggctgtatgacatattcatagaggcccagtcttaacagattttgaagccatttagtaatttgtgtttgctgtttttggtatttatcgaaatataaatattaatgttatttttggacagatatttgttgtttggaaatgtacgtgtcttatttccaaaaataataaaataaattcaccgaacaaaatagatattgaagaacaaacacctctcgatttccagaatcacttgcgcgattctcatagaaaaatcattactgcgtctcctattatacttatacttgatcaattcgtgaatccatgaagaggtaagcttcatattgaatcagacctatactttttcattttttgtatatgtcgattaaatttgcaatctttgaaattttcagttttaatagtacaaattcgccatagattttcaagaaggcggatcttatatgtgtaattattctcaattgaatataaaaattaggctttttcttaatttttatatgaatagaatttgatttatagtagttttaaaaatttatatagagtaggaagttgaacagttaatcttgaaattacagagcaatatgtagtttgaaatatacgtaatttagtatattttgcattaactgtgatttgagaagtgttttttgtatgtttagtatatcatttgcgagtaaaataagccgatgccaaaagcaatgtttttttgtcattgtagctatttctgaaatatatatatatatatatatatatatatgttaaaggttagttatatctcattttcaaagttttgttttatagctttgcagatttagtttatgttagaatgaaaactttgttgtatatttattcag

SEQ ID NO: 5507 - DNA, 5207 bp, Arabidopsis lyrata
  Intron number 1 from transcript 889834 (locus 889834) deri ved from phytozome v7.0 (chr-ID scaffold_7; pos 8141210 to 8146416 reverse strand)
aagcaagagaagcgggagctgcggccctccgagaagttattaatattttcggccctcaaataccaatgtgttttggtagcctagtggtattatgtcatacaccacatatcttaagtcatgagttcgaatcacctgaagcgtgagagaagattttttttagttttttgttttttttttatggttgaatttttttataagtatacacttttctagagcggccctttttttttttttgcgggcggccctcataatcgttgctacggctctagtcattatattatatgaatagaagaatagagaattgaagctatgttaatggggtcaattcaagaaattttaaccatttttttctatttttttcttaattttaaataacaaatctttcaaaatataagttattgtggtcagttgaccccatcccaccaacgtagctccgccactgcgtacagaacgagcaaaagacctgctagtagacggactacgcttataatgggtttggctcagatctgacccttgaagaaatctccaaatcctggtggttgaattcacatggagagtaattaagtattaatgaacattcgtaatattgtggacatgcttattggacgatacgctggatttttcttgaacgcataataaccaatgtgaatgcatttaatgatataattactgatccattatttcttcaaagtcaaaacatacaaaagtgtgatcatacgatatttaatttatttctccacaaataagagattgtgatttgtgagaagcgtaactgcctaaatacaatttaagattacgtttttaggttttatgtctctgcatgaattctcttatcagcgttcatttcagatttgttttgacttttgagaaggaccagttaaagttagtagcgtatgaagcaaatttcatcgcaggttttgatattttcttaaaataagaggatcaacatggatattaaaatcaagagcaagtgacagtgtagaagaacaagagctttgtgttgttgagataggttggaacacaccgcttctgtaggctgtagcgagaataaaatgaacgattaatacaaaattttatataaaaattgaaagtaacacacgaatttatgtaacaactctcattaaaatcgaaaagaaaccgatgagtggttatgggcctgactgcccataagaatcaaaaaaaaaaatgtcaaataatgctctttattcaaagcctccaaagtccaacagattagtcatcactcatcaatataatatggaattatatatatcagaagtaaaggtcttgtattatgaaactaaaatcgttttctctctagaatttcctgcacagctaaagttccgtttcatgattgtcttctttagctaacatcaattagcctaatctaaaagacaagtcgatacacccaaaaaaataaaaaatattgacgtgaaagaaattgatttctcttacatataattactgtctggtttcagattgattggactcataaacaaaaagagaactaaaatagaaagaaagggagaagaattagataaatgtctagctattatgcctcttttggtttcctctttcttatatagccttcctcgcaagcttgccttcttcttcaactcagctacaagaaccaacttacatctaccatgtttgtcctaatacgacaacttaccctgaaaatagcgcgtactcttccaatcttaaaacccttttgtcctctctttcttccaacaatccctctttctccagcggattctatagcaccgctgcaggtcggagtcctgatgtggtattcgggcttttcctatgccggggagatgtcttgccggaaatctgtcctgactgcatcgtcttcgctgtcaatgacactctgtctcgatgtccagaggagaaaaagagcttgatatggtatgacgagtgcatgcttcgacgagaattttttcttggaatcttcacttcagaatggaacaaacggaattatcttgattaacactcagaatgttacatctaatcaacaagaaatcttcagagatttggtgttgtccactatgaaccaagccgccaacaaagctgcaaacagtaccagaaaattcgatgcgagaaaggctgattttaccggattcgaggatttgtatgtattggttcagtgcattcctgacctgacgagagaagactgcttaagttgtctgcaacgaaccatcaatagattacccactgataaagttggggcaagacttgttgtgccgagctgtagttcaagatacgagctttacccgttttacaacgaatccgccgttggaacacctcagctggatccagcttttccaccaccaccagaccacctggtctgacaattctcttttccttgattacatgtttcagcacaacttttcttttgagacatccaatgatatgtggtgatctgatacaaactatttatgtcaatacatgagaaggcggaaactcctctgtcatagttatagctgttgttgttccaatcacaatcatttttattcttttcgtagctgttttaattttagtatccgagctaagagaaaggagatgattcatgagacagaaccactagctggaggtaaaaaggctccttttcttaggttcaatgattattctaccttgtccttatattaattcagctgttgaaatgtttttatagatagggatgatattacaacagcaggctcacttcagttttattttaaggcgattgaggcagcaacagataagttttcgcaaagtaacaagctaggtcaaggtggatttggcgaagtttacaaggtattaacatagcataagactgtagctgttttatctacaagtatacactaagataaggtagtttagagtttgaactttggagaaacgttttaagttcttggttttgacttttgaattgaggcaaatgatgtaaaacttatattgggaatcgagagagtggtgaggtgtttcacaaagtcttaacatgatttgtttcgaatcaaaaccacaataacatgatttatgtcaccactcaccactatacaaatcatgaaaatactctgtttttcccctgtatccagattaaatctgacacatactttgagaattgagatgtatgggattaagtgcaacaaccttgtaactgcaaagaatctttatgtaccatcacacacaaaaatctttctcattctctattgtacgtagctgaaaaactccagtccttagttatcttttttcaattgttacaagtactataacttacaaccaattcccttatgattttctaaaaataaattactgttgtagggtacatttcctagtggagtacaagttgcggtaaagaggctatctaagacatcaggacaaggtgaaagagagttcgaaacgaagttgttgttgttgcaaagctccaacatagaaatttggtaaaactgcttggttattgtttggaaggagaagaaaagatacttgtatatgagtttgtgcccaacaaaagccttgattacttcctctttggtcagttaaacttaattcttagcctcagatattttttttcttcaaattgcatgacatttttggttattaacattgtaaatatgaattatgaagactctatgatgcagagccagcttgactggacaagacgatacaagatcattggaggaattgctagaggaattctatatcttcatcaagattcaagactcacaatcatacatcgagacctcaaagcgggtaatatcctcttggacggtgatatgaaccccaaaattgcagattttggaatggcaagaattttcgatatggaccaaatagaagccaatacgagaagagtagttggaacctagtaagtttatctatgccattttctgactcttttaactgtaatttgctcctattaactcaaacatataagttttttttttcagtggttacatgtctcctgagccatgtaatttccaaatccgtcaagttaccttgaaaatctctggtatagttatcactcctcagaatctccataccaagcgatccgtaaaacgaacggtttgagtagcgtacaagacaaactgttctatctattctccagtctatagtttctgtctgattagtacaattctgcaacaatctaccattcgaagagatgatacaatcagaacaagattgtgcatcagtacctgggacacacatccctagaccgtatgctctgtttggatcttccccggtagatgtcgtgtagaagccgtcattagctgtgacattagaaggaagagaagaaagcaggtctcggcggtttaagtcgtaagtactattggctgtgaaaaaaccagatctttcaaggcatatatgtgcagagacatgacaaaagctgatgaacacaaaccaaaagattactgacaacttggaactgtcaacattctcgtgcagtggttgtgtattctgacactaatataggcttattaggcgattctaacctagttccgtctccgacggtgttgcctcacgcagccgccgagaaatttctgcttccttccccctcttcatttcttctaatggatgtcctctccgttactcctccatctacagatcctcctgatccagtagatccagttactcttctctctcacagatcccctccgcaaaatcagatctcctctgctccggttatagaaaccgatttactctgctcctctgctccgattaaggaaactgatttcatggttcctgtgactggccaagcttcagccgttatggacccgtctctcactgaaatcaccggacttgttccaattagttctgctcctcctcaatcggaccaacctgctcaaatatcctcttcctccccgccacagtcggtgattgaagtcgaacccgaagttcctccggtgatagacgatactcaactcctctgggctgctaggttcaattcaaagctccggaatttgaagaaagttactcggccaacatttacgcaagatggcactcccaaggtcagagccccagcttcagtcatccttaaagccaccgacacttggaaggaccatatcgtagctcacttccatggaactcctcctcctccagggaaaattttcacagatttgaaccccatttggggaacatctggtcgtatcaacatcaaggcgttacctaatggacctgttctcattttcattccatcagaggccactcgacagtgggtcattgaggttgggtgt

SEQ ID NO: 5508 - DNA, 1282 bp, Arabidopsis lyrata
  Intron number 1 from transcript 475688 (locus 475688) deri ved from phytozome v7.0 (chr-ID scaffold_2; pos 10233453 t o 10234734)
ggttttcaagtcggcggagctcgtaaaaggtttcatcaatctcttagatcgttacgcttgaattcgccattgaaattaaatcgaggacgatgctagatcgttcccttagctcttgatttgaatcgaattgtgcgggaatttgattgaaatctgtagattgatagaattttgaaatcactgtattcgacttcgtccttagttttcttgtaaattgaattcattgttttgatgttatcatctgttacgaacttagcaggattctgatctattgtgtttgttcatcttcaatttgaataactctttctgttgattgattactatgacctagatcgtctctacgctcttgttttctttcgaattgtgcggaatattgtttgaaatcagtataaggatgttacctgatgctagaattttatcaaatgttagcagagttttgatctcacttgtttttatcttctcatccgtttgatttaaaatcgaatcaagaccgagctagatcgtcccctttcctttcgaattgcgcagaaatttgactgaaatctgtagattgatgtggcctaaaactacagtagaatgtttttcaaatgtgtacagagttttggtgttactctatccagtttcaccctaagctttcttgtaatctggattctgtagtttgatcccttgttttgatgttctcatcggttcgattttatttgagaagcatgtattgtttgacaggattatgaagctgttgtgtttgttcatcttcaatttggaaaccttcatgtagattgattactatgagctagatcatctctttgctcttgctttctttccgattgtgcggagaaatgattaaaattcgattttaggttgacaagttttggattttgtagtctgataacattggttttatgttctcatctgttcgattttaagctgggaagtatgttgaacttagcaggattctgatatgttgttaattcatcttcagtttaaaacaactctttctattgattgattactatgagctagatcgtctatttgctcttgttttctttcgaattgtgcggaaaattgaatgaaatcagtatattgatgttacctaaaactacaattttatcaaatgatagcagagttttggtctcactcaaataagttttcttataaaaattgtttttatgttatcatcagttagatttcatttgagaatcatgttgaacttagcaggattctaatctaatgattgatcgttatgatcaatactgatgcaggtacaacgtgccgtatccaactttat

SEQ ID NO: 5509 - DNA, 725 bp, Arabidopsis lyrata
  Intron number 1 from transcript 486975 (locus 486975) deri ved from phytozome v7.0 (chr-ID scaffold_6; pos 439944 to 440668)
tcctccacgtatttattcttatttctccttcattctttttttgctctatatataaactaaataaaaattcaaatattaccgattagttttgttgcagtggaagctatattatgttaccagttttcatttaacatactggtcactagctattctcaaaattggaaaagctggctccatttcaaaaccgtatttaatggatctctaatctataacccctgaggttttgtgtattttatgatttttatctctagattatataagcattgtggtatattacgaattatgcttggaatgttctctttttgtttgcatttgactttttaaactgatttaattgtttagaatataggcctataaggaggaaaactacaataaatacacacattaattaatacaaggcggtaaacaaatactatttcttaaagttgccatcaaaaaagaattgtcaaaaactatttaatacttcttccgtcccacaaagaatatcgttttaagattttatagtttcacacaaaaaggttgtttgttatttgtaatgcaaaattttgaataactatctatttttaactttacctttttgatatattaatagaaaagataattttatttagtgcactaataaaatgtatagtgtaacttttaatagtttttcaatgtgtgaaaaaatgtataatgagtaaaacatagaaaatataacaataataacgaaacaggtcaaagacgtc

SEQ ID NO: 5510 - DNA, 549 bp, Arabidopsis lyrata
  Intron number 3 from transcript 481337 (locus 481337) deri ved from phytozome v7.0 (chr-ID scaffold_4; pos 3425175 to 3425723)
gtacaacaatatcaagttccaggtctgggatttaggtacgtttcttagaatatgtttgaagtagtacaaatgattttggtatatatggaagggaaattcggaatctacactatataagctttagattaatccatatcaaaccattttccatgttagcagatcttcagtgacacatttgaataatggaaatgtttcgtctttgagtgaattacacgaaccgtgatcaggacattccttgatttggagtccttagattatatattcttcataatgataggtagttgtggtatatgttgggtatattggactctcttgttccaatttattacattttctaccttttccaagtggtcttgaatatgggggattgttgattgttttccatggagtgcgtgtattgtatgtatatatgtctttgctgtttagtaggttcttacatacaattcttatttgcgtttcacattttgataaatagattggtttagcgaaaacaatacactaactagaattttcatgtgacaggtggacaaacgagcatcaggtagctta

SEQ ID NO: 5511 - DNA, 1684 bp, Arabidopsis lyrata
  Intron number 1 from transcript 895813 (locus 895813) deri ved from phytozome v7.0 (chr-ID scaffold_6; pos 24015756 t o 24017439)
tgttctttcggaggtcttgcgccaggtggcgaaaggtaagtgggtaacaattttttaaaaaaccaaaaatgttttcatatctcactctctctccacctatcatcatattctctctatctttctctctctcttaccttattataatactattataattatcataatatctatctttaaagatatatccataaatatgcccttatataagagccattcttcattctctttcttcttttttcaatatttttatttttttattaatttttttaagaattccacacattttagaacctctcattgaggatggtctaaataattaaccatgatatatgtaaagccactaacaacaaaccaattaatgaaacaaagtttagagcttatgcaagcttccttctttagttgatcggacctcttaatactagttacttcatagtcttgcttgctttcaacctcttgctattgcatattatcttggtccccatatgattcgtcctcttttgtaatcaggctcaatcaaaccttacctagaaaaaactacaagaaccgaatttagatctaacgtaaaatcacacatacgttattctgttcctggtgtattcttcacgataatataagtaaatcatgtctattataattatagggtattatttaaaagtaccaattcctatctactttgaatataggatatacatacagtatataatcaacccgttccaaggggtgattcgagccatcgattgaggcatacttttataacaaatactttctcgcaatcagaggaagttcaatccggaattcggttttctctataaaatatttcaactttaaaggaatagtaaattagcaattagtgaaattgaagctactataaatccgttatgttgtttggtgatggtttagattagttttttcagtcataattttctattacaaaaagaaataagtttgacgaaaaagaaaaaaaaaacagaattaagttttgcttttgttttttctttcaaattttgattcggtttaaaattcaatttagggttttaaatatttagaatataaaactaactttttctaatataaatgctttgactaaaagtggagtatctcacattcatcatatcgacataatttttctttgtttctcgtattcctagctatgatataaaatcatgtctatatattatcgggctaaaaagtaccaattctcgggatagcatgcttcaacgattaaagatatacaagaaactattaggagatgatggatctcctgtactagcgacagagtacatgaagtgatgcacaagaatacaactttcttgtaaatatggaaactgttttagggttagaatcattatatttatagagtactaactattacaggactaactattatttctccattgtacacgttacctcacttcactaatctggtccgatcacccctactaattaatagttcaaaaggctaaattctgttgaaatagctagaaaaaaattatctcgaggagacgtgatgaattttgtcgactacagtgcgcttcgactacagtgtgtttcgactacagtgtgtacagtgtagagtgtagtgtgtgtttcgtgtttcgactacacgcactgcagtgcatcgactacagggatttagggtaaagtgtgtaaagtgcttcgactacagtgctttacttcgactaca

SEQ ID NO: 5512 - DNA, 1782 bp, Arabidopsis lyrata
  Intron number 1 from transcript 946796 (locus 946796) deri ved from phytozome v7.0 (chr-ID scaffold_7; pos 13137343 t o 13139124)
tccgttattcaacgggtatatttgagaagtatacggtactaaaaccacaaccattgatcttagcttgatctgttcttccctaggatttatacataaaagtaaattgttttgtttaataattttccattgcatgaactttcgagacaacaagtggacaggagtgtaatgtcatcaaaagtcaaatcaaacactgtgaggaacataatagacaacgttggcttctttcgcagctgctcaacgttgtctctcccgatggtcccaacactctcttcttctttttttgtcaacattcaaacgttttttaaaataaataaaaatgtttaaccttaatcatctttctagatctttaaatgcctaaaacttcaacttaatcagtcagcaatccgtcacgttaatgattttgaaaggaagacttttgttttgtttcggttagttttgtttgtttagtattttaatcacaagataactctaatttcccattagagttgtgttaattgtgttgattatgatttggcgttccaattctgatattatttttatgttgtaaatcttaaactgttacgttattgttctatcttcctatgtgagaaaaaagtaaaatgttttaaaattttgacatggataataatataattgtaaatctataataattatattatcattttatttatatttttcaaaaagaaatatatttatcttaatagatttaatatgataatgtcaaatatagttataaatctaaaagagttatgttattattccatccttttatgagaaaaaaacagatattctcttaaacttttaaattaacgtggataataataaataaatgataattttactaatatgataatgattcggttttaatcttaccaaaaaacaaataatgattctgttttacaaatatataaattttctttgtttagttgtagatattgtcatataaaaaattcttagatcctccactgccttaattttatgtaaatactttgcttgatatttaattttgatttgatatcataactaatccttgctttttttttcggcactaaccattgaattttttatactgccatttaattcttgcataaaaaataataattaatagtagtgtttattatgaatgcaggtttgttttccataaaaactagattggatttatggaagcacgtcattgtttccagtgcgaggaaacaaatgtcgtatcactgctgttgtggctctttagtactttcatttctgtttatggctttgcttcggttgtatggttagtcatcaatcattgatcttctcattgtttgaatattgttgcataggaaaaatcttccttttttatgaatctttcaaaagttgggtccatgctattctcagtaattgattacgtttattgaatatttgtgtgcttcctctgctgatattctaattcatgctttattcgtcgtctttgatacactctgattaaccattgtggacctctagagtctaatttgcaatattaatgcaagtctctttaacttacggattatgaagagcatcctaagatcgtttaatttgattcaggttttatgtggctaatgtttggtcttggatgtgaattagtctatcatgtttcttggaaggtaggaagcaatcttgatgtttaccaaaatccaatgtgctcttttgtagctcagttttgaaatatgtactaattattgtagagggaacccgaaacaaagagaccatatgtatgattttatatgcgaagagaagctccgaatttgaaatcgtctccactccggt

SEQ ID NO: 5513 - DNA, 11532 bp, Arabidopsis lyrata
  Intron number 5 from transcript 897229 (locus 897229) deri ved from phytozome v7.0 (chr-ID scaffold_5; pos 11246860 t o 11258391)
taatctcaaggaattaattctccaaaattgctcaagtctactagagctccctccttctattggaactgccacaaatctgaagagattgaatattagcggatgctcaagtctcgtgaaactcccctcctctattggagatatcactaatctccaggaattgtatctcaataattgttcacgtgttgtggagctccccgatatcgagaatgcgactaatctcaaggatttaattctccaaaattgctcaagtctactagagctccctccttctattggaactgccacaaatctgaagagattgaatattagcggatgctcaagtctcgtgaaactcccctcctctattggagatatcactaatctccaagtgtttgatctatccaactgctcaagtctactagagctccctccttctattggaactgccacaaatctttggagattgaatatcagtggatgctcaagtctcgtgaactcccctcctctattggggatatgactaatctcgtagcttttgatctatccaactgctcaagtcttgtggaggttccatccgctataggaaaacttcaaaaattgtctgagttgaaaatgagagaatgctcaaagctagaggctcttccaacaaatatcaacttggaatctctccgtacacttgatctcacaaattgctcccagttgaaaagatttcctgagatctccacaaacattaagtatctcaggctcacaggaactgcaataaaagaagttcctttgtcgatcatgtcatggtctcgtctttatgactttgggatttcatactttgaaagcctcaaggaattcccgcatgctcttgacatcatcacggagctgcagttgaacgaagatatacaagaggttgctccatgggtcaagggaatgtctcgtttacgtaaactcaagctctacaactgcaacaatctggtatcactcccccaactttcagattccctatcttacttagatgcagataattgtcaatcccttgagagactggattgtacctttaacaatccagatattcgtctcaaattctccaaatgcttcaatttgaatcaagaagccagagatcttatcatgaacacatcgacttttcatcctgcgatcatatcatgtacacaagtgcctgcctgcttcaatcacctggagatgttaccggatagttctgggggttccttgacaatcaagttgaatgagtcgcctcttcccacatccttgagatttaaggcttgtttcatgctggttatgggtaacgaagaaactggtgctgataagagtttgatggaagtaatgattaacatcagggacaaacagaatgatctcaaagttcggtgtacaccaagcctttatagtatacagccacttttaacagagcatatatacacatttgaagttgaaacagaggaggtgacttccaccgagcttgtctttgagttcaaaacacgctatagcaaatcttggaggtcccttcctgattggaagatcaaagacttggggatatcttggaggtcccttcatgatagcaattggaagatcaaagacttggggatatcttggaggtcccttcatgtagatgagcgtcgatgggatactgttagaaattttaacccattttcatctttaatttatttgaagtttatgacgttgtacgtgtgaaagattatcaatgtgcagtgttgggttatgtttaaaatttaaattaattgcagtgaagaagatatatgcaaacaaggacggtgaagataagagacgaggaagagaagaagctgttgagactttaaaattcatgtattgaaagcaagattgaatttcccacctgatgcagataaaaaggtacctttggtgtttgttgtttgctggacttttgaattcttcttttgggagattttagaactgctttcattgaattttcagtttaagctaaacatgtattaggatggagcaatatcaagtggaagataggagaatgcgggatactccaaaccttggaggttccttcgtgttaatgaacatggtgaggttaaaaacttttatcccatttccatcgttaattatgtgattctataagttttaaaatttgtgcataattgatactaattgcagataaggagatatatgcaaacaaagatagagatgttaaaaccgtattttcagatttgttttcatttttaagttaatgtgttgtctctctgtaacaaatgagcctctttttattgaatatatatacaatagaagggaaaaaaaacaacccagaaatacaacaaatttggcccaaaattgtctctctgtaacaaatgagcctctttttattgaatatatatacaatagaaggaaaaaaaacaacccagaaataatctatttaagcatacaatagcagagcagatattttccaggatacataataaacagatgatgcatgttttgtttggacacaatctgtgtgtgttttatttactttccatattatagaaacatgcaaagttcccatcaagcttgcaagaagctagcgtacttcgcacccaggagaagcctctggatgcacaagagggcgttcttggtgacctcggcgttctcgtggttcatcagtttcatcactcgttctttcgccttgaggtctgttaagatcactctccccgctgcatggtactgtatgaactgtgatagatcaaagcatgccaccgccaacgatcttggatcactagacgtgtccaggatcgtgaggaggaccctgagtatctgtatccaacaagttttaacatgtgattaggaggaccagcccgctttgtgccctttgattaccgagacaggttaaaagaagaaatacctggaagtcattttcctcaaagcttgtgacattctcacgccagaaattggcatctttgtgcattgggttccaatcaagatggccaagaagaacctcttgcttatacttgtcaaaggaactcaatttcctgatcttgtcttttagcccttcttctagttggttcagtgcatccagcaagtccttacaagttcagaatttagcgagtttaactatgaccatcaagtactaaaaacacatctaatgttatcggcatcacttctattaaccaaatttctcgctgtagctttagcagaaattaaagaaattcatcttccccacgacaactaataagcagcagtcctcaggctttgtatttaaattgtcttcttacctcatcactccatgcttgtgtttttagactgtggataatatgtgggagtccaagatcaaccatctgggcaccaaatgtaccttttggaagcaagttcctgaacgtcaatatgaccaccctgacaacctgtaagatataataccgtcaaataaacataataacaagtgcatgtgcatcacaccacatttatgcaagttaaagatcagacaaaaaaacataactcaccttttcctttgtcgagctcttaaccacttccgtgagcctttgcattgtcctagatgttgctaagtactctattgcaggctcataataggacagaagccacacgcagagacatgtttcatacaaaatctgtggttaaaagcacacaaatcacaggaattaggtactgagaaattatagcaaaaagagagttgttctttcttctgacaactaaaacagaactatctcattgttactaatttgtccagcccacactttagaacaaggaagcaatataaatcaacagatttagtagttatttgaaattcaaagttattttcacccccagagtgtctgtctagtaatcactaatcacctttctgccaagaactttgcatgatttggaaactgccatacttatttacaactctagtggaaattacttcccctaaaaatatagttacctggatagattgctgagtggatgcaggggagattaaagggacaagtaacttaaccccatctgcctgaacaaacgacgatctgacaacatgttccttaagcagtgatgataggcagctgattgcaattggaacaccacgagtaggatgagaaggttgcttcaactgcatatcaaagccaaggattgtaatatccatggtggacatcaaaagcttttctggattcactatgtcacaacataaaggttccctaaatatcaaactcgcatcaacttattagccaacatcaaagactttttgcctactcagaataattgtttgtttgtgttagtgtttgcatttgcgtaatttaacaaagacatggtgagagtggaattgttattgctgattttcacaaaataaatgttatatgagctctagctctaacaatggcattgcctacaagacaaaaaaaactagcacttaaaacaacaatgcaagaccaacataaactagaacgagagaaagagaaaagaagaagaaacctgagcacaaagccattccaccaaccctttgagaacatcatcaagtgtagtaatctgtttctttgaacccgaagcttctccattagcaataacaccatcaccagattttggcctagcactatatgtaaatgaggctgtatgttacatacatgaaatgatagaattatgatagataagctttattaaataccttattatccaggcaaggatcttgcagcttttttcttgaatgaaccaatttcccttccacagcaacctgaaaagaacatatcttttagcttgcctacttttgcagataaacagacaaaatcaagcatacagtgactttgactaaacactttgtctctatatatgtcgtttgataaagatcatctatttttttcatacagtttcaccgagccccaaccaagttattgccaatgctatttggttgaagaacaaatactacttgcctgtagctgaaagcagttccccccaatggagcatatgtttccccttttgtcaggaggattgtatttagtttaacaaactgactcatcatcactcaattctggatctcagaaaaaaacgagcaaggaccaaggcaatagaacagaaaaagcaacgaaatcttgtgctggaccactacaatttatttacaggacagaaacatcaggtcaagtgaaaatgtcccactaaacataacacaccgagattaattcttttttgaaaaatagccatttccaatcactaggaaaggttaggttcatttgacaccatagatacagtagaatacaagaaatgagcaaaatccaagaagtcctagaccttcccaaagcagaaagaacacatacgatcaaataagcgactttatcccccttaacaatacttgtctgaaccaaaatacagtcataaagctataccataggggctcacctcaagaaaggctcgtaagtatcctcatgtgccaaagatttatcatggaataaccgagctcgtgtcgggttttctgtcaaacagttgatacattaatattaatcggtatctaactaaatgaagaaaatttaaaagcacatatcttcaggttccatttacctgagagcatttcataaatcaaagccaaaacatattcaactgtttcttccttgaatatatcacgtaaaatgctaacaaacagatgaacataagctggaccatcctgcaataacaccaccacatattatcacttcataacaacaaggtaaacgcttgcatgatcattatacaaaacttcaaccactaatcagaagaaagctttgtagaagatttacttcatccagcaactgtgcccttgcactttcgggttttttatcgtagcgccttaaatgctggagacttgttgctgaaatcagcttagttgtcatgtaagtctcccatggtatgtctcttttcaatacctacaaacagcaacagagattgaatcaattctgcagatttacttacttaatgaataagtaaatgtatgcaaaataaaatcacaaacctgctctaaagttagttctgcatgatccatggatatagttcagaagcttaaacaacacttgagattattgaacactactgatccaaaaccctacaattgtaagacagaacaaagcataactttctgaattgtgactattttttcaatcaaacaaacacgatctacaagcatccatgaaatgtgaagaagaaaattttcaaaaactcagatcaagtagcaaacgcaattcaaatactttcaaaatcgattgaatcagaatgatagaataaagaaaggatttgatttaagaaaagtgaaattgagtttttgacctgaaggagaagacaaaagtgaatgatcaagagagattgagagagcttctcttaaactcggatctgaagcgtggaaggaagttagaagaagaagaagaagaagaagaagacagctttctatttactggaaattacgatattatccctatcttttttcgccttcgtgtcgtcttcttcggtgggtctgacgttgccgttggatctttctacggaggttttgtgtttaccggcgaatcgattccgttggtcgaagatggacccgtcggtttttttttttgcaggaattgatgtatatttgggcctttgggaagccgaaaaggcccattaaagattgattaattaaagattggttaagcccattaatcaatttcttttggaagttgagatgtgtgattgatttagtcatggagtgttgaaattaataatccatggttgatatattttgatgtatatttgcagagggtatattggatgtgtatggacagaaagagggaatttgtctaatattggtgttgttgcttgactttgaaactccttttgggagattttggaacatttttcattgaatttttatgttaagccataaaaatttggaaattcatccatggaaattccaaaaactttattttatttttgggcggacaacaatctgtcagataccaaattttctatgtaaaagctgtcagatttagtttaagactattttttttttgccagcagtcataaactataatctataaatattattaaaccaaaggtaatttaatctataaacggttttatcgccgtacccgtaatcattcaaagctttagaagctttttttttaaaaaaatttaaatctaagaaatcgaaccaataaacttgaaaccatcaaaatccaaacaaaatcgaatcgtagtaaaccaaaaaagaaaaagaaaaaacgaatcacctagtggtaaatctctgttgggattattatattcctcacaacagaattttaaatttttattgtttaacttaaccatggttaacacattaaaccctagggttagattttgaccaccttcgtataaatatatatgtaaaaccctacatcactcgcagcccccaataaattacatctgcaattctgcaccacgaaaccaattctgcattctctcgatttgcttatcattttctctgtttcttttatacaattgtgttttttgtttcacttctttctaatgattttttatagttgtatacccatctgattgcaaatgatgagttaatcaccattgataaaagaagctcaaattattgagtagtgttggaaatcataaacttccatgactctgatgcaatttttatcaagaaaacctcaaattcttgatcagtattttttttctgttctttctcagattttgttaataatcattgaattttggttttcaaatctatttttatttgttaaattattcgctacattgttttttgacattcgatttcagtcagatctacctaaattatttctattcaaaagtatttctcattagtgtttttaatctattttttttatgcatatttagggcatacacaatgggacaagtgggaggatgtgtgttagtggtaatttattattaaaataacttaagaggttaagtttaaaaataaagaaaaagactaaccgaaatcgttgtcaagcttaaaactgctgcctttattcatcgcaaccactcataggaagacaagtgagataacacccgagtgttatcacacatccggattcagtctccaaacgcactattccattattttcgatttttttattactcacacccctctaaaaattatcccactgtgtatggtcttaggccatacatagaggcgcaacttttgttcgggtgttataattaaaaaaaaaacaaaaaaaaacaaatagtgatgaaagggaaaaaagatgggtatagacttacaattgggtgtaagtgccacatgtctcactctcctttctattatttctctattatctctctccctcttctctctttttttttattatcacataaaaaatattctaacatatatactcaagtttattcactgtggatgctcttagtgtcttatataacttgaattgaatttgatcaaaattgaacttctggataaccaaactgaaaaaaaaagtaaatcaaaaactgtaacagtgacgaagtaatgaacaagaaaagctccattaatatacaccaagagaaaaagatgaagaagctggaatcaatcagtagtggttttggtgcccaatagccgttaaaatgttgttatcattacaattctcataaccaaacaaaaaataaacaacaatggattgtcttctgttctaagaatcgaagttacgaagcatcattatcattgtccccatcgaaatattcatcgtctctttggacctgcttatctcgcgaacgctctgaaacaatcaaaccgtttacaatcgaacattagtcactgagaaaacaaagggattagatttcaaggtggttatcgatacttacgatccacacgtacatccgggttttgttcatcttcatcaaaatccggtatgtagaaatccggtggaacctatgaaattcaagtaaaaaactgatcagtattaagataacaccaaaaaaaagaagattgattaaagcatcagttgtcctacgatgatccgagtttacctcctgcatctgtacgcttggagcgtgttgaatgtatcgcaagttctccaaaatctgcactttgatcgaactgatgtatgatttggtattcagattctcctgtttcaatttcaaaacacaaaacatcaagtatatagattttgttaaagcaatgaggaactataagtgacataagagctccttacaatgtgaccacctggtatcttcaaagaaaaatccggcgcaaaatacttgatgtagtcattttcaggaatctctgcagaacaattaacccgtgagcatgtgacgttaaccgtactataacaaacattaagaaatttactaaccattaggaagttctgtgtccaaaagaatgccagtctcaacggtccaacaccgagctacattctcctttgtgtatcctccacctcctgtaacctaataaacaatcagtaaaaaactgactccgtcatcaacgaacttatgattacagaaaggagtcgtacatatagagtcaagagagattaaataccagtaagggaagattgaacttcttcacaaatttaacacattcggcatgtcctggaaaatgcatagcagaagccattttaaaacccgattcgcaaagaaactagcaaacgagagattgaaagagagaaagagattttgattacaagaagaaaaagcaccatcaatagagagattaaagcatcctagtcgatccctggccaatgaatctgccccacattgaagaacaattgcacccggttgatatatctcaacaaccttggaaattatctagagatcaaagaaaatgatcaaacacacaaaaacagtgaaagcattgagaatttgattgtttcagttcaagaacttactgtcctgaacagacggttgaaactactgtcatcaattccatccttcagcggcacattaatggcgtaatatttcccttctctttctcctatttccttttaaaagaaaaaaaaaaacatcacaatgaaaattcatccaaacacattgaaaccgtcctcacaaatcaggaaatgaattctgaatattactaccttaacatcgcctgtccctggaaagaacttatccccaaacttatgaaagctaacagtcattactctgccataacaaaattcaaagatattagcaatcaatttctatagaaacaactttcgagaagtagtgttatggacttgtaactgtacctgtcagtgaagtaaaaagcttcttcaactccatcaccgtgatgaacatctatatctatgtatagcacacggggatggtgttttaacaactcaagaattcctagtacaagatcgttgatgtaacaaaacccagatgcatcacattttttggcatggtgcagcccgcccgcccaatttatagcaatgtcacagagtttgttgtttaacctgcgtgcagcatctatagacaaaatttgcagtcagtcatttctcaaaagtgacaagcaaacattaatatcaactacgtgtatttacctatggttccgccggcgtaaatttgacaaaattcaaacaaatcttcaaagacaggacaatcctctccaagattatctgcatcacagtaacttatttcagcagaacatgtagattgcaaaaccaattaatgaagatacacaacttacatctagccatttcattgggaaacaagttttgattttctggattgattcgttgcaggaattccacgtagtcgggagaatggaactgagccatctcaataggatatgccttgtgtggacgctgaaacaatagagaacataaaatgatgtacagtgagatcgtaaacaaaaggaataaaggatcaagaacaagaaacatgaaagatgagcaagagactgacataaacttccatcttgctatggaaaccatatgcatggataagataatgagtcatacaaagcctgtgagatttcatcgggtgattcggaccaaaatacacgctccccacatcccctgcaacccaaaaaaaaaaaaaaaacattcagcataacatcacaatctcctataaactgccacaaaggctcgatcatcaacaagaaaataatctgaaactctcatcagagtttgaatcatgcagaacatcttgaagtacgaaaaagggaagttataaaagtcagagagagacttcacggttccagcctctgcaaacagaggcgatgacagggaactgtttgtaggaggcgcgaaggagacactcgcgagcaacgtcgtcggaaagattggggataagttccatcgagaaagtatcaaagattgaaacttttatttatctgtttgtggaaaagtgaagaagattgaagctttagaagagggagagatattgaaacagttttagtaaaagagagaattttggattgagagcaggttgaagatgatgatgatggtgattgtgaatggggaagaggagagtgtgccgctttatagatatttgaagataagtgtttaattctagaaacttgttgattcattcctcgtttttttttctttaatactacaagtttgagcaactggattgtggaatttccctcgtttttcagattgctcgcaattgaaaagttttcctgagatttctaataatattgtggatttcaaactcctaggaactggaatcaaagaggttcctttgtcgatc

SEQ ID NO: 5514 - DNA, 445 bp, Arabidopsis lyrata
  Intron number 1 from transcript 943195 (locus 943195) deri ved from phytozome v7.0 (chr-ID scaffold_6; pos 22274057 t o 22274501)
gattctcgcgtaagtaatttttcctccgattctcttttcttttttttttttccggtgaaaactgtttaattccgttgggaatgcgtctcttagatagtgaagcatgttgtagtgtcgtctctttgcaacatatgattcaaattagttcaataatcagaagaaatttttacataatggattttatttcttagggaaaacggtaaaattcttatgatttcagtacattttattatgaatcgagaacttttctttgtagattcttgtgatttcaagaagatttaattatgaattttgattatgattctgtgtgttggcttttatagttgtatgagtcttcccttatagttggatatagcgtcatgttattgttatgtatcaagaacttatttttcagtggtaatctcgtgtaggtacacgtcgttcgtgggtctgttcccattgctct

SEQ ID NO: 5515 - DNA, 562 bp, Arabidopsis lyrata
  Intron number 3 from transcript 491666 (locus 491666) deri ved from phytozome v7.0 (chr-ID scaffold_7; pos 4595801 to 4596362)
tttacttctccagcgatcaaactctgcatcacgtaaagattcttcctttgatattctgtgtcattgtttattctaattttaaagtagtagacatgcaacataagtgctttccattaacgaatgtcatttttgttgtgtgctcatataaaatgctgattgcaatttgtagtagtgctaaatggtaactttcacccgccatgtgatgtttagtttggatttttttttatctttctgtttttttaactttggttaatggatacttcaatttctgtagacatgctttatgccccacctactttgaaatcacgtgattttctacggaaattaaggaagaagtttatgcctggatttgtttattttggcataaatcttgcaacgttcttataacctgccccaactatttgatgtttctctcactttagttttctgtagattttctttgcgctcacctaactttccaactaacatgatttttttcaacgggtttaagaaaaaaaaggctggtcttttgtcaaataaaacttattatttgtatttggtggtgtctacttgcaggatttga

SEQ ID NO: 5516 - DNA, 7540 bp, Arabidopsis lyrata
  Intron number 13 from transcript 475732 (locus 475732) der ived from phytozome v7.0 (chr-ID scaffold_2; pos 10918882 to 10926421 reverse strand)
tctagcttatttgacaagatcaagaaggcttcagttttaataacactatcctatttgagaatcactatgtgaagcttctctctcattttttccttttccaatggttcatgacagaaaacacataagggacctactccgacattccaacttagcattctatctcccgcgattctttattgcaagccaagctataattagttcttcaagcgtccttgtatcattttcttcaaagcatctatcttagcagccatgccagacccatgaagaacttcctccgcgtatgatctaggctctgaaccaacaatagtagctatatatatgttttgcatagaaacgattagatcggataagataagataagacaccgtacctaaaatgaagacgttggcactggttcaaggcagggactctagaacaaatgaaatagtataaagaatataatcataatctgaacgcgtgtgattataatttgtcaccacaaaaggtgaagtccctggagaactccacatgtatttgtcggtgctgtggcaaagagctaagaaggctcaagaaagttttcatcaaaaactccaatgagctataattatttggtacaaaaaatcacagttcgtttccttatcatctcttgagtcgagacaaataaatctcccgtctccatatgatacaatttctagcccaatttcgcttaactttgattaagtaaattgacataatcacacagccaaattcatgtagcctctcaaacagtggtgtactccaaatacaacatcttctccttcaataactcagtgggggactctcaaataatcaagtggtccgcagccaagacgcactcccccaccacaaaacaaattgtgtcgacaaatgaggttgattcgacaaagacctgactacatttaagatatgacattattttttgaacttttctattttgtcgacgcacaatgttcaatgcaagattttttccttttcaaaatcaaatcgtatgcacataaactctgcaccattatcattttacacagttcagactttcttgtcaaattggctctcccccatgacaataaacctttgagaatcaagattatttcactttttcaagcatgagataaatgtacaagtgtgagaaagtatgttgtgccaaaagaagaaaacgtttatggttcctacacgccacacatcatagtaaatcaaataaaacaacattgcaaattcttaaaaaaatctcatgaaagcagttacggtgttctaggcactgataacgtaaatcgggtgaggaagatcaaatagatttcaaataaacaaagaaggataaatggatacaacattcgcaagtaacgcagcaccacttctcatctgcaagagtctcaaagagagatccagcaaaacgatgaggaagagcttgagaattacagagaattctcaggaacaacagagaaccaaatgaagaagaagattacaatctcagattttgcataataatgaaaagaagcaaagactgcgttttaaagagtcttcataacaactttctccagctccaaccaatgttattctgccacgtgtctcacccgcttcgaccaatctttgtcctccacgtagccttctcatttgatgctcatttcctacattaggcacacaagctcgcgagatttgttgccagccgtctggaacatcccttgagtatgattgattttatctaatttatcaagatatattgatatgaaatcagttgagagtgtagtaataaaacccttaacaactttctagagttttgaaaccgagagaataaggaacactagaaatcgggtgaaaactacgtactagtcatgcaaccaaattgaacgatgggtacttctattggtagccgtttcccggaccggggacatttcagaaacgggacaacatggagacagcgggacatcaatcaattatggcaaggattgggatatggggacgagtaaactttagaattattagtaaccatggatcgagagagaaacatggtgaaatctctgattctcattaatgatcaagaaaggttgttacaacaatgtatagtgaacaaaccaactaaaccagaattaaaccaatgaaatcaccttaattagatgattatttaggtggttaaaccggacattccagagcccttaaccgtaagctattatctacaagtattatcaacatgtgactaactatatgattctaatagcctccctcaagatggcagtggtgcatagatgttgcaaacacccatcttggcaataagctcccgaaatggtgccggatacaatgctttggttaaaggatctgctaattgttcttcagtcttcacatacatagtcttaagaaaaccagaatcaatctgctccctggtcttgtaacaatcaagttccacatgctttgttctctcatgaaatactgaattgttagcaatgtgaattgcagcagtattgtcacaataaagataagcaggaggcttgaaaggaactttgaagtcattaagaagccgagaaagccaaatcatttccttagtaccagaagacattgctctaaactctgactctgcagaactcatagaaactgaatcttgcttttgtgaacgccaagaaaccagagagttaccaatgaacatgcagtagccagtaactgatcttctattgtttttacaagttccccaatcagcatcagtataacctcggagatcaaatgtatcatctgcaggataaaacagaccctgccctgctgttcccttcaaatatctcaagactttatgcacagcagtcaaatgaatgtctcttggatcatgtgagaattggcataaagtattgacagcaaaagcaatatctggtcttgttaactgcaaatacatcaatttccccaccagctttcgatatgcggatggatcacttacaggaactccaacatccttccttagtttcacacttggatccataggcgcagcagatggtttacttccaagaaaaccagtaagagaaagcaattccaaaatgtattttctctgacaaattgaaataccttcatcagttctggctatctccaaaccaaggaagtactttgctgtaccaagatctcttaatttgaaaaacatcttcagttcttctataaatcctgccactgcagcatcactattactgacaatcaagatatcatccacgtagactagaacaccaagaaaaactccatcaacatacttggtaaacaaagtatgatcagcattagatttcccaaatcccatggtcttcagagttgcagaaagcttgagaaaccactgtctcgaggcttgtttaagtccataaatggatttgtgcaatctacacacagcattaggaggtaaagcctctcctataagatctgcataaccagggggaaccttcatatatatctcttcatccaaatcaccattcaagaacgcattagaaatgtcaagctgatgaattgaccatctcaacttagcagccaacaataacatcattctcactgaagttaacttggcaacaggagagaatgtttcctcataatccaaaccctcttgttgagtataaccttttgccactaagcgcgccttgtatctttctatacttccatctgcattatacttgattgtaaagacccacttacaaccaatagccttcttattcgctggcaaacaacaaatactccatgtgcgagttcttgtcatagcaccaatctcctccttcatagcagtacaccatacatcaaagtcttttgcctctgaatatctttgtgggattatatcatttgtgatggtattaatgaaagcacgaaaaggctcagctagatatgaataagaaacataatttgtgattggatagagtatattaggattaatactagtagtattattataacaaaggaaatcctgcaagtgttttgggggtttcttttgtctagtagactttgactcagaaggaatcaaagccttagaggatgacacatcttgatggggatgtgcatcaggaattgatgtttgcacaagaggcaaatcatcggtttgggcaggaaactgtaatagaggaaagaaagctttcatatcatcagtgatagtagatgataagaaaggaaaaatatcctcatgaaaaatgacatgtcttgaaatagaaacggcatgtgtctctatgtctaatagcttataccctttataacctgtgggatatcctaagaaaacacaagctctagccctaggttcaaacttatttctatgcttaggggatgttgaactataacataaacacccaaaagtctttaaagattcataagtaggagccgtattggtaagcttttcataaggagatttatttgccaaaacaggtgtgggaagtctatttattaagaacacagctgttaatatacaatcaccccagaattctaatggaatattggattgaaataagagggctctagcaacatttaagatatgttgatgctttctctctaccacagaattttgttctggagtttcaggacatgaatgataagcaataattccattttcagcaaacaaatcattgaattttaattcatgtgcattatcagatctaaccgatttaactttcttctgaaattgcgtttgaatcatattaatgaaactaggaaaaacatgcaaaacatctgatttattctttagcaaatagacccaagtagctctactataatcatcaacaattgttaagaagtatttaaaaccatctatagtaggaacagaaaatggaccccaagtatctatatgaactaaatcaaatgcagatttacacatgttttgtctagatttaaaagataaatgtttctgttttgacaagtgacagacatgacaaacaggtaaagagtctttatttatctttatatctttgagattcaaaacatcagataacaaatcaacttttgaatgagcagggtgacctaatctcttatgccatgtataggaatcaacaacaacagaagaacaaacagaaatttcagagcatatagtattggtaccttttaaagaaacagaatgattagactcattgaaatccaagacatatagattgccaacttgactaccttttccaatcattaactcctgtgtaagttcctgaacaaaacattcatcagatgtaaagctaactttcgattttaaagtctttgttaaaacactgacactgatcaagttaaatttaaactcaggaatataaagcacattgtggagagagattgcatcagatagcttaatgtatcctatgcccactattctaacggtacaatcattagggagtcttacaaaggtattgtctaaggctctaaaatctatataaaggcttctattgtgtgtaacatgatgagtagcccctgaatctattacccaagctctaggagacacagccggttctttagagatagaagaaatgagcatgtcatagtaagaattagagtataaagccagaaaggtacctgaaatctgagaaatcacaggtacagaagttgaagtcgaggcacaagactgagtctgtataggttccactgatgtagtatgaagcttgttgctaagataagaaatcacagtctgtatctgatcatttgacaactcttcataatctttcttttcactagattgatcaaccactggtgggagttgtgtcacagcagcaagatttgtagtcccaatagtctgagccttcttccacttagctccaggagggtacccatgctgtttgtaacatttgtcagcagtatgaccaagcttgtgacagtaggaacatttaggcttctgatatgaaccttgagtcaagttgacatgagactggtcagatgtttgtgacgcttgaacctgaaatgctgcagccggactggagagaatagaagtatgagaacctcctacaatccgctgactctcatcttggtcaagcatgttgtatatctcagtcaaacatggtcttggcttcatatttagaatttgtcctctgatatgagcaaaactatcatttaagcccataaggaactgtatgatcttgctagtttcagcttcttcaatcaattctttaacatgatcacagttacatttcttcaccgaaataactctagtattagccaattgttcccagagtgttttcttcttggtgtaataagttgacaaatccaagttaccttgcttcaaggtatgaatagattgttctaactgatacttgcgtggaagattactgacacgaaacctcagaaaaagatcattccacatctcagcagcatcctcatagtatagaatactatcatatatttccttattcactacattcaacatccatgctttaaccatgctattacacctactccatatcttgaacatacgattatcaatttcaggtcgcggaagagatccatcaacaaaactcagcttattctttgcatccaaactcatcttcatagcaattgaccagttattgtaatttgttccatcaagaatgtgtgagacaatagacagacctggatgatcagaagagtgaaggaagaacggactatgcgcgttagcaaacgagtcaatctctgcggaaatcgattgaatcttgtctcgcgcagccgtgtaagtaagagaaggagcatccacgatgtcatcggccactggatacgaagatccagctcgagtcttcatcggagagtactccgagaccggagatttgttccgatttggtgttttcttcttttgtttccccatgacgagtgaatcgaagctcaaatgtgcgataagaagctaaatcagaagctcagaaggtgattctgctccgtttaagctcaaatttgacacaaatctggaatcgatgcaacaatccgccggtgaaaaacgaagaagatgaagaaaaacaatgagaaatcgatgaaattcagagaaacgcaagcaaaaaatgctctgataccatattagtaaccatggatcgagagagaaacatggtgaaatctctgattctcattaatgatcaagaaaggttgttacaacaatgtatagtgaacaaaccaactaaaccagaattaaaccaatgaaatcaccttaattagatgattatttaggtggttaaaccggacattccagagcccttaaccgtaagctattatctacaagtattatcaacatgtgactaactatatgattctaataagaattggtgtcccctactcgatgccaacccggtaatatttgaggcccaaaacaaaaaaagttgaggttttttaagaaaataaaaactgctaaatcctaactattctatttctagttaattgtgggactttaaaaaaaaattcatccacaaaaaaaaattgttattttttttgtttgtttctataaaaatggacaaaaatcatctcatttatgtctaagatactcttataatgaagtctttaaaaaatatataataactagaatttaacctgcggtacaccgtggggttattatttttttaaaaaatgtaatgttattttttaaaagattaactgaaaatatatcatattaatttgtatttctaaatgtaaatatctatct

SEQ ID NO: 5517 - DNA, 3797 bp, Arabidopsis lyrata
  Intron number 4 from transcript 888203 (locus 888203) deri ved from phytozome v7.0 (chr-ID scaffold_7; pos 774866 to 778662 reverse strand)
ccttactcaaagggtagtctcgggaaggtaatagtgttttttttccctattcaaattataaaatttaaattacggttttattttattttagttttaaatgttcttgtttgaatcaatacagatgacacagaatgtgaagaatctgttaagcaaagctcaaggcaatcaaactctccaaaacttgatcaatcattctcattctttgcttagatgattattgaaagaatgaatttaattgtatatattgcacatttgtgtatacattcattgactatattaccaaataattcaatagataattatttatattttgtttgtaatcactaaatttttttatataattttaacctcaaacttttatgaatacattggtatcgttatgtaaacttgaatcgccacatttatggaaaattgtagaagtattcaataattgttaaatatttatgatatcggctagaaattacacttattgtattagatggacacaaaagctagataaacattgtctttcaatttgtagttataccaaagtataatcttaaattttacactaaaactactttacaactcatactttacaactgattccgtttaaactggaaatattttatctggtatcaatatggttgatgtatacttatagtcttatactgatacaaatgttataactaattacaataaatatcaaatcagatcgcagacggaaaaaagtaaaagaaaattacaataacgcctagatatgtttgccttttgataatcttttgatcaaaattttgttttttactccgtttaaattggaaaccaactatccgttattgttctatattaatgaaatgaaactaaataaaatatgtctatgttattaggaagaaaaagaatttacatggttgcatttgaattatatattctgataaaactgttataactaagtataataaacatctattcaaatagcagacgaacaaaaaataaaaagaaaattatattaactgctagatgtatttgtcttttgtcgtattgtttatggtttttgaaaacaattattattatttgattgtgatttaattttggataaaattcttttcatttacttaaaattcaataattcagaatgaaatagttggacataattaatcgtacgggaaacttcctacacatgaaagtgaaatatagaggagtatgtggcgtggaggaacatagacaaagagtttacaaagggaaacaaattaacaatctacaaacgtacgtatggccacaaccatgcctatcaaactttttcaaagccattccaaaagcctttttgtatattttttttccattctctattaattgaatatttggattctatttttgaaacttattatgtcgactagagcactgtatctttatgtagtttttcaaaaactagcattgctgaaatatatatgtgatacgagagccaaaatcacacgtttaacctaagcttataaatcatcataattaaccacacaattagataaaaagagaaggatataaataacggtatataaattcatcagataatcagagatctttttaacatgccacacccaaatctgaattactgaatataatgcaacattttcaaaagatattgtattacatattggtctactagttaaatgattcatcggaagaccgatgtctagaataattttcaaggcatgtgcaaaagttggatttgcttttcatctaaagctttcaaatgactaatcattattgaaatagaaatgaaagaatccgggttgcaaaagcaaatcaaattacatattttaggcatcttataaactagtgttacttggaatagatagaacaataatttacaaatttcttaaatgtttctatcttttcaatttgtgttaaaatgttcaaactggtaactctttttgaaaggaaactataattcaaaacaataacacctacacattgttgtgatttttactgtaatatttaaaatacgaaaaataaaattaatttagtttattgatacagaaattaaacaatgggttataaatcagatatttaatgtgtaatattttatttagatatcagtttttaagtgaacaattaaaagaagtgatgtggtaaggcatgaaagacacgtgaaccaaacaagtagaaaaaatgtgaaggtgatttgatataatcaatgttttaaactaaaatttgatttcatatagattaattgtttattactttaaaatttgaaagtagatataactgatattttccttatgatagattgcccaatcacaattaaataaataatgtattcagagtaacgtctatctaagacatgaaagacatgtgaacccaaagcagtagaaaaagtgtgaaggtgtttccaatgtctggtacggttatgatacattactcaatatactaatatatttaaggtattttaaaattttcttagatatgtgtaaaaaacaattaaaacataaatctttataaaaaggaagagaatatttgtttttattgtgtacattgtacaaagataaatcaataactcaaattaacaaaaataggtaccttgaaatcatcggcactttgactaattaaattagggaaaattagaaataagagatatctactaaactttttgtccatatatacttttttggtgagattgtcagtttggacgaaattacccttacaccctattttaaatatattttttaaaaaataatcataaaaacatgtagatatacaagagtagaggtgatttgatctaaaaaaatttagatttggttttaaaaaagttgattttttgatagataaagtttcatctaattttattagaatacgttttctagagttctgcgaaactcagagtgtgtattctgcatttttgtatatgttctacatattttagactagatttctgttctaaaaattttagaaatccgaaaatcatatatctaaaatatttagaacatgcattctacgctttgctctatgttctaaatttttttgaatatccattctactaattactacatcttctgccatcgttagattttgtaatcttcttttagaatgtaaattctacgatactgtagatttggttttctgaaatttttagaaattttttaaatacagaaagtaaatcttcagaaaaggaaactagatatttatcgtagattacgttttaaatagatattaattgtttagattacgatctacataatttagaaattgttttctacgtttattagaaaaaattaaaaccaaaaacgtttctaaagcctaatttagaaaaaaaaaaaaaaactgaatttagaaattattgtctaatattttagaaaattttgaaactaaatcgtctaaaccctaagctcccatcgatttgtattttatgctactcggtttttcttcttcttccctaatccacgagtttgcattcatcttccacatatttgtatcttattttaccagttttttttctttttcttccacgatttgtattagaattggatttatcagtaatactaatgtttataaatattttatttaactttatataatatcatattcttaaaataaataaagtcaaagagatgtatagatctcgttaccaataccttacgagatcagtatatacttatcgtcccaccttgtatcatagaaaagttcaaatacaccatgtgctagttatccattttattcactgtttttcattcataaataatctctaacttttccaactaattggtatattatttaaagtttcacggaggaaaaaaacacgtttttaagttttttattaggtctcataa

SEQ ID NO: 5518 - DNA, 862 bp, Arabidopsis lyrata
  Intron number 1 from transcript 485242 (locus 485242) deri ved from phytozome v7.0 (chr-ID scaffold_5; pos 14053770 t o 14054631)
gtaacggtgtcgtcgtcgccaaacgatttgcctctcttcctgaaggttcttgatttctctcagtgcccttttgcgtgcttcagcttcttgtttacgatctaattcatttctgtgtttcgtttgattctttgttcgattgtgaattgagaaaatggcgattcgagatctatctatacgtttcgtagttcgactgatttggggaatgtcaagagatcagatcgatttgttgacagggtcttaggggtttacggtcttagtcctctaggttttcgaaattcgattcctttacatcagatttcgcttaattctttgtcctactgcgttttacgatctttagtcctctggtttgtcaaattctctgtcttttcatcttcttctgagttttaatggttgatcttcaatttcttggccacaatcttttgaatttgagactcttgacttgtcctctgtagattggttttatgtttgatttcaattccttgctgaactagattaactttctgatacggaagttttccttttaatggttggtgtttcctttttctgataaatatggatgaagatcgattgtgataatcatgtaagaatataagagagcttttgttgttatataggttttacctgagggaagaaaagtctttctctttgggacttaaactccaacattatcatagttgatttctgtttatgagattcattctgtttggttcgtttctcttatagcagtaatgaaatctcattgattgaaagctacgatcttgtgatggtatcatggaagttgtgcttgagaaatacttggattcttgtgaagaataagaacagttgattaaccttcttaatgcttgtttagggcacagaaaga

SEQ ID NO: 5519 - DNA, 602 bp, Arabidopsis lyrata
  Intron number 1 from transcript 492906 (locus 492906) deri ved from phytozome v7.0 (chr-ID scaffold_7; pos 10137061 t o 10137662 reverse strand)
tagcttcaattcgccattgaagaagccataatctggtgcgtaattatcgattttgttatttgtttccgataaggagtattattttccgtttgtttcttgttttttttcgggtttggtagattttcacgaacttttgcatctttcagatctactgtatgtttttcccttcgtttgtgacggcgttatctgtgaaaagagttttaatttccatggagaattgctcgataatctctaatttagctctttggcaatcaaaattttcgatttcattgtatttttctggatgtgtgagcttggttatgaacagcgtcggtctagctcgtttacatgattctcaatacacagaattttcgtgggaaaggaacaattatgttctttttttctttcatgattcttgttattatgttgcatatgttagccccttttactcatttagactatatgtgaatgtgtttgttttgatgccatttttttgtatttccatcaatcagtaatttttcaattcttatttcaattcttatttcaattctttgtcattgactatgttgatgattccttttctttcagattcctaaagagcttacatttgatattcaactata

SEQ ID NO: 5520 - DNA, 27750 bp, Arabidopsis lyrata
  Intron number 1 from transcript 494997 (locus 494997) deri ved from phytozome v7.0 (chr-ID scaffold_8; pos 13024641 t o 13052390)
ctctcaaattggctcatcttcccgttaattcctccgaatccaagcacgctccttcgatcttctcgtttccaaacgtttgtttagatcttgtatatcgaaattttccatttttttcccgatcgctagctcgagctcgcctatagtaatatatttaaagccctcgtctcttttgatcaattagacaagacacaatgctgaaaagacatcgctccagctcgagctcgagttttgtattaaaaaggcatcgctctagtgtgcaagtgcaattgctgccatacgatgttgtagagctcatcctcgaaagacttcccgggaaatctttgctgagattcaagtgtttatccaagaattggaaacgacagttgatccgacgtaagcaattacgaggtccagatgtccttttcgtctcccttgaagatgatgaagctccgaggagcattgtgtttgggtcgtcaatagtttctaccgtcaagttccctactagttgctccattgtttgttatggtagttgtgacggcctcgtatgtctctattgtgtctccacaccgggtttcgtgatcagccccgccactagatggcatcaaagttttcctctttccagctttcaacagctccgcatggacagacttaataaaggagattttcgtgccccaaatcataagcttggattcggtaaagataaagtcaggggcatatacaagccggtttggttatataattcatctgaatatggcctagacaacgttactacttgtgaagttttcgactttagcaccaacgcttggaggtaccttgtccctgcttctcctcttcgggttcttgtctaccataaacccgtgtacttagatgggtcactttactggttcaccgcatgtgaagaagaaaccaagatattatctcttgatcttcacaccgaaactttccaagtcatctctaaaactccctttccccatgtatctaacccacttgatgtcaacatgtgcatccttgataaccgcttgtgcgtatctgagaaaaaatggcccatccaagtcatatggttgtttgactcttcaggcacatggaagcaaatgtgttccatagatctcaccaaaactttttcttggttcggggaacccaaatgcgtactctttccgatagcgattctagacaagaataagctattacttcatgctcgtgaggactttcaaccagtggagaaacaacctgtggtgatacatgatctccgtaccaaatcctatgattttgtattcagacctaccacttttgggttttctatttattatttccaaagtttattttctgtactaccaatttgaaactattgtaatccaacattacttcattttgtaatttaaagctgatttttttctcctcatggcctcttgttatattcggaacaagatacataataattaactatctgtcgtttcggttttttggaagtgagtagctattatcttgactctataaacacttctacatcatacaaacaattccttggtttcgtcataatagaactaagttaagtaaagatctgtatcgtatttactcatatttgaagaactttatatatctaacaactatttcaatgaaaaaagcaaactaatcaatttagtattatcaattgttcttccatgcagaacttttccaccactgtcgtggttggtcattgggtctaatggtgtgaattgatactaggattttactatcaattaccctaatatactttcatgtcattgcagtataagaggttatcaatccaatcaggtgctctcactatcaatcaagatatgctcagagataactaagtcaagccaagcagaataaaggtttgttatctagcaatcctaagcgaacatgcataaaaacgatagaactactgaacaggagtgatcatgcataagagaaagaactatcaatactaagcagcaataaacaagcaagcaataggtacagagaataggtaaaacaatagagataaaaaggtcctgaggaatggggtaatcgattatggcagtctccttaatctacctaggtggttaacaaactcaatcaagctatccctagacaatagattcaaatacaaatcaatccactctcgtgacagagattctcaagctaaatcactttcatactcaattctcattgaagaaatataacctagcaggcattatgattcaatctaataaagtcaataagcattctaaacatccaatctcttgggctagagtatgcaaatctctggaaaagtttgttcagacatttcatcaaacaccttgtgggtgtggaaatgtctgagatcaatttccaattgatcagagaagaaatagcattaagatctacaaaaccagaagggaaatcaagcaattctacacttaaccacctaaatatactaaggattccacacctaatctaacccatcctcaagaaccctaatccactactcaagaacactgaagaacatcatgcataaaaacccagaaaattgcataaacccagaaatcattaaaaagcaagtatgttatagataagagagagatctacaactttgatgaagaaaagaaatgcaaaaactcaaagattcagcaggaaaaacgattacaaaaactagggtttatgagagagcagcggaatatctgctgggtaaaaggaatatccgctgggtaatagcatgtacccctatttataggaaatactaggttgccctaattagctacaagacaaaatagagagtcggcggagaccaactcgacgtatcgtcgagcctgccacgtcgagtccatgtgatcttcaaaggtggcgcattgacgtccaactcgacgtgacgtcgagtccgtgtggtcgagtctgctcccagtcggcttcctggcgtcctactcgatgtgtcatcgagccatgacgtcgagtctgctcccgggtgatcttgaacgacttcaatcctctccaactcgatcccgagtctagctccaaggtcgtgttggttcctcattgctccattaagtcctaaataagctccaaagtacctgaaactcatccaatatgcaacatgctatgctatgcaatgcaaatcgtactaagtgatgaaaatgttataaaaaggactattaatgcaatgaaacagagaggaaactaagctaaatgtataagaaatgtgtgctaaaaataggtaaaatacagagatatcaactcccccaaacttagctcttgcttgccctcaagcaaacaaatagaaccaagctggacaagaggtttgaaggtggagactcagaaccaaaacatgcatatagagtaagtgaattcaatgtccaggttgctaattctagagtgcaaggttgactgatctctacttaaaaacattagccatctccttcacatctcaacctaacctctgccttaatcaaatcaagcattcaaatctgcacattccctttaacatttattaagtaggaaccgtgaatcatactatgcaatgtatatgaacacatttggctaaaggataaaggtttagagacaaagatggtcccttaaagatctggtttaaatcgcaacaggggatctctcaagaatgattgagctttagtagaatgctaaaggtgagtatcaagttatgcatacaaggataagaccccatctacccagaatgtaatcaatatcaactcaaatggaggtcctatttctaatcccagaacatgaacttaactctacccttttgcactcaaagcatttacagactttactcaaatcattcctttcttttctttgttttctatcctaggagaagctttcttactttgccctgtctagcggattaggattctttaacaactagggttcccttttctttcttcttataaacacaaggcttttgcccaatctctttaagctatttacagaaccctttttactttactttagcacacccaaatcctttactagacttctcttactttagctacttctccttaggactcttttccctttccttttctttcaatgatgaacacaaccttttctttcttttaaacacaacccaaacccagaattaagcacccacctagtcctatctggtccagataacgtgaaccataactacatgagatactatccttgtcgttacagacctaagactttctaccaagctcaatcggaataaggcctcacattcacacacaaatgataaatggcttgaaggaaggttagggctaagggtggggaataactgctccaaagatgggagtcagctacttggactagcaagagtgatcaaaaggtgaaagaaagtccaagtattttaaggtatccatgagttcatagcacaatgcacagcatgataattataagtcaaaattcaagttcaaatagatagggaatggcatcagatcaaagcgagtttcgactaaaaacaagaaagtcaagcgttgaattcaaaagatggtgcggtcttacttcaagttcagtcgattatgcattagagaactaataacctgggcactgagttctacttagtgaataagcatatttacaaggttataatcatcataatctccaatgcaaatgcatgatgcagcagtcctaaatgaaagcatactaaaacagtcttaaaatggcaatgcgaactacatgaacactcttcttttgtattacaattttcgaaatttttcaaatttttttggtttttctatgccttagatgattatgcaataagaaaacagaacacaacatcaaatacttcttggactctcccccaaacttaaattacacagtcccttgtgtaataaaaattcagaagagagctcaagagaaacaaacagcgaaacagaaaagcaaactaatgcaatgaaataatacaatggtttagggatgagtgatactttgggtttaggcgaagtagtggtcgaggaactcatccatgctctcctgcatgtaagaaggagctgtgcttgactctggaggttcctgctcgttgtcaaaacccgtctgcgtgtgagaaggattagttggctctggagcaggctgctcgacgtgcagactcgacgtgtcatcgagttccatggtcgagtctgcctctggacttggccgctgagccttccgcttattgcgatgtttttgcgaacgcctagggagttgtgcagactcctcttggctttccctctggcgcggttcaaaggatgaatacctgggaggatcagcctttaccgggtgtcttggagccatgcttgtggaaccgcttcttctcaaagtacctctctcttctgatgatggtggcgaatgcttggacttcttttgcagctccgtgatctgaatcgccatcttcttcaccatggtagtcaatgagtctaccttctttgacaatcctcgcattgccttcccctgaaactttcccaatccttgcaggagtcctatgcgcttgtgagcttctctctcgcttttggtctgcctaggggctttgtattccttgaagaagaaccgctctggtgcataatcatcaggggcgtcttgggtttgctcctggtagtccttgtgcattgcttgaggcggtggagaggcaggggcgacttgtgaatcgtagagaatgaaggatggtggcccgaagtcgatgttctcaccagccttaatcgtagtgtgattcgtgcatggtagaagcagcctaaaattcccttcttcagggtggttgaacacatagagcaacacgccttcaggagctgttttatcaaggtagcccttcttccttaggtatgccatatcgatccaatttggggaagcgtctcctgttcccacgtctatacccgcagctaccagaatcggtgtcagaattccgccaatggtcaagcttcccttgcgccctgacctatgcattgttgcagcatagtccttgtatcccaataaatgatccaagaacacggctattagaggggcgtttcctctatctcccaccatttctgctccatctctagtgtttcttaaggtgaataggagagctaaatccagaagctgcagctcgccttcgcttatggtaccggtgatcttctttgcaaagaacatgctagcaatggactggtgtagatacctcaccactgggcttctaatagaggaactcttgcttttcgaaggtatgtaatctcctggtccagcgatcgtcttccacaaggcttgaagttcgcgcttatcaaaatcttgcaccaattcctctttgctcgggaatccatacaagagattgagctccctaatcgttagtgagtagtctcttcccttgacagagaatgtgatgtatccaaaacctctctcattctcttcttcttgatcatccgcgtagaagtgtacattgagagtagctaggaactggcaggtctccacttgataaccctcaaaactataccccaggaaggtttttaaaccgcacatctcagcaaggtagtccacatcttcagcaattcccaaagcagccatcgtttctcgatgaggatgtcttgtgccttcgaaatccagtgactttaggtagtcatagtactcctcaggagtaggaggcttcttcttctttctatcccttttggcgggtttagcaggtttgatctcttcctccatttcaacagcttcttcttcaggtgtggcatcgaaatctgcttccttaaccctcttaccgcggcttatctctcttctccttctggccagacgttcagcatcgtcatctcttgagctcgaggagcctcctcgacgtccctcctcgacgtgacgtcgagtaggttcataacctgcctgacccagcaccatttcacttccttcatgttctggtctatcttctcgcacaaaacttgaatgaccggtccaagagcgggttggaatcctctcgttgataatagcaaaaccacgtgcagcgtttcttgcagaaatcttctttctttcttggtcactatccatggtgtttccttcagcaaaagaagaacacaacgagcagagtggatcaaatgagcagagaatagagtttttaaagaggagaagtgagttttaaactttgaaatcgagttttaaaaccaaagtttatgaactttcaaagctttaaaacgcaaatgcaaaggggaaatgagagaactagagctttaggtgaaaaaaaaatgagagaaattgaagaaatgagagagtgagagagatgaggggtgcttctccccttttaaagacgcccaaggagaccaaaagcaagggtggagcgtgtgggagcagaaaatgttggatctagaattcaaattcgaaatttgaacggtttggcgttgtctcgacgtgtgggctcgacgtgtggggtcgagtaggacgtcggcaacttcaaatttgaattttggagggactttgcttggactcgaggtgttgactcgacgtggggtcgagttgactagttgaccagatttgaatttgaattttggctccaaggttgacttcctggatagttgactcgatttgaatgggcttggctgtgttgggcttcgcttatcatcgagttgggcttcgtttaaagcttagagccggtccattggacagacactacaaaaacacattataaataacaagagataaagagctatttacaaagataaacataggaattcctcccaagtgagcttgtttaaagtcactaagcttgactttactactcttttaggcgagttgaggttcctgaagatgaaccgtagatccttcaggaatgacgctatccgcgagatacttcttaagccgctgaccattcaccttaaactctgacccgtccttagtaaatagcgataccgcaccaaatggtagaacttctttgatagtgaaaggaccagaccaccttgatttgagctttcccggaaatagcttgagtctggagttgaacagtaacacttggtctccagccttgaagtcttttggtgaaatctttttgtcatggaaagcctttgttctttccttgtacacctttgaactctcataagcttcaagccttatttcctcaagttcgtgcaggtcaactgatctcttttcctgagcatctttgatatccaagttcagcaacttagtagcccagattgctttgtactctacctcaactggaagatgacatgacttcccatagagcatctgaaatggcgtccttcctattggcgtcttgtatgcagaccggtatgcccagagtgtatcatctaacttggtagaccagtctctctttgaaacaccaacaaccctggcgagtatggccttgatctgacggttcgatacttctacttgcccgctagtctgagggtgataaggagtcgctaccttgtgcttcacaccgtgcttctttaacagactctcaaagaccttgttgatgaaatgagaacctccatcactgatcacagccttagggataccaaatctggggaatatgatgctcttgaacagctttaagaccactttatgatcattagttggagatgcaatggcctcaacccatttggagacgtagtccacaacaacaaggatgtacttattaccataggaagcaggattgaatggtcccatgaaatcaattccccatacatcaaagacttcaacctctaggatagggctctgcggcatttcattcctcctggtgatgttccccattctctggcagggatcacatttagcaatgaatccatgtgcatctttaaacatggaaggccaccaaaggccggcttggagaaccttctgtactgtcttgaaggtagcaaagtgaccgccataagcagaaccatgacagtgttccagcactccttgaacttcctcttcagcaatacaccttctaaataggccatcagtacccttcttatacaaataaggttcataacagtagtaatggttgatgtctctaaagaacttcttcttctggtaagcatcaaggtatttggggatttccccacagataagataattcacaaggtcagcataccatggaaacttctcctcttctatagccaatgcttcatcgaattcattcttggtgtatcccacgtcataacacttgatagccaacagctgctcctctggcatggaatcgtcaatagggatttcatcttcaatccgcattctggacaagtgatcagctactccgttctctatacccttcttatcaacaatctccatatcaaactcctgaagtaacagaatccatctcagcagtctaggcttggtatccttcttagcatagatgtgtctcaacgctgcatgatctatgtagactatcactttagaacctaccaggtagcttctaaacttctcaaatgcaaagactacagccagcaactctttctctgttgtagcatatctcacttgagcatcatccaaggttctgcttgcataatagataacatggagcttcttatctatcttctgacccagcacagccccaaccgcgtagtctgaagcatcacacatgatttcaaaaggatgatcccagtttggtgcttggacgattggagcagacactagagcttctttaatcaagttgaaagctctcatacactcttcatcaaagatgaattcggtctctttacagagaagtcgagtaagtggtctagcaaactttgagaaatccttgatgaatctcctgtaaaagccggcatgacccaggaaacttctgatatccttcacgctttttggaggctgcaactgcaccatgacgtctatcttggccttatcaacctcaatccctttctctgatatcttgtgtcccaatactataccctctctgaccatgaagtgacacttctcccagttcagcactagattggtctcctcacaccttgttagaaccctgcatagatttaacaaacaagaggagaaagaggagccatagacagagaaatcgtccataaagacttccaccgtctcctcaattaaatccgagaatattgaagtcatacacctctgaaaagtagcaggtgcattacacaatccgaaaggcattcttctataagcgaaggttccataagggcaagtaaaagtagttttctcctgatcattagggtgaattggtatttgaaagaaaccactatatccatcaagaaagcagtagtattggtgattagctaacctttcaagcatttgatcaataaatggtaaaggaaaatgatcttttctagatgcagcatttagctttcgataatcaatgcacattctatgtcctgttatagttctagtagggattaattcatctttatcattctttataatagtcatacctcctttcttaggcacacaatgaaccggagatacccaagtgctatctgaaatagggtagattacacccgcttccaatagtttaagtatctcctttttaactacttctttcagattaggattcaatctcctttgaggttcaatgctagaatgagattcattttcgagatggatcctatgcatgcacaaactaggtgagattccctttatatcagacaatgaataaccaattgctcttctatactttttaagttcggacaatagcaagttcacttcatcatcattcaatgcagcattaatgatcacagggtaagtagagtttgttcctagaaattcgtaccttagcccttgcggaagtggtttgaggtctaccttaggtgctttgagctcagaccagtcatctgaggtaggagaaggccatctcgacatgacgtcgagcttgcaggtcgagtctgcttccttgacttcttcaggaattgaactgggaaggcctactcgacgtgtggtcgagtaggtaagtcgagtctgatctgaaacgtcttcttccactgtactgacttctgctactgacacttctaacttctcaaagttttctgatgattcttcttctttatgggagtctagcagcttcttgtaccccaatgtctctaagtgtaagaacccctcttccccgtttttggtaagagcactctgtaggtagtcttcttcagtaagctcttcaagtagttcgtcagctaaacgatccatttcttctatgtagaacacttgtccgtcaatggtaggtttcttcatcgtcttagtgatgtcgaatgtcatcttgaaatcttcaccaaggtttaagtcgatcttacctcttctgacatcaatgagagctccaaagtagctaagaaaggtctccctagtatgagagggtcctttggctcttcatccatttctaaaacaacgaagtctgtagggatctctacccttcctattctgacaggtagatcctctaacataccatgagggactcttacggatctgtcggctaagattagttggatttggcaggacttgtacttgttgaaaccgagtcttcttgctactgatagtggcatcaaattgactgatgcacctagatcacataggcatttgttgaagaacaaagggcctagtgaacaaggtagagtaaatgagccgggatccccaagcttcttcggtatgatctttttctgtatgatagcactgcattcatggcttaacactaccattccttgtacttcctgaattctctccattatcatgtccttcaagtacttgtgagaatctggaatcagcatgaaagcatcaatgagaggcatccttaattcaatctccttgatgtgtttagcaaacatggctctgtacttctcaatgatatccctcttgaatcttcctgggaatggtagtttgggcttgtagggtggtggaacgaaagctttcttcttacccttatcaacagttggtttttcgatttggggactcttagcttgatccctaggtacaacatcttggtcaagcttagtggtgtcttctacttgagtttcattctgaatagaatcctccccttcttgaatctcactgtcctcagtgacaggagcttggttaggtcaagcacgcagctctcgaccactacggagttgaatagcatgagcatactcctttggattttgattagctttcccgggtagttgtccggggtgtgtaggtgcagaagtagaagcagcttggctctccatgtacttcactttggagtttagagcctcaatcttgacatgtagatcattgtaggagcagtcgactttgttttgaatctcagccatcttcttatcaccagctgcttggccgtgtagaagcttctaaagcatgtgcttcatgtcttgatcttgtgcaggtggagctggctggggttgctatgcaaaaccgggtggtggattatattgttgataaccgccactaaactgctgctttgggacaaagccttgattgtacggtatgaatggcttggactggttctgttgttgctgagggtaaacctgatcttgagggtttgcaacattcgtgctccggtaagatagattaggatgagcaggcttgtaggggttgtagcccttgttgtagccaccttggttctgaacgtagctgacttctgcagcctgagtgttctccccctcttggatttgatagtgctcttcttcagtgatataatggactggcttctgttgagtaagcataaatttatccatcttgtcgttgagagcctgaatcatctccttattatgctttgcatccggatctccaatacctctgttggagcgatcaaaatcctcgttatagttaccatcagatagagctaagttctctatcaattcccagccttcctcaacatccttattcaagaaattcccattagaggcagtatctagcaacattctgatcttgggcaaaaatcccctgtagagtgtgctgagtagtgaagccttcttgaaaccatggtgtggacactgtatagtgtagctcttgaatctccccggcaacggcgccaaattgatacaaggattttactatcaattaccctattatactttcatgtcattgcagtataagaggttatcaatccaatcaggtgctctcactatcaatcaagatatgctcagagataactaagtcaagccaagcagaataaaggtttgttatctagcaatcctaagcgaacatgcataaaaaagatagaactactgaacatgagtgatcatgcataagagaaagaactatcaatactaagcagcaataaacaagcaagcaataggtacagagaataggtaaaacaatagagataaaaaggtcctgaggaatggggtaatcgattatggtagtctccttaatctacctaggtggttaacaaactcaatcaagctatccctagacaatagattcaaatacaaatcaatccactctcgtgacagagattctcaagctaaatcactttcatactcaattctcattgaagaaatataacctagcaggcattatgattcaatctaataaagtcaataagcattctaaacatccaatctcttgggctagagtatgcaaatctctggaaaagtttgttcagacatttcatcaaacaccttgtggatgtggaaatgtctgagatcaatttccaattgatcagagaagaaatagcattaagatctacaaaaccagaagggaaatcaagcaattctacacttaaccacctaaatatactaaggattccacacctaatctaacccatcctcaagaaccctaatccactactcaagaacactgaagaacatcatgcataaaaacccaaaaaattgcataaacccagaaatcattaaaaagcaagtatgttatagataagagagagatctacaactttgatgaagaaaagaaatgcaaaaactcaaagattcagcaggaaaaacgattacaaaaactagggtttatgagagagtagcggaatatctgctgggtaaaaggaatatccgctgggtaatagcatatacccctatttataggaaataataggttgccctaattagctacaagacaaaatagagagtcggcggagaccaactcgacgtgtcgtcgagcctgccacgtcgagtccatgtgatcttcaaaggtggcgccttgacgtccaactcgacgtgacgtcgagtccgtgtggtcgagtctgctcccagtcggcttcctggcgtcctactcgacgtgtcatcgagccatgacgtcgagtctgctcccgggtgatcttgaacgacttcaatcctctccaactcgatcccgagtctagctccaaggtcgtgttggtttctcattgctccattaagtcttaaataagctccaaagtacctgaaactcatccaatatgcaacatgctatgctatgcaatgcaaatcgtactaagtgatgaaaatgttatgaaaaggactattaatgcaatgaaacagagaggaaactaagctaaatgtataagaaatgtgtgctaaaaagaggtaaaatacagagatatcatgaatcaactaactactaacctgttcttattgtttttgtttttttccgctctttttaatgttagattattgtttagctcataacaaatgtcttatattttagcaagaaaattgtttacttaatgctgcaaaattgttagttttatatttttctgagggagaataccaagtttagtggttttgatgacaactttagacattttttttttgatataaatgtaactatcattaaaaataaaaaaaagtttagggattacataatataatgcctaagatgtttgagaccttgtcaaaaaagaattaaaaaacaatgttgcaaataaaagaagaagacacaagagtgaattcatctaatccaaagttgcatgaggtttccaaaatgcttgctttgtcttcaagcggtgatggtgttctaaatagagacaactttagacattgttatgggaatatgctgaaagaggagaatgataaccacaaggtccacaacctcgtgattacagtggcctatatgtttttttttttttgataaatagtggcctatatgttggtgtgcaattatataatcaacgtcacctcttagcggtttgtgatacatgtggcgtcatgggctaatctacagcccccaatgagggtgcatctgcctcggtgcctcctattcatttttagatatcgaactactcataacgctgcatgccactggttgttgcataaattgtgccaacgcatgaacacaatatgcaatattggttcttgttactgccaattaagtagaccatataccaatggtcaggaggatcaaccgatcaagtaaaagtggcgatttggagaaaaccaggctatttttacttccggactccatttttaatcaactctacgattttgatgatttcttttttttttcttaaaataaataaattaaaataagggctatattaatatctatgcccagaggatgagaatattaagtatctatgtatgaagatcacgtaattaaacctctctcttccccgacagaaattatgacgaaaaagtccctacaaaaccgaaaaaacgaaaacagttatagcgtaggtgcggcagcattaaatgctgaggatatcttggaagatatcgcccgccggcattggaaacataaagatacggtaaatcattacagctgatacagcgagggtcctagatttcggaagtagcgaccagtcaaagagagatccaaatgcggatttgcgtcgaactctagcgagttcagaagcagcagctgttgggccgccaatggtcgctttatcgtcaagcgattcaaccttcggaacgccaacctcgctttcgacaagcatttctttcagtaccgaagacctaatggaggatagtggctcgtcgaataacaactgtggatgtcggattcacacactcgagtatttttattaagtaggaaagattactcttgagggacaaaaatgaatctgtaaaaacttatgagttgctacgaaaattgcaatagtatttctttcttgagaggaagatcccccttacatggccattggcctttgtatttatacataggaaaatgacattaaaatggctaattaagtataattattctctcttaaatgtgtccgttttgatctttggctttaatgcttcaacgtttgaatttgagttgaccctgatcttcatgggccccgccttttggcccaaatgtccttaaaccgactcaaccgtgacttcgatgccgaactcatgccgaaatgcagtcacttcggattttccttgtggcgatacccacttcgactgttcctttggctcactaatccgacgggctttatcctttatgggtcttcatcttgtctacgtggcaatctttggttggtcccggacttctggtgcgggatccgacaccaacaattagccccccaagttcttcgaagtgccattccaattcggagaactttaaatgcttaaatgaccaaagattgcactcgaaaatctttctgatttcccgccgaaaatctcatcactcctttaatttcggcactagccatttttacccgaatgacatctgtcatcattatgaccgtatattaattaattactattaaaacgggaaaaaccttcccacttccctcacaacttccgagacggttccatcatttagcttgtgtaaggtaacttcttttcatcatcattttctacttttacatttgcactttattcgaaacttctctctacttttcttcaccgaacctctcttcgccggatcttgaatttttcatttttctccgatgacttccgattctgagagacctgaatctccgtcttacgatgagaggcgttctagcaatgacgaatgcactcgtcctaacgatattgccggtcctcattacaaatccacctgtactcttcaatcccttgagcgattaaaggcgctttgtcaaattcctcctggaatcatagctgaggcacaaaatagccgatcctacagaatctccggagaaccaccgtgacggctacttttgtgtttacgaaatctacttcaagggctgcggattgaccttcccccttcccgaagccctagttcgattcttggcggctcttgagattgctttacctcaactaacccccaatctcctccgaaccatcctcgggattataaccgttgcggcagaggctggctacgtcattggagtccccgagatgaatgaacttctaagcgtgagaagttcgtcaaagaaaacaggatacttctcggcatacccaaatgccaatagaaacgtcatctcgcacctcccgaacaaggatgaaaactggcaccatccttggttcctgattaagaaaactcctgcttcgattgggaatctttccgatgtactcccatcgaagtggtctacgaagcctggtagaaactaggtcgtatactcctttcctggtcgttttatttttttactgaccaaattcgttgtttcacttcgcagctctcatcgcttcaactctcccgactgaagaatttgtcaagttcttcaaaacaatcctcgaaggggaaaccctttggaactctttcaccctcgatcggtttgtcgaggccaaccgaaaactcaggatgagtcctcccaatctacttcatcgtcttccgcctcctccctcaactcagggaatgtcagctcgggcccttactgcccagcgtaagaaactttccaagccgatagcagaggcttgtgatgaaaacaaggcgttccttgcggccgccattgacaaaaaagattacagcaggaccctggtggttgatgataacagctccgagggagccagatccgttgctgcttataggttaacacctcgtcgcgaacgtcgtgacgaatgttctcctcggagagagcgatctcctcgtcgtgattctcctcgtcctccccgagacgatttcagcaatgaaccactaaagaacttggttcgcaggaagagggacaaatcatcccgtagtgactcttctccgcgaagggagaaatcaagggcccggactgaccgttcacctcgatcatcccctcccactgaaccaatgggtcctccccgacctgttgatatgtcttcttcttcccaacccgatagcgaaaagactgctcggagtgcatctcctaaaaagggggattctgaatctcgagatgcttcctcgaggttaaagcctgctcttgtccctcaagtcaaatcgctttcaggtttggtgacttacacatacttaaacgtttttgtctctattaagattccaatttttacaactcttccttcttcgcagctatggagaaagaaggcagtgtcttccgatgcttcaagacacgatcgggttcgatcttgccagacttcgacaagtggcgccctgcgattcgcgaacgctacttgcttcacgctcaccactcatctcgggttagttccgtttttttttttttttttttttttttgattgtattgccattctgcaaactgacttgccatcccgggtttatatataatgccaggctcacggcgagcttaacgacatgattgaacattacgaagggttggtcattggacgggagaaggagattgacatgtggaagaagaaattctctgctcttgaggctgaactcaattcttctgccggctccaagcacgatctggaggacaaggtcgacagtttaacatccgagcttgcgtagataaagggggagctgcaagaccagtacgaccggaattacaaactccaagatgaactttctggtgttcagggtagacttcatgaatccgaatcaaccggcgataccctgaacaaccaacttatcgagcttaacgtgaagtacaaggcgctagccaagttgcatgattccgagttggcaaagtcggcatcgaaatccagaaaagatgttaagggatgcgggatggagttgatccagggggccatccgcttcattcaaaccgagaaggctaggtcagatctggaatcagacgtcaaggagcacgagagcaacctaattctgttggaccaaatccatgatgcagatttctccgaggtgcaagagagggccgaactgtcgaccaatctttctgaaaagcggagtcgtttggcagctcttcccgcttcgactttcaacccgcaggactttgaggaattcttcatagaatctcctcctataagtgaatcgggcctagactgggcgggtaacttttggctcttgatactcactaccttttcttaccttgtacctttgattgactggaattattttttctaggctcaagtgagacggaagacgttgtcccacccaaagttcccgcggcgccggaggtcactccggaggatgattgtaccgtggagggtggtccaggagcttcatctgatcaagcaccagttaaggaggcgagtgaaactttgacagctgaaccggagtccgaggtggatgtcgatccgtagtggctgtgtccactttaaactggggattgtcccatttagttgaaacttaatttcgaacttgtttttggcctaaggaggctttatcatttcttttgaacaagatatttgcctgaggaggcttttaaacttttctaggttatgaccgcaagggggtttggttaaaattatatgcgggtttgcaaagtccgcttttaaccttttgtggccttgtggttatgcttttgagatttttaggctgatcagacctttctcttaagaatgcgagaactgagctcggcttaaagcgagttcccacttcgggtttagtcaactcgataaatttattgggcttgggccttagaaacttttgtagttaatgcgacggttgctttttcccttcttatttcttaaaagtagggaaaacggctcgtctttaatgcaataactgccttctctcgattttccaaaaatggtttaaaccactcgggcacaataccattattggatttatggttccaagacaaaccctaaatcattataaataaaggattacctacctctaagctttatttaattatgtttttagaatcttacttgagaaatattacaagaatggaaaacgaaaaagtagcccccgttgatcccggcagcccactcttcttgtccggcgacggttttgaaccggccggcgttctcttccctcacgccgtctttcactttccttcaaaggagaaaaaagaggcttgcgactttattgacaaggttaatatctgtcgtctttgattaaaaacttttcgtttcatcttattcattcatctttatgctaggttgccgacaaacaccgtcgcttgtgtgaagagaggcagcggctaggcctcaaaaggcaaacactcgaggctcgcatcgctcgggtggagaggaagatacgggctttggaaagtgatccctttcaatgggaatggcagaactttgattctgtcgctgagatcccgaagatgcttcggaaatgcgtcttttaatgcaggatctgttcgaaggcataaatctctccgcgaatcactccattcctaggatagaatccgcagctgacttaggaatatgacattcctataaattacagtctcaacttctcttttctcctcaccgttcttcttcattttaacaggcatggagttcaaccttcgatgttcagaatctatgcccgacttctccaggatcggaatgataaacgaagatgttccaaatgagccaaacaggcaaacttctcctcctcgcggcttcttcagatctcagatccgacctccatgtgctttgatcagggatctccccattagagaccaaggaacagcgatggcattcatagaggcactcgcgcttcaacatcggaagcttacattggaaaagaggagactccggaagaaaattaaccggatgcaacgcaggcttactacggtatcaagagatctccacatccttgaatctcaccccggagaatggatagaactcggaatttctgacttcgctcgaattccagactacatgttgtcaatccttgaccttgctggccaaggagtcgaagtgttctgctcgtcaacaagatctccataatccgaagtgtacgatgagggatattttgccttatttgcttgaataaacgctcgttttccaattttttgtatgttcgcatagccgaacttttatttgcttcatttgttcgcacagtcgaacctttccctttaatacagaaataaaacaaatttttattaatagctgaactcgtttccgagctgcctacgtacccatttcgggatcaagccacaccgtagttcatatacataaacaatgcatgtagctttaaacataaaacttctttaggttgatcacattccaaggtcgcttgactggattgtcttctaagtctttcaacctataaacaccgttccgaaccacttcggtaacaatgtaaggtccttcccaattaataccgagtttaccggcaccttcttcttttttgttgtcaaagacgcgccttaatacataatctcccacgaagaacggcctacttttaactttagaattgtagtaccgggctgctgcctgctggtaattctggatccgaatcaaagcttgatcacgcctttcatttatggtatctagtgaatcattaagcattgctgaattttcttcctcatttaacggtgcttctgttcggcgaagtccgggcacattgagttcagctggtactaccgcctccatgccataaaccaaagagaatggagtttcccctgtaggtcgcctaggggttgtacgataggcccacaggacgggttggagttcttcataccatcctccttttagatgatttaagcgtttcttgagattgctcaatatcgtcttgttcgcagcttcagcttgaccgtttccttgcggatatcgtggagtagaataactgactttgattccccagtccgcacaaaaggcatcaaattcgtgtgaaatgaattgtggtccattatcagtgactatttcgtacggaactccatgtcgacatataatgtttttccaaataaaggtctttaccgccgaatccttgataccaacatacgcctcagcttcaatccatttcgaaaagtagtccgtgaggactaaaaggtattgtacacctcgagttgatttgtgcaacggtccaatgatgtccattgaccacctcataaacgggtatggggcggaaatggaggagaataattccgacggttgatggatctatggtgcatggagttggcagcgcttacatctttgggcgaacttaacacaatctgtaatcatagtgggccaataatatcccattcttttaactttaaaagccatagcccttactgatgaatgactcccacataatccttcatgcacttcgctcatgacgatttcgacttcaggcccaaaaatgcataataggtaagggtcactgacacctcgtctatataacgcatcctttgatagacaaaatttcgcgctaacgatttttattttcctggcctgccacttattctttgggagctcacctgtcatgatgtagtgctttatcggctccctccagtcagccccccagtctttagccggaatttggtcaaccttgtgaaatactcgtggctctggctcgggatgttcgtttggttcaagaacatcctcctcgattaacggctcggtttctaatatcgtttctggaatcgcatcttcagctaagacaacgggttccttgttagatgtatttgatccctttgacttcctccgtttgttaggtggcggttcgatctctggttcgccacggtcacgtgccgctgctcgagaccttgtaacgacgagggtttctttgttgtcttgaatgcttcgctccgaaatgcattccacttgaataactcttttcaactcaggatctgatgttgacgccaatgcggcaagtgcatccgcagttgtattctctccccgaggtatgcggattaattcgaatttcgagaaatttttagatagatccttcaccacttcgaagtacgcttccattcttgagtctttggcttcatagtctccattaaactggttaactactaattgcgaatcacaataagccactatttccttagctccaactccttgagccaatcgaagtccggcaatcagggcttcatattctgcttcgttgttggaggcattgaataacaatcggaatgactgttctagaatttctgatgttggagactccaacttgatccccactccggatccttcttttgtcgaagacccgtcaacatgtaatttccaagtttggttctccggttgttctatcgttccaggtattggtagttcggtcaggaagtctgctaagacctgagccttcatactgatccggcttttgaactctatatcgtactcgctcaattccaccgcccatttcgccaaacgtctggactgacttggactatgaagtattgttcggagtggctggttggttaatacttcaatcggatgggattgaaaatacgggcgcagcttccgagccgaggtcaccaccgcgagtgcgagtttttccatcattgtatatctggtttctggatccgtcattgacttacttacgtagtaaatcggcttctgttccccgcggtcttcccgaaccaagactccactaaccgcatggtttgaaactgatacgtacaaataaagcttttcatccacttctggcttggacaatataggtggagtggttaagtatgccttaagctgcccaaaagcttcttcacacttctcatcccaaaggaatcctttgtttcctcttaggatttggtagaaaggtaacgacttatccgttgacctcgagataaaacggttcaaagccgtaatccgcccagtcaaccgttgtacttccttgaagtttcttggagatggcatgtttagaaaggcattaatttgatttggattggcctcaatccctctttctgtcacaacatagccaaggaattctccggatgggactccgaatgtgcactttgccgggttcagcttcatttgatatttattgagaatatcaaaacattcctctaaatgtttgacgtgatcctctttcttcaaagatttaaccaacatatcatctatgtagacttccattgtcttcccgaggtgattgtggaacattttgttaaccaaccgttggtaagttgctcctgcatttttcaaaccaaaaggcattaccttgtaacaatagatacctctatctgtgataaatgacgtcttttcttgatcttcggggttcatcattatttgattataacccgagaaggcgtccatgaatgttaacagctcgttcccagcggtggattctacaagtcgatctatatgtgggagcgggaaactgtctttgggacatgctttattgaggtatgtgaagtcgatgcaaaccctatctttcccattcttcttcttgacaacgacagtgtttgctacccattccggatattgcacttctcttatggaccctatcttcaaaagtttatccacttcgtcatttactatttttgctcgctccactccaagctttcttcttttttgtttcaccggtttgaagcttggatccacgtttagttcatgacaaattatacttggatttatgccaggcatgtccgctgctgaccacgcaaacgatgttttgtttttccttaagagttcgatcaaagcttcttttatttggccagtcaaagttgccccaattcgaattttccggtccggcttgccttcttccaacaccacttcgattactacatcgtctttcttctacccgctaggaaattttgttcttagtccctcttttgcgggcttcgttaattgctattgaatcttcatacggtggctagctagataacacgtccgtgaagcttcttgatctccccgaattgtttccactcctcttaatgttggaaatttaatacattgatgatatgtagaggggactgctttcatttgataaatccagggagtcccgaggatgatgttgtaagctgcgggcttatcgaagacaacgaagtccacgatcttcgatacctttttggcaaggaccggtagcttgattgtcccgagagacatggctgactcacttgtgaatgcaactaatggggacggaggccccactatgtccgcccgactaattcccattctttctaaagtacttaaaaagatcaaatcgaccgaactgcctgtatctataaggatccttgatacttcgaagttggcaacgtcaagggtaatgactagagcatcatcatgaggtctttcgaggtactgcgtttcttcttcattaaatgatattgatgcaccttgaaaatcgacttcttcgcttaagcttgctttgagtaggacatttcgtctatgtttcttgatggaacttatcgaatctcgacaaaatttggagcctcctagaatcacattgatcttacccttcaaactccttggttcttcctcgttggataaccttggtcttttggaatcttggtctttagaattttcccttgcttcatggtattccttcacaaaatcttttatatcaaatttcgaaagatctccactggcccaaagctccgcgaggtaccttttaaggacactacaatccttggttaaatgtccggttactttatgaatatcacagtgtaaactttcatcacggacccaagtgtttgtccttcctttcccttggaattgttttccaacggtactgttgaagggttgcgacccaaattttcttggtcctttgctctccctaggttcgaacttcttggtagggacggtgattgccgtcttttcttgtttatttcttttggcaaaattttctttctcgtcctctacttccatccaattatttgcgcggaagagtgcatcctgaattgtgtctggtttatgaagtattaagtcttctttaaaccttgaatcatgtcgcaatccttttcgtagggcagataaagctgattgctgcgagattcttgggagctttgacagcactcctttgaatttggtgatgaaaactcgaagtgactcatttgatccttgcgataagttccaaagatcggcatccgaaacgcttttatccataaggatggaatattgctttaagaatacggctgatagttcgtcgaaattgctgatcgaacccggctctaattgggtgaaccacattagagcttggccacatagattctccgagaaaagcttgcagtaacctgcgtcctcatcagcttcatccaattcgactcgtccggcagctatcaggaaagctgcgagatagctctttgggtcctccaatccgctgtaagggtccaacttgagcttccgggaatctttgatcctcaaacttgcaattcgcgagatgaaaggtgttcgcctagcttcttcctcatggtctcgaactggtcgaggttctcctgctcgtattgagctgcaagttgttcttcatctccaagctgtgtcccttcttccaacgtctgaactacactattagtagcaccaggagttgtttgtccactggtttcatttcgcgcggcggaacttggcgagttgaatatccctcttcggattcccacagggtttcctgcacttaaagagcgaacacgagtttgtatagtgctgacgttttgactaagagatacctgggatgtttgcaacgtatcgacggccttttccacatccgagaacttttgtgatatgtccgacatggtttgctgcatagctttgagggtttcggccaatgatgtatcaacggcgtctcctccgaacattgttgcttatctcggaaatgtagtaaagaaaaaatctgaccactcaagaatcctcgttccccacagacggcgccaaaatgtggatgtcagattcacacactcaagtatttttattaagtaggaaagattactcttgagggacaaaaatgaatctgtaaaaacttatgagttgctacgaaaattgctatagtatttctttcttgagaggaagatcccccttacatggccattggcctttgtatttatacataggaaaatgacattaaaatggctaattaagtataattattctctcttaaatgtgtccgttttgatctttggctttgatgcttcaacgtttgaatttgagttgactctgatcttcatgggccccgccttttggcccaaatgtccttaaaccgactcaaccgtgacttcgatgccgaactcatgccgaaatgcagtcacttcggattttccttgtggcgatacccacttcgactgttcctttggcttactaatccgacgggctttatcctttatgggtcttcatcttgtctacgtggcaatctttggttggtcccggacttctggtgcgggatccgacaccaacaacaacagcttatcgctattaggtatgttaatgaataatcaatatattatccgctattttgtttatgcactatcaaacaaccattaaatgctttaaactgtaggtgacgaaacactggcacacttttactctgatcctgatggctctctgattatggatcctcaacctatcacaatgatagataaaggcaaaagtatcatgatagaggacggattatcaactaaagaaatagggatgccatcaactaacacaagagtatcggaggtacagaggaatgagatgatcgtgaaggatacacctgtgccaacggtattctatgacagagatgcacccccatacaaaaataattaaaaaaaaaattgaacagaagcgatggaacaatgtaaaaaggagggacttaattatcgcttcctctatgcatatccattgatatttctcttaaaataaaaaggaaatgatggcaaaaacaaattactaaattaggaaagagttgggaaataaaaaaggagcggagggcttgagagaaaataagaaaagagttacgaatactactttttgtcgtctgttgtttcgtcttcatcgcattgcgccgccttgtcatactctgcgtctctctcaagcacgctccttcgatcttcctcttggtggtac

SEQ ID NO: 5521 - DNA, 3155 bp, Arabidopsis lyrata
  Intron number 1 from transcript 914215 (locus 914215) deri ved from phytozome v7.0 (chr-ID scaffold_1; pos 26702623 t o 26705777)
atcgcaacaacctgaggtattgtaattataagatttttaactttattgattgaattctgtcacatgaaaccctaattcttgaattttctttagttcttatgaagataatagttgactcttgcttagtaggtaatttcgttccaggctaaagtttttagccagtcacaactacagtactcgtttttccttcattgtcaacaattattttctagatcttttttttatgaaatttgttgggagtatatagaaagattttaattttttggaatgtaatctttttttaatcaaggttttcaatttttggaatgaaattgttatgggtctttggaagatcatcaagcaaggtttataagcgtggaatctagtagtatttatatatagcaacacttgtaattctttagtacttaaggtaaactttgatatagtttatatatatagatatattgtaagttatacataaaaataaaaaatcatactagatcatcatccgtactatagtacgggttgaatttcatttattacaaaatttataaattttatgttttagaataaagttgtgatatattataatagtaagtgaaaaataatattttttgtcagtccctatatataatactaggatatgacccgcggtacaccgcgggttaattatttgatttttttatttttataaattgatgaatttattgtgtataatattttttgttgtatactgcgggtaacatgcgttgtatctaaaataaaaaattttaagttgtatttgttttgtttagtgtttaagattgtataattgtattttgatttgttatttataggaattcacctgtggtatattgtctcgtattaatattgacccaaacccgtccaaccatataatctaaaatgaaattaaacatcattttgttatttttttaataacacttttatttaaatgtcatataattcgagttaatttgaaagttgctttcaaatagtttccatgtatatttttaaattagtgtgtgtttttggaccaacccgtaaaaaaaatttataattgtatcttaaaatactaattaggatttcacccgtgatatactgtcccattttagataattgtaaaaattaaagaaagatccgaatgactcaatttcggatctgaataaaataacgacatgattaaatgctcaatttgttcttaaaaatgttaatatagattacacacatatttttattcatcgattgagtaatatatgtccgttttaaaaaatttgaattgtaacatatgcagaaaaaaaaaaactaaaatttactaactatttatatattttataataatttaaaatagtataaatataagatcaaataaaagtgaaataagaatcatatatttatgtttaaattaggtagagaggttttaggaaattagtgcaaatttgttatattagcattaaatcatcatatttgatttctttatctataaaaatcatggagaatataccataaataaagcgtttaaatatagtaattagttgagaaagtatatatattttagattttattaattattttcgttttttaattttgccaaaatttaaggaaagatccgattgaagatttccgggtcaaaattaaataaatttgacccgatttgggtaccccaaaaactgctgcaaaaatgtatagtagattagaatgaatatatttttccttttctatagtattcagttatggatattttttttaagatatgaaaacggaaaataagattatttttttaaaagaattaatattatttgaacaatgagttaatttatgttaacaaccacaaaatgagagtgcatataatttagttagatcaaaaatcaaaatatcataaatgagtcgcatctaaaacgtagattattttgaattacttaagaaaattagctattattttgaattaatttaggaaattattttttcaaattctaattcattgattgttgaaatagagatttgtttgagccaattacggaatttaccaattattcacataatcaaatatgttatgaacatatattttggtatataataataccaaatttaattcgtatgtggagtatatattttcattttaaatccctatgaaaatattgtggcacaatctattatttattattttcaaaattgcttgcagaatcaaatttcaaatatttagaagtgtcaaaccttatttaacctatctcatcataaaatctgccgcctactataaatattttaaacatatctttttagaaaatcaaattaatgtatttatagtttatttatctttttaatttattaaatatttatgatattctttgatatattaaattaaacttttttaaatgtttcaatttaaaatctttaaaattttgtattatagtatgtaaaattatgaattaaaaaaatgatatgaaattaaatataaatattcaaatagttataaggatcataactcatttcatcatataatatattatattcaacccaccgtctattataaatatttgtttcaaaaaatcaaattagggtatttatacttcataaatttttgatctattaagtattgatgatattaaaaaaaaaaggaatatattactcaaatatgaatttttgacctgttaaatttgttctttcatacattgaataatttatattcgtctttaaaaattcaaatcttcgtatatgcggaaaaaatttacattttcttttattatatagatgatataatgatttatttatttatagaaatagaatcatataaagatgaaaggtgaagtataatgattaataacaaattaatatggtaagttagataatcttatatgttcattttgattggtcattctttttaaagaaattaataatagattttcgtttttataattaaattaaattcattaaattgcataaaatagtatttgaattgtttatccttaatgagttgaattaatttactctataaatttttatttctaatggcattcttaagtaaattcttacaaaagggaaaattaattaatagtaattgtaaattgtactccccaaataatagtataggatatatatcattatacttacaaagatgagtagaaacgttacactaatattaattgatattttttctttttacagaacaaccgttgaaacgt

SEQ ID NO: 5522 - DNA, 1512 bp, Arabidopsis lyrata
  Intron number 2 from transcript 487384 (locus 487384) deri ved from phytozome v7.0 (chr-ID scaffold_6; pos 2154472 to 2155983 reverse strand)
gtggtcctcctagaccattgcgccgtttcctccaggtaattgtttgtttttttcttttccattgtttattaatcaaatcggttataactttttaaggaatcataatattttaggggaaatcaatgatattttctagagaatatgcaatattgtagatagtcaaattttactgttttatttgcaaaaactaaggatggttaaagaaacaaaaccctaaaacgttatagcaagaagttaatttatgacggaattgagagaaacgaaaatatttttattctttttgttaatgcagtagagagaggctagagaactccttttacataattaaaaaaaaaaaaaaaaaaaaatcaaagcaatataggtttattttatacatagaactattgggttttgtgaaatgtttggaataatattatttggaaaaataataaggatatttttcttgtggttatgctacatttctagtttctacttgattcatgaaaagacaaagatccttaatgtctcataaagcatatgcaaccactgatcattatgacactggatgattgagcttttccacttggagttcaataatacattcttcctatattcctgatttttatgattcttagtagttgaagttttcttttccttgattggtggcaaaaagatctttcaatcatcaaacttcctcttgcttttaattcttcatcgtttctttgtttttcttttccacatttattcctaaaagagatttgtctagctaaacctaccttcaactttgtcaacgatggaattggtcatcctataatattaattgttcgttgattagtttggattttgatttgaaaaaattaacagcgaatagaataacttttctaatgtaaatctacaagagaaccatacacccatatatatattttcatcgtataatttgttggtttccacataagttaagataaaaccattgattttctcaattaaaattttgatattttccaatgtaaacttatgacttttgagattttgatgtggccttaaataaagtgtgacgtgtcccatggaattgcgctcttattttctcatttcaaagtggagaaagtgctcacaagttaccaaagtttttggaacttgaaagttggaaccatctatggtccacccacaactaacaataacaactaaaaaaatatacttataaatatacatagttggttcccaaatagatatatttgttaacaaagatattgctaattgattttctccaaatagatatttttcttaacaaagtagacttttgttcccattaccaaatatagttatttaattttattatcaccaaaccaatgacatttgtttgttttgggaaaatttgtaataatggtgaattaagttacttgtcgttgacttgtttcaagtcttttgtgtttacttatttgaaacgagatggaatcattacaatagttctgacattactctctgaaacaaaatcaaacagggtcttgatccaaaatcaacggctaatctattcgc

SEQ ID NO: 5523 - DNA, 2165 bp, Arabidopsis lyrata
  Intron number 8 from transcript 315955 (locus 315955) deri ved from phytozome v7.0 (chr-ID scaffold_2; pos 13783678 t o 13785842)
tccctccctcccacgctgctcaatctaactcatcggtttgcttcccaatttctcttatatatgttaaaccattgagaaacattcttaaccaacctccgattcagttaactactacatgtagctatatatagaaagataacgaccataagttgtcacttagtagagtactcaggtcgcaaacatagtattatgaaacctcttcttgccttttataatgaataatgtcgggactatgatattctattaatttataaaggttatgtacttatgtagtatcaaaatctcttcatattaggaggtcttgaacaaattgcgtccaccaaaaccagattggtatttcgagctctacggttggtttaggagttcaggaatggaaagatacgagaaagaggttagagtgacttcgatcatgaagttgaatgcatttttacattccatttatttatctttcttcttcttcttttgatagattgcgggttacaagaagaaactctttaaccaagtcggaaacgcagaaaaggttttggagattggcatcggagctggtcccaatatcaagtactacaacactcttccaaacgtctctattcttggtgtagatccaaaccctaaaatggaaagctacgcacgaaaatccgctatacaagcaggattgaaatccgaagacttcaaattcattcacgcggtaacggcctttttatatatattccttaaatccataataatttgcatttccctaatgctaaaacatttccttgttaatcttatgattaggtcgcagaatgtataccgttagaagatgcatccgttgacgcagttgttacaagtctcgttatgtgttctgtcacagacgtcactcaaaccctcaacggtaactgtttacttgttataaaccaaacatacttgttaaaactttcatgaacttctaattcaacaatgaattaacatatggatattacagagataaagcggattctaaaaccgggagggcgttacctcttcgtggaacatgttgcagctgaaggtatctcttttgccatcaattacagaaactatgaatgcttaatctaaagttttgtctctattttgttgtgtagatcgatcatttctgaggatggtgcaaaatgtgttggatccagtgcaacaagtcgttgccgatggatgtcatctaacgagaccaacaggagaatccattataaaagctggtttcaacggtggtgttgatatcaacaaggcttctcttactagcttctatcacttaagccctcatatctacggagttgcgtataattaataatcattaatttgcaagactctgtttctagtcctctgtttcaagactcttgaagaataaaaagttctcttgttgtttgaaataatgagtcaatttgactaagttcaagttgaatatttctgtttgaataatgcgtcaatttgactaagttcaagttgaataagtcctccatatattgtcggagataataagagtttagtttgtgttttgtttcggttcttctgttgtaataatgtgtcaaggtctatttaaaaaccctgttttggattctaattctctgtttcaagactctgttttttattatgaactatcaactctgtggattaattctgagtaatttattactaaataatgtttcataatgagaacaaaatgccaattatgagctactaatatgtaattataaggattttatttgtggacagaatctgaagtagaaaaagcctatcttcatattatttcactgctctgttttggtatatgagtaatttgagctttttcaagttaaaagaatggcgatcctgcacttctcatcttcttcaccgatcttgaggattatacactcacctccaagaaagatttgggctttgcaagattccatcaaaacccagaagaatctcattacgacagattctgtctcctctttcagcttctgtccttgtggaagaagacatttcataggagctatgacttcaataccatttcttcccatatctccctcttccgcttctacctcaacggtttcttcctctgtttttgtgttaaagaactttagggtttatctagaattgataaaaaatgcatcctttaataatctaaattcactttattattaggaagatttggaaagattacgtcctccaaactccaa

SEQ ID NO: 5524 - DNA, 1470 bp, Arabidopsis lyrata
  Intron number 1 from transcript 916931 (locus 916931) deri ved from phytozome v7.0 (chr-ID scaffold_8; pos 15418217 t o 15419686)
ccagagcaaatcatttgagacagaaaatcggtgtcacatatctaccacacatatttaatcacataaacgttaatttattcgtttgtgattgtatatcgtgtaggtctaggattcggatggaatacccttattttatgtattttcgtttaggtatttaattttttacataattagttgaagttatccatattttctttattttctcaatatttcactatgttttagaaaatacccaaatttcccaaaatttccatcacgaaataaactttacccgtcccaaaatattttatttggcacatgatatgctagataaattgaaagaaacatttttaatatatggttgcaagcaatgtattttaattgtaatatgttatacaacattttttaggaattctcatcccatcccgttcaaaaagtcagtttcaatatttaggattaacacactattataatcttaacaatatgtttgcgaatcaaaatattaaatatagattcgagttatatgcttgattttttttttttttttttttatctataattagagttttatttggcaagtataataactgttgtgatatgatttcgtaaactaatttaagatttgatttaatcgtaaacagttctattttctatttttattatttcgaatatattattatcaattgttatggaaacagcttattaaatcataacagtaaatttagtttgtttgatttttggatagaaaagacagaaaaatctttttgaatatatattgttaatgctccaacgaaataaataaatatactttttgaatatatatttttgaccaaaagaaaaatgctcaacaaaataatatatatatatatatatatatataatttttaaagtttgttagttttgagtgattcccagttaataatatagattttttaaattttaaagaatcatttaaagtttttgattattaaattattatttcctatgttctaaacatgttctaccaataatcactaactttacaaaagtttttatttaaagattttacaattttttaataattatttttccctaagaactatctctgaagattaacccatgcatatgccctaagggaacgaagaagccgaaaactttctctgcgctctcttctttttcttcttccccaaaaaaaaaaccctaatttctagatccatctctaagaaactcgcgtcgttcgtcttaaccatggcttcgaagctcccgttgcaaaacatcgacaacgccaatgttgcgaaggctccggcatcatcgctagcttccgctgggaagacgattgagcatatcctactttgtcctgattcttacataggatcggttgataaacatacccaaacgctttgggtatgatggattgagttatctttaaaatatctgtgctttgcttattatatatgcatgttctgatgtccctgttttcccattcagcctggcactcatatttttccatcg

SEQ ID NO: 5525 - DNA, 11673 bp, Arabidopsis lyrata
  Intron number 7 from transcript 905398 (locus 905398) deri ved from phytozome v7.0 (chr-ID scaffold_3; pos 10786755 t o 10798427)
ctgcgcttgcggaagacggcatttttgtcttgctgggaacatttgcatgtatcgccaatttcatgtttgcacaaccattgttggtgtcagatcccgcaccagaagtccgggaccaaccaaagattgccacgtagacaagatgaagacccataaaggatgaagcccgtcggatccgtgagccaaaggaacggtcggagtggttgtcaacataaagagggtccgaagtgactgcatctcgacacgagtccggagacgaggtcatggttaagtcggtccaagtacatttgggccgaaaggcgaggcccataaagaccaaagtcaactcaaattcaaacgtggagcattaaaatcaaggaatcaaaacggacacatttaagaaggaataattgtacttaattactcatttttaatgtcgtttctctatgtataaatatggaggccaatggccatgtaaagggatctccctctagagcaagaaatacgatagcaatttctgtagcaattcataagccttttacgttcttattttttgtccctcaagaataatctttcctactaataaaaatacttgagtgtgtgaatccgacatccacattttggcgccggctgtggggaaagaaggttcttgagtggttagattttttctttattacacttccgagataagcaacaatgtccggaggagacgccgttgagacatcattggccgaaaccctcaaagctatgcagcaaaccatgtcggacatatcacaaaagttctcggatgtggaaaaggccgtcgatacgttgcaaacatcccaggtatctcttagtcaaaacgtcaatactatacaaactcgtgttcgctctttaagtgcaggaaaccttgtgggaatccgaagagggatattcaactcgccaagttccgctgcacgaaatgaaaccagcggacaaacaactcccggtgctactaataatgtagttcagacgttggaagaagaggcacagctcggagatgaagaacaacttgcagctcaatacgagcaggagaacctcgaccagttcgagaccatgaggaaggttagccaggaattaaaagaaatgaaatcaaaatttcatcaagttacaagttcggagccagacatcaatcgagtcattgaagaagctaggcgaacacctttcatctcgcgaattgcaagtttgaggatcaaagattcccgaaaactcaagttggacccttacagcggattggaggatccaaaaagctatctcgcagcttttctgatcgctgctggaagagtcgaattggatgaagctgatgaggacgcaggctactgcaagcttttttcggagaatctatgcggccaagctctaatgtggttcacccaattagagccgggttcgatcagcaatttcgacgaactatcagccgtattcttaaagcaatactccattcttatggataaaagcgtttcggatgccgatctttggaacttgtcgcaaggatctaatgagtcacttcgagttttcatcaccaaattcaaaggagtgctgtcaaagctcccaagaatctcgcagcaatcagctttatctgccctacgaaaaggattgcgacatgattcaaggtttaaagaagacttaatacttcataaaccagacacaattcaggatgcactctttcgcgcgaacaactggatggaggtagaggacgaaaaagaaagttttgcccaaagaaataaacaagaaaagccggcaatcaccgtccctaccaagaagttcgagcctagggagagcaaaggaccaaggaaatttgggtcgcaacctttcaacagtaccgtcagaaagcaattccaagggaaaggaagatcaaacacttgggtccgtgatgaaagtctatattgcgacattcataaagtaaccggacatttaaccaaggattgcagcgttcttaaaaggcacctcgcagagctttgggctagtggagatctttccaaattcgatataaaagattttgtgaaggaataccacgaagcaaaggaaagttccaaagatcaaaattctaaaagaccaaggttaaccaacgaggaagaaccaaggaattctaagggtaagatcaatgttattctaggaggttccaaattttgcggagattcgataagttccatcaagaaacatagacgaaatatcctactcaaagcaagcttaagcgaagaagtcgattttcaaggtgcatcaatatcatttaatgaagaagaaacgcggtacctcgaaagacctcatgatgatgctctagtcattacccttgacgttgccaacttcgaagtatcaaggatccttatagatacaggcagttcggtcgatttgatctttttaagtactctagaaagaatgggaattagtcgggcggatatagtggggcctccgtctccattagttgcattcacaagtgaatcagccatgtctctcgggacaatcaagctaccggtccttgccaaaaaagtatcgaagatcgtggacttcgttgtcttcgataagcccgcagcttacaacatcatcctcggtattccctggatttatcaaatgaaagcagtcccctctacatatcatcaatgtatcaaatttccaacatcaagaggagtagaaacaatggatgacatgcctggcataaatccaagtaaatttgtcatgaactaaacgtggatccaagcttcaaaccggtgaaacaaaaaagaagaaagcttggagtggagcgagcgaaaatagtaaatgacgaagtggataaacttttgaagatagggtccataatagaagtgcaatatccggaatgggtagcaaacactgtcgttgtcaagaaaaagaatgggaaggatagggtttgtatcgacttcacagacctcaataaagcatgtcccaaagatagtttcccgctcccacatatagatcgacttgtagagtccaccgctgggaacgagctgttaacattcatggatgccttctcgggttataatcaaataatgatgaaccccgaagaccaagaaaaaacgtcgtttatcactgatagaggtatctattgttacaaggtaatgccttttggtttgaaaaatgcaggagcaacatatcaacggttggttaacaagatgttccataatcatctcgggaaaacaatggaagtctacatagatgatatgttggttaaatcgttaaagaaagaggatcacgttaagcatttagaggaatgttttgatattctcaataagtatcaaatgaagctgaacccggcgaaatgcacatttggagtcccatccggggaatttcttggctatatcgtgacagaaagagggattgaagccaatccaaatcaaattaacgcctttctaaacatgccatctccaagaaacttcaaagaagtacaacggttgactgggcggattgcggctctgaatcgttttatctcgagatcaacagataaatcgttacctttctaccaaattctaaaagggaacaaaggattcctttgggatgagaagtgcgaagaagcttttgggcagcttaaggcatacttatccactccacctatactgtccaaaccagaagtggatgaaaaactttatttgtacgtgtcggtttcaagtcacgcggttagtggagtcttggttcgggaagaccgtggggagcagaaaccaatttactacgtaagcaagtcaatgacggatccggaaacaagatacacaatgatggaaaaacttgcactcgcggtggtaacttcggctcggaagctgcgcccatattttcaatcccatccggttgaagtattaaccaaccaaccactccgaacaatacttcatagtccaagtcagtccggacgtttggcgaaatgggcggtggagttaagcgagtacgatatagaattcaaaagccggatcagtatgaaagctcaggttttagcagatttcttaaccgagttaccaatacctggaacgatagagcaaccggagaaccaaacttggaaattacacgtagacgggtcttcaacaaaacaaggatccggagtgggaatcaagttggaatctccaacatcagaaattctagaacaatcattccggttgttatttaatgcctccaacaacgaggcagaatacgaagccctgattgccggacttcgattagcacaaggatttggagctaaggaaatattggcttattgcgattcgcagttagtagttaaccaatttaatggagactatgaagccaaagattcaagaatggaagcgtacctcgaagtggtgaaggatttatctaaaaatttctcgaaattcgaattaatccgcatacctcggggagagaatacaactgcggatgcacttgccgcattggcgtcaacatcagatcctgagttaaagagagttattccagtggaatgcatttcggagcgaagcattcaagacagcaaagaaaccctcgtcgttacaaggtctcgagcagcggcacgcgaccgtggcgaaccagatatcgaaccgccacccaacaaacgaaggaagtcaaagtgatcgaatacatctaacaaggaacccgttgtcttagctcaagaagtgattccagaaacaatgttagaaaccgagccgttaatcgaggaggatgttcttgaaccaaacgagcatcccgagccagagccacgaatatttcacaaagttgaccaaattccggctaaagactggggggctgactggagggaaccaataaagcactacatcatgacaggtgagctcccaaagaataaatggcaggccaggaaaatgaaaatcgttagcgcgaaattttgtctgtcaaaggatgcgttatatagacgaggtgtcagtgacccttacctattatgcatttttgggcccgaagtcgaaatcgtcatgagcaaagtgcatgaaggattatgtgggagtcattcatcaggaagagctatggcttttaaagttaaaagaatggggtattattggcccactatgatcacagattgtgttaagttcgcccaaagatgcaagcgctgccaactctatgcaccattgatccatcaaccgtcggaattattctcctccatttccgccccatacccgtttatgaggtggtcaatggacatcattggaccattgcacaaatcaactcgaggtgtacagtaccttttagtccttacggactacttttcaaaatggattgaagctgaggcgtatgttggtatcaaggattcggcggtgaagacctttatttggaaaaacattatatgtcgacatggagttccatacgaaatagtcactgataatggaccacaattcatttcacacgagtttgatgtcttttgtgcggactggggaatcaaagttagttattctactccacgatatccgcaaggaaacggtcaagctgaagccgcgaacaagacaatattaagcaatctcaagaaacgcttaagtcatctaaagggaggatggtatgaagaactccaacccgtcctgtgggcctatcgtacaacccctaggcgacctacaggagaaactccattctctttggtttatggcatggaggcggtagtaccagctgaactcaatgtgcccggacttcgccgaacagaagcaccgttaaatgaggaggaaaattcagcaatgcttaatgattcactagataccataaatgaaaggcgtgatcaagctctaattcggatccagaattaccagcaggcagcagcccagtattacaattctaaggttaaaagtaggcctttcttcgtgggagattatatattaaggcgcgtctttgacaacaaaaaagaagaaggtgccggtaaactcggtattaattgggaaggaccttacattattaccgaagtggttcggaacggtgtttataggttgaaagacttagaagacaatccagtcaagcgaccttggaatgtgatcaacctaaagaagttttatgtttaaagctacatgcattgtttatgtacatgaactacgatgtggcttgatcccgaaatgggtacgtaggcagctcggaaacgagttcagctattaataaaatttgttttatttctttattaaaggaaaaaggttcgactgtgcgaacaagtgaagcaaataaaggttcggctatgcgaacatacaagaggttggaaatagagcgttatttaaaagacgggatgtccctcatcgtacacttcggactatgaaaatcttgttgacgagcagaatacttcaactccttgaccagcaagatcgaggatcggcatcatgcagtccggaattcgagcaaagttagatattccaagctcagtccactctccggggtgagattcaaggatgtgaagatctcttgacaccgtagtaagcctgcgttgcatccggttaatcctcttccggagtctccttttttccgacataagcttccggtgttgaagctcgagtgcctctatgaacgccgtcgctgttccttggtctctgattgtgagatccctgatcaaagcgcatggggctcggatctgagatatcaagaagccgcgaagtggaggaagctgcctgcttggctcattcggaacatcttcgtttatcattccgattctggagaagtcgggcatagattctgaacagcgaagattgaactccatacctactaaaatgaaaagaatggtgaggagtaaagggaaattgagactataatttataggaacgagtaagctgcggactctatcctaggaatggagtgattcgcggagagatttatgccctcgaacaaatcctgcattaaaagacgcatctccgagaatatttgaaaagtaaggaaagttgcaaatgtttccataaataaaaaggggccgaagcccattacgagttcaaaataagtaaagaagttagagaacatttatggaagaggctcaggaacaggctccttcatcgccggtttagtcttcgaagtggacgccttgttcttggcatccacttcgggatgatcccgaacgcgtttccgacaggtgctggcctcctcctcgtcttcttcctcgctatcagatggaacggtatggaccggagcattcacaggacccggaactcctttagcacggagatacatccgaagcatcttcgggatctcagcaacagaatcgaagttccgccattcccattgaaagggatcactttccaaagcccgtatcttcctctccacccgagcgatgcgagcctcgagcgtttgccttttgaggcccagccgctgcctctcttcacacaagcgacggtttttgtcggcaacctagcataaagatgaatgaataaaatgaaacaaaagcttttaatcaaagaagacagatataaaccttgtcaataaagtcgcaagcctccttcttctccttcgaaggaaagtggaagacggcgtgagggaaaagaacgccggccggttcaaagccgtcgccggacaagaagagtggactgccgggatcaacgggggctactttttcgttttccatactcgtaattttactcaagtaagattctaaaaacgaagttaaataaagcttagaggtaggtaagcctttatttataatgatttatggtttgtcttggaaccataaatccaataatggtagtgtgcccgagtggtttagcccctttttgggaaaatcgagaaagggcagttattgcattaaagacgagccgtttccctacttttaaaaaaaaaaaaaaaaaaagagcaaccgtcgcattaactacaaaagtttctgaggcccaagcccaataaatttatcgagttgactaaacccgaagtggggaactcgctttaagccgagctcagttctcgcattctaaagagaaaggtctgatcagcctaaaaatctcgaaagcataaccacaaggccacaaaaggttaaaagcggactttgcaaacccgcataaaattttaaccaaacccccttggggtcataacctagaaaggtttaaaagcctcctcaggcaaatatcttgttcaaaaaagaaataataaagcctccttaggcaaaaacaagttcgaaattaagtcttaaaattaatgggacaattcccaatttaaagtggacacagccactacggagcaacagccccctcggaatccggctcaacagtcgaagcttcattcgcctccttggcaggtgcttggtcagatgagactcctggtccgctctccacagtacaaccatcctccgggatgacctccggtctcgcaggaatttcgggtgggacgatatcttccgtctcacttaagcctgggaaggacggttccagttaattttaaaaaaaaacgtaaggtaagaaaagggtggtaagcgtcaggagccaagcgttacctgcccagtctaaacccgattcacttataggaggtgattcagtaaagaattcctcgaagtcaagcgggttgaaggtcgaagtgggaagagctgccaagcgactccgtttttcagaaagattagttgacagttcggtcctttcttgcttctcggagaaatctgtttcatggatttgatccaacagaatcaggttgctctcatgctccttgatgtctgattccaagtctgacctagccttctcggtctgcatgaagcggatggccccttggatcaactccatcccgcgtcccttaacctcctttctggccttcgatgccgaccttgccaactcggaatcacgcaacttggctagcgccttgtacttcgcgtcaagctcgataagttggttgttcagggtatcggcggttgattcggattcatgaagtctaccctgaacaccagaaagttcatcctggagtttgtaattccgatcgtactggtcttgcagctccccctttatctgcgcaagctcggatgttaaactgtcgaccttgtcctccagatcgtgcttggagccggcagaagaactgagttcagcctcaagggcagagagtttcttcttccacatgtcaatctccttctcccgtccaatgaccaacccttcgtaatgttcgatcatgtcgttaagttcgctatgaacctggcattatacataaacccgggatggcgagtcagttcgcagaatggcaatgcaatataaaaaaacggaactaacccgagatgagtgatgcgcgtgaagcaaatagcgttcacgaatcgcagggcgccacttgtcgaagtctggcaagatcgaacccgatcgggtcttgaagcatcggaagacgctgccttctttctccatagctgcgaagaaggaagaattgtaaaaattggaatcttaatagaaacaaaaacgttagagtatgtgtaaatcaccaaacctgagagcgatttgacttgagggacaagaacggtttttaacctcgaggaagcatctcgagattcagaatctccctttttaggagatgcactccgagcagtcttttcgctgtcgggctgagaagaagaagacatgtcaacaggccggggaggacccattggtttagtgggaggggatgatcgaggtgaacgatcagtccgggcccttgatttctcccttcgcggagacgagtcaccacgggacgacttgtctctcttcctacgaaccaaattcttaagtggttcgttgctgaaatcatctcggggaggccgaggagaatcgcgacgaggagaccgctctctccggggagaacgttcgtcatgacgttcacgacgaggtgttagcctataagcagcaacggatctggctccctcggagctgttatcatcaaccagtagggtcctgctgtaatctttcttatcaatagcggccgcgaggaacgccttgttttcaacacaagcctctgctatcggcttggaaagtttcttacgctgggcagtaagggcccgagctgacatgccctgagttgagggaggaggcggaagacgatgaagtagattgggaggactcatcctgagttttcggttggcctcgataaaccgatcgagggtgaaagaattccaaagggtttccccttcgaggattgttctgaagaacttgacaaattcttcagtcgggagagttgaagcgataagagctgcgaagtgaaacaactaatttggtcagtaaaaaataataaaataaacaggaaaggaatatacgacctagtctctaccaggcttcgtagaccacttcgatgggagtacatcggaaagattcccaatcgaagcgggagttttcttaatcaggaaccaaggatggtgccagttttcatccttgttcgggaggtgcgaaatgacgttcctgttggcatttggatacgccgagaagtacccagttttctttgatgaactccttacgcttaggagttcattcagctcggggactccaatgacgtagccagcttccgccgcaacggttataatcccgaggatggttcggaggagattgggggttaattgaggtaaagcaatctcgagtgccgccaagaatcgaattagggcttcgggaagggggaaggtcaatccgcagcccttgaagtaaatttcgtaaacacaaaagtagccgtcacggtggttctccggggattccgtaggatcggctatttgcgcctccgctataatttcaggaggaatttgacaaagcccctttaatcgttcaagggattgaagagtacaggtggatttgtaatgaggaccggcgatatcgttaggacgagtgcattcgtcgttactagaacgcctctcatcataagacggagattcaggtctctcagaatcggaagtcatcggagaaaaatgaaaaattgaagatccggcgaagggaggttcggtgaagaaaagtagagagaagttttgattaaagcacaaaagtaaaagaagaaagtaatggtgaaaagaagttacctcacacaagctaatgatgaaaccgcctcggaagttgtgtgggaagtgggaaggttttttcccgttttaatagtaattaattaatatacggtcataatgatgacagatgtcactcgggtaaaaatggctagtgccgaaattaaaggagtaatgagattttcggcgggaaatcagaaagattctcgagcgcaatctttggtcatttaaagcatttaaagtcctccgaattggaatggcacttcgaagaacttggggggctaattgttggtgtcggatcccgcaccagaagtccgggaccaaccaaagattgccacgtagacaagatgaagacccataaaggatgaagcccgtcggatccgtgagccaaaggaacggtcggagtggttgtcaacataaagagggtccgaagtgactgcatctcgacacgagtccggagacgaggtcatggttaagtcggtccaagtacatttgggccgaaaggcgaggcccataaagaccagagtcaactcaaattcaaacgtggagcattaaaatcaaggaatcaaaacggacacatttaagaaggaataattgtacttaattactcatttttaatgtcgtttctctatgtataaatatggaggctaatggccatgtaaagggatctccctctagagcaagaaatacgatagcaatttctgtagcaattcataagccttttacgttcttattttttgtccctcaagaataatctttcctactaataaaaatacttgaatgtgtgaatccgacatccacaaccatagtggttaacgtttaacaataataacagtttatatcgatacccgaagaacgttaca

SEQ ID NO: 5526 - DNA, 449 bp, Arabidopsis lyrata
  Intron number 1 from transcript 944335 (locus 944335) deri ved from phytozome v7.0 (chr-ID scaffold_7; pos 2300478 to 2300926)
gcacaaaactctcactgctcaacaagatcttgcaggtttctttctttcttctatcatttagttttcttcttctttgttcacatacagattaacaaaatttcagaatttttgtgtgatttgattgatttttagtgatttttcttcactttggtgaatgagtaattgaaaattctctgccttttaatcatttgttggcttaaatcggactcaaaggccaattcttttcgtggatttttgtgctaagagtaatggttcttggggaattctagaatcgctcctttgaattcttcaattgagcttgagaatttcccaccaaaaaaggtgtttttgcttgatgatgtgttcttgagataaagttttagttttttttttttttatgtagtttaactttcaacaactctgcttcatttttatgtgtttggtaacaggagggagattgggaggtctat

SEQ ID NO: 5527 - DNA, 8809 bp, Arabidopsis lyrata
  Intron number 16 from transcript 497092 (locus 497092) der ived from phytozome v7.0 (chr-ID scaffold_9; pos 1145285 t o 1154093 reverse strand)
gtgtcacttatgcttctacttctgcatgtaactacatttgctcaactcttgaggaaccttgccttaattttactgcttggatcatagattctggtgcgactacgcatgtttgttgcaacttgagtctgtttgctgacattaatagcatctcagaaactactgttaaattacctaacagtactaagattgccataactcaatctggtactgtaaagttgtcagataagcttcttctcaaaaatgttcttttcattccttcttttcacttaaatctcatcagtgtaagctctcttcttcaagattgtgcatattctgttaattttttcccttctttttgcacaattcaggagtttactcagggcttgatgattggtaaaggtcgtttacagaataaactctatttattggattctgagtcacagtcatcacagtcccaagcttcttctctcatttgcactatcaataattctgactccagttctctatggcattcaagactgggtcatccctctttttcaaagattcaagctctttctgaagatctttttatttccaaaacaaagcttaaagattggtctcactgtaagacttgtcatctagcaaaacagaggcgtctttcttttccttctcttaataatgtttcaaagaacccttttgatcttattcatttggatgtttggggtcctttttctgttgtctctacagagggttttagatacattctaactcttgtagatgattgtagccgtgttacatgggtttatcttttaaaatcaaagagtgatgtcttgactgttttccctagctttcttaatcttgttgaaactcagtattcacaaaaggtcaaggccattcgttcagataatgctccagagctttcttttacttctcttttagcttccaaaggaattttccattatttttcatgtgttgatacaccacaacaaaattctgttgttgaaagaaaacatcaacacattctcaatgtggctcgagcacttctttttcaatcaaatgtgcctttagagtattggagtgactgcattaaaacttctgtatatcttataaacagaactccatctcctttgctaaacaataaaactccttttgaaattttgctcaaaaagaaaccactttattccaatcttaaagcttttggatgtctttgttatgtgtctacttatcctaaggatagacacaagtttacaccaaggtctgaagcttcagttttccttggttatccctcgggttataaaggatacaaagtcttaaaccttgaaacacattctatttccatttctcgcaatgttattttccatgaagatatctttccttttcaatctctggagctttcatcaaacactcttgatcttttctcttccactattcttcctcttcctataccagatacttctcctatacactcacccattccttttccctctaaagtcttatctgataacagtaattcatcaatagattctgaggttgctatttctgttaatggaaacagacctaagaggaacactcgtgctccatcgtatctgaatgattaccactgtaacttggtcaatcacatctcaaatgacagtggtaatacctctcatcctctgcaatctgtgttggattattcaagactgaatgatcattatcaacagttcatattgaatatttcttctgaatcttagcccaagaattttcaagaggctgttaaatcagaaaaatggcatgctcctatgaatgaggaacttcagacctgtgttaatactggcactttctcagttgtttctctaccagaaggaaaacaaccgattggttgtagatgggtttatcgaataaaacacaatgcagatggaacagttgatcgttatagagctcgcttagtagctaaaggctacactcaacaagaaggtgttgattacatagacactttctcaccagtcgcaaaacttgtcacagtgaaattgctattggatttggctgctaagcatggttggtctcttacacaaatggatgtaaccaatgcattttttacatggtgatctagaggaagagatctacatggacttgcctcctggttatacaccacctcaaggagaaactttgccacctaatgttgtatggaagctacataagtccttatatggtttgaagcaagcatcaaggcaatggtacaagaaattttcagatgttttgctgagagatggttttctatagtcagaatcagaacacactttgtttgttaaataaaatgatggtattttcattgccctactggtctatgttgatgacattgtcattgccagtaacaatgatgatgatgtttgccaattgaaagccactcttgctgcagcttttaaattgaaggatcttggtcaggtgaaatactttcttggacttgagatagccagaaataaagaaggaatctccctttgtcagcgtaaatacactttggatttgttggaaagtgtaggttttcttggctgtaaacctgttgcaacaccaatggactccactgttcacttacatgcagagagtggggatattttaccagatgcaacagtttacagagctttaataggaaaacttctatatcttacaatcaccagagcagacattacttatgtagttcataaactgagtcaattcttagctcagccaagaactcaccatctagaagcagctcatcgtgtgataaggtatttgaaaggagatccgggtcgtggattgttttattctgcacattctgagattcgtttacaagccttttcagacgtagactggggtacatgtcaagatacaagacgatctacgacgggtttctgtgtttttcttggagattcattgatttcttggaaagcaagaagcaatagactgcctcaagaagtagtgcagagtcataatacagagctttggctgatacaacttgtgaattgctgtggttgagtaaactcttgaaggatcttcatgttcacatcagtggtcctgcaactatatactgtgatagtactgccgcaattcacatagcctctaattcagtttttcacgagcgcacaaaacatattgagattgattgccacatagttcgtgataaactgagagctggttttctgaatctcatgcatgttaccaccgataatcagctagctgacttgtttaccaaagctttacctcccaagacattcaagcttctcatgtcaagatatgcattttcaagtctctttcttctcgcatgaagaattcagacaaaatgagactattcgtgcaaatgatacaatcaaactcaaagaaatattttttttaaatacaagaagctcatcggatatattaaagttaacaaaaattttgaatatttatattgattcatataatatatggatagaaaaaatctaactcacggtaaaggaattacaacttgatatatgttgcaaagatttattatacttcaactagggagttcaatggcaacaaaccgctccccatgatctctctgaaattagcagttatatcatccaccaaagatataagtcccacctactcaaaactaagaggagatgccgcctacatcagttttttgtctattttttctatccctctctatcaaacaaaatagctggcttgttaaaaagcatggaaaggtatccagaaagcacaaggaagttgaatctagcggaggggtctttgcttttgcgtgcgcggagccccaacgaggaaggtgttagtggtttatcattgggtcaacaatgctaatccctcatattcttattgatagggatccccattcattcctagattctcgtcagagacgtcattccttgtggcaaccacttgaatattacttgggtaagagttttcgcgtatgccccaacacttttaaaaaattatgacttgaatttgatcattttattagtgtttaaatgtttatttttgaaaattctttgatatcattttttaaattttgttttttgaaaaataaccactttcatatatcaaacctcgatcgaattacaatatgatcccccaggtattttaaatcatgctttgagcgagaagttattgtgggaagaaactcagatggatccgattaaattgagtgttaataggaaaacactggctcaatcgacgcaatcccttagctgtcggattgatggttcatggaaatctacggatccaacaatgggactacggtggtggtgtttacaagaaaatgatcaaacaatacttcttggtgaaaagtgttttcggaggtatccctccccctgcattcagagatggaagcttcaatttgggctacgaaatatatcctttcaagaaggaaagactgtcaggcatttgaaacagatggtatagagttagtctcgatggcgcagtctcatgaagaatggctagctttctccaatcaactcgatgagtttggattgctctgtgatttctttctcctttttcgatctcctatatttctcgtttatgtaattctaaggcggattgtctaacttgatactctagagtattactatctgaagtcacgtttgtaaactcgtttcctccagattgggtaacaaatcatggagtttagcttttaattaatatgtggttattaaatttaaaaaaaaaaaaaaagaaaaaaaaaaacctctcttataaaggaaaaaatggtcaactaatctctcttgtaatccttaagactggttatttaaggaaatataagttccattctacatcttttatcatagcataaatagttaaaaaccgaattcatgactgccgttttctcttttcacaaaaagcttcttcttccactccttgattccaagccataactacttcttttccttctaccgacaacattactacgttttgactcttgttcacgtcattatgacgactgttacaaaattattgcctctaattttcatgtatgggagagaaccaattaaactttaagctctcggaagaagagaaacgagaattgaaacatcaaagatgggaatagttattggattgcacagactgaaaaactacaaacaaaagtacgactttattaataacaaactccagtgtattttgtctgtccaacatttcttggctctttggttatgcaaaatcaaagagaaggatctattactaataaaaggaattcattgaggcctctcaatgtgtccacatcagctattctctaaacactctatctaatggacacgtcagcagctaccaaaaaaaaaattaaacagaaactgcagcccaacagaagcacaaaacaacatttcatattaaaaaagataagagaagcccaacctaataaagcccatacgctcaacacttgacatgaagacttaatactgtaatttctaaattacctgatattatattaacccatctaaaacctaaattcagtaacaaaaaaaaaagaaagaagagagacccttcatcttcaccatcctctaaatctgtatcgcttcagcttcctaacaaaacgaaaaaaaccattgttatcgattctccacttcctatcttcactctcccatacattcacacaaaatgaaataaatggccactactaccttcattaacatcgattcaagtttcactataaaaccacagatcacccatcacacaaagaaacaaaaaaaaactcctaacagtcactacgaccaaaacatggcaccaaataaagctcaacagtctccccagccattcacctttcagatttttgatgatattgatggaggtttatgtgagaaactgagaaagaagtcttactccgactaattcattattgggaagccgtgaatttgaagaaaggcgacatattgatgggtcttcaaggaaatctacaatgaccttccaaaacaaaatggtaaactacttaccctaacttccaaacaaagtatatgcaattcctttcttttcaaaatggtttaggtagtaattcaatggaattatactgcgctgctatagcatcaaatcatcccatggtacgtaattccaaatagataaattggggtgaaggagaaagtagttccggcgatgcggtgtttcgatagagccaagatatatgttagatccagagatggagggaatggtgtggtggcgtttaggagagaaaagtttgttcgttttggaggaccttcaggtggagatggaggaagaggtgggaatgggtatgtagaggttgatgggtctatgaattcgttattgccgtttcgtaagactgtgcatttcatggcgggacgtgtggaaaatgggagagggaagatgcagagtggagctaaaggagatattgttgtcatgaaagtggctcctgggtcggtggtgagataggctagagaggttgggagtgaggtggagggtgaggaaggggaggagaaggaggtgcttttggagttgctgcatccgggacatagggcattgttgtttcctggagggagggatggacgcgggaatgcttcgtttaagtttaagtcggggatgaataaagttcctaggattgctgaaaatggtgaagaaggtcctgaaatgtaaagtgtgtattttgcttcattttgagttggttttagtttagtgagttggttacaagctttggtttgggaccaacgtgtaaagtttgagacttaaagtattagagtttctgaaatggattctgtttcaggaccatcatggactttaaatttttagcatatataatatacttaacatggagcaaaaaatagtttaattaaagaataatcaccatctacacaaaatgtaacaaatatgctaccaaacctctaatgccaaataatgttttaagctgtatacattgcctgagaaaataaaaaaagttaaccaccaaattaagttactaatactacccatcatcccaaataatcaaccaattaaactgaacactacaaattctatatgtatatatttttagaagaaaaaaaccttagatgcacatgagtaaaaataaattaaaaagtgtcagaaattccaaagtttatttacagttattaaaagctatttctattacactcctttttattttgttaatattaattagcgtaaactatttcaagttcatatttatttttccatataggttgtatgttaaaacgtatagaagtttcccaaaaaaaaaagaaaacataaaaagattttttttaaattattaaaatttacaaatataccgggcgtagcccggattttcttctagtggaacataaagataaggagatcaatgcaagcaagcgatgtcctcccggagaataagagcaagattaaaacaaaatgtaatgaattgtgcagaagatacaaccaaactcatatacaatgaaatttattgaattaatacaagaagctcaagagataatattgtttcatccaaaaaattaatataatataaatcaaaaaacaggaaaagaaaattattgtcatagatcactaagagcatctctgttggtttgctcatagaaaatgaagagaaaaataagagactcaccggccattaagaaaatagaaactaataaaaagagagaagagagagtgacaagagactctcaaatgcgctatctattaaaaaaaaaacaatttaataagaaaattagtttttatggcttatttgagaggtcataagctggaatacaattgcataaaaacgtaagttttatagacaaaataaagcacattatgaacgccattttagaggtaatggcggagatgcatcccttttaaaatatattgcatccatttttgcactatattcatatcgtagaccacatttaggatgctttaaaactggacagtacacctcaacctcagtaaaaaaacttcatgttaattccttgcctgaaaagacatttcatatgcgatcgctcagttccatcatcaccgaatttaatggatcctgtaccgttgaagtttaaatgtttgactcttaagtttattttcccgatgtggcaattatattggagaattctactagaaccgagttggttcttaattacgatctcatttccctggcaagcttcattaaccacaaaataaatggcactaaataacatgaaaaatattactagatgactcaaattaagcaaagatgcaattaaaaatcagcttcacaaaacaagcaaatatcaaaattttgaagaaccaagtgatcacatgatgaattattttggtttaaattaagcaaagatgcaattgaagtttttgtcggaaacatggagactaacaaaaaaataaaataatataaacagttgtaaatcaataggtaaaagagattaggaaaaaaaaaaactatctatgcaatgaaattcctagaaattaagccgttatttttcaatagaaattcaagcaagcattaaagtcgagtttgatttgttcatgtcttaaattccaatttcgttggttaaggacatttagctcacctatggtctttctagtaatacaacaacacttttgatgtaccgaagaattaaacctaagataaaatattggtgatcaatatagactaaacaataggaataaccatagatgaataacaaaaataatcaatccaaatgtaacaacctaacaatcattcaattatgaaatctcccttttgaaatccatgaacccaattggaaaagtactcaaccatagaaatagaagaaaaccaaaataatggagaagaagacatgacaaatttaaaacagaatatcaaagggttgaaagaagtctctagaaagaaagaatttcaaaagtaacaccctcgtccagagcaacaatagttagggctgggccaaatccatatattagggtccggatcccttttttttttttaattaaa

SEQ ID NO: 5528 - DNA, 11546 bp, Arabidopsis lyrata
  Intron number 3 from transcript 915002 (locus 915002) deri ved from phytozome v7.0 (chr-ID scaffold_1; pos 32909972 t o 32921517)
acagcaaacttgagaagctgtgggacggaatcaaagtaagtcatttaaattttagttttgtatgtagaatatcctctcttgtacattaaattaacttgaaaaattatattttacttgccacttcgtttctagcatgaaaatatatatatattttaaaattttatgtgttccaattgctaagtgtaatgtgttccaattttatgtgttaaatttttatgtataattgtgtatattttgtctccatctttctttacagctgcttaagaatctcaagcgtatggatttgtcatattccagaaacctgaaggagcttcctaatctttcaatggccactagtcttgagaagttaaaacttagtggatgttcaagtctggtggagctcccttcttctattgggaattcaactaatctctccacattcaaacttgatggatttagtctagtggagctcccttcttatgttggtaatttaactaatctccaggaattatcacttagtggatgctcaaggcttgtatcactcccacagcttccagattccttattgcgcctaaatgcaaacaattgtgagtccctagagaaactagactgctccttttgcaatccatatatttggcttcacttcgctaactgcttcaaactaaatcaagaagcaagagatctcctcaccgagacatcaaatgttaaattgtaaagaagtgcctgcgtgcttcacttacagaggttatgggaattccgtaacagtgaagttgaatcaaaagcctcttcctacatcaaccaaatttaaggcttgcatcttatttggtaacaatggcgaaaatgacgttagttatatttattgggacacaacatgtgtgtatacgaagaagaataagggttgcatcttgttggataataagggagaacatgaggaacgagggtcggtgtcttgtcgcatcagacacaaaccgaatggtttcttaaattactatccagttataacggagcatctatacattttcgaagttgaagtagaggaggtgacttccacagagctttttttttatttcgagatcttcaaagaggattccaggactatggagataaaagaatgtgggataatccacatcttggaacatcatgttgatggcgacgaaaagatggcgatgaagatggagacaatgtagatctgagacaaacattgaaactcaagtcaaacagagaagccacaagacaaaattgcaaggacgaatggtaagtttgcattttcacaactcaagaacttactttgttgataaactttgcataacaactgttcaatgaaatgtctaagtgagctttttaagtttaaagtgacaatagctagaactgcaatctccaaaatgatttttgaattcaatcgtgtagggtttagagctggagcttaagaaactcttgaaggtgaagttgaagacgtccatgaagatctatttaagaaacaggtacaaaacttatacattcttttgatttatgtgttttgtttgtcttctcaattcatgacaatacaaatataaattgtttgtgatattttagatgttcagtaaatttcttttggatctgattaatttttgctctaggcacaagtaaagtcgtttcaatatgcatttgtcaagttaattgtgtcttttacggtatggcttgacccacatgttcctctctgtttctcatttgaataatcagtttttcctgattggtattcactactgttatttcatatactgcttgaaaaattctcaaattctttgaacttgtgtttagtgctctagttgctctctgttaattcagatttggataattagttgtcctgtttcagtattacttaactgtattccttaaattggttagatatagttttgctgaatgtataacgattgctagtaccttcgtgaaatggttttgaatctgtttgtgtaatgtcaaagccagaagccgagaacgtagcaaaagttaagatggttaagagtcttttaggtatgttgtgtgccttcagcttctcgtttatgtctcagaatgccttcatgctaatgagatgactttattttgtaggtgaactattacagttggcctcttgaaattctattatcatttatacattttcgacattgaagcagaggaggtgacttgcaccgagcttgtttttacgttcgaggacagaaattccacatacctgaaagcttgggagataaaagaatgtgggatacttttaacttcggagcgtcatattgatgacttatgagagcttgggagaaccacacacccttagcccacgcgcaggctggttttgtcactctgatgtgtttccaagtctcaccagtagagaagtttttcttaaaacctgacgtccgctacatttcgtctgcttctcgattttgcctcttctatcccagcttcaattctggtcaataaatccacacggtgtctcctactacgtcgagtcagaaacacgtcttccatagtcatagtcttagtaaatcccagatcaatgcatcctctgtcgcccaaaacgtcgaaaagaggtcccacggaggacttgtgatcataccaaaaagaagtgttcttaccactttgaatttccatcttgtggaaactttttgctatctctttcagtttgaataacaaaaagaaccttggtaagaagattctttgactgcccaaaacgagttttgccagaggagataagtctgaatccattgtcttttagagagtgttttgtggattcagcttctcgtttatgacgtctatatgactaagaactgttacaattgtttgtcaaacatgtgaaggtgaagttgaagatctaatttacctacttaagaaatacttaatacattcttttgatttatgtgttttgtttgtcttctccattcatgggccatggcaacatataaaatatgtttgtgatattaagatgttggttaaaaattcttttgatttatgtgttttgtttgtgataaacacatataaaaaatgtttttgatatttagatgttcgttaataattcttttggacaaatatgcatttgccaagtgaattgtgtcttttacgatatggcagaagagaaatcacacaactatatgtcaactttaacaaaatggagatttagacaaagctcttctcttattacatgaacatggcacattacactagatatcacatccacacaagctttataagacgaaaaaggactaattttttttaataacgccaaccaaaacttgattcaagcaagaagtccaaaaaaattccattttcctgaataaaaaataataatttagatggaatgtgataaagactgaaatcaataaaaagaaagacaaataccttgcgcattagtagcaggaggactagcaggagacactgcaaccaaaacaaaacaaaacaaaaatctctattaatcagataatcatataactacaaaaggaattaaatcataatccataaaaaatcaagaagaaatctaacatgcaccacaagctgccaccggaggagcataaactttacaagcatcgggaagagtagtagccttagtaacgttaagtttgattccgtaagaggcagtgttcttcaacccttcgcatcagtgccggcccggtaaatttgggtgccctaagcaaaattaaagccataaaaaaaaaattcttttaaattagatttttaccattaaaaaaaatgttgtagttgtctctaaaagccaacaatatttttaaaaggccctacaaaaattattgtatataaggaaaacttaacaagtttttaggtaaaaaggccctcaaattttgaggccctaatcggtggcttcggtggcttgccctctgcgccggcccttcttcgtatagacattccggttccgtatcgaggatattcttgagactggagcagcacgaatttgagggtgtatccatcgtactcccgatcgttataaatgataaacatgggaacaggggaacaacaagggtacacccggaggctggtataatgtttccatgaacataaggagaggaaacagagaggactaggaggagaagagatgttgctgcggagaagaaagccattgttttggttctctgttttggttactgcttaagaatctagagagaagaaaatgagaattgtggtagagaatgagtgaaatgtgctgtgtttaaatatgggtttgagtgataaagacgacgtcgttttggtgtacacgtcatgtgtaacttgtaattttttggttcttttagtgtaagattctgctcatttttatttggattttatcctatattaagagctttttatcattgaaattaaagttgttaccaaaatgattagatttgttagaagaatacagaagaaaaaaaaaaagtagaaaaataaaaatgtaatttctaaaaacgttggtgaaaaaaataaaaaaaaatttcttaaaacgcttttctaagtagaaggatttgtattcatactttgctttgctgtatgtatttcttagattttgttttttttctgctgtaaccttctgtcaaaatctataaatggtataaaacttaacattcataccaaaaaacaaaagtttatatgctaagatatttattttttttatgttaaagttgctaagattttctttttaactgtcttggtttatatgtcttggttctgagtcttttcgagagtgttgtgtggattcagcttctcgtttatgtcgtctgtatgactaagaactgttacaattgtttgtcaaacatgtaataaacttgaaggtgaagttgaagatctaatatacctacttaagaaacaggtacaagacttatacattcctttgatttatgtggtttgtttgtcttctccattcatggcaacacatatacaaaatgtttgtgatatttgccaagtgaattgtgtcttttacgatatggcagaagagaaatcacacaactatatatcaaatttaacaaaatggagattttgacaaagctcttctcatattacatgaccatggcacattacactagagatcacatccacacaagctttataagacgaaaagggactaaatatttgttataacgcagaccaaaacttgattcaagcaagaagtccaaaaaaattccatttccctgaacataaaataataatttagatggcaggattaaacattataataagttatcaagaatgaaatgtgactaagaatgaaatcaataaaaagaaagacaaatacctggcgcattagcagcaggaggactagcaggagacactgcaaccgaaacaaaacaaagtttctattaatcagataatcatataactacagaagaaattaaaccataatctgatttatcgtaaggatcataatccataaaaatcaagaagaaatacagagagatgaaggagaaatctaacatgcaccacaagctgacgccggaggagcattaactttacaagcaacgggaagagtagtagccttagtaacattaagttttattccgtaagaggcactgttcttcaacccttcgcatagacattccggtttcgtatcgagaatattcttgagactggagcagcacgaacttgagggtgtatccaccgtactcccgatcgttataaaagataaacatggtaacagggtaacaacaagggtggtgcactcgtcggctggtacaatgtttccatgaacataaggagaggaaacagagaggacgaggaggagaagagatgtcgcagcggagaagaaagccattgttttgattctctgttttggttactgcttaagaatctagagagaagaaaatgagaattgtgatagaatgagtgaaatgtgttgtgtttaaatatgggtttaagtgatagagacgacgtcgtttttatgtacacgtcatgtgttaacacgtcattttttggttctttctgtgtaagattctgctcatttttatttggattttatcctatataaagagctttttatcatcgaaattaacgttattaccaaaatgtttagattttaaagaagaaaaaaaaaaaaaaacagaaaaataaaaatgtaatttcttaaaacgcttttcttaaagtagaaagatttgtattcaaactttgctttactgtatatactacttagattttgtttttttctgctgtaatcttctgtcaaaatctataaatggtataaaacttaacatttataccaaaaaaacaaaagtttatatgctaagattttctttttaactaacttggtttatatgtttaaagactaattaattaaatatagtaaacaagttttatcattttgcatacaattattcagtgggtcagtttctcattgtatttaagataagagattggttcggtttgcacaaaaaaatggagattggttcaaacttcaaatgttgaaacctgcgtgttgttgttattgaatttaaaaaattaaaaaacttttttttttctttctcaatgtcaaaactatgagttctttcgcataaagaatgaaaacaaaattaatgtaacaaaaatagttaaagaatatcacatattttcgatatctttcaagatttgaataattagtttttccagatttagtattacttaattctagtcctgaaatgtagttttactgaatgtataacgattgcgcttaactttgtgaaacgggtttgaatatgttttaataattaatgcaaagcgagaacatagcaaaaagttagaatggttatgagtcttttagagtatgttgtgtggcttcagcttctcgtttatgttctcgtatgaccgaggtctgaggacatgctattttattttatatgaaatgacttcttttttttgatgaactattacaattggcctcttgaaattcaattagtgtcatgttaaaaaaaaagtaaaatctaaatgggactaaaaaaacaactattgaataaggggtactgggtggcaagggacctaaacattacaacaagtgcaactgtttggagtagtgtttgacataagagtagaaggggtttacaagttatctcctagtagaaagccaaaagaagaataaatcaccatattttgcattcccggaagatgggaatgttcgtgttgatgtttttccaaggcttgatgttgtttgaggttctttaccatgtcttttgttatttctctccctccatatggtatggactgcaatttgaaacgtttatcgcagaagtaaaagagccttctttttggttgtctcatatgttatgagcaaaatgatttgatcccaatccagaagtatctacaggtgtgactatcttgaagtatcccttttactaactcctcccatatttgtcttgtatacgggcattgaaagaagaggtggtgtcttgtctcaaccggttcctgacaaaacgcacaagatgtattcacttgggtcttccacttcaccactcgttcacctgtagataatttgtcatgctttgcaagccatgtaataaaagcgtatttaagcgtagcttcagattgttcgagtttttcaggtcttgatttaagaaatgatcaaaattataacaaaattcagatttaattggatttggtttaagtttggatgaaaatttagttaaataatgattaattatatgtaattcatattatattttaatatatgttaattttatatatgaaaactgaaatattaactgaaatatttcgatgtggaaatttatgtacttttcatagtattataaaatttggtttggtttcaccttagtaaatttttgtgatcgaaccaaataaacatgtattaatatatattcatattcggttcggtataataatttatagatcactagtaacaaaattggtttggtttcacgttgatgaatttttgtaacacaaccaaataaaacttcattaattaacctttttacatcatgactaaaaaaatttcaatttatttataaattctaaactagaatttcagaagaaaatatattaaatttcaatttttcattgtggtttctttcatagaattagagtgtcatatgtcgtaaccaattgctgagttatttattgggttctgcaaaaaaaaaaataactctccacctcaaaaatacagataaatcatacgaagtaagaaaaaaaacataatataaactttatatgtatattgtatatgttttcacaatcacatacaatatatattttttagttataaatgttgagttaaacttctcgtcgcgaaggcttcgatttaacatattaatcatcaaaattttacaaacttgagagtagcggaaaaatgttatattgcgtattatatttaacttcgtaggattaatttgcatttttgtaggtgaagataaatttgcaaaaagtggctagtttgaagatttttattacggagacggtaaggtatgaaagtcagttgttgcaaataaaatgaccaattaaatttctgaaaggaaatatcaagaaatttgagagtataaattagatggagagagagagagatagcaaatttaggaatgtgaaacaaagtcaactgttaatgagggatgtttcctcattaacaaaaccttttgggaataactcttacttagtctaagctatattttaaattttatgagcaattgtgttttgttttgagctgtcatgctctgttttctgtttttgaatctttcctttgatttttaatgtagtttacgaaaaattcgtacagaaccgcttcatatcacatatgtaaacaacatttttcatgaatggcttttttgagctctaattaatttcggatgacaaaaaaaaaaaaaatgtagtttcaaagcccccagcgaaacactatggaaaatctccaaacgttacttcctttgtcaactcttgattttgcgtataagaaaaagtcatgagattaataagccaatcaatcggatattttggaattttttttcctttgtagtaaggtgaaataattggtcggttgcattttcttattcaaactaaatttctcggaggaaatatcaaggaaattctaaagatattgtatgtcaacgttctaggcctatatacattcaagttttaatccttaccccccatttaactctgttaaagatattgtatgtcaacgttctaggcctatatacattcaagctttttcctcttcttattcttctgctccttcgattccttcatcttcttcgtctcaaaactgggagtacgatgtctttcccagcttccacgggaaagatgtacgcaaagcctttctcagccacgttctaaaggagtttggaagaaaagcaatcaacttttttgttgataacgagatcaagagaggagaattcatcggtcctgaactcaaacgtgcgatcaaaggatctaagattgctcttgtcttgctctccaagaattacgcttcttcgtcatggtgtcttgacgaattggcggagataatgaagcaagagtctggtcaaacggtgattaccattttctatgaagtagatccaacggatgtgaagaagcagaagggagactttgggaaggtcttcaaaaaaacttgtaaaggtaaagacaaggagaagattaagacttggaggaaagctttggaggatgtggccacaatcgcaggttaccattcaagcaactggttcgtgttcttgatttagcttttaatatttctaactcatcatactatgtagcatacgaaactgtatgtatacaagagattcataacttttgaacgtgtatgttagttcttagtgattatttattaacaagatgtatgtatgaattgttcttcgtctttgttagggttgatgaagcagccatgattgaaaacatcgctgctgaaatttcgaacaagcttaatcatttgacaccattacgtgattttgactgtttaattgggatggaagctcatatgaaaaggatggaacagtatttacgtctagacttggatgaagtgaggatgattgggatttggggtccgcctgggattgggaagaccacaattgccaggtttctgtttaaccaagtttccagccgtttccagaatagcgcactcattgaggacatcaaaggaagctatccgaaaccttgttttgatgagtacaacgcaaagttgcaactacaatataaaatgttgtctcggatgatcaaccagaaagatatcatgatccctcatttaggagtcgcacaagaacgattgagaaataggaacgtgtttctcgttcttgatgatgtggatcggttagcacaactagaagccttgaccaacaatgttcagtggtttggtcctagaagtcggattatcatcacaacagaagatcgaagtcttttgaacgcacatgggatcaaccatatatacaaggttggttttccatcaaatgatgaggctcttcaaatgttctgcatgtatgcttttggtcaaaagtcccctaaagacggtttttatgaacttgcgcgtgaaattacataccttgtcggtgaacttcctttaggactaagggttattggatcccactttcgtggattgtccaaggagcagtggtcaatggaaatatcaaggttaaggactaaccttgatggagatattgagagcattttgaagttcagttatgatgctttatgtgatgaagataaagatttattccttcatatagcttgctttttcaacaacgaaaatataaacaaattagaagaatttattggccaaagattcaaggatttgagtcaaaggctattgggagaaccggagatcgaccgagatcgacgatcgagatgatcgcccaagattactctcatcaataccatgatatctttacgttttagaggagaaatctctcatatctattgaaagatttcttgaatatgtgagtataaaaatgcacaatttgctggcccaactaggtaaagaaatcgtccgtaaagaatctcgtgagcctgggcaacgccgatttttgtttgataataaagatatttgtgaagtagtctctggttatacaactgtaagtctttccattattctttcattgcagtgctcaccataacttgagtctattttatcatctctacttatctttgggtcttttttctcagaatactggaagtgttgtaggcataaactccaattatgggttaaatataactgagagagcctttgaaggaatgcctaatctccagttcttaagagtcggatacaatactcatcatccaaacattatatcttcttcaggacctctaatttttatatctccgaagctacgattaatagattagtggtttttcccgatgacatctttcccttttattaataatctggaattccttgtcgaattaagtatgcgttatagcaaacttgagaagctgtgggacggaatcaaagtaagtaatttaaattttttaattgttttaaattttagttttgtatgtagaatatcctctcttgtacattaaattaacttgaaaaattatattttacttgctacttcgtttctagcatgaaaatatatacattttttaaattttatgtgttcaattgctaagtgtatcaaagtaattgtctattttgtcattattctcctttacagctgcttcgaaacctcaagtgt

SEQ ID NO: 5529 - DNA, 884 bp, Arabidopsis lyrata
  Intron number 1 from transcript 356803 (locus 356803) deri ved from phytozome v7.0 (chr-ID scaffold_8; pos 4899878 to 4900761)
tattacgggaacaagcaagaggtctcagctgacaagtaagtctttttttttgggttatatttcaaatcagaaaatagatctaatcttaaaaattgtaactacataagatagtagttttattaactacataataacaaataaaaaataaacataaattagcaagaacaatcaataattttttcttcacaattttcaaaacaaatccacgcatagcgtgggtattcatctagtactaataaaagggactatttgagccctctgagagtgtccacgtcagatttttcctaaacactatgtgaagatgccatgccagctctccctttttcctcaaaacaaagcactcaaaatttgaccacgtggcataagacaatgatcaaccccatcctgaacgattgctcttccagtcttctcaagtttttggtaacgcatcttataacctttaagctattcacatatcatctattaaccttcttaagattctttatcgaaacgtcattttctctcatcttctccgctaaagtctccatccagattgagatctacaaatcttaccccatcaggccatcacgcatctctctcaattccgcctgagtttgaattctcggggtcgaggattccgggatcaaataattcgagtggctttctgtagaattcgaaatcatgtccgattagtgtatcatgctggtaatttaatcatctttgactttcttaatgatttgtctttttggtgattctcagagatttaaaatattagaggttgcaatgtgaattcgtatatgagtgtgaaagcagaccaatatgtagtatttttatggctagaagacgaatcttattgacattttagtagagaaattcgtggacgtggtaactcaaagccgtgacgt

SEQ ID NO: 5530 - DNA, 12502 bp, Arabidopsis lyrata
  Intron number 3 from transcript 896231 (locus 896231) deri ved from phytozome v7.0 (chr-ID scaffold_5; pos 1193009 to 1205510)
aacaacctttcgcttctgagttcactgtagataatgttgaattttccaagtccaagtccaattctaattccccaatagtatgatattgtccgctttgggccaagcccgcacggatttgtctttgggttccttcccaaaaggcctcatactagttggagttggacttcacttatatattagacttttttttctaatcttccgatgtgggacgttggtttgacttcaacaatctccccttcaaaccaaggaccacatgtggatcttaacacgcctcctcgatgttggtgtcggatcccgcaccaaaagtacgagaccaaccaaagattgccacgtaatcaggataatggcccgtaaaggatgaagcccattggatccgtgagccgaagggatggtcgaagtggttgtcaccatttcgagaatccgaagtgactgcactgtgacacaagttcggtgtagaagacacgggtaagtcggttcaaggacacttgggccaaaagaggcgaggcccatgaagatcagagtcaactcaaattcaaacgttgagcattaaagccgaagaatcaaaacggacgcatttaagaagaaataattgtacttaattactcattttaaatgtcgtttagctatgtataaatatagaggccagtggccatgtaaaggggatcttcatctcaagagagaaatatatagcaattttcgtatcaatttacaagttcttacgcattcatttttgtccctcaagaattatctttcccacttaacaaaatacttgagtgtgtgaatccgacatccacattttggcgccgcctgtggggacatcaggattcttgagtggtcagatttcttcttttctacatttccgagataagcgacaatgtccggaggagacgccgttgggacatcattggccgaaaccctcaaagctatgcagcaaaccatgtcggacatatcacaaaagttctcggatgtggagaaggccgtctcgtgttcgctccttaagtgcaggaaacccggtgggaacccgaagagggatgttcgctcgccaagttccgctgcacgaaatgaaaccagcggacaaacaactcccggtgctactaataatgtagctcagacgtcggaagaagagacgcagctcggggatgaagaacaacttgcagctcagtacgagcaggagaacctcgaccagttcgagaccatgaagaaggttagccaggaattaaaagaaatgaaatcaaaatttcatcaggctacaagttcggagccagacatcaatcgagtcattgaagaagctaggcgaaccccttttatcccgcgaattgcaagtttgaggatcaaagattcccggaagctcaagttggacccttacagcggattggaggatccaaaaagctatcttgcagcctttctgatcgctgcaggaagagtcgaattggatgaagctgatgaggacgcaggctattgcaagctgttttcggagaatctatgtggccaagctctaatgtggttcacccaattagagccgggttcgatcagcaatttcgacgaactatcagccgtgttcttaaagcaatactctatccttatggataaaagcgttttggatgccgatctttggaacttaacgcaaggatctaatgagtcacttcgagttttcatcaccaaattcaaaggagtgctatcaaaactcccaagaatctcacagcaatcagctttatctgccctacgaaaaggattgcgacatgattcaaggtttaaagaagacttaatacttcataaaccagacacaattcaggatgcactcttccgcgcaaacaattggatggaggtagaagacgaaaaagaaagttttgccaaacggaataaacaagaaaagccggcagtcaccgtccctaccaagaagttcgagcctagagagagcaaaggaccaaggaagttcgggtcgcaacccttcaacaattccgtcgggaagcaattccaagggaaaggaagatcaaacacttgggtccgtgatgaaagtctatattgcgacattcataaagtaaccggacatttaaccaaggattgcagcgttcttaaaaagcacctcgcagagctttgggctagtggcgatctttctaaattcgatataaaagattttgtgaaggaataccacgaagcaaaggaaaactccaaagatcaagattccaaaagaccaaggttatccaacgaggaagaaccaaggagttcgaaggggaagatcaatgtgattctaggaggttccagattttgcggagattcaataagttccatcaaaaaacatagacgaaatgtcttactcaaagcaagcttgagtgaagaaattgattttcaaggtgcttcaatatcatttaacgaagaagaaacgcggcatctcgaaagaccgcatgacgatgctctagtcattactcttgatgtcgcaaacttcgaagtatcaaggatccttatagatacaggcagttcggtcgacttgatctttttaagtactctagaaaaaatgggaatcagccgaggagacatagtaggacctccgtctccattagttgcattcacaagcgaatcagccatgtctctcgggacaatcaagctaccggtccttgccaaaaaagtatcgaaaattgtggacttcgtcgtcttcgataagcccgcagcttacaacatcatccttgggactccctggatttatcgaatgaaagcagttccctctacataccatcaatgtatcaaatttccaacatcaaatggggtggaaacaattcggggagaccaagaagcttcacggacttgttacttagctagccaccgtatgaagattcaatagcaactaacgaagcccgcaaaagaaggactaaaaacaaaatttcctagtgggcaaaagaaagaggatgtagtagtcgaagtggtactggaagaagacaagccagaccggaaaattagaattggagcaactttgactgaccaaataaaagaagctttgatcgaactcttaaggaaaaacaaagcatcgtttgcatggtcagcagcggacatgccgggcataaatccgagtataatttgtcatgaactaaacgtagatccaagcttcaaaccggtgaaacaaaaaagaagaaagcttggagtggagcgggcaaaaatagtaaacgacgaagtggataaactcttgaagatagggtccataagagaagtgcaatatccggagtgggtagcaaacactgtcgttgtcaagaaaaagaacgggaaagatagggtttgcatcgattttacagacctgaataaagcatgtcctaaagatagtttcccgctcccgcatatagatcaacttgtagagtccaccgctggaaatgagctgttaacattcatggacgccttctcgggttataatcagataatgatgaaccccgaagatcaagaaaagacgtcatttatcacagatagaggtatctactgttacaaggtaatgccttttggtttaaaaaatgctggagcaacttaccagcggttggtgaacaaaatgtttcacaatcacctcggaaagactatggaagtctacatagatgatatgttggttaaatcgttgaagaaagaggatcatgttaaacatttggaggaatgttttgatattctcaataaatatcaaatgaagctgaacccggcgaagtgcacatttggagtcccatccggagaatttcttggctatatcgtgacagaaagagggattgaagccaatccaaatcaaattaacgcctttctgaacatgccatctccaagaaacttcaaagaagtacaacggttgactgggcggattgcggctttaaaccgttttatctcgaggtcaacagataagtcgttgcctttctaccaaattctaaaagggaacaaaggattcctttgggatgagaagtgtgaagaagcttttgggtagcttaaggcatacttaaccactccacctgtactgaccaaaccggaagtagatgaaaaactttacttgtacgtatcagtttcaaaccacgcggttagtggagtcttggttcgggaagactgtggggagcagaaaccaatttactacgtgagcaagtcaatgactgatccggaaaccagatacacaatgatggaaaaactcgcactcgcggtggtaacttcggctcggaagctgcgtccgtattttcaatcccatccggttgaagtattaactaaccaaccactccgaacaatacttcatagtccaagtcagtccggacgtttggcgaaatgggcggtggaattaagcgagtacgacatagagttcaaaagccggatcagtatgaaggctcaggtcttagcagacttcctgaccgaactaccaatacctggaacgatagagcaaccggagaaccaaacttggaaattacacgtagacgggtcttcaacaaaacaaggatccggagtgggaatcaagttagaatctccaacatcggaaattctagaacagtcattccgattgttattcaaagcctccaacaacgaggcagaatacgaagcccttattgccggacttcgactagcacaaggagttggagctaagggaatattggcttattgcgattcgcaattagtagttaaccaatttaatggagactatgaggctaaagattcaagaatggaagcatacctcgaagtggtgaaggatctatctaaaaatttctcgaaatttgaattaatccgtatacctcggggagagaatacaattgcagatgcacttgccacattggcgtcaacatcagatcctgagttaaagagagttattccagtagaatgcatcttggagcgaagcattcaagacagcaaggaaaccctcgtcgttacaaggtctcgagcagcggcacgcgaccgtggcgaaccagagatcgaaccgccacccaacaaacgaagaaagtcaaagggatcaaatacatctaacaaggaacccgttgtcctagctgaagaaatgattccagaaacgatgttagaaaccgagccattactcgaggagaatattcttgaaccaaacgaacatcccgaaccagagccacggatatttcacaaagttgaccaaattccggctaaagactggggggctgactggagggagccaataaagcactacatcacgacaggcgagctcccaaagaataaatggcaggccaggaaaatgaaagtcgttagcgcgaaattttgcctatcaaaagatgcgttatataggcgaggtgttagtgacccttacctattatgcatttttgggcccgaagtcgaaatcgtcatgagcgaagtgcatgagggattatgtggaagtcattcatcaggaagaactatggcttttaaagttaaaagaatggggtacttttggcccactatgatcacagattgtgttaagttcgcccaaagatgcaagcgctgccaactccatgcgccattaatccatcaaccgtcggagttattctcctccatttccgccccatacccgtttatgaggtggtcaatggacatcattggaccattgcacaaatcaactcgaggtgtacagtaccttttagtccttacggactacttttcgaaatggattgaagctgaggcgtatgttggtatcaaggattcggcggtgaagacctttatttggaaaaacattatatgtcgacatggagttccgtacgaaatagtcactgataatggaccgcaattcatttcacacgagtttgatgccttttgtgcggactggggaattaaagttagttattctactccaagatatccgcaaggaaacggtcaagccgaagccgcgaacaagacgatattaagcaatctcaagaaacgcttaagtcatctaaagggaggatggtatgaagaactccaacccgtcctgtgggcttatcgtacaacccctaggcgacctacaggagaaactccattctctttggtttatggcatggaagcggtagtaccagctgaactcaatgtgcccggacttcgtcgaacagaagcaccgttaaatgaggaagaaaattcagcaatgcttaacgattcactggataccataaatgaaaggcgtgatcaagctctaattcggatccagaattaccaacaggcagcagcccggtattacaattctaaagttaaaagtaggccgttcttcgtgggagattacgtattaagacgcgtctttgacaataaaaaagaagaaggtgctggaaaacttggtattaattgggagggaccctatattattaccgaggtggttcgaaacggcgtttataggttaaaagacctagaggacaatccagtcaagcgaccttggaatgtgatcaacttaaagaagttttatgtttaaaagctacatgcattgtttatgtacatgaactacgatttggcttgatcccgaaatgggtacgtaggcagctcgaaaacgagttcagctattaataaattttttgttttatttctttattaaaggaagaaggttcggctatgcgaacatacaagagattggaaataaagcgtttattcaaaaaaaaaaaggcgaagtgtccctcatcgtacacttcgaactacgaaatcctcgttgacgagcagaacacttcaattccttgaccagcaagatcgaggattgacatcatgcagtccggaattcgagcaaagtcagagattccaagctcaatccattctccggggtgagattcaaggatgtgaagatttcttgacaccgtagtaagcctgcgttgcatccggttaatcctcttccggagcctcctcttttccgacgtaagcttccggtgttgaagttcaagtgcctctatgaacgccgtcgctgttccttggtctctgattgggagatccctgatcaaagcacatggggctcggatctgagatctcgagaagccgcgaagtggggaaggctgcctgtttggctcatttgaaacgtcttcattcatcattccgattctggagaagtcgggcatagattctgaacagcgaagattgaactccatacctgctaaaatgaaaagaatggtgaggagtaaagggaaattgagacaacaatttatagaaaaagtcatatcctcagcaagctgcggattctatccaaggaatagagtgattcgcggagagattcatgccctcaaacagatcctgcattaaaaggcgcgtctccgagaatattgtaaaagaaggaaagttgcaaatatttccataaataaaaagggccgaagcccattacgagttttttaaaaaaagagagaagtgaggaagttaaagaacatttatgggagaggctcaggaacaggctccttcatcgccggtttagattccaaagtggacgccttgttcgtggcatccacttcggaacgatcccgaacgcgtttccggcagttgccggcctcctcctccaagtcctcttcctcttcactgtcggacggaacggcgcaggcaggggcgttcacgggacccgggactcctctatcgcggagatacatccgaagcatcttcgggatctcagcaacggagtcgaagttccgccactcccattgaaagggatcgctctccagggcccgtatcttcctttccacccgggcgatgcgagcctcgagcgtctgccttttgagtcccagccgctgcctctcttcacataagcgacggtgcttgtcggcaacctagcataaaaatgagtgaataaggcaaaacaaaaagtttttaagtcaaaaaactctaaatatttaccttgtcgatgaactcgcaagcctctttcttctcctttgaagggaagtgaaagacggcgtgaggaaagagaacgccagccggttcaaatccgtcgccggacaagaaaagtgggctgccgggagcgatgggggctatttcttcgttttccattcttaaaatatttctcaagtgagattctatagtcatgtttaataaagcctagaggtaagtaagcctttatttataatgatttagggtttgtcttggaaccataaatccattaatggtagcgtttccgagtgggttaaaccatttttggaaaatcgagaaaaggcaattattacattaaaagacgagccgttctctttaagaagggaaaaagcaaccgtcgcattaactgcaaaagtttctaaggcccaagcccgacaagtttaccgagttgactaaacccgaagtggggaactcgctttaagccgagctcagttctcgcattctaaagagaaaggtctgatcagcctaaaaatctcgaaagcattgccacaaggccacaaaaggttaaaagcggactttgcaaacccgcatataattttaaccaaacccccttgggccacaacctagaaaggtttaaaagcctcctcaggcaaatatcttgttcaaaagaaacaataaagcctccttaggccaaaataaatcaagtcttaaaaataaagggacaatccccaatttaaagtggacacagccactacggagcagcagccacctcggaatccggctcaacagtcgaagcttcattcgcgtccttggcagctgcttgatcagatgaagctccttgaccaccctccgcggtacaaccaacctccggagtgacctccgataccataggagctacgggcgggacaacgtcctccgcctcacttgagcctaggaataataattccagtcaatcaaaggtacaaggtaagaaaaaggtaagccacggagccaagcgttacctacccagtttaaacccgattcactgataagaggtgattcagtaaagaatgcctcgaagtcaagcgggttgaagaccgaagtgggaagagctgctaagcgactccgtttttcagaaaggttagtcgacagctcggtcctttcttgctcctcggagaaatctgcttcatggatttggtccagcagaatcaagttgctttcgtgctccttgatgtctgactccaagtccgacctagctttctcggtttgcatgaagcaaatggccccttggatcaattccatcccgcgtcccttaacctcctttctggccttcgatgccgaccttgccaactcagaatcacgcaacttggctagcgccttgtacttcgcgtcaagctcgataagttggttattcagggtgtcggcggttgattcggattcgtgaagtctaccctgaacaccagacagttcgtcctggagtttgtaattccggtcatagtagtcttgcagttccccctttacctgcgccaactccgacgtcaacctatcgaccttatcctccagatcgtgcttagagccatcagaagagttgaggtcagcctcaagagctgagaatttcttcttccacatgtcaatctccttctcccgtccgatgaccaacccttcgtaatgttcgatcatgtcgttaaattcgctctgagcctggcattatacatgaaccagggatggtgagtcagttcgcagaatggcaatgcaaaaaaaaaaagaaaaaaaaaaacggaactaacccgagatgagtggtgagcgtgaagcaaatagcgttcacgaattgcagggcgccatttgttgaaatctggcaagatcgaacccgaacgggtcttgaagcatcggaagacgctgccttctgtctccatagctgcgaggaaggaagaattgtaaaaattggaatttcaataaagacaaaaagttgaagtatgtaaatgaccaaacctgaaagtgatttgacttgagggacaagagcaagttttaacctcgaggaagcatctcgagattcagagtctccctttttcggagacgcactccgggcagtctttccactatcaggctgggaggaggaagacatatcaaccggacgtggaggacccattggttcaggaggaggagatgatcgaggtgagcggtcagttcggaccctcgacttttccctctgcggagaagaatcgctgcgagaggacttgtctctcttccggcgaaccaagttcttaattggctcgttactaaaatcatctcggggaggacaaggtgaatcacggcgaggagattgaaccctccgaggagaacgtgagtcgcgacgatcgcgacgaggagttaatctgaaggaagcgacagatcgagctccctcggtgctgccatcatcaaccagcaaggttctactgtagtccttcttgtctatagaagtcgcgaggaactttttcttctcctcgcaagcctcagccatcggcttggaaagcaacttacgcttggccgcaagggcccgagatgacattccttgagttgaaggagggggaggaatttggtgaagatgaccaggcggactcatcctgagtctgtggttagcttccaggaatcgttcaagagtgaaggaattccaaagggtttccccttcaagaattattttgaagaattcgatgaactcttcagatgggaggttggaagcgatgaaagctgcgaaatgaaacaacggtgttagtcaataaagataaagaaacaaccgggaaagatacgggcaacctaatcactaccgggtttcgcagaccacttcgaagggagaaaatcagcgagatttccaatcgaagcgggggttttcttaattagaaaccaaggatgatgccaattttcatccttgttcggaagatgcgaaatgatgttcctgttggcattaggatatgctgagaaatatcccgttttcttcgatgaacttctcacgctcagaagctcatttagttcagcaactccgataacataaccggcctccgccgcgattgttataattccaagaatagtacggagaagattggaggttaattgaggaagagcgatttcaagagccgctaggtataaaattagggcttcgggaagaggaaaggtcagcccgcaacccttgaaataaatctcatacacacagaagtaaccatcgcgatggttctctggagattctgtgggggaagctatttgagcttccgccataatttccggcggaatccggcaaagctctctcaatcgctcgagggattgaagagtacaagtggacctataatgcggaccggcaatgtcaccagggcgggtgcactcgtcgttactagaacgcctctcgtcaaaagacggagactcgggtctatcggaatcagaagtcattggtaagaaagaaaaattcaagatccggcgaagaagggttttggtgaaggaacaaagagagaggttttgattaaagtacaaaagtaaaagaagagagtaatggtgaaaagaagttacctcaagctaatgatgaaaccgcctcggaagtcgtgtgggaagtgggaaggtttttcccgttttaatagtaattaatcaatatacggtcataatgatgacagatgtcactcggttaaaaatggctagtgccgaaattaaaggagtgatgagattttcggcgggaaatcagaaagattctcgagcgcaatctttggccacttgagcatttaaagtcctccgaattggaatagcacttcgaagaacttggggggctaattgttggtgtcggatcccgcaccagaagtacgagaccaaccaaagattgccacgtaatcaggataatggcccgtaaaggatgaagcccattggatccgtgagccgaagggatggtcgaagtggttgtcaccatttcgagaatccgaagtgactgcactgtgacacgagttcggtgtagaagacacgggtaagtcggttcaaggacacttgggccaaaagaggcgaggcccatgaagatcagagtcaactcaaattcaaacgttgagcattaaagccgaagaatcaaaacggacgcatttaagaagaaataattgtacttaattactcattttaaatgtcgtttagctatgtataaatatagaggccagtggccatgtaaaggggatcttcatctcaagagagaaatatatagcaattttcgtatcaatttacaagttcttacgcattcatttttgtccctcaagaattatctttcccacttaacaaaatacttgagtgtgtgaatccgacatccacactcgagatgataactccatctcgaaccgatcccagttagaccgataataaaccccttcttgggcccccattactcgggttaaggagaggtatatccgtatccacttttctaggtccaccagaatttgaaccttgggctctgataccatgttgaattttccaagtccaagaccaattctaattccccaatagtatgatattgtccgctttgggccaagcccgcacggatttgtctgtgggctccttcccaaaaggcctcatactagttggagttggacttcacttatatattatacttttcttcttctaatcttccgatgtgggacgttggtttgactccaatagataatgtcaaagccgtgatcttggtaagtataacatcacttcttatctatgtttttaatagttgcttgcaccacaagaaaatgtttgcttgtgttacaatcttctttatgttttttgcgttccaaaaggatatcgtagtggcgggtacggatacagcagctgc

SEQ ID NO: 5531 - DNA, 2081 bp, Manihot esculenta
  Intron number 1 from transcript cassava4.1_032791m (locus cassava4.1_032791m.g) derived from phytozome v7.0 (chr-ID scaffold08597; pos 257159 to 259239 reverse strand)
tcgtcatttctccaacaaacgagttcttggcatcggtgattttggtgatgtctatgaaggaaacctcccaagtggtgagctcattgctattaagaaacttaaatatatgcaggatggtgagcaggaagaagaaatcgagaatcagattaaggaggtcggctctgtgtctcacccaaatcttgttaagctggttggctactgctgcgaggaagccgatagactgcttgtattagagtttgttcccaacaaatctttgaaatttcatctgagtggtgagtcctaagatacattttggattgttattatatgattgccatcttacaaataataaacgatatcatagatgaaaagaaaagatcaaagttgaagtggtcaataagaatggaaattgctttaggctctgcgagaggtttagcatatctgcatgaacaatgtgagtaatcttatattaatcaaggcttactatgctctttttgcaattaagttttcatctattttcattttttaacttctcattatttttccgtttatgtttatttaggtaatcctaaaattatccatcgagacattaaatccgataatatttttctagacagtgactttaaatctaaggtatgataatttttttttatttataaaaaaaatagaataatttaatggtaacaaataaaacttttcatgcataggcattcatgcattctacatatgatgttgcatatcttccctgcattctttctcgatttttctttctgtttttaaaattatttattttgaaacagctgtttattttcagcataaatttcaataaacattagagcgaatgtatttttttttttaataaacttttttattgtttaagtgctaaatatagttaagatatcacttaataaaaaattaaacagcaaagtctcagaattaaatttattttaaatacatatatacgtaatgtgttattattcacaataaatgaatcttatactaatttacttaatatggataaaatttttttttcttttcaggttgctgattttgggcttgctaaaatttttccagaaattaatatcagacacattcctgccgataaaaaagaggctaccatgtaagatttgatttataaatatatagtacttttgcttgtagattataattacatggttattattttttatctacttctacaaaatagattttttattaaaaaaagttaaaaagaaaaccaaggatcttgaattctcagccgagagattggagcacaaaatgggcagcgctgttttgggcttagactttatttatatatatatatataaaatttcttaatgcaaaatttttaatacttgttaaacatgcagttatacggattcagaaaattccaatgaaaaatcggatgtttattcttttggaattatacttctagaactcatcagtggaagaaaaattcatgaaagtaatcttgatatcgtgaattgggtaagcagccagcaaaatcctttctcatcaacaaaatcaaaaaaataaataaaataaattatgaagttattattattatttatgttttatatttatctgtattaaaaaaataataaaagataattattcaggcgaaacctctaatgacaaaaggagattcaataaatgtggattacaagagcttagttgattcaacattgaaagaagattacgatcaaatagaaatggaaagaataatttattgtgcagctgctagcctatacagtccatcctcaaaactaaggccaacaatgggacaggtatacttcaatttatttgattatttaatcattcattttaaattttaaaaaaatatttaaaaagagagaattaatataaaaattatttcaattaaattcttagattttatatagaaaataataaatgtgttatgaaatgcagatagttagaactcttgaaggaaaaatgccacataaggaattatgggttgtggaaggtaacaaacactttcccacaatagtatactatttaatgatgattatatagcttacagtttggtagttattctctgtttacaggaacgcagtcagcttctaatgatgattataaagcat

SEQ ID NO: 5532 - DNA, 1794 bp, Manihot esculenta
  Intron number 2 from transcript cassava4.1_002982m (locus cassava4.1_002982m.g) derived from phytozome v7.0 (chr-ID scaffold07340; pos 33985 to 35778)
ttggacgaggtaagatcaatgcattaatagtttccacagcctatattcttgaattcaaatatccttcctcctacttgtcgttatcttggctatgaaagtgattatgtgcctttccttgtattaatttagctgtttttcatcaacttgttgcgaaatgctggtgatttcttgacttggttaaattcacgaaagtttagctctttctatacctttgtctatgtgtttgtaagtaatgttgagtgaagaagaaatataaggtgcagattggctctataattcgttatttaattacagccattttggtttattaaatgtgaagttgtctgctagaaaagtcctgcttaaagtgtgctgcttattgcagctgaaagtgtagatggtctgtcttgtttcatgctacagtatattatttgaggggttgatcacagttcttacattattcatgtagaattatgcgatctctcgtgactttgtatatgctattgttgatcaatgggaaattttgcacttgtgcagatacgcatttagatagagttagggactaaaattcatttctcataagatgttgaacttcttcttagttatgtacaagaggagaggattacactactacagcttgaacctaggtctcttttgggataactacaggtggcaccttggctatagatatttatatttagggtacaagttgagagtgttagagcttttgaaaatttctacattgtacaattcatgcaacttcagaatttacctgtaaatatgatcttatattaagaacagcatagactgatgagaatccaaagtttcaggagatgaaggaaaacttaattaaattgaaagaaagagatgcataatcttagattggtctgtgtttcttaaaccacttccgattgattaggaaccaatatctaaaactaccccatcctcaatatattatctaaggatcacttccaattccaaatcctattaatagggtgtcatattgaggtaacaagaccatttcgttgaaaatttgaaaagatattaagaggaactaatcagaagctaggcttttcattaaaaaattaaccaaaatatcagtacagattttaaaaactacaaaaagtgaaaggtattgccttctggatgtggaatgcttatagtgtgacctaagatctcgccatgatatggcaaacccatacttgcaaagtcccatcagaatggagactaaaaaaaaagctttaacccatgaatgactgatgcccaaatcattcttcagctcatactcgaaatcctgagtggagcttgaaactaggatctctaccaaacctcaaccccttaccacctgggataagcacagggctccttggctttatgtatttatatttttggtacaagaggagaatgctacagcttgaacctaggatctctactcacacctttcccacttccacctggactacccattggtggtgcctgccttggcaatttatcaatgcctggtgtatgcatagaagattgctgcattagatatgactatgatgtctgtgcccctctgattctgtcatattttatagaatacctcactgcatctatttttctttagcacagccgacaggcatatcttactgaaatatcaggattcatggattattgtttttattcatctctgcattatattcttttggtatgatatttttgtctatatgcaacaggattttggctaaaggcttttggcttctcacttttagaggtctaatgaagagttctattttcacaggtggatagaaggtacaaacaatattatcatcagat

SEQ ID NO: 5533 - DNA, 988 bp, Manihot esculenta
  Intron number 10 from transcript cassava4.1_008245m (locus cassava4.1_008245m.g) derived from phytozome v7.0 (chr-ID scaffold00847; pos 896573 to 897560 reverse strand)
gtcgccattttagaggtacatgattttcttctttgtgggtgtattcctactataggagtgagctgctttgaacgaactttcaaattgattttcttgagaaattgagttcagtttattttgtagttcaattctatatgaaagtataaaagtttggtatatttagtttggtttggttattaaatcaaaattttcagaataaccaggacactgggttttgtaatttagacattaggattattgtatctctcctaatttgtgaaacgaatctgaaaataagtaacaaaaaaggaaaagagagtcctaaatcagtccaaaactgatgaattagactagttttcattttgattttactcgcttattcagttcggtttaaaccagggtataggaggggcgctaggggagccatggcccctatccctctaaaatgttcttttatatacctacatatatacttcttggaattttttttaattatttggtcccttcaaaaataatttatgttattttattgtggcatagttaatgtgaaaaatcaaacaatttatttcttattatatatttcaataaattttcatagcattgatagtctcaaacaaatgtagcttaacgatattatgttatattatcttttgactttataatattaactcctcaaaatataagtaatgagtgaactattttttgaattaattttatatacactattgaccccctcaaaaaaatatttctctgtttctacactggttcatcattatcccttaatattcagttgctcggttttgagattttttttcaaagctgttcgaacagagagcacagatgctaaccctacctgcgggcattgtgattgtgtgtagctttctgatggcagtcatttcctctttttctcctttttttttcgctttttttgcctgtttccgttaggctttgttattcacatgttccttttgcagttgtttttattggatcaaccctatttgctttacaa

SEQ ID NO: 5534 - DNA, 2132 bp, Manihot esculenta
  Intron number 4 from transcript cassava4.1_012653m (locus cassava4.1_012653m.g) derived from phytozome v7.0 (chr-ID scaffold06549; pos 34289 to 36420 reverse strand)
actgaaccggcaggtcctcaaattcatccttcagggtatgtttatttttgagttttgacttgattgtggaatatctttcccataattttctattaattgcttttttgctttcctttttttggtagttttgcatataattggaactttcttctgttatgatagaatattcctgcataatctttatcttgatcttcttaaattctttgtcacaaaggttaatgttttatggagataagttggtgataactagaactaaactagacttgaatcagttatctatgatcgggatttctcaaaattaactgttaaaacattctcggcccctttcatgatttatttgatgcttatgaaagtcatatgaatgaattcaacagtatgattcgcttgtaagagatgtaatgtatgaggaatttattttgataaccaagagctgcaatatatgagggacttattttgataaaataatataattaaaggagcgctttttggaattctttgtaatttatgtgcagctaacaaaatttccttatatgggtgactagaccttgagtatagtagaaaaatcgaaccgaatcattttaattcatttttctggttcaatttggattatatgtttaagaagaatttggtttttaggttcggcttgatgactgaactgactgaattctaagcctcaatgttgtctcaagcccgtaggccatagctgttcttttgagcccgtagatcatagcactcaagacttatattctctccatcatctcctcattctcttatatctctgcctcatttccttttctcatctccctccattcctcctcaatcctcattgttttctctccctctttttgattcaatctcctccacttgtgctgctgctgtcgccttcactgtccacaaatcaagaccctgctctctgtccagaattcaccctctcgcccttttttatctattaactagcctccccttctagagtccagttttcccttccctgtaatcatcttctttttttttcttccatgccggctccagttgtagcttcttcactgtcttcaacagatttgatgtaagcttttagatattttgatttttagatagtaatgattctttgacccttcttccatattttagttgtattcattactcatcgacttctgctgcttcctgcagtaatctagggttatcttttcattttgttatctctatctttttttattttattatttttttttgggggattgtacaaatgatttcacgtgaattttggttgttttgcaattcatgatttgagatttgagaggttgaaaaatggtgttctgttattaatttattatgtggaagatggcctagaaccgactgccatactgattcttttttcccggttttggtttcaattcagttttcctatataattcggttcagttgtaaaattttctgtttcagttcagtttattttaaaaagaaaccaactaattgcagagtcgttttccatatgtttaaatgaaaatgatagatgaaagaatttcttatgatttgaaacaagagaattaggggactgagacaaggcatttattgtgatgatagattttttccaataacatgcactggcaatggaattcaggagtagcgtgataaaagtccagtggtggcttggccctagtttagatagtttgaggaccgaaattttgtagatctcaccaagtagcctctgaattcatactttctatctttgcatatggcactccgctggcttagattattaggctctcattgccacatcagggtgtagttgctgttaagattaagaatatttgcttcaatcatgtttatcaaaagaagagtgataaaaggatctaatcatgagaatcaatgcccatcctggatggctttcttctatgggtttctactaatcatgataaaagtccagggtggcttgtactgcttatggtcctttctcttttagagagagagatttgaagaactatgatgtctgtgtttgcgtttcttctatggttttctagtctttcatggcatgcaatttctaattttgcttatagagattgtgaaggctaatacctctttttctggcttgctttgtagaattatatatcctcctgttaatccagttggtggta

SEQ ID NO: 5535 - DNA, 3477 bp, Manihot esculenta
  Intron number 5 from transcript cassava4.1_007922m (locus cassava4.1_007922m.g) derived from phytozome v7.0 (chr-ID scaffold09150; pos 46126 to 49602 reverse strand)
atatagagagattgttccatatttaaagctgtcaggtttttgacaaactctcttttattatttgctttcaaagtttgttttacttctttccttgcagttgctaagctatagagtttgtgtacctttatatgtgacttataaattctagtcggagaagaataattccttgggtattaggtatccttgtaaaagaaagttaggatcatggtttcaataacgtatgtaacgatcgttatttaatagcattttttttgggaggttgttacccgttacctcattatttaaaggcccccttaattttcatgcataacagtaacaacaccaaaagttacgtagcgataacgaccattatcaataatttaatccttttatttacatcccaaacataaaggttctaatgagttctagcagtttcagagctcttttcttccaaaatctctttttctctcaaacaattcattttggctgcatttttctcttataagcttagtttcatcataaactactctatttcttattgtctttcaccattatcaataatttaatccttttatttagatccaaacataaaggttccaatgagttctagcagtttcagagctcttttctttcaaaatctctttttctctcaaacaatttattttggctgcatttttctcttataagcttagtttcattataaactactctatttcttattgtctttctcactgttgttagaatcttatgactctcgattcaaatcttacttttcaaatttttttttccaacaaatcgattcgaatctataggtgaatcttaaatgtacctgaaccttttgattctcgattcgaaccttacaattctcgatttgatcctatatcctagcaattcaaatttatagggtatatgaattgtgactaaataaaaaaattgatagtgaataaggtgaatcaaagaatttttcacctggtataatttattatttaaaagagtttgttagcccttatattttcaaaatttaaaatcttattcatttttgctatacaaaagtgtatatacaaccttctctcaactatttttcttccactaaccattttttccccgctccttctttttgtctttttcttttttttttttgtcttttcagttaagttaactaattgtagttgttatgacagtttatatttataatattttaatatactatcttttttactatttaatcatttgatcaaatttaaatgagaatttcgatatatgtataataataactattgtcgacaattccaaagttcataatttataacaaaaaaaaaatatatatatatataacataattcatacatattattctattatgaagaatatttctaattaaataaataataattctatatttatcaaaatatgtcattatgatatattttttaaattatttttagaacatatattatttttaattgatttttggaagtcttagcgaattttatgattaaattcgattctcaattctcaatttgtgaaatgaaaatttcgattctcattcgaacctcgttttgactatggtctttcttctaaaagataaatttatttctctgttttttgcttttatttttataatttgtcttttttttcatttacttttcttatatttttgttgattaaaagtcattttgatgttaattttgtgttaaaatttttttgagttattagtttacctgatatatagtataatgtgattttttcttattttaaactatattactgaaatctatttcattaaattaattataagataacttattctaaattttatgtataagttttatttgttatttgttaatggtaattgtagttcaatatttgggacaagttataaatttaatatatatgttagttattataaataaaaattaaggtataagtttagaaaaataaatttttattaataaaaattatgttttttaaattgatttgcagtctattgcttaatttcaatttattagtttgttttaatgatgtttaatttaagttatatagtctatattttatatattatgtcgattatatagttatctacgttattctgacttatacctatcaatattaattcattttattaactttgcaaattgttttgaaaaatttgcatagcgctaggtcggtaccattattttacggttgttacaagcctgttacggttacctacaaccacaaacgtggctacgaccccaatttaaaatcatggttaagaaccttattttgattggggaatatgtcatgtacaatgaactaaaagttcttcttcattgttctacagattcatatcaaacatgatctattgctattcatacatgcattatgaaaatcattagtcagctttagagatgggtttagtggaaaagaaatcctcaaagtcccattactagaatgccttttgatagatttaggtatttttattgcaaggaattggtagaaggctgtatatcattaactgaatcaatcaagaacagtttgaatttttttacagcaactctactctcaagaacacaaacagagacttcacttgcttacaataccgatgaacaaacaaaataagagaataccaaaggaattccagagaagaatccttggcccaagtttagccgaaacaaacatacaaaattacttgtttaatgaagagagcttctccattctatgtagccaattgcctgtcatgtgaatcttcatgccctgctgcacgttgtcctttatccttggggtccccaccaaatattctcccagtaactaacatttcagaattcccagccacctcttcattttgaggtttcctcatttttcttctagcataaaccattaatgcaccaggccctaatttagcttggcccaccagaggagaaagacctgtaaggctgcaacacagtggtggcaaaaagaaacaattgggagttgtataaataaaaataatacatataaaacctagaataagtcactaactttacgcagtgctggcaatataagcgatttgagtggatgcaaatttataaaagcacaaactctatatagtggggtagtttaagcaattgaatggaggcaaatttatgaaaacacaaactctgcacaggatctttagaagtcagcgggccaagtttccattcacccttggaaacataaattttgtccagaaatttcttcttaatccagtaaactactttcaaaaagtgatgatctagtaaattgaataatcattatttattacttattagatctgatccttatccactgtactgtagctactagtttgtgagaactttcaaaatgatatatgtgttgcttctaattcttttctctggtcatggctagcacctgttagtgatgttctttatgacctctgacttgagcttttggatgaaagaccagagtggtgcagataattgatactgattattttcaaatccacatctataggtccaactgcatttgctccaattattg

SEQ ID NO: 5536 - DNA, 2222 bp, Manihot esculenta
  Intron number 6 from transcript cassava4.1_014545m (locus cassava4.1_011102m.g) derived from phytozome v7.0 (chr-ID scaffold11746; pos 510642 to 512863 reverse strand)
atacaggtatttgcttctttattgtgccttttatttaaagaaaaagttttagcatctggtttcaataggagatataagccaggatttgcaatgcatgcagcagcaaatacaatttttgtcgattttgaaatcaatcaaaagtacatgacaaaaaacataaaatgggtatgggttcgcagtgcaagtagcaagctaccaaagagccaaaaaagaccttcaatgaaatggtcaatatttttgtgacttttgattagggatggttagacagttcaacgtatgcttatttattggtcattatatatgaaatgtggtaaatgatgtcttctcaactataaattttttggtatttgccttttaactttgaagttataaggcaaagatgtttgtatagtgaagttttgatggtatttttgtttgttttggtggttttggtagagagtaaaatattgaggttgttaaaagagatgagataactttcaggacataattttttgtccacttactttttgaaatcgttgttctagctcaatttagaatttctaggcttcattaatattttcctagaaaacattttctgcattttttggtttttttgcactgaaaataattgtcaacagaaaatattttctaggtcgaaggaaaaataaaacaatctttaaggaaaatgactttctcatttcaaaagagggtcattttttgaattttgagaatcttattaatacctctatacataaatttattaatatccttgattttttaatattctaaataatggaaaataagttattttcttaaaaaatattttttatgaaaaacattttccatataaagttattttgtacaaacaaatggagccttaggcttctttgtttgcggaaaataacttgtatttggaggaaaataacttctattgtttaattttaatttaaaaagtaaaaattattaacaaatatatatataaaggtgttaataaaattctcaaaatgcagaaaatgaattactgtttaaaaaaaaaagaagtcgtttctcttaaagtgacttaatttttcgtttgattaggaaaatatttttctattgactaatttctctgagtgtccccgaacactagaaaatgtagaaaatattttactgaaaaatattttccgtgaaacaaacagagcttggatactaaatcttttaattgcagaatccctgttttatatatttttacttgtttcatccttttggttttttacttgcaactcctgcacatccccccttgtaccaggtctcaccactctcttgggattaaatggaaacattttatacagagggggaggggggcagagagaaaaattagttatgaaccataattgaaaaattaggatgcatcataactaaaggtggttgtgtttgtcaccctttctttcctcttcaacatttcttcgccactttagactccagtcatgtccagtgaccaggtattaccatagttaccagattcacatgtcccctaggtccaatgatctgggctgcactttccagtttgtgggaatttggcaacccacactgggaaactttatctggatcaccaaaaccgagttctaatccgaagaagaagaagaaagaaaagaggaaaaagtagtagctgtgcacaggagaagaactgatgcaagaagaagaaaaaaaagatatgatgtgaaggagaagaaaatgatagaatgggactcttgatcttttgttatggtgggtttagatccgagagtaactagctgactgcttagttgagagttgccaggagatatacgcactaataattattaattatattctttaattatttatctgtttttagcaatgaaagatgatgatgataataatagataaataattattcatattaaatcaatatttttacatttttttataaaaatattatgctaatcaaaattagaaaataaattgtacaacataaatataattcatgcacaatataaaaataatttgcatgccgtgaatcaaattagtgtaccaaataaacctactgcctacccctattctcctagttttaattaagtggcttaccaccttcctgtaacactatcatgacccaagacacaaccttacttaaagttcttagcatccttgattatctctactggttttattttcagtgtgaaattccaatattgacatgtctgtaatattgatttttgtgcagagtagattggcactcaagccag

SEQ ID NO: 5537 - DNA, 3442 bp, Manihot esculenta
  Intron number 9 from transcript cassava4.1_007618m (locus cassava4.1_007618m.g) derived from phytozome v7.0 (chr-ID scaffold12831; pos 42162 to 45603 reverse strand)
gcaccagtcgcttcttgcctttgtgcaaaggtaagtggatttccattatttcttttcttgcaccctgtttcgtcatatataagtgttgaatattctcacatggatgcatgtgtgcatgctggcacatgcatggcacatttgtggtcaatgacttataacatgaaagatagcttgtgctgtatgaccacatctagttagtctttaattggtggaagacatttttctagtgtagcttatcttgtttttttcctgaatcttctgtcctgtccaaggaaacctaaagaatcaagagattcaatgttcttccagttactgcacattgatgcgttgtattctttctggcactcattctccaatgtaaattacctagggcgtgtgtagctctgctatgtgaaatgaaattaggaacataaaatgtctgtctaaaaacatatttccttaaaattgctgagtgaacaaaatatattgaaataagaataactagaaagaatttctattattctaatttgaaattcataacatgaacataataatgaccatacaaatattgtctgagatttgtgtgcttgtttgattctctacataatagttgtttgcatttcaaaatccaaatttcatattgcaagtccataatgattcatagcattccagaatgcaaatcactagggggtgcaatgttttctggtagtgtagatcccgacttgaatgcaaaggaccattgtgggagaagaaaaagccgagaggtaacaatggtagagttaagaatttcaactacccaaacaaaaaataacagggtttgacataagaattaagaaaagaaagccagaatttacatcaagtactcaggaaaccagtacaaagctattataaggactctaccacaatcccccttccccgcagaagaactgccaaacaaaagaataatatccccccaggctaacctaaattttctttccaaaacctcacattccttgccctgcaccttcctcagatacttatagttcttccacgtgtatcagctccctcacttcctggataagagaatttttctagtggcacaagctccttccttttgtttcttctggatcatactatccatgagcctagtttgggccttgattctcttgtcaagcatataaagtttgcgtgtttgatgattggagttgttaagatccttttttgttgtcaagcatataaagtttgttgtcaagcatataaagcatataaagttttccttgtagcaaacttctcttttccttttctattttttatatagaaaccatgtaatagaaacaaaattttaataatataaaattttttaaatgttggatagcaaaaaccaaaaaattaccaaagaagtttgatgaatattgtccttttagatattaaagtctctttgaaaattaagataaagtgataaagtataagaattcatttagtagcccgagggcaaccaaaagtagcaataattttagtaaaataatctagtccaactctatatttctaactaaccataattaaggctcatgttgattggtacacagtggattctgcaaattgatgaatttttggcatttgcattaatccatgtctgtctcttttttgaaggccaatggctgtggaggcaggtttgagatttatttgaataaaattttgtttatacctttttcttaattttcattttcctcatctcataaaaaaattgaaattttcttatgcattcggctctgttaccaatgcatagatatcttcctgaaatagctcttccccgtttaatctttcttagttgtatgctatttagggcttcatttgatttttggaaatacgtatacaattctgcattttctaaaatttgctctgtacatgtgagacgagggttcctacaccatgctaatggagctgaatggcaacagaggatccatgtagctgacctcatataatttgggattaaaacttagtagtagttgttgttgttgtgtacatgttctcttagtcagagaaactctatcccagtcaaagaaaaccaaagccatttttaaagaaatcatgtccaattgcataggacattgctgcataccctgttttcctagtttcttgcataacattttcatctatcactcggcactttcttgcataacattttcatctatcactcggcacaaagaagtacccaagtttgtgcttgacaatcagaaatttaaggacaaatgttctaatgttgctagttatgtttatgtggcaatgtgaaatcaataacgtaaactatttttttataattagaatgttgttggtttattgtttttaaatttaattttatatatgggatccaagcaaattaaacatattattttatcagcacggccctgtcagcatgattgatgatgtaatagcatgtaattgagggttcataacaaatgaaagtaggatagaattttcaacgtggtacttctttcatactccttttaaaactaaatattctatgatagaatcttcatagattcaaattttcaacgtcttttacatcaaggaaatacattaactccaatgcattccgaaggccacaaactaagttccaattaatttgtgttgcaaacaaaaaagggaagtagtttagtatttcagatagattttgatatttttgtagctgttacttttgaaacaaaagaatagtaaatttaaaggatttccctatttttagataatacaattttttttattttattaatttaaagagaaagttgtgtttttcaagattccaattgaactctaaccatattttttttgatgtgttactagctcttcattttgccatgcctcttcattttgccatgccgtatccgtgtcgtcacgacacttcatgggatgcggcatggaatacgtgtcgacgctcgagtgacattcatgcatagttaatagagcattcttttcactcaagaggaagagaatttatttagattgaaatagttatttggttgtattttggatcacatattgattgtatttgctcatctacttgtactataattattactatataactgtatattttttttaaattttagtttattttatattacataacatatccaagcaccttatttaaatttagattcatgtccctgtattttctatttataaaattgataatcaggcatagggatatgcatccatttcagacacccatatccgagtccaagtaacataggtgacccgtatattaatactattcatattaatactgtttatagtacaagttcagcatatcaacctgtttgtgatgtaattcattggagtaggattacaaaatgtccttcccttttctttgtatttatcttgaccagaccccccccttccgccctctatttccttttttcccccttttctaactgtgcccaagctgcatataatatagttgctgtgttatgaacctgcaggtacaaga

SEQ ID NO: 5538 - DNA, 1429 bp, Manihot esculenta
  Intron number 1 from transcript cassava4.1_001111m (locus cassava4.1_001111m.g) derived from phytozome v7.0 (chr-ID scaffold07520; pos 288066 to 289494 reverse strand)
caggtaattttcttcaagatgctttgccacttggttactttatgatttttttttttattgctgagatagaattcaaatctaaaatctgcatgaacaattctagtttgatttggatgtgattagattagacatggccatgggctggttcggaaccagcagttctatttatttttcgaactgaatcagaatgggtccgatttaaaatagttccagacggtgttgattttttaaccgtttcagtgcggttttaaagcagttctgttccgatttcaattaaattcaaattataaactgttaatccaattttgatttgaaaaaaaaaattaaaggtaaaaaacttaaataaaatataaagaaataaatatgagtcttaaatattattgaatatatattttattaaataagtaaattataaaatgtattcatttacattatataaaaaataaaataatatacatataatataaaataaaatgatattatatttaaatgtaaataatattttttacaagtcaaaaatagatttaaacttaattatttgataatttaatttgtttatgcatcaatttcaactgatacaatttttcaaaatgatttatttaataaatgaaaaattgaatcggaaccaaacttgactgctggttcgaaccagccagttccatttccggttcacaggagggagaaccattaccggcccccttagtttaaggttccggtctggtccggggtctgaccggtttggtttatggtccgaacccgaccgtggccgtgtctagattagatagctgacacaagaattcttatatatggatgcgaaattttctccgagtttgttctaactgcagattctgtgctattttttctgaaaataggttcatcccatttttagtcgaaaaactcagtttcttctttgtttttgttatatgctggagtgttaaattgccattaatggtaagtttgtttgatgctctaagtaaatggtatccgtaacattactatgaatatgaaggaattaactgtttattcatgtggcacaatgttttcccatgatgtttcatctttctattaaaaccatgaagtggactttgaggtccaaaattcaatactaacaaattatcaaattacccaaaagacattcagaagctacaatgttctgagtcatcattctggttattgttttttaaatgtctttttctttaaatcaaagcatgccaattcgttttcacttgaactaatttagtcttgattatttggattcttttaactaaaaaatttggcatattttatctactaaatgatttgaatcaataacttacgtgggaacacatttgtctttctagtttttctgtcaatctacatatatgataatctaacattaaactctctatttgactgattgcagttactggtcgggtgacgactaaagtgg

SEQ ID NO: 5539 - DNA, 4223 bp, Manihot esculenta
  Intron number 11 from transcript cassava4.1_009811m (locus cassava4.1_009811m.g) derived from phytozome v7.0 (chr-ID scaffold10503; pos 46384 to 50606)
tggtaagctgcttcttcctcctctcctctcctctgatgttgaccctttctcacacttgcattttcctcatttttgttatgttgaattagacactatatatcaagcaacttgtatgtcaggtttaatgaccaactggatttatctgattgaaactgccatttagttgtgacgcggaaccctatggcacaagcctcaattccacgcgcacaagtagatacggaatctaaaaatttgataaacccacctcgtatgacactgacactccaaacttagaaaagctgaaacaccaatgattgaaagatttatatgagaatctgacaaacaccataacgaatagttgatatgttagccaagattattggtgcaatcgatgaaaacaaatccttactctcactcaaagcaatacacgccaaatgcatgaaaagaattctgaaaattttgatttaaagctgtctcttacaaatgtttcttatccttatatagtaaggatagaaaataaaaccctaagacactcttctgagacttggccgaaccacacacaagacctaagcccaatcacactctaaaataacacatcaaacacataagtattaaaacataagctcaaatcatgacccaacactctaaaacttaaaagataaaatatggccagaatacaagcccaaacaaagctaaaataaaacaagtgtttaaataataaaacatagcaagcccatcataacaaagctgaatcttcacaaaagcttttcttgatcttcactttagacttccctttgtgtagttttagtccataggtttgattaggctccctaagcctatgtttgcaagtgttgcaccaaatctgccccatatgaattgaagcatgccccaaatatatatggatcatatgaatatgattttgaactccttttagatccatttgaatgacataagtttgctccacaccattattagaaatttgccctattagatccttatcattctctccttctttagaaaagattcgtcctcgaatcttgctgatatttatgtcaagggaagctttaggaacccatgtatcttcaaagacctcttcttgaataggtggaaatagcataaaactttcgtcatggatgttttcatcagcaacctgcacatcaagaacaaatgaactaggcatacaaatattagttatagaaagatcctgtggatgtgacccattctcctctacaacttccaaagcagtctcattcgcctcctccacctcatcaatcacgtgctccccatgtccaccatcattcacaacctcttctataagctcattgatggaattttcaacaactacattagattcatgcattataacttccttttcaatttcaatctctatagaggttgagattgaaactttagcctcttctttctccttttctttccccatcttccctccttgaactagtcttgattctttttcagcctctttaccctcaaactccctcttttctgtcattttttccggagaactcaagctctcactcccctttgtagccaaggccgaagcttccttctccctctccagcatttttatttgatcagcatatacctcttgaggtgataaaggagcgagtataaccttctgtccttcatgagtgaaggagtacttgttattgaacccatcatgttgcacctttctatcatattgccacggccaacccaacaacatatggcttgcctacatagataccacatcacacaagatctcatccttgtacctaccaataaaaaatggtataactacctggcgtgtaaccctaacctcaccacaatcgttcaaccattgcaatctgcatggcttagggtgtttaatagaagccaagcccaatttcttcaccacatacacactagccacatttgtacaactatctccatcaataatgagagtacacacttttccattaaccaaacacctagtgtgaaatatgtttttccgttgttctagactttcttccttaatctgcatattcaaagcacacctagcaacaagcatctcacaatgttcagcaagcaacatattatcaacaaacacatccgaatcatcacagtcattattgtaattaagagttctttgaggtatccttgtagaagtggaaacttgtgagacattcaaactctccatagttttagttaacctctcaagagtcttataaaaccttataaactcatcactaactgactttttgaagagcttataattactagccatgtcccattcactttcatcatcactagccatgtcccattcactttcatcatcactagccatcacatttttatttttactcatgccgccttaaattaataaagaacaaagagaactagcaaatatggtgttagaaataaaaggactctagtgtttgcactcttaccactcttttgctgattcttcaattgcacttcagaaactaaggtcaatcaaccaaccacaaggtgcatttaatgaaacaaagaagaaaacctaaagaaagaaagaagcgcataaaaaagtagaaggaagacactgacaatttggatacaagaattaagttttatgctacttgaaaaatatcacctagagtatagataaaagcaaacaatactccaccaatgtcaaagaagtaaaagcaaagcttaaaaaaaaaaaaaaaacttagaaattcaaataaaaacgaacctaggacaaaagtttgaatttaattcacgtcaacgcaaattaaatatggatctatgtaaatctatccacaaaggcaagtatcaaaaccccacaaatagaattagaaaaaaaaaattaaatttcactcaatttagcatcatggacgaaaattctagtgttaaaagaaggatttgacattaaatcaatttagatgcaattgccttaaatgtgcactttgggaaataggcataatttcttttttctcctaatctggattcaacccaattcaaaattcaaaattcaaaatggattctcataaattatcctaatctgaattcaacccaattcaaaattcaaaatggattcccataaattacaggtatcaattgagatagataaggcaatatagatgaaaaaggaagtatatcacaatttcggccagataagataaataaagcaaagacgattctatttttttcgttttttttatggatttcgaatttttcttccaaaaaagattatgtgatgatgaataatcaagaaggtgcagccatggatacacctttcaccgaaatcaaaaaggaagaaaaggaaaactcaaaaactctagatcatgagataaatcatggctctgataccaactgacgtggaaccctatggcacaagcctcaaacccacacgcacaagtagatacgaaatccaaagatttgataaacccacctcctatggcaccttaaacttagagaagccgaaacaccaatgatcgaaggatttagatgagaatccgacaaatgccacaacgaatagttgataagttagccaagattcttggtgcaattgatgaaagcaaatcctcactttcactcaaagcaatacacgccaaaggcatgaaaagaattttgaaaattttgattcaaagctgcctcttacaaatgtttcttatccgtatatagtagaataaaaaataaaaccctaagacactcttctgaggcttggccgaaccacacacaagactcaagttcaatcacactctaaaataatacatcaaacacataaggattaaaacataagctcaaatcatggcccagcactctaaaacttaaaagataaaatatagccagaatacaagcccaaacaaaactaaaataaaacaagtgtttaaataataaaatatagcaaatccatcataacaaagctgaatcttcacaaaagcctttcttgatattcactttaggcttccctttgtgtagttttagcccataggtttgattagactccctaaccttatgatattcaccaaatctgcgtttacatgactatcctcattggttaccatgaactgacacaagactaaaatcttattatctttaagccaattgttcaattgatgttgttaaatatccttgtgtgaacatgccccttgttattttttttattttaatatctctgtttcccaaatatgcagttacatatgtcatgccaaaaattcattttgaagtttgaccaatgtttcctttgatgcaattgcagttggagatatacagccgctgttata

SEQ ID NO: 5540 - DNA, 1495 bp, Manihot esculenta
  Intron number 4 from transcript cassava4.1_016337m (locus cassava4.1_016337m.g) derived from phytozome v7.0 (chr-ID scaffold04133; pos 79558 to 81052 reverse strand)
ggtagatcaggttacttggatatcaggcatgttatattctttatgtactcttgaatactgtgctactgttgtccttaaaccaactgtagtactaataaggttgtttctgtgtaacacttgtagtgagaagttgtctagaaaattgatacgatggcaatgtgcatatggaatgtctagatgtgatcctagcctagtttggcaatctttctgacatagaagttctcaataaaataaatgtccatgttcttgctatggtcattctcaaaacacaattcttgtagatttttacactccacatcaggcgaaaatttttcttcaattgttcacttgcaaatggagagcatcaacagctgtactgatgttttaattttattcaagtgctgataaacctcaccatctctctgaacattaagaaggtgttgcacgctattgagtacttgttatgtgatcttacatgtataggatccatgaagttagttcacaatccattgaattccttgtgaaaagcatgtagttatgtgaaattgaattccttgtgaaaagcatgtaattatgtgaatggatgttaaattgcacctgatttttccttaagtttgtaaatccttgtgttggaagtgcacaaaaggaaaaaggtcttgaaaatgcataactatattaatgttattgaagcagtggtgtagtatgacacccgctgcgggctgcctcttctatgccagaagagtcactagcatcatctgtgttccactatgatattccaatataaagttaatgccttggtgccacacctcttctaccatttgatcagtttgtggcaattactgatttaaacttccttgtcttcaaaattcatctgtaactactcaatttcatcaatgcagcctctggtgttctgtcctgtacattttcttccattcctctcttagcatgagcctcaactgcttgtaattagaggattctgtagatgcatatttactataggaaaatacggcctcacaactaccaccaacatcaaccatctgcattatgaatcttgtacaaacacgagaattgaagagattttctatatattgatctttgaataagggcatatatatacaacatacaaatccctgattgtgaaaataatctacaattaattctatagttactcctataattaatcctaagtttaagcttctatacatggtaagacaatcaactaccagctgtattctaataaatctgaacatcaccactgtgctgcaaactggaaagaataaggaacactgaaatccaatagttctaattagttaaatgtgtcttatcctgcatactgtgctcacaattaaagtttaagcttggtgacaacctttgaacactaatgaagccttcagagaatcagagtgtcttggtagagttctaaaaatgcaacatgcatcatcagtttgcttaattttagctttggaatgaacaacttctctgttggtgttgaaattgtcttcctatcatgcaggtg

SEQ ID NO: 5541 - DNA, 4726 bp, Manihot esculenta
  Intron number 5 from transcript cassava4.1_032089m (locus cassava4.1_032089m.g) derived from phytozome v7.0 (chr-ID scaffold02644; pos 50164 to 54889)
gatcaggatgtaagtctcttttatattaagcaacttattatccttttgtgatctctacatttgttatgaggaaattttttcacatacgtgtaacttgcattcgtttagtatgatttgggtgtttgcataacatgcaattaataatttgactcttttctagcttgaatacacaagctcatgtggagggctataggctttctccatttgaccaagttatgacaaatggaacttaaagagtccatagtttattatataattgtttgacttagttttccctatgtcattttctcttctaatgccaaggtgtcaaattttctctaatatcattggattttaacatatcaaataatatttttcattaatataaatagattttacatcttttataacatagtattattttaaagtctaaaattccaataaaaaatttaaatgtttaaaaaatattaatttctaaaatatatattaataatttgtttataaaacatatcaactgtttattttattattgtaatgaagaataataataatgtcagagcacatttggtttagtggataggaccatagttatcaaatcgagaatcttcatttcatgaaaagggaatcgagaatcgaattgaatcgtaatatttgctaagactttcaaaaatcaattaaaaataatatatattataaaaataagtaaaaaaatatcaataatgacattttaataaatatagaattatcatttatctaattagaaatattcttcataatagaataatatatatgtatcatgttataaattatgaactttggaattgtaaacaatagttatcattatatatgtattgaaactctcatttaaatttaatcaaataattaaatagtaaaaaaaatatcagaggaagaaaaatagctaagaaaaggttttgtataaacgtttttttatagtaaaaatcttaaattttgaaaatataagtcttaacaaattctttataaaaattaagtggattgagtgaaaattcggtcgattcatattgattcaccttattcactatcaattttttttacttcagtcgtaattcatgtatcttttagatttgaattgttaggatatagaatcgaatcaaatcgaaaaccgtaagattcaggtacatttaagattcaccccatagatttgaatttatttgttggaaaatagattcgaatcgtaagatccgaatcgagaattgtaagattctaacaacagtggacatagcataatggtgggaatttgattaataatttaagtagttaaaacaaaaattcagttccctgcaggattacgtttaaatgattaaaaaatgtattatcacagtttataacaaatatttagatttattttttttatttttgtaatttgttaattcccagatgaaatttcttggttaagtttcgctaaccactaatcgtctaggcgtcggtccataatcacgaattgtagtgtagataatctccaaattgtttcggggagatgggagaatgctatgggccaagtttgttagctctaatattttcctgcattagactatggtgcctgtttccaactttgggattagctagggtttctattgcattatatttctagaggatttgagcaagtaattgcttttccttagggtaactcaatccgttcatcataatgttattatttttgacatttaaaacacaaagtacatctgctatgtcaacttatatttgctcttaatatagtagtcattgattcattaaataatatttcaaagccaaaccttgtgcaaagatttcactatcaaaacttaatagtagtcattgacacaacaagtaatcttccatgtaggatcctcacacgagtaaattcaagaacttgcttgttagttgttggtatgccacacgccttagcttatgagaataactgcttcctttcacataataaataatataacttgtactagtttctagtgctctaatcaatgtccaatcctaatagagcatcaaccaaggatatttaaggacaatgttttgatgctaagtataattgccccttcaaaaattttatctttgcttgacattcattacatagaaaatagatcaatattaaataaaaaagtgccttcattagtataaatgaaacttatatgttacatgaataatgtaaatttacttgcaaccacgtgactggttgcaaagcacatatactaaggcataagaccaaataactatttcccttgttttgtcattttacttgcaactgcatgattggctgcaaagccacgtactatttcccttgtcttgtcttgtcctgtcctgttcatggtgccaaatgcagccttaaggaatgcattaagagttgtcatccttctttgctctggaaacttataaggttgaataaagagtcctcttgcctttctgaagagaacaaaactaaaagggaaaaaggggaaatgtaatatatatatgaccaattcaaatctttgaaaggaaaaaagagatccaactctaactttatacccatggatttaaatagcagtcatgtgcttgtactgctgtggattttatgatgcattctttgttatctgcattgttgaacaataatgattgttgttctgtaaaaaaaattatttggaaggctttgaacaaccttaatattgtaatagtaacatatcttcatttgcccttttttgaaggaactgatgagtgataggtaatatttggttatgtatcttggattatttttcccttgatgggaaagcaacagagggctaattccaagttgcttggtccattgtttggctttttggtgcatattatttttgaatgagtaaggggaaattgaaaattatttttgaataatgttgactttgagatgctgagggagtggttattaaccaaatagcttgttggcacttggcacctattcattcaataatttagagggtatttgagatttgctttccatggggtttggtggtcctttaacatgtgatttgatccttctctattagttttttaattgtatgctttaagattatggcactcccctattttgattgtgcatcaatttccaatttgtagtttttctagaggttgagcttttgggtaatggtatgatcacctgattatatactggaggtagtgggttaaatcaaggaatagctccttgtgtggaaggtgagggctgtgtttatctaacccttcccagagcctgcaaattcttcatgcttttgtacacctagatttgtgatctacttatctaaaatgattaaacaactatttgtttttcagtggatagttcggtatgtatgccatttgtagcatgcaatctcttcttcttcttctgtttctttcttttccctttttcttttggttactttaatgggaggcattgccatatataactagcttttaaatagtaactgttggtgtttttttgtctgaatatggttatgcttgtattacggagggccatttcaatttgttcagtccttgtgaagagtgaatgcatgcaaacagaaatgtaagaaaaatatgataatcatgactatatatgcatgcaacaagtcatatgcatgcaacaagtttatgtaaaacagcatgtacaagcaagattgctcgagtgatgttgcacatgtgcaacttaaaaaaaaatattttatgaataataggttataggtgtgggattaatagaaattattttgtaatatttgtgaaatcatgtcctattcttacctgtttttattgatttggtgaaattagttttgaagacaatgttattgatgtattcttaattttgtttgaattaacatatagacatattgtattatatttttgttattttaggtcaactctgaaataaaacactaaaattgacgatttctttatagattatttaagttcattaaaatatttaaaagatagttgttgtgtaaatattaattaaatccaataattgaagtccaataactacaaccggaaaaaaaaaagtatcagaacaaataaaataataaaagcaatgtatattttttagtatttcatatattgaataaaaatattccaataatttattatcttgatattaaaaaaaaccataaaaaagtgttacagtaatactagttattgcaatcctaaagttgaagtgtttgggggtttaaattttaattctatataaagtgtgtatatggctctgtgcttttgataaatcttatttctcaaatcagttgatgggtggactaacactcatgtggagaagagattaacaatttttttaaaacaaaaaaatgtaattgtgccattcctaacttgaagtgtttagactttcaattctatacaaagtttctatgtgctttttactcattgaagaagaaaataaggttaagatatcaattatcagttgatagatttgatcattccttaatctcacaaattggatctgttgatagataggttggcttgcaaaacattaaataattaaataaaaaaaaaaaagaaagcttgttagagggataaaaagcgtgtttactgtaatccatagtcaatgctcctatgaagagttattttggattcaattttagtatatagaaatgttatgttttgttcagttctttttagaatatgtatttcaaaccttttctcgacagtgtatattacctgaattttctcattgtaacaatttacttttcttttgttgtattatgacatatacagattctggtggaggttcttaaca

SEQ ID NO: 5542 - DNA, 4758 bp, Manihot esculenta
  Intron number 1 from transcript cassava4.1_000130m (locus cassava4.1_000130m.g) derived from phytozome v7.0 (chr-ID scaffold06656; pos 1257262 to 1262019)
ttcaaagctcaaacggcggccgtcagagcgaaattgtgagtcgctttctttttcttgaaaccctaacttttttctttctagaatctagtttgccatgacggccgaatctgcaccagggttttggagctttaggggtgggcagctgcatttcatcttgttttatgtttttaggattcttgatcttatgtgaactaggcgtaaaatgtgagattttgggctaatttataggtctaggctttgtttacttgctgaggaacggcagggaaaggaaaggaaaggaaatggagattttgggcgctgtttttcctgctctctgtttctttttagttgaaaaatctagtagttggctaataaattttagatggctatttgcaaagtggctctttctttttctgcctttagaaatgtttcaagatattcagtagttggtgttcaaaatttgtcttatattattattgttatttttcttccacttattttctcggtaaaccagaaagagaaagcaaggggttatgagatttcaactagttcatatattgttatttatagtattctcattattctgtttataggtgtttcgatatttgtagtgcctgcatttaaaataacaatgacggcatttgtgaggcgttttcatttccacttggctggagctttctcggctctatgtcctgattctctattgtggattttcacttccttgatttattccattctattaccacatctttaatgtgagctggcttgtaacaagagaatcttttaggaactacttgtctgcatggcttgtgaaaggggcaaatttgcagtacgccccaaagttctccttatcaagcatgtcacgtatgtggcagattttgtattgattagttaaagaagaaatttgtttagaatataaaatgggaatccacagatgagcaagtatttatattttaagcgtgccaaatggagtttgacttgtttcccataaaaaagggtggcatgctaaatacatatgccactgttcaggtatttttgtggagtgttaggcaacggcccagcatatctagtgtgtttaaatctgggaatttagagatgtagtgttttagtacatgtgccactgcttagtttccatctttacttggttcaataagtggtagctggtattaaggtttcaattattgttacaggaattagtactggtcccagtatcacatgcagtttataaattttgaaccatgacagaatattgattgatccattgtataatcttatcctattcaacattgttgattagatttcttattgtcaattgaagttaacgaggttaatgtcaatatcttactagttttttggtgttctaaagtttctcagtaatccttcttctttgttttcttgctcttctagtagaactttatggatgtccaaacacaaatatatataagaaaaaggtgagtgagtttatttgtttttttttggataaattactttgacatgtgaacttttatggggtcaaattttgcagcaagttcagggtttgccgtgattgatatcttcttaaattttcaaaattaaaatttttggttatccaacatacctgtgtaattaatttattgactaatgttcatggggcaaggtctacagtaaagtggcacctagatattgatatcccatcccaattttggattgtaagaatacattttgaaggttggtgtgagacaatgttattttccccgatctttatgtctcttaagatcatattctgtatggatatggagtcgcggcagagatctgtagactttgagaacaagaagaaatcttttgatgtttcatgtttatttttcatgatgttttcacttgaaagagggtctcttacatgcgatggcgtggcattattacacagggtatgttagggccaaattgttcatgtgtactccattctagatatgaggttgacaagtattgagattggaagaaatttctgtagctaactaaatttgagaaaaaaggaaatctgtaaagcatgaataactagtcagtttttcagttaactttcaaaccctagcttcatggtgcacaaagtgggggcaattctcttttccttggtggcattttcttgttgggagttacagttatcacaggggtttttttaggatgtgcccttggtctacaggttcagtttgccatgtttgttgcaagttagccgtttgacatgaagtatcaattggactagccataagctgctgggaatatgtcaagttttgattgtgagtgatttaggatgtttaatatctagaagatgcgtaggaggtggacatcctggagaagttgaatccatgggtagtttggggatcacttgcctcttgccctttgttttgttgtagggaagaaattgaggacaaagaaatgagtgataatgaagaaagagattgagaaaggaggaataggtgccattcctctgtcttttttggtaactgattgaggatgatattcttccattatttacatggacaaaattgttgaaatgcaccaaaattcatgagttttataggcaacatagtaaaaaataaatccagtcgagaacttttcattctgccaatatgcttgaaattggttgggaagattttcttttttggtatggcagcagggcgaaaagatttttttttcccctttccttgattgctgttgctccaaccaaatgatggaaaatggcctttatcttggtcattctttactttcctttcttctttctttccgctgaactttgcctattagagaggagttcaagagaagtcattgcttcagcttctcttgtttggcatatatgatgaatgaactgtgacaaacctacaaagatgaccattaaggcgaatgtaaatgcctatggtgtagccaaatgcagggaggatgtttaggtcctatatttcataaacattctgggaatggaatttagtaggtctggggcttgtgtttgaatcaggagttctccatctagtttgtcaaatttaagtgaagtgttgggctgttggaagctatccactttagggattagcaatgtgcaatttcgtttttaactgaactttgtaaaaaagaaaatcaaatcaaactgaacaaaaatattcggttcatcagtttgagcctgttaccaaacagcttaccaacaattaccagcaacttctacagaataaatcaagatggttttccaattgtcatctatagacatgaaatgaaaatcattctatacaggaaacccaaagtaagaaaagcaaatttacatgttgcaacaaccacgccaaaagaactgttacaacaaatcaaggagaagtccaaattcagcaatgtaaggtgaagaataagaaaccagatatgcaatttcagcaaaccaactgatcagatatgcagcaaggtgaagaagaacaaatctcgatcccacagaatctgtagcatcgctggaaccaatgtgaagaacttgtttttcttggaaatctggcatcccttttgtctttttggcatgggtggaatgagggagagagttttcatcaggtgattgatttcaacgggttcagtttctctaaagatttgcatttgttagagtcagttgggtgactggtgagtggcgatggccgaggtcaggtgagggatttgtcatgacaggaagggaaagatgaggtaaagaagaggccagctgcagagagaggggaagactggggggactcctgggtctgggctttgtgaaataaaattgagggttaggtgagtgagtgaggctccagaatgcagaggtgatggagaaggctgtgagctttaggggttttatagggagggcagaatggcatagcaacacatatgggcgatttggtcggttgcagattttaaaatcaaattaaccaaaccaaattgaaaaatgtcattttaaataataaccaaaaccagacaagatcattttggttttaatggactcagccctagatcttgtgctgtgtcgaaagtaatggatcttaatactatatgctggtcttgtcctttttaagttggttgactaatgaactgagagatcctttgggttgtgatgaagggaatatctgaattctgaagtcatactgtttgagtgcaaagtttgtattggaggtcaggttggaataaagatgtatctgcagtctgctgtgaattcttttactgtatcagttttaccagtttgccatggtcagtggctaagtgtaggtgagatgtggcacaatgcttcttaatttaaacactgaataatgttttagaaactactgaggccctgatcaggtggattttttttcttgatagagcagtttggtgcataggtatcaatcttgcttccttctcaagcttagttggtggatgaaaccatttgatgcaggttatctaggtgctgagaattggtgtatgtccaaataagactatataatgtttagtggatgggtgctagatcagtatttggtatgacattttgcttttgaagtgtggaactgtttctttttgttgcgttcacaaaatgtaaagttttatccacttgtgataagaaggtctgtaacgttctttttcacaaataagacatttttcttattcatgctggagcttcctttagttaagtaatttaagtgaatggcattttcttcttatttgttttctggataaatttaagttcgacttttcctttctatctattacttgcaaatagtacggtatttctgttcacaaataagaattcattaccgttacgtttttatttttttccctcagtcttgacct

SEQ ID NO: 5543 - DNA, 3112 bp, Manihot esculenta
  Intron number 4 from transcript cassava4.1_003006m (locus cassava4.1_003006m.g) derived from phytozome v7.0 (chr-ID scaffold06918; pos 10164 to 13275)
tagggcattaacagagttgtcgagtagttgtaggtttttttttatctggctttcctcaaaattttatagctttatgtgaatttggcaacctccgcaattctgaattcatgaatttacaaaattgctcgactgcttactatgggagttttgcagcagcttgtagttctgttaaaatagaatcatggttttaattaaaggccttttacgttatgtaaaggctgttatttataggtttttggcctttccgttaccattataccacttttttgaaggcagaggaaaatttgttcgtgtaatggccattatagccattactttaatggtaaaggccattatttacagttaaataacaataaaagtccgttatctcacttttttttcattaaccaaacaaaagcaacaacttttgattttttttcttttctctagctcggagagttctaaattgttataactcatcttctctctcaaattttcacaaaagttaattgtctatatacaaatctttcacttcttctctcttgagctgaaattatagactgtttttctagttctacacatctatatcttacaaaagtttagttattgtttttgtttttttatttttttacgtatttgttgaagaaaattttgtttgatgcctagtcttttttattaaacttatagcatgaagaattattatttactatatgttactgtagtttaaagtgactattgccaatatgtctaacaataattgaattaatgtcttctgcttgatatatttagctcattatttggttatgtatcttagttgtactcatatcattaaacatctctttattctatgaactttataattctttttgaaaaatttgcatagcgataggccgttattgttatgttacaaccgttataagcctatttccattacccgtgactgtggctgtgaatgcgacttaaatcaatgaatagaattgattgtgcgtcaaaaagtaatttgggttattgatactgtatacctgttcaataagccagaatatgattgtgtaacgcgtagttaggtggatgatgtggtctttgatgctctggaaagcacctgttgttgtatgtttggttggttctgaattacgattcatatgcataagttccatctatgaatagggtaccttgttaattgggcacgcacataatttttgtgcctttaataatggagacgaaacaaattgagtcattttatgtaacggatttataggcaatgtgatgccttataaatgggaactgatttctgtatgatagaggaatcgtgcccaacagttgatgagtcccgaccctgggtaactaaacatagtttaggagggtagaaagttggggattgaagataattattttggttaagtacacgatgctattggtgaagttatatcaatcagttgtaaatttgaggtgcccccctctttgctctgtaaattggatcaagataattgaaaaaagctgcatgtgattttggaaatttttgttggagatcatattcattagtgagtgtaaaaggatttatatttggagtcgttaattgtctaataacattgggcattatttgcaaatgcctgaaatggtttctcactttcgctctttagatagagatttcttttgttggaaaaccatgtgctacataataggataaaagcaggttagattgctggcctgaaaattttgaactgttggacaatcatgggaatagcatttactgattctgtgcgtaggtccttattctcgataaaataagttaaaattatcctttacatctagctagttgcactgtgttcaccttaatgggggcttttctaattccttttttcttcttttaaaaaactctttgttcccaaattatcattggtcattttggtagttatcttgaccttttgatattgacttgtgctcctaaggaatttgttttaagcattctgattcaggagggcaactctttccaactcatgatttcagtgttctagcagggtgacatttgatatgactctcttttggtcattgttgttggtcttgtatatattttaagtgcctcgtgtcaacaatttgtgtcaaatttagtgcttacttggcattgtggtttgaggcctaaaactgcttttttaggaaaacagcaccattttaaaatgctaataaaaaaagcagttttgtaattttagttttttcttttttgttttctttagctagtaaaacttatctaatttaattgtatatcactctttattactctcgaactaatataaattaaaaagttgattttatcaacaacaccatcaatacaaaacagacctttaatctaatcttgtcttgtaagctttctgattcttgatctcactggcacaattcaaggtttatatgtcctccatttattagtgcaggcgccttatacttgcttggggatgagtgtgtaataactgatatggagaagagagcataaattggcatgctttagttggggatgagtgtgtaatgataaccgagatggagaagagaagagagcataaattggcatctgtgttcttgtgaagttttggagtaaatgcttctttgtaaattgctacttcccttgtaccttgtaaattagttggtgtttaattttaaaagatagttggattctaatttggccaattttacttgtcgcttcacttattcctgaatttcagagtgatctctaaattttattttatataagcaaaaacctttaatttaattttgtttcaatatcgacacaaatgctaaattttcatgcagattttggttgctgtagttattgaacattatttttggtaattagcggcagatctcattctttcatatgtttcctttgcctcgtcaaaagagcaagggatcacattttcaaatgacctgtttaaattctatgttatatctatgataaataatagactggatctctgatcatgcctatttccattttgtgtagagtttcacccttactagtttctgccttttttgcatctacatggtgactattgtattaactgtgtttctgatctgaaatttccacactaaaagcaattttcctaattagactatcctcctgtttcagattgcaggaaaattagagtag

SEQ ID NO: 5544 - DNA, 1508 bp, Manihot esculenta
  Intron number 15 from transcript cassava4.1_001312m (locus cassava4.1_001312m.g) derived from phytozome v7.0 (chr-ID scaffold09709; pos 213783 to 215290 reverse strand)
gggaaaagaaaacctgatcagatcatcatattcaggtatagttttcttttacatttggcaatgaatgagccagtacaatgccttgttttcatttctggtagatatatgcttctttctgtcagttaaggtatgtaaaataacagaaaaatcttggggtgaaacaaacatgaaagagtaattaattagaacacgtgttatctggaaaacatatatgttgatatttggactagctaaatgaaagggtaatcatttaagctatgcgttgtacgagaatcttggtgttgaccgagtgttgtaatgcccatggatttaaattgcagttgtggccacgtttacagtcgtggttgcagtcacaggcgagagaaataggcttgtaatggccggtcgtaatgtaacggtaacgcctatcattacacaattttttataaaaaaatttgtataactcctaaaattagaagatatttaaagttatgagtataactaagatacccaatcaaataataagcattagtacatcaaataaagacattaaatccatcattgctaagcatctttaacaacaattaatttatagcaaaaataacaatatagttggcatggatagtaaaaaataattctttgtactccaaatttgacaaaaagaacttgacatctaatattatttatttaacaaataagtaaaacaaagatacataactcaaattttatgagatataaatgcatagaattagaaagataattgatgatcttagattaagagaaaagaagtgagacatttatagaatgtagttaacttttgatagaaatttgataaatgtgagatacaacagtataaaacttccaatctaagaaaagaaatttgaattttgtctatggctttaaaaaaaaggtaatggactgttaccattacttttattttaaataatggtagttactgttgtaaaacggtcataacagccattactggaacaaatttttcctgccctttaaataacgggtgtaagggtaatgggagggtaaaaaaaactataaataatggcctttgtttaataccatggtagtgcctctttgtggctggaagtttttcggtgtagttgatgttacactacaagctatggttaccacttattatacacaattatgttttgagtatgtaatgatgtaggccagtaggtttttgtcctgctgcatcaattagttttaagcttttatggatgaatatgcagtttgtttgatttggtcattcttagcaaaaattttctgatttgtcaaaaatttaatggtttgtgtgatttattttcttgatttttttatttgttccatagtcccatgtttctgtaatttccttactaccgtgcactttttccttcatgtaacagttgtcccttttaagcttttttggaatatctctcacttgtttttgcttaccgctctggtatcattattcatgttagttgagtgcatacttcaagtttatccagtcttgatccctatgcttttgtataggg

SEQ ID NO: 5545 - DNA, 2845 bp, Manihot esculenta
  Intron number 2 from transcript cassava4.1_004414m (locus cassava4.1_004414m.g) derived from phytozome v7.0 (chr-ID scaffold03332; pos 317336 to 320180)
gtgtcgttctattggcctgggagacaaaactacaggtaaggttcttttgattttaattcaataatgtaatgatatgcctatttgcatctggtttctttatcgttctttaggtttctggttgatttgctatttgtggttgatcttcatattatctactttgttgagtataatgtagtgtgcttagcctatagtgtttgggaactatcatatagagggtatattgcctcaaaatctgctacaaccgaatgctgattgaaccttgacatttatatgtaattatgtaagtatatttttggttgaatgacgttcttgagataatctccgcctttattctgaaagaattcaaagcaggaaaagtaaaaaaaaaagtatttggacattgaggatgggataaaaatgatgcctaaagaaaggtatctctcctgatgcaggctaaatattagcaaatatcaatattaaatttaaactacaagagagagagtctatcgtagtgcttggaattgcaaagcattaaatgagttaaagcttgttcatttaatgcttctaatagcatcctttttctagcctaaattgcttacatagattaatggtatatatctgtcgcacgtggactcttatctatattatcttgctagaatcttattgttgatacttgctatcaagtcatcgttacgtggcacaatctaattaatgacttggtagttttagtagttcttgatgacattgagcttttttttcctctttgtcgactggtgatataattaggcaagttgccaactacaactaattttgtagcagaagatattcaaaactaaatgatgaattggctagaaatggataacaagaaaatccagtaatccacaaatagttatagtcataattgtgaaatcaagatttgaatcaagaatcaaaatattcgttttatgaattaagaatcgaatcaaatcataagatttcttgaaaattccaaaaatcaattaacaataatgtaggttctaaaactaagtaaaaagaaatatatcatagcatattttgatcctagttattaaaggtgtgcctagcgcacgaggctcagaggtcagcgccttgacactccccaggcgatgattcaaaggcacacccaggtgagccaaggcacacccaggtgagccaaggcacacccaggtgagccaaggcacgcctgatctaggccccttatttagagatggctggcttttttcccacttcaaatgcagatatgacccctcttagtaaagaagaagaagaaagaggaaggaggagcagatgtgaagaacaaaggcagaggagaaagaacatgccgtcctcctcctcctcctccttagccttgttgcctcctttttaagtacaattaaatttttagattttttgaattacttttgtaataaaaattctttgttgatgccattatataatcaaagaaaattacatgctattgtataatattgaatttatataatttcttgctgccattaaattattatattattaatacatattaaagataaatcacaagtaaataaatataatttgtaattacaaattttatcatatcattaaaagttgaaaattctataattatgaaagtagataaatttaaataattatcttgtatttctttagtttaacaattattcaaattttttatttattcattatttttgcaccttgcatcgctcaagcgcgtgcttcgctcaagcgtgcacttgcgcctaggctcatgaccttttagtgctttggtgcaccttgagccttttacaattatgattttgataaatatagaattatatttatttaattagaaatattctttataatagaataatatttatttattatgttatatagttttaaattagcaatattccttataatggaataatatgtatttattatgttatatagttttatgttataaattatgaactttgaaatcgtgggcaataattatcatcgtacatgtgcttaaactctcatttgaatttgatcaaataattaaattgaaaaaaagatagcaagttaagatattattaatataaattattataaccgataactacaattagttaagtaaattaaccaaaaagaaaaagaaagaagagagagagggaaaagaatggttggtggaagagaaatagttaaggaaaggttttatacacactttttatagcaaaaatgaatgagattttaaattttgaaaatataaggtctgacaaactctttatagatttatatcgctagaatgcggaatcgaatcaagaattgtatttttaaatcaagaatcgtaagattcaaatgcattcgagattcaccccatagatttgaatcaatttgttggaaaattgattcgaagcataaggttctaacaacaatggttacagtgtctttgggggattacattgtaggtttaataaagcatctgcatatatcaaaaaagtacgaaaagacctgcaaaactcaattttagattattgaattggtaacctactaaagtaacagcaaataacttctcccatttggatgactgccaaggaaccattgcttgtgcggaaggttgctccacttcaataggcaactcttcttcttcttcttcttatttttttttttgaaccgacaataggtggccttattgataagagaaatacatgcatctcacatgcaaacacaaaagaggggaaaatggaaagaaggagacacaaaccttttccttttaattagattggtcaaagcacatcttctgttgtttattttttggcctattgtagaatatgtgatggaactggctatgttgtctacactgcagatctcgttcaaaagcttatagaca

SEQ ID NO: 5546 - DNA, 2906 bp, Manihot esculenta
  Intron number 1 from transcript cassava4.1_005259m (locus cassava4.1_005259m.g) derived from phytozome v7.0 (chr-ID scaffold06656; pos 800438 to 803343 reverse strand)
aagatcagcttcagctgcccatacaggttagcctacggagaattttgttctgttgtttctatttcatctttctttctttttcttggcgcttagatttttgtgttagtttgataaattaagtaatcttgaaagtagcctttagatcttgcagcttaggaagcttatctaattgataagatatgctgttcaaaatcaaatttagcagtacttcggatgtcttctttccgccaagagctagttcctctttatcttcctcatgattaaggtttagaaagttgatatgtgtatgtgaacatgtaagctgatcgcctgaaacatttacgcagtttctatatgtaattatataataatacatgcatatttatatacgatctcatttcttagttaattacatgacatagaacttctatagatttctgtttgacatggtctttagatttctgtttggttgtctcgctaaaatttcagtgatgtaagtcctttgcatggtattcatcccaatattagtctgcagtaatacaaggtcttgtcctagcctttgatgtttgggaggcgtgtgtattaatctcaagttctattgggttttagtgtctggcatggagagagaagagcaaaaggatcagtaggggattaaggttacaggtttagtgtgtttgtcagtctggataatatttgcgtgcctttttctggattgctttgtcatgaaaagaatactattcaggtcaagtatcaggaaatgagccctgaaattgtaacttatttcaataactataccaattcatttgctacctttaaaatcttcatttaaattgtgaaatgggatttcgtataatgtgcagtgattgttcatataatcaggcaatttaattgttttaaatgctaaaatttctgctgatgtagggtgtccattaattgatgagcctctttttccatctactacatcttacagtataatagtgaggtttgtcagttttgtgctaaacctaaacaccatattgagttgagtaattaataatataatttcgagattttagcatgtgtattggtgaatgttcattcctattactcatcagtttcagtttgtactctgtagggttgggttatctagataactggattctggtgtctttaatttaatatatagttcattttaaacctaaagaatggaactctttcatccctgcatcccataatatggattgatgtaattggcaagggaagggactgcattgacaaaaaggaaggaggatgggtcctatgaaatctgcatgtattattttcacaattagtattgtttttttagtagaggatagaaacctgtgtcttgtgcatgtatctacattactgtgtattcacacttcatagaatgttatattagattaaagatggggcataacacttcattacctactattgtagtgtcaaaatattttataatttgcttgttttgtgagattgagacccaaaatcattgatttgtagttacttgctgtagccagctagtagctcaagaacattcaagtgtagaaactggaagaaattagaattatggtctagatcccgtatggtgtgtggatattattgagtattttcctttgtaaaaacttatatttatgattgcttaaattaattaataatcatctgctggccagaatctgtgacattagaattcaagggtaaacttttgagtctaacacctccataacgcatctcttaccttatcaattctgcctgtttaatttaatccaaaatgtacataagcatgttttcatatattctcttgtgtcactggtaaaggcctggagtggtttttcttttaccaactgctaaagcttctgtttatagaatggtttggtcattggaagcgtctaaacaaacaactgcagttcaatgatttgtttgctaaattcaatcaagtaccttgccaataagcacaaccatcttgtcctgttattcacataaatggttctgtactttttggtgtaccattttatgagccttttgaccatcctaataggaagatggtaatgtcataattctgaggctcataatgatgactggtgagagctttatttcaaagtgaggcacctacatagtccatacagtttctttcctttcatattgacatttctgctacatgcggcaagtgaggttactggaatttctttcctccggtttgttcatgctgatcattgaataaatattcctgtatattttgtctcctttcatatgattcaaaaattctgaaatgcatcagttttagtgttcaaatactgcagtgcaaggtttttgtgctaatcagtagatattaaggtcttcttttcatgctttacagtggttgttttcagttgaatgctttagaatcttgtatcacattcatgaggcctatagataatcctactgtgttatctagtcagacagttgcacatgaactttgaatttgactgtggtgctcttcataattctttgcttaaaaccaagatataaatattaaattcaataaacaggtgattgactttttttttagtgccataggcgaagatcaaatttatggtaagcaggtatttctttggttcagaggttaggacatctaggtgacatgcaagccgtcatttatctagcaggataaatgcataattgttgtatgatctatggtactcttggaaatcaaatatgttctaataacaaatatttcattttacacgtgttactatgtatattaactttctgatagctgacatgccctaaacatcaccttttgatcgatttagtgatgtattactaaggattattttgtttatgaaagttgtatgctattcattttacattgacacttagttgtaccttataagcacaggtttatgtagattatggacttactttggcccgccttttccaggagaacc

SEQ ID NO: 5547 - DNA, 1159 bp, Manihot esculenta
  Intron number 11 from transcript cassava4.1_002781m (locus cassava4.1_002781m.g) derived from phytozome v7.0 (chr-ID scaffold07520; pos 2638018 to 2639176 reverse strand)
ctggtaagctttggacaagaaaggcataagaagtgaactgatttatcaatgataaagatgctattgttatgacatgcaaggatatagttgtgattcagtaaaaattaaattttcagaatttgttagtattattttgctttaatatggtaagatgtttgaaatacttgagagcatatttccaagataatttttgttggagaaaataacgctgttgtgaaaaaaacattttaactttattcagcaacttttgagtaatgtaattgagacacagtttcatcctaaaatattaattatcaaggaaatcacatatatataaaatatgattatttgtcttctgaaaagaaagttggaatagtttgttatttggagaagctacattttatttggatggagaaatttaaaatggtgatatttgaatttgattataatctagttgtttaggttcataacttcatctacgggtataattaagtgtttggtatccttagtttaattccaaatccaccttaaatagccaaatggtagagtgcctagctgtgtacttgtaatagaggacgttaggagttaaaacctggcaacaaccttcccctttaaaagttcagaaataacttgtcattcatgttcatgatgttgaattcatttgtaaatttaattaattaaagagtgggttaactttcattccaacaatttaaactaaaatcatcttcaaatccttcaaccaaacatagaattttggcatattaagatgataaatttatgaaagatttatggaacaagggcttcttaaatttaccaatatggtcaagctttggatctcccaagggattgaattcgctcttttgtttcagtcatggcattgttctttatcagcacaacagccactgtggagggatccatctatagccctcgtaggttctgaaaactctgccatatctagaacaggaagtgtcaaatacttgactgaagactgtccctttctactgagacaattttcaaatcagtagtatattgtgtgttcctgcttgtactgcttgcatgtccttcacaaggtcacaattgaatttggtcatattctgtaattgatttgcctgtgagattcctatttgtagaataatctctctttctcccccctcgacagaaattgttcttcaatttggat

SEQ ID NO: 5548 - DNA, 761 bp, Manihot esculenta
  Intron number 2 from transcript cassava4.1_033750m (locus cassava4.1_033750m.g) derived from phytozome v7.0 (chr-ID scaffold08265; pos 745472 to 746232)
tatcttgaagatcggactgttcgtttgcagctctggtacgaccttttcttattgtctgttatttgtattttggagaatctcttgtagatttttggttgtatctttatcagagaaattcttttgattttattgtgattcctagtcttgttagttgctttcctacgtctaggattgtgcactcagcacagacaaaaaatggggagaaaatgttgaagtgattacaatcttttgtttgtattaaggacgcagtggctgatagtcggcatgctcatgcaggtttagctcaattcagtctctgttttctttttttggaaaataacttttatatggaaagatattttctgtcaaacaattgcagattttttctgttctttcttgcatttttcttttttacctctttgatcaagaatctcctgttgcttcccttgccttgataacctatatcagaataccaatgtaataatatatacttcgataatcaataatgcaatataacaagcctgaaattgatcaaagagttgtttgtctgtagggtgttttgtttttattataatgcttttccaagatgaaaccacccttgtcccaaggtaaattattggtctaaatttaaggacaaacatgcttgttgacaatgaacattattttacattgtttcttatgatgtctgtgtctttccattttgttgctgcagttctggtttttgaaatttctactctgttttcacagggatactgctggacaagagagatttaggagtctca

SEQ ID NO: 5549 - DNA, 2631 bp, Manihot esculenta
  Intron number 8 from transcript cassava4.1_000095m (locus cassava4.1_000095m.g) derived from phytozome v7.0 (chr-ID scaffold08686; pos 640072 to 642702 reverse strand)
ccttgccttttggagaggtaattctcttatactgggtcagttatatgatatgtagatacatgttttccttctacttttgatctggggggatgtaaaagtagtgtcatgatttgacatttgtccatggacacattttctaccaaccagaaaagattgcggttgcaatgttattatcaatactcgttattgatctacattaataactaaagttaaactctctaaagctactaaatagcataaaaagttctattcataacaattgtgggatttttttcttcctttttttatatatttttttattaatttcttattctctatgggtttgctcgtctgacgatgtgtgaacaacagtaggtcttgccattgtctagcattctcttttttatgataatggaaatgactatgaatagcaggtgtagccttaaggatcattgataaagaatagttacagtattatgcatgcttaccttaactggcaaaatgatatggctactaagtttttcttaatacatacacagcaaagatttaaattgcagtcgctataacaggtaatagaaacaggcttataacagccgtaatgtaaagctaacagcttattgctacgcaaaattagaagaaaaatttgcaaagctcatgaatgaagagatatttaaagatacaaatataactataatacccaatcgaatagtaagcattaatacaccaaataaagacattcaaatccatcattgttaggcatctttaaaaataattaatttatagctaacataacaatgtagataatatagatggtaaacaacaattcttcatactctaaatttgacgagtggcatccaatattattgtctttaacaactaagtaaaaagatgccaaatacaaagataaataactcagactttataaggtataaatatatggaattataaaaatagttgatgatcttagctttaagagaaaataagtgaggcatttgtagatagatagttagcttttgatggaaacttgagaaaagtgagatataatagcataaaattttccaatctaggaaaaaaattggagtttttgcctccatatagcttaaaaattaggtaatgaatcgttaccgctacttaatggtaaataatggctgtcaccaattatacaatttttctccacctttaaacaacaggtgtaacagtaatgggaggataaaaaacctataaataatggccattattaaaaccatgatacattgtattacagtcatcaattttcaatcaagtgatcaatcacctttgtctatttcctagatcaccaatgtccattactcttggcatgttgttgacagcagtccctgcctaacgcttgatttcttctttagccaattttagttgtctctttctagtctgcaagtcgtatggggctccctggtttgcaagcacctgaaagggcaaggaaggtgtcatatgtatgaagtctttaaaacccatctctactatgacatacctaagaaagaactatccatttaagcatgcagtaactcccagaagccctctacattttgtttacttcttgccttggaaccttggttccatatcccaccacggcaccaccaggtgactgtaatcaattttaattggaaataagttcaaatttgcccctctatttttcatcaaggatcaaataagccaatttaattttttggccatagaagcccacatctttatattaagggccaaataagttggaacatgttaaaatattaattgttttaataataacatgttatttctttaaattttaactgtaaagtacattatttctgaaatttcattaattctccagagaaataatatttaacatttaaaaattatgaaagtaattttttattattaaaaaataaatattttagtatgttaggacatttggcccttaatgcaaagttatgggtatattaggccaaaaaattaaaattagtcttatttggcccttgatgaaaggtataggagtggatttcgacttttccccaattttaattatcctgcattgatttaggctttgaggtttacgtaacaagttacctaatgcttagccacaacattagtggatcatgccttaacagctaagtactatgctgagcaggatgaacaaagcatttaactttgtaggtaccataaatttcgtttgttggaggtataagattattcttgcgtctctcacctgcaaacttaagctttttggttgactagttttttgatatggtatgagagcctccaaagactaaactgtctagaattcatatcttggctgtcccttttttgactaattgtattgcacaagctaaagtgggcctgtgcttgtctatgcttcaagctgcgggggtgtgttggagatatgagattattctcggtgccctcacttacaggcttaagattttaggttgagtagttattgacacagttgatgaagtttactgtctgatctaattttcattttatttctgttagaaattttatttccatgtgatgcaagcatgtatatgcatatgtgtatgtttaagttcttaagcttttactgaatctaatcgtggtccttttttcttttgctctttattcattaagcctcctggaacagcagagtcgcaggctctt

SEQ ID NO: 5550 - DNA, 1252 bp, Manihot esculenta
  Intron number 1 from transcript cassava4.1_002435m (locus cassava4.1_002435m.g) derived from phytozome v7.0 (chr-ID scaffold03834; pos 177714 to 178965 reverse strand)
aacgctagtggccttagttttgaagagctttataggtttacctcttcaatcttgtcctttttgttttggctttgagcttaattctttagattttttcatgtctgttagattatttgagattaacgatgatttgaagctctcttcgtcttgtagaaagatggctgattagattaacttttaagcttcaaatttttgttggtcgataattatttggttattatatatgtaactgtagtaaatatcgtgtttggtttccttttttttttttgcttgtttcatattttttaaaactttaatcttttctaggtgtagcttgtgattgctttttgagggctttgatagccttggtgcttaattggtgaaaaacttattaataagttaatttaccaatatatgtgaaggatttgattggataagattatatgagaaattgatgttgtagtttgtcaattatgctcgtcctgaaatttttagggaatcatcttagttagtggttctgaaatttatcaggaatcagcttacttagcagatgacacacgtctggggaagatagataactgattgcttgttaagaaaatttcatgtggcagcagactttaggatggatgatatgcaggaaatgtactgaattcttaaaagcgaaaacaatatcaatctagaacaaccttaagaattctattgaagtgcagtaaatatggattatgggagaactaactgttgaagttctattatcttatgcattttttcctcccttccccttcttctctgtattccttctcgtctttttttcagataaatattttggttaatgtgtgcactaggtttagaccgtttcttcctaactaagtcattgttagtactgaaaaaagacaactttctcaatcctcttatgtttgcaggcacaaactttgtgatcgagttatctgtgaagtttttgtttttttctttttaataatattttacacgcttgaagagaaagagagatatggaagtattatagttctgtctctattctttagcaagcattttgattgggtttttagggtacttaagtttatgtgtctgcttttaatttgcatgcttatctagaatcgtctagtgtctggttattgtctgacttgctgattttttcttcttcacaaatctatctctcctctatccaaaaccatgaaaaagagaggggaaggagcaaaagtacacagaattcaagtggtcgtgtgtctaatgttacagttttggcataatttcagga

SEQ ID NO: 5551 - DNA, 3184 bp, Manihot esculenta
  Intron number 3 from transcript cassava4.1_015129m (locus cassava4.1_015129m.g) derived from phytozome v7.0 (chr-ID scaffold12865; pos 347899 to 351082 reverse strand)
ctcaacaaactgtatgtcctcacactttttcattaatttcaaatttattttcagatgaaatataagggcctcgtaatgtctccttaagctgatatcagtgtagcatgaagttatcaatggttgctatttaaatgcaattcatgtcagggtggaggaaatatttatcattaggattagtgcatcgcttttgtccgcctgcatgtttgaattttatggtacatgtcctggccttcacctgcatagtgaaagtggaatagtccatttcttttcaacctaaaagtttattaaaccttcaactactccacatgctttgcatcccattaacatgggatagtgtcctccttcattaacttgcagtagggaagaaataattacatttttttttaaaatgttacttattattatcatcgtcgtgcgttaatccttccaattttgtttgttttaacctgaatcaattgattaatgaaacaaagaaagctttttctaattacctggtattaaatgattaattgatcaaattatagataagcatgtaatccctccatcccctaatttttgtccaactttccatttttggctgtcccaaatagttgtccgctttcttgttttacattatggttaacatataaattggctattgtagcctatttaattttatcttattttcaacaatcccttagtaattattattatttttttttcaaataagaatgtaaattatctctaacatttaattcaaaacatatgttattaataatgattttattgtttcagtaaaacttaaatatgggtataattggaaaattagtaaaaaaatttattatttagctataataactatcatttctttatctatttgaaaaaacaaagtggacaaaaattatgagacagagggaatattttgttaggttcttgatccctagctcctcttcttgcttatagaagatagaaaggaaagaaagaagaagaagaaatgggaatggagcaggaggtagatagaatattctggaatgttgtatctcttatcatagtcaacagcagttcacaatagctgtatttatacagcttatgtagctaatagtagcataactgttcccacccttctgatcttatgttacaactttattcttcctctaacactcctaactacttcttaactagcccttagctaccacaaagcttttcatagtaaatattctaataaatgaacccagaaaaaaaggcaagtgaagagtctccataaattacacacttcctttctttttctgatgagcatgtagacaatcttcttttctatgtggtaagaagaattagattaaaggcgccaggcaaggtgagggatgaggcgaggcctcttgcaagaggtgagtgccttgcctggctagaggcatgaggtacggcgaggtgctgcctctgaaaataacggggctggcttattttttccttgctttttaaacaccaaactctaatttatagtttccttttgaattcgctgtttggataactaaattttaggtactagccttgtatttatgctcactaattagcaagagaatagtacaatatctacataaatatgacttatatatatatatataatacaaacagacaaaggctatggcgcctcacttcaaaatggccttcacctctcacctaagaccataaggtacccagttgctttagtgtctcttaatagctagtcagtacaacaatgagagttgaaagatgaaggtattattgaagccaaattttgaatacaccaaacagagacaaggtatgggacaaccagacctgtactctagagtggaaaattatgatgtaatataagcatcattatttatcggcatgcttaagcataaatttcatgaattccaactgagatatggtttgttttcttttagtggtttaatcagtttggatattgatttagtttctggacatgaatttaatggtgcacaattatccaatttgaggatccatgcgatgtatttccagtttggtgatctgaattctccaataattgttctgcaaccagttgaattttccatttgttttgtctataacttttatatgaattgggaacagtgcttgtttatttttgaattttttactaggacttcacatttgatctaaggaaacagtctcctcgctatgcaaaagtctgggatacatcccaactcagttgcccataatggtggcaagtcttatgcctacatactcgccattaatctaataaaattcccaaagagtgttcatctaagttttaataaattttacattaaaatcaaaatattatatggtaatgtttgggccattctacctaggaaactgataatctgttttataaacattacttttggactatttattgagttgattattgaatttggttttaggagatctgcatataacaaagaaagtaaaatttgtcactttttttaaaataaaatgttgatatttgtcattatatacagtaattgtaacttaaccaataagtaaaaagtaattcatgataaattgctagctaacagaagtaattaatatcatcaccaatgtgagcaactaatagtcaactcagctgccagcctaagtagggctgaaatgtagaaatagttattctatttgaaatagtagtgataataattgtaaagttgcaacttaacgccatattttacttataaaataaaattgtaaggcactcagcaactcacattaaataataggaattcttttatacccaccgttgaagatttatcatatgctaaatcaactgtgtgcattgggctatggagtattcaccttgaaatattcttggtagcatacaaaggttcatgcttcaaggctgtcaaggtggagctgtatttgtagttttgtacactgattggaacctgctgcctaccttgggtgaggaaggaaatgaaaatatgactagggaagggctacttttaaaatatgcaattaaatattggagtgtcttcttatacctttactttgcatatccatttgtttaggagatatttactggagccattttgatgacactggttactaatattctggtgtcttcttatacctttactttgcataaccatttgtttagaaggagatatttcctggagctattttggcgacactgattactaatatatgattttcttaattgaatgttttttgttcttgtcag

SEQ ID NO: 5552 - DNA, 2689 bp, Manihot esculenta
  Intron number 8 from transcript cassava4.1_009470m (locus cassava4.1_009470m.g) derived from phytozome v7.0 (chr-ID scaffold03597; pos 29505 to 32193)
cttttcaaggtaattgacaataatttgtgttgtatagatatgcctgctgagttctatttctgatagaaaattactataaagtatagttgtcaaattgagattcgtattgagaatcaaaatcttcattttatgaattgaaaatcaaatcaaattgtaaggttcgatataaatctaaaaattaattaaaaatagtacatgttctaaaaataagtagaatagtatcttacaatgtcttgataagtataattatcatttatataattagaaatattctttataatagaatagtatgtattttccatgttatatagttttatgctataaattatgaactttgggtttgtagataatagttatcattatgcacatgctgaattctcatctaaaaatagcaggttttgatattattaatataaactgtcataacttgacaactataattaattaagtaaattaactaaaagaaaaaagaaagaatgaatgaacagggagcaagaaaagaataggtggtggaagaaaatagttaaagaaaagttttatgtacacctttcatggtaaaaataatgagatcttaaattttaaaaatataagatatgacaagccctttatagattattgattgaatcgggtgaagacatggttgattcatattgtttcacttgattgactattgattctttcaatttagttacaatttaggtatattttccctaaatatttgaatcgctaagacatggaatcgaatcgagaatcataagattcgaattaagaaccataagattcatgtcattttaagattcaccttatagatttaaattgatttgtatcataagattctgacaatattgctataaatttttctagttaactaattggttatcatttattatcatttctcgtgaatgtttctgtcagtgagcaatcctttttttttttttaaaaaagaagtgcgaatgaggagtgtaggcgttgaaaattaattgcaatagtgcccaaaatgggctaaaatgtcgtagttatattaataattggcatgagagaaagatcatcaatcataacatgctgattatctatcttgcttcttctgttagtgcacatttattggtttgttcgtgaaaaatacaatgatctgggcattcctcctcccattagattcctttggggatcgaatcaggccgatctattttatcaatatgatattagcactaggggagagtagatttcggtctaaaccgaaaaaccaaaccgaaccgattaatttcggtttatcggttcggttagtcggaatgatcggtttggtttggttaatatatttaaaattattcggttttcggttcggttcggtttaaacatgttaaataaccgatcaaaccgatttcgtggctagcccaagcccatgccctcacccgagccctcacccgatcctctcctacccaacccagcaccccaaccccctccatcggtccatccctttctgccccccaggcgttcaagctccaatctcccgattctctccctccagatctcccgattctctccccccagaacccctattctcccgatttctccccctggccaccactgatgattaatttactatgacattttttaaagtcgccatattaagaaagtgaagctgcatgccctttgctaagctgtggctgtgagtaccgacacctgagctccgttgctcttgaaggccggaaaacgtcatgggtcggtttctcctcttcagtagtcaatgatggtggatagaagtttgatttggatgattggttggtgattttcagtggtggaagtggtagcgttaggtccgacatactgtagtttatttatgtttttgtgttgatttatctgtttggcatgcgtgggacttgtctggtattattgctgcttctcattgcctagtttgtttggtttgttgatcggttgtcatcggtcactgcttatgcctttgtcggtgctcttctgatgccaagaagccaggtggctagggtaatagttcggtttgaaccgaaccgaaccgaaccgatttttatcggttcggttatactttcaaaatcgattttttcggttttgaaaattttaatagttcggttttcggttttgtcggttcggttcggttcggaacagaaccgaccgattgcacagggctaattagcactaacttcattctcgatgttgggctacggacaaatatataatcctgcaaacttcatgccccaggattctagtcctgagtgcgaaggggtgtgtaaagtcacatatcatttgggtattggggaaaaaggcttcatatatgatttgggaaatccttcttccaaaaagtaccttctagagtggagttaggtcttgttgacaacaactaccgacaatcataatattcagattatctgccttgctttctcatgttaatgcacatccattggtttgtaagaattcaacctatggctatgatctacattgcaacccaaaccttcagctaatacccaagggtgattttggttcaagttgaaagagctatagctatggtcattgcttactatctacttgatgaatatataattagaatttcattgcacaactttttctttctctagatgatcttgaatggaagtagagactttctgtcctgaatgaattgctaaatctaattttgataatattgtcacaggaatcattcaaagcg

SEQ ID NO: 5553 - DNA, 4886 bp, Manihot esculenta
  Intron number 16 from transcript cassava4.1_001888m (locus cassava4.1_001888m.g) derived from phytozome v7.0 (chr-ID scaffold09846; pos 175506 to 180391 reverse strand)
gataggtaagaaaactgtggtacttcttgctttggtttatggttcctgctagtcagccccttcattgcaggttttcattttcgcactcaaggaaaacagagttagtttctttttgacaagtgtgacactatgagaaatgaaaatgtttaccgtttcagtttcatgtttggtgactgatttttcactgcaattttcttgtgatcttttgcaacacggtgagagtttgagacagtttcattgggataagggtcaatgtttgttgccttccaaagaatggaatacaggagagtttttttttcccatctttcctgttgtaaattgtccattagatattgcttctactggtactgagcaactcaatagttctaataatgacaatgagctttgagataatgtaaaaagccttttgagtttgtggcccgagttaggtccacatgtattggtaaacacaaagtgtggtgtatgtgacatgagatattctactagagattttaggtctatatgtttttggaagaaatttaggaattttagcttagcagtagtattcaacttatttaggagtttgtgttgatttagtattccttattaatagtggtttaatattttcttattttgggatactatttaatccatgtattttggtagattattgtttttgacagttaagatttagaattaacaaaattttgagagattcatttctttcccatttggtgattcttatggttctacatcattatggtactctataggtttatttgataaaccaagagcaattagttacattatgctagttgcttatggtagataatggcatgtcattgttgtttcttgtaaacaaagtgttgacagaaaaagcagctctctcgtatgcatcatagctaatttatacttgctactttcctggtcgtggtgcaagtatggtggtcagatatgccacttattttgtatatcttatagcagacaagtttgtttggtacgctagtcagattgtggtgtgtgtattagatttatttgggtctttacattgttgataaggaattacagaagtagaatagaagacagaagcacagagagaaaaacacagaattcatgaggaagaaaaaacacatttcaccatatcattcaaggatgagaatatgaatgcacagagacaaaacatgagaattcatgaggaaggaaaagcatattacaccatatcatcaagaatgaatatcaattataactgtagctcatatagccagcttgtactataatgtcacaactacctagaaacttcagttggagctatcatctgactaacaacctagaaattttagtgggagctgtcatctgactaacgacctctctccacctcttctacaaaactgggcatgccttcccaaaggacacctttttattaaaagattcttgtacgaatacctcccctttcagaggaatgtagaaatctgagctcttaactcatttgtatattctcaggaagcatcagctggaaaaaatcaactccaataaatgataagccgagttacagcattattttgttttgttgacaattttctactatgaattgcttgaaaaggcatattgactgaaccaatatgatctagaatttgaaaggttttcccctttgatttttttaataatgttttagcaataagctttgaatcaacaccctcatgaaatttcttcttctgtcttctccatctctcaaactcaacttctgtaaatttcttcctgtatcttcttctcgcaccaactctttctttttgctgcttagtttttccagtaataagaacagattctccattgtcaaaaatagtaactgatttagcaacataaattataccattatcataatgagtagaagaattctcaatcaattgcagttccttgattactcaatttcaaaattttctgggtggcaaacttactagtaaggggttctgaatttcctgagggtactggttgttttggtagctgaatgatagatgtcggtaacttgccatattggtttctagtgaccgcaagcttacaaaaaatcagattgaggattggatggaataggaggagatgaagcattaacaaagattgtggatttggtagctggtttggccttatttctgattgctgccacaattatttcctgcaaccaaaccagtggctaagcctctctgaatgtccatggcttaaacattcttataggccattgcaacccatctactaatccactgagaaaagattcaaacgcttgatcttcaattctgactttcaaatgcatctaattaaaagaattccaataatcatgtgaagtaaattcctgtttcaaatttattaaatcctccaatggatcttctgttgatcctgtagtccccccttgagccataatctccatattctgagaacttgtatcagcatgcatgggtataatttcttccaaagcttgctgatgtcatcgctctgcttccttctgcaacttttcttgctgaagttctagctcctgcatcatcacattatttctccatgccctccagtacgcattcccttgatccattgtgtggttcaccgaggaggagttttatggaaatagaagaaaagaaagaagcacagacagaaaacaaacagaattcaccaggaagaagaaacacggagaattcgtgaggaagaagaaacacatttcaaatgagaatcttaattacaattttagctcacatagcatcttatactaaaaggctcataattgtcttttctaaactcaagcaaagaatgacttgtcctaactacttcacaacttcagttggatctgtcaactgacttgcaacttttcctgcactcattctcatcttcaaaacatggcatgcctcttcttattgagttcccaaagctcactgttttatgaacagatattctcatatcagcaacaaggttttctctggtcccaaccaagactgaagaagaagaatgaaaggaagagaagcatagaggagaaacagaagaacatcgagaaagaagaaaagagggagagagagatgaaagatttgctggttgtgagcgtgacaccctagcaaggaaaaagattggtaggaaaatgattatttgttgcagggataatgaaagaaagttgaggacaagaatttcaagaaaggatggaaaaagagaaccttaatggcaattaccgggaaatagaagaatgtaggtactaggaagaaattagagagagagttggattgagagagaaggaagatctgaaatcctaaattagagtcttggatcaagaattaaagaattagggaagtagaaaggcagaattgaagaagagaaggacaagaaatgactactagagagagaaggaacaaggctaaaacacacacatatgtatactctactgattagaattctggaatttgggaacaactcacctggtttgggatgagatgacactttcaagctctgatacgtagaaaatttctcaatggtcccaaaacaccataattggagaagaaaggaaggaagcagagagaagaaacggtcaaacagaatagagaaacaggaagaagtagaagattgagaaagaagaaaagagggagagagagaaagaagacgagagagaagaagagaattggagagagatatctgttgtattgaattgataatttctcccatacaatgctattctgtttatacaatttattctgctattccctctctatttctccttttcatgactggtctctaggcattttctcacaagaattttgcttgtatttcattaattagccaattgtaaacttgattttttattaatttttttttgaagtcctaaacatgttactagtttctcacaatgctactcaattaattagcttggtttcttttgttgtagaagtagctgacacgttgcatgactttttgtatgtagggcacagatagacttaaaatatcttattattttaatgaattagttgataattgttatggtactccaactcatcattattgatcaatgtactatttacagccagtaacagtaaatgctcatcaacataatttttacaactgatgacaaatcttgtcaagaagagtattttcttttgaaaaagtaattcatatagaaatatcaattttgacatcttatttcataaggatggggaataacttgtgaagaccttcaatgaaaattacttggagtttgtgtagtctgttggactccattttgtttcactggctctttcttattccccatattgatctttctctgttgtgcttcaaaaggcagatgccttgctgctgtatcaaacatgtacaaccgtacaggatctgcttctcccatgctccacaacatggtcatggcagctgcttggctatcaattcattttgaccatctttacctgtaattgacaccatgcatgaatctctattcaaattgttttatgctcagcaataaatgatttatattgtagatcttaactttttgttttgatttatttttttcccctattggcttggttgggaagtaaaagaaatttaggcacaaatgttaggttgtaaaagtttcaatgcagctttaagtgggatcgcaaaattgaaaatccggatcttgtacctttccaaactggatagctgaagtactgtgatccaggatgcatgtccaagatcatgatataatggggtcgtagtgaactagataactaatggcatatgccacttgcaatttgatgcattattttcaggctttttcctcctaatccatcctttttttttttttctgttttcaaccattcttgttatttgatgacgtgtagcttcattttaattataattctttatggattgggagagtgctatttcaactaccttctgtatttaggcatttgagtgtctctctggac

SEQ ID NO: 5554 - DNA, 3912 bp, Manihot esculenta
  Intron number 2 from transcript cassava4.1_019816m (locus cassava4.1_019816m.g) derived from phytozome v7.0 (chr-ID scaffold06446; pos 162991 to 166902)
gtctgcattaaggtaatattagattgtacttttactaaattgtgatcgttgtgaagtatgttttagctgtgattgttgattctctatctgtgaacctattatgatgagaaattgttgcatttgtccaattgctgttgcgggattttgtttacgtggttttctatcgatatctagggctcaacttagaaggaatggggaatgactgtaccctgtttcatgattgattcgtagggataaagtcttccttccttaaagcaatgatactggtttcaagtgcttttcaaaacttctagaatgctggggaagttttacttttgacaagtagaagatggggaaaagaagctgagcataagagtgactaggatccatacatcggataaattttctgggatccatacataggataaattttatgtgcacaagtgcttgttttcgattgaggttaggagatgatatgttaggttttatcttcttgcaaatgttaggctaagagtttaatgttgtatatttccagcatttgagtatttttctgtggggatggagtatggaggatggtaatgttatagacttgggctttacagcagatggttggttttgtttggaacgtaagaaggatacaaaataacataagataatttagcacccaatgctaatttagagtcaatatgtttataatcttcttggtattaataggttgttaaatgaaagttgttgagtttgttatgttagttatggtacttaatgggttgatacatacactgtctactatccattgtttatgtctaggactgctgtaatacctaaacctgaccaatgcataagtcagtcatgctctattagggggtgagcaattggtcagtttggttccaaaccgaaccgaaatcgaaaatcaaattatatgttttagagaaccaaaccaaaccaaaccaaaaataagaactaaccaaactgaatcaaaccgaaataaatcagtttggttcgatcacctaaaaccgatatggtaaatgtgaataaacagatttcatccagaactactaatgcaaattgccaaaatttcaatgcttcaatcaaatcttcaagaaaaaccttaaaatgcataattcaatcttcaactaaacaataaatttcaatcagaacaaccaagaacaagaagaagaaataacaaagaacaaacccagaaataacacaaacccataaaataatacaaattcagaaagaaaaaaactagaaaaatcacaaacaagcatctaagcacgcagatttgatgatgtaattgtgaaattggagagttcaaatatgcgaaattctcggtgagactggatgatctatgacattcctctccagtcggcgacagatcatttgccaagcgctcgatagtcgccttgttgtgcgtgagagagagagaagttgcttccttgtcgtgagtgagagagagaggtcgccttccttgccgtgagtgagagagagggctagacgggtggagagccgcaacaaatcatgaacaatgtcctccctaaatcctcaccgtgattgagagagggtcaaaggaggtgggggctaagtgagagagagagagggggcagcaagcagcaacgacgaggaagctgcttctttgtgagcggcaatgacttgagggaggcaggagagaggataggaagaataaaaggggtggctatacaaatgggttagggttccattatattgtttatatatgaggcaatttagttcggttcggttttcagttaaaaaccaaaaactgctcagccacgtgctctatatgatgtaagaggcttagaaacatagaaacatctctccttctagcaagcactaggtttcattgtttttgggccttgggcttcatgttagtcattgagttagctgaatttcaatagctcctttagagaaaattactatttagttcatgtgatatgaaaaaactcgttagttgatctttcggtattgaaaaatatattaaaacgtgtctaaaattttaaaaagtctactagatagtcccagtggtggagccacacttctatgggtccccctggaattttcaaaaaggttagtgtctattttgaacttttacaaagattaggatccttatgaaattttgaaaaatctagggtctctctaataaaatttacaattaattcttcttattttttgttggtaataataaagcccttgacttattgcaattaagccttattacattaagccccctaacttcacaattcattctaaattacagcttaaattttttattttataacacttatattctattaaatatatttatcattagaagggctacaaatttcatttaatgcttattttttttaaaattaataagaaaatatcaattttgatgcatactctatcttatttaattattatgatattttactaaatttaatgagttgataaaaaaatatttggatatatagttttacattttttttatagtttctttctaatatcaaaattgatacaagtaaaagaaaatttaatgctcacaatacgaagagagtaattaatagatatttttacaaaatgagaggacaactaatgattttttttcatgctacaaggattaaatagtaaaatatttaacggttaaaattaatgaaatgactaattaatagattttttaaaattttagggcgttttaatttatttttcaaaaccgatggaccaactaatgagttttctcataccacagggattaaatagtaaatttctcttttttaaattatgatgtactgagcctaaagcccttttctcaaatcaatgaatgttttgacctttgattttttttttaaaaaatatctatttcatatagaagcccctatctgtggggtcccaatctcatcattcagaattttaaatgataagatgttaatgggacaacaatttgatatgatgactcaactttgatggcatgtttttgatatttattttggttgaggggacattgcaaggctttttaaaattaaaaacaaacatggtgtgtgggagaaataataggagatgaaatttttttaatgattcatgaggagacaatagagagagaagttgctacaacagtatttagtttggtggagaagctgttgcaaagtttattagaaaaaaatgaaaattttatgcaattctatggtgtgtggtgcaacatacaagggtgttttggtagggctaccatgccttaaagaaaaaaaggagtgtacttggaccagcctcttaattgaattggatcctattattgaggacttcggcaaagcaaaattctaattccttgggacttggtagttataataggaattacataataataagttgttagaatcaagaataataagattctaatattccaacagggataatgaataaatatattaaatttctctatctgtaggatatagattccacctgatttgttattgtgtgataaatcatatattttgtacatgataattgtcacatcactttcttctcattgtctttgttgtcattgtaatatatgcaattgatgcagtcatttggatgtgaaaatggcttaataatttagcttttaatcatagcaaggaaataatttagcttttaatcatagcaaggaaataatttaagtttaaaacatatatgatgtatgtggttctgattgtgaaatggattacttggcaccaagttggatatattttctttcattatggtatatattagtgcacaagagcgagcatttctactgctcccgatctttgcaaagccggggaggttcataaatatgctcttttaattgtttgcaagtccaagtgaacataaaaataataatttgcataattgaagataaaatgaggttttttggtttttttaatgcttgcaggtgactagaattagaagacgaactcaagaagaggg

SEQ ID NO: 5555 - DNA, 1509 bp, Manihot esculenta
  Intron number 1 from transcript cassava4.1_017568m (locus cassava4.1_017568m.g) derived from phytozome v7.0 (chr-ID scaffold11960; pos 110158 to 111666)
catttctagtatcttacatgttcatcctttgcccttttctcgttaaattactaatgcttttctctcatttttctttgtgccttattgcttaagctgtgaaagactccaagacatttgataaaataattgattttaatatgtatttcttttgatctgcattaatcaaaccctcaaatcacttatatacaagcatcatacatatgtgcagactgaatcttcaatttcttgcaagatcttattttgtttactgccaatttagaaaacagcattaggaaccctagtttcatatatgctcttcatatatattagagataaattaagttacttgaaaaaaaaaattttgattaattaattagtacccattactgtagtctcaaagatatatcaaaggctagcaatggtgacaaggatgtttaaatatatttcaaataacatgcatcctttttagatgaacagacttcttgatctcttattcatggagaagctagctcgcttgcatatcatgcaaaagcattcatgatctagttatatatatatatttgaggagttttcataaattttatataatattattaaattgcatgctaaattttctctatttaattagctctttgaagattttgaggattttccttcccatgagaggtcaattgatagatatcatttactttatttttatagaaataaaatatgcaaaggaatcaatgattgacacccccacaataacaaaagttaaggttttcttatttatatggatttctgtatgccatttctgatgtcaaatatctccacaaatcccatattagctatgtgaaagtctccaactataagttaattaattgaagataagtccattttcaactaatgccccaccaattgctttttctgaaaatgagtatagtgaagaagatctcgttggcaagggcagatatgaaatttattatattattctttgtaccttgtaagatttgcatgttgtccaataccagattttgtgggacaataggttttattctatttaactaatgctaataatgcttcccctttgcatctttgcatttgttgctagtgaacttttgctgggtcatctcagattggatgattttcatatatatatatgtgctcctcaaaagaatacatcttctgttggtagctacaacctcaaatcttcttgtctctatggagagagagagaatcaatttctaaaggtctctacatggacctgcataaaggagatattaacaaaatgcttctgcttctatctcccatgtttcttatatttctggaccaaaactcatgagcaagcagcaaaatcacactagggtttcttattacagtataccctcttgcttgaacaagctcaaacactcgatggtttagttaaattttgtcttttttatttttatatacttgatcaaaaccagagacaagtaagctaatatatagggtttctactcatgtttcattcttgcaggatcgagcttgttgttggagaatcaaagtactgaa

SEQ ID NO: 5556 - DNA, 3473 bp, Manihot esculenta
  Intron number 5 from transcript cassava4.1_010893m (locus cassava4.1_010893m.g) derived from phytozome v7.0 (chr-ID scaffold03150; pos 16671 to 20143)
cctcacttatcatacattgtcatcatctttccaaggtattttgattttctgttacctctcatattttttgacagttctttggttttgactgattaattgatgaatttcaaaaactttaaattttaatgataatcctttttaggctcgtcattttaaggtagttgtccataatttattatagttggattcatttctttcttggagcagcatactttctttttggactgccatcattgtcttttacagcttcccttggttttgaattgttgattacaggcctaacaatgagtaagacctatttgtttttgttacaggttataggaagtaaatatgttaatataggaagtaaatattgatagatggatcagttgcttaatcttagaattgtataattatggacttgattttccttcttgtttagattccgtctctcacatataagtaggttgtaatctctattttgaaatacaacaaatattatccttctatatggtatcagaatctcaccatagagatttgaattcttttagagacttagggctctgttcatttgggttatccataaagggtaacatttggagatttagagctctgtttattttgggttactcataaagggtaacatttggagacttatggctctgttcatttgggttaccaataacatttggagacttagggctctgttcattttgagatgccctgacttagagctctgttcattttgagatgccctgacttagagctctgttcattttgagatgccctgacttagagctctgttcattttgagatgccctgacttagagctctgttcattttgagatgccctgacttagagctctgttcatttgagttatccataaagggtaacatttggagatttagagttctgttcatcggggttacccataaagggtaacatttggagatttagggctctgttcatttgggttacccataaagggtaatatttggagacatctggcttcatcgggcacggttcatcgggtactgttcacaagtaccgttcacgggttctgttcttttgatcctttgtttattttgattgttttgggttggttgtccttatgcctgaaattgattatatacgtaacaagttgggcatgattaatatttatgctccaacttgagaggagtgttataggttatagaaagtaaatatgttaatatagaaagtaaatattgatagattgatcagttgcttaatcttaggattctataatcatagatttgattttcttttctgtttagatatcgtctctcatgtataaataggttataatctctattgtaaaattcgataaaatattatcattctatagttttaaacttaaaatttgaaaattaaatagtagataaatatgaaagttcaaaataaaaagaagtttattctaattaagtactatctttgtaccacattacatgtttaatatttatacacccaaatcactaagacaaattaatagccttaaatttagaaaatttataatagtttatctaaaataccctttcatgcttttttcacatgttagtattaaatgacttaaaaaactagtaaggatattatgggacggagtttgtaattttgtagataaagatttaaagtttttaggctaactgaatatctccaatcactaactaatttcctatttaaacaaaatcaagaaatcaaagagaaaatattttggatcagcatttctcacgttgtgaatcgtatgttctggaacaccatttggagaggggggggggaggggtaacgttttaggtaacactgggttgtcataaacaaatgaaggactgaaacctttaggaataaactgtgggcgtaatcaccagttgtttgaatatgcttaatgcttctcattcaaaacaaaagatcagtgaacaaatgaaagaagtattgaatgagcatcccttctccttattaaaggaatacccttccctcaaataaattcctgcttatcacaattactaacattgtcatcccattgcacccactgtttctacaaccaaaatgcattcttagctactgcaccaccatttttaccattaaatctttcaccaagcttattacgtaggctacattcacctattccattctgcacccattcttgtagagcaatcagtccatcaccagtcaccaccaccatctttgttgcattgcttctgcttttgtttccattactgtaattgtatatcaatattgattcccccatttcaccaatttcatttttatagttaccaaaaattcaaaatcatctcccctgacttaaagttgttagtagaactatattttgctttaattttaccatgatcatggacaatatatttccctaggtaaacatcatttgcttgctatccatattatttattaagagtgaagtttgaacatgcacagattatcggggcattctatttgtgagttactgtagcttcctaagagtgattgggcacatcgagggacatcacaatatgtataaattactcttgtgctatggagattcactttgtagactatttttcctattagtaggtaagagatttttatgagcagtaacaaagttctaaaacaaatgattttcctactagataaaatgaaataaacagataaagttgattctgatcctaaaagaagagataagataatgaagataggatgtagataagcaaccatcttgataagatgtgaatgaacaaccagcttcttaatcctgcatgccgagagtcctgtgccgctggtaaagctttccaacaaatgagtccataacactgacctacagaaggcagataataaagtgcctggtaaaattctattatggatactgagaaaaagggtaagtttttatccaacttgtaaatgcttttatggatggaaaaattagttacaaaaagtgaggacttttagaagtgacgatgacaaattttcaactataattatctcacaagtagaatttccttttgtccttgagtattttgttatattcttggatgaattgagcaaggatacttgagatgatatgccatgatccatgaattattgattagtggggttagataataatataaattaagatgcttcgtgcatggatagacaagaaaggaacatctacaaaatggataacattagtggaaaggtgcaggtggcaccattttaggacaaagtttcaaccagtatattttaaaataatttgtccaagtgtaaagggatcaggaagtccattgatgtggaagattgatcagaaagcccaaaggagagagaggtaaacctatattgtggtcgctgatatatctttttgtcgcttaaactactaacatgaagttttgcattttattaattaccttgtggatctatcaatatgcatcatctatttatttataagagagagtaaatggcactggttctttgaagtctttcagtggttcttggcttgattatgcagattgtgaga

SEQ ID NO: 5557 - DNA, 951 bp, Manihot esculenta
  Intron number 11 from transcript cassava4.1_006875m (locus cassava4.1_006875m.g) derived from phytozome v7.0 (chr-ID scaffold06446; pos 194927 to 195877)
aattaaagctctgtagtgcatatcttgggattccagtaagtttatgatgtatctatggatttaacgttttttgtagatctaatattcttggtatgcttagatttgcaactgctttagatatatatatatatatatatatgttatacgcaccttaaacttattattactaactagattcgatatggatgcccttgtctaacaagggttgtcaaacatatgactacgagagcgtttggtttacccttttgatccagcttataactgattagctcccaaatagctaaattgtaattggtaaatcttaaaaatgggtagctgataactgataggtagcttattaattactttttcaatcagttttaatttgagttttttctcatacgctaatagctaatgaaactttatattttatttagatcagattaccctttttagtatatattaattatcaatttttcatattaacataaatttctatatgtattaataaagtatttataattataaaataaatatcatgcataaaaaataaaatttattttattaataatcatatttttaaatcttttaaagactatatgataaattattaatttaatgtgtattttaataataaataaatcatatataagcagtaacaacgaaaccttatttatcaaatgctttgaatgttttagctgcaattagcaaacaattatcagtcaccaacgagttatcggctatcaactatatctaacaattaaactaaacaagccctataccttgtagtcctttttatgatactgaaaaataggttacaatttaggcatgacctgctgtctatattcgtttggatcaatttaagaatttattctttttttgtagttaaaaactagtgattttgattttgtctctcttgtttaatttaacacggtcaacttcttcagggaagtcatagatcaagagacaatt

SEQ ID NO: 5558 - DNA, 3058 bp, Manihot esculenta
  Intron number 5 from transcript cassava4.1_012436m (locus cassava4.1_012437m.g) derived from phytozome v7.0 (chr-ID scaffold11581; pos 1048100 to 1051157 reverse strand)
tgaaagcagaattggtaaaattaataatggttttggtgttcctgtctaattaaatagtactcatttaattatatatttcaacctccagaataccacacttgctgaatggtagttgtttatgggtagggtttggtcataatttctaaccagtctgaatgattaccataaatagattatgccacaatgttcttacatcaatatatgacaatggagagagatatttttgttacattatctttcttctttctactacagttgaatgtcttcaagaagagccaaggccttttttttggggcctaatgaagtgggagtaggactgggaccgaaaaatgtggggttaaggcagagtgggatttcatctctatttagcctgagagatacttgtgctgtgcttgttcagaaggaaggaagatgaaaggaactgtattttgactctatgagttgagatacactttctccactttatgcatttagcttatattgttgactggatttcttccttctaccaaacacagcctaactatcttgattatgttggtggactggatcaggaagcgtgattttgccacaaagggctttttatctattaaccaagattagtattaagatcatgttagaatgtgagttgtttcttcatgcctatcctgatcactatttaggggttgtttggttcaattctatgtcttaaaatttttgtggcgttcaattgaatttcatgatttgtgtattggtttgaataaaggctagaattcaattttgtggaattggttataactaaaataaatgcctattaaatttgatggaatcttaaatgagtttcatgatgtttacataaaaatattttttagactaaaatatcattatgaaaatatttaatctcaataatttgtctcttatatttattagttacataacttttcaaatactattaattaattaaacaagaaatttatcttatctcttcttttttcagctttttactaattttttgtacttgttcactttctactttataaaataaaaatttactttacattgtttatgttgttatgtaaatctcttacattttgatatgtgagtttattttatgtttattaatatatcattaatgaatttatacatttcttaattatttattattattttatattatttatatattttattattattttgtattatttatattaatattattttttatattataatttatatagtttattattattttttatttattttaaaaaattttatacataagattctttggtagagtaaaaaattataattttttaattttatttgaggatagtttagaaaatgcaaacaaatgaatttttattatgaaactaaaccaaacatgaattatatagaattcagttgtactttacaaaacttttattcatggaattgaaccaaatactatgttattggttgagaaaagcatagatattggaatcacatcagaaagaaaaaaataataataatatggcaaggaactttcaaccacatacagcaatagcctataacaatcttttacctttcagtcaaacagatatgtgattagttcactgcaattccctaattttacatttctcgctcatcgtctgcatctgggttgtgcatcgcaggttgcattgatcttttttaggatccaaatcacatggtatgtgatgcagatatctcaatattgtgaacccatgtcttgacatgagagaaaaagagggtattgagagaacagctttaggaaggtgaagtgattgtaggactcagacatggcttgatctaagatgaaatcaccatttatataaataatgtctggcttagatagtgagattactgttatattgttggtcttgtgtggttggtgaaattgcacaagttgtatgatagaggccatggtactgccaatgacattgatggcagtctgaacattctcagaaaggataagaatgcaaaagggaaagatgaaaagaggagactgaggagatagtgccattctagagcctagcctagacctgaatatagctaagttagtgtctgggcttgttgaccagggcctccatgttttgttgagcgcatctctaattggaactttcatgatctttttttctttccttttatttaaggaaaaaaaaactcattggcccttgaataatttcagttaattcaagggttatgtagttctattcatttaatttcacatttaaagaaaaattgaaggatcttgtttaatactgtctttttatccatttcaaatgcaattatgcattcaataataatttcattattgaaatttagacaaaataaatggaaatttgtctacttcattggctctcttacgaatgataacctaatagtaggactaggaggctctataaccaatattaataagtgtaaacacatgtcatgatcccagtaagtagcctagcaactaagacctactaactaagacttgccatatattaattgatgtaccccctccctgtacagtatagagaacactgcattcccagtgtgtgccttacattaaagcttggccggtatactgcttgtaatgcaagtgcttaagctatgtttgtgtaaatctagagagatgaacaacttgtatcattacctttcccttttaactcccaaaccttactggtggtttaccttaattcaaggacttcaatttggaattggaacagttgtctgtagaagatgttgtctagggctaaccaagcaccacaagtacctcagatcagattgcagctagaaactatcctaaaaatgccatctgccgagctcacatttgaaaatgatgctggaaatgttctgctcaaaaagcttttaaatgtctgtactctgtagcattaatttcatagattctttctgtttcccaattgaatagcaaattaccttgggacttatatatattatgtataaaaatctgctatcacagcacaatatatttattacattttattaaacaaattatcatacaggtctttttcttttaaaaaaaaattgtcttgcaggtcaatctcttggcaaagcatattggaaaatcacc

SEQ ID NO: 5559 - DNA, 1110 bp, Manihot esculenta
  Intron number 6 from transcript cassava4.1_034124m (locus cassava4.1_034124m.g) derived from phytozome v7.0 (chr-ID scaffold09360; pos 72198 to 73307)
cacaagaaattatagaagaacttctcaaacctgtggtatttactccactcttcttttttatgttattatagaatttgtagtcatcatggcactgatagtcatttatgtgttttgtgtcctaaagcataaagtttcggctgattctatttttttctacttgttaagactgtttgaagaggggaacatcatgaaaattctacgctccatgtgtttaaactcatggaaaatctgctttctacttttatatacatgggtctaactgtttataactttgtttataacttccattgaagctgtgtgtttattatgaaggtgggcttttcagttaatgtttgagctttaaagtgattttattgttacatatgaattaagtgccagcatctgctgctcagaataaaataaagggagagctgttatcttggagggtgaaaattgaagtcctattctgtttaacgtttcccattttgtgccacgagaccaaaatgctgcataatctgtagaactaattctaactacacctagttttaagaatttattttttctagaagttttttgcaagctcttcctttaaaggttttagccaaaacattagtttgggagaaatgacaagagttcacaagttcacttcagtttgagtaaagggatgattcagtttcccagcctcggcgtatgtctcatgttttggagcaggattcttcattccagagaagaatagaaacagggagaaatagagaaagaaggaagagaaaataggagaagaaatatagagaaatagaacttaggagagagaaaatagagaatgagagagggaaaatgattagaatcttgatatttatttgggagtcatctgctactcttgcaccctcttgcctaattcctgtcaggtataacagctacttgacttatctaactacctcatgtagcttctcaactgcatcttctttttctactctttttctccataaaataacatccccttattcttcttatttatagtcataacaaatgaattctgcgggcatatttactataacacatggtggggtttgatggtaaatgagcatttcaatttttcttctcttgggtaaagtgtttttttccatgtgcagg

SEQ ID NO: 5560 - DNA, 1841 bp, Manihot esculenta
  Intron number 6 from transcript cassava4.1_011177m (locus cassava4.1_011177m.g) derived from phytozome v7.0 (chr-ID scaffold10998; pos 25365 to 27205 reverse strand)
tgcggtttgtgttgttggcggtgagaggttagttttacattattaactaatatttctaatttgcatttctaaatcttgtgcatttgttgggaattcttttcttgccatgaggtgctgttactatctgacatgagcataccactggttatacttccagttgtccgttatatattgttttttgtccttatagtaacaatagttctaattatttaactaaaacatggaaccactgttgtgagaattggaaaaagagctctaattattcaacttaaatgtggaaccactgttattaaaatcttacgattctcgattgaaatctttttcccacttcatcaatttgaatctatgggatgaatcttaaatgtacttgaattttacgaattctcggattgttttacattctagcaatttgaacctatgtagcaaatcacaaatgtacttgaattgtgatcaagtcgaatgaatcagtagtgaatctggtgaaacaaaatgaatcaatcttgcgtttacttgattcaagggattaatttctaaagggtttttagtttaagattcattcatttttgccatgaaaagtgtgcataagatctttctttagttattttccttccatcacccattcttttcgctctccctcatccttttcttttagttcatttacttctctaattgtagttgtctaagttatgatattttatattaataaattttcatattttattataacttgctatacttttttttatttaattatttgatcaaatttaagtgagagtttcaacacatatgaaatgataatcattatgtataattcaagagttttgatttataatataaaactatataacataataataacaataatatattattctaaaaagtataagaatatcataatcacataataaatatagaattatctttgatctaattaaaaatatgctctattatatattatttttaattaaattttaaaattttttatcaaagcttattattcgatacgattcttgattcctggttcacaaaatgaagatttcgattatcgatttggcaactatgcatggaactttttgttgattaatataccttccatagtaatttactcttcttcccaaggacttcattaactattcaaaatgttcatttgttgcaaagttgcaatgagttacaaagttgtttcatctctaattctgaggttttgtcaagtaaggttgattgggattttcaattgttcattagttgatttggtgttcagttaacctaaagaacaaataaatcagttgtctttgtgaatgatgagttgcttcattgatttcatgagagttgcgttgcccacttcttgacatcgtctcctaaacatatgtggttcatttgtagctttgtaccagtgtctattctttcttgcttcctgtgtatacacttcagggttgttgattacagctgtaatactattccagttactaaaattagaggtattgctaagatcttaaaaactcaagttgtcagaaaatgaaagaagaaagaagtttcattctggtggttccctagtactggatctgaccatgtgcattacatccagttcatttgcaaggttctgggaatcttgggcgtatgcgagttggagttggtacaatttttatctagttttccatttggagatggcccacaaggcagtgttctcttaagcgtttcattgtaaattgtggaacaaaagaagacttgcatattggcatcaggactttctcctgtggttatttctttgctgttattttctgggtaaaagttgaatgtttttttttgcagatctcttattgcaaatttgtcagctgcaaattgtt

SEQ ID NO: 5561 - DNA, 1945 bp, Manihot esculenta
  Intron number 4 from transcript cassava4.1_022688m (locus cassava4.1_022688m.g) derived from phytozome v7.0 (chr-ID scaffold07519; pos 95838 to 97782 reverse strand)
tgattcctggcttatcaagtgactctgctgctgctgtaagtagaacttctataaatttccttgtaatctggttacaaatttcttgatatctcttgggttcctttggaaactgaaatttcagtttgtttcgaagttgttctttattattactattattatatttattttattttttgttgggcgtaaaacaatatatttgaatataaaagattggaagtgcaagggcttaactgccctttaaaattttttaggatcttggttgatgacttgcaaaacattattaactccttaatatttgctacttaagatccggattcttgtcatagaataggagacgtatgtttcaagcctcttttaagttttttgagatttgtgttctgtaattttgtgctgtctatatgtgaatgctaaaaagaattctattatgaatcattctatctaaaagcactaatttatttgtttattcatcaaatcaaacccagaaaggatgtctctttgctatagaaaatccaagttctttaatactgctgaatttctgattgctgtaaacctttttgtagatgagaagaaccagagaaacacatatggatgtttttttcacattcaatctattaattcctaaagaactcaatgcaaaagagcaggggaaagaaacaaagatctagctgagattatttgtaactttgatataaattagaattagataaaatgcagaggctggcttctttttatttcccccttcttcttcttcttcttcttcttcttctttttcccctttctatagttaatattgtgaaacaaaaatggcttacagtattctaggaagctagttttgcattgtgcaataggggtgtccacggttcttaggtccctaatcgagcccaagaaacatactccgattctttttttttgaacaagcaagcacaattattaagaaaatgccagaaaaatctggccatacaactaaaagagcacactgaactgaaatttttttacttttttggtttttcactaagaactgaacttaaacaattccggaatatcgaaccgtactatacttcctataatttttaagttattatatacttctatatatttttatatatctatatattgtaattatggataattacaaactattattatcttttaatgctaatgtacattaaatgttatacttatctactattttttaatccttaatttcatatatatatactttgtaattaaagattatataagttgtaaatggtttaaatgtgtattaaatatatgatataatttgtattcatacctaattttaaaacttaaatactaatttaaatataaatttttatgcaaaaattatataaaattattctcagaaccgagaattatactgaaactagaaatgttgatctggttctagttcataggtagaccccaaaccaaattcggacaagcaatcctctagtgtgttgggtgcatcaaactgaatgttgcttctagctcaatgaatgaaaacaactaaactaagagacattcaaccaaagctaaattctcagtttccttcattcaaaatttttcccccaactatcagcaaatatgtgcaggaccaacaaaaatgatggtaatggagatggaagtgggacttcaaaaaaaaaaaaaataccttcttaaaatgttttaaacacctattattcattagatttatatgtataccgtttttctttttaaatcaggttggcagattgatagtatggattaatagttgcatgttatggattttaagtccatatgcaagcatgtagtattgcaattatacttgtttagctcatttgctatgaattacagtatgttaaacatctcgaatatgatgtttagataataggataatgatgcataattatattacttgatgtgaaatgcagtatataaagcattttgccttcagtacagcaaaacg

SEQ ID NO: 5562 - DNA, 4277 bp, Manihot esculenta
  Intron number 3 from transcript cassava4.1_015770m (locus cassava4.1_015770m.g) derived from phytozome v7.0 (chr-ID scaffold11373; pos 22926 to 27202 reverse strand)
agaagatcccgtttatccttgtcattaatcttcaggtatgtagttaatgcatttgtgtatatccctcaatttgacatgttttcatcaaagggtaaatgatcaagaaaacctaaaactttaagcattttttttttccaattgtgatcacctcttgtagaattatcaatattgtccataaaatttggagcaattattgcaacctctagtttctcttgctacagtatgtgcactgttgatgtggtgcctgccttacattgcttacttcaataatctttttagatgaatagaatgagatctagctcgaaaatgagagaaagtacttttttttttttgtacacagaagaaaataatttagtacgaacttccctatcatcttgttctcattctaatcaacattaagagctagtaaactaaaccacattggcaagaattcaatagggtatatgtgttggtgaaaaaatttgggcattagctgcaattgtttaatttctgaaattcatggaccccattggtaagtttaacataaagtgagtaatgttttctgtcgtttgctttttcatacatgaactttcaagcattaagtatgaattactgttcaccaatttttattggtccatctgttttacgtgagattcattttcatttaacattcaatagccacggaatagagatttgatttccaattggatgatctcatttgagagatatgatgaacttgtttaaacaagccatggatgaaaatgataattggtatataagtggaattccaaaaataatgaaacttatcattactggggataaagtgaattagttctggctacttgcggtatggggtaattgggtgaataacaaggagtgtgacaagaacttccactaaaaccaacatttatttgaggaaagaagggaactttatttgaattttagatcttggcatcatgcaaacacaaattgaaggcctattatatcttattgataattggaagactaggatgccccatgtaactttgacataattctctatttacattcaactgaactttactttattccctagtttagttgttcagttgcatgaatcactttcttttgttcctatgaacagcattttttattgaaacacttggggagcacatctacatcatgccatcatctctattctctgttatagaggacaaggacagaaatacacgatagcaacaacaaactgctgctttcattttgtctgattctacatatgttaagatgtagaaaaatattgaattactccctgaataccctaaacaaagttgcctttagttgttgcaaaacgaatagaacaaagaatacaagggaaactctcaagtttattttagatatcaatgtggataatgctaagctctacaaagatacccaattggcttaggtatatatagtatagtaactagtcctaccagtgctaagattaggaaaatcaaaatagaaatattaaccaaaaataattaagaataataaaccaattcaaactttctaacaaacaaaataatactacttaataaatttcctaaataacttgcaacaatagatacatgtaaaagactaaaacccctattaaaaggtcttgtatcatttcccctttgattgagaagaactcaactcctgagagttgaactgccaataagagtccagtagagaaggactcaaagtttgaaattcatctccattaatccatgtagcatcagaatcaaaaccaccatgccacttcacaagaaacatgtgaaaatcaccttgagaggaagtaacaaacttgtcgtctaacaagactctaatgacatctttttctcacagaagagatggctaatttggcacatttttacatacaaaacattagaaggcaatgtaggaggtttaaaatttccttgataaggtgagaaatcctgcactgtacagtgctaatattcatatggatataggcaagttaaataaatatgcactggatcaatgtttttttcaaaatggagaataggccagcaacttgtgtttgaaattcttaaaggaattgttagtattatctttctgagcgaacacaaaccgtgacacaatcaccaaccttgacctctttattcctacatgcaaatcagcaacaagttagttattttcattacttaatgcagtctttcacctaatcaatagcatgcaaatcatgagtattgagcaaaagtttcatcaggttgtaaatgcgaacatcaagaggaagaggaaaaaggtcgttgagatctaaggagaatagccatgaactatcccaaatatacttctactttttgaacaattgacaaaataatcataggcaagctcttatttagataaaacccaatcctaattaccttttgtttctccctacaacacactgaagcaaatcacttaactatgattaataacttcaagtttgactatctgtttgtagatgaaaagttgaagtagtcttcaacatagtgccaaacaatttccatatcgtcttccaaaaataactaacaaacttaacatccttataagacgtaataaaagaaggttaaccatgtttgataacttaccaaaagaacaatgcaactacatgtaaaagatcaatgatcttattacatggaataaaatgcgtctcttagaaaacctatccattgttactaaaatggggtcatattatcaagttgttttcagcagagcaagaacaaaatccatattcatatctctccaagggcatatggaataggaagagtagtgtgcaactgcaaaccaatgtttatttcttaaccttagctaaatgacaaagtgataatgtgatacaatttagcagcatctcttttcaatgaaggttaatagaacatgtccttaataagagcaatggtattatcttcttcaaaatattcgactaacccacttatatgcaattcccatactagaaactcttaaagtgaatacaaggaatgcacaatttagttgctctaaacaaatgatcatcacaagtcaagaaagttaccatgattacttatacttctagattagaccaaaattaggacaagtagaatatgtgctacttgttctatcaaaccaaaaatcttacactcgtcacatgaagaatagtagatatacaactaagtatgccaagtgctttattttcaagactagaataatatttaagaataaaagagtgtttattgagaaactcaacctaaccagcatgtgtagaatttaatttcttttgagaatcaaatatctcaatgtttgatcatcaaaaagatacaacaatatcttgtggcaatagataataatggcaagtgacaaggggactggactatagcataaaattccatatcacaagtagaatgtttccatttagcctcatcgaaatttttactaaaggatgctataaggtgatgatctttctgattgaagacaactcatatgttaacacataatgcatcacaagcaatttcaaagacctaaaaattaggatgactcaaagcaagcgtttcaaaacagagaaccaacaagaacctgccaataagtctaacatgtgctcaagtcaacctgtactttatatcgatcttgttaatggctctactatctatactcatcattaaagaatcatctttcttgggtgtcaagattgcaagtgcaacacatggactaaggctatatctcaaaaatccgttcactaaaagttcttctatttaactcaatttgctccttgaaattcatcctataatgaggaacattagcaactgtaatcctagaactaagtcggtagaatgtcaatatctctcattggtggtaattcaccgggtaactcttcatgcataatgtcatggaattgatgtagaaccaataggaggaatagaagtctcaaatttctatcaattcttaattgcctgtatgaattctaacaagttctaacatacctagatgactgatatttatagtataataacaagtattgcttgtactagaattaggatttaggaaccccaaaataataaacgctaaacaatgttaattaggaatattaaattaactcaaacttcctaaaatggattgacctaaaaccctagtaggtcttgcatcatagttgtagtgaatgattatgctatgatttgattaggttgttaattgttagtgaatggcattgatggacatctttaatttgatatcctaagatattatttggacttaatagtttcatctgtcttataatgaagaatatgtttgccatatttctttttcagattccagcaaaaccaaactacagt

SEQ ID NO: 5563 - DNA, 1826 bp, Manihot esculenta
  Intron number 2 from transcript cassava4.1_015274m (locus cassava4.1_015274m.g) derived from phytozome v7.0 (chr-ID scaffold00253; pos 12366 to 14191 reverse strand)
tgctgatctgccgtttgacaagtatgattctaacttgtattaaaccaatatgtactgactgattgtgaatgatttgtgtcagatttttatccttaagaaggaaagaaaaggccatttcctaatctattgcattcttcttgtttgttattttactgctttttaaattgcaaaattcaaatctagaaagaattgataagcatgatcaaattactattaaaattactaaatttacatttatacaataagaaattacagtaatttagaaattttaggaagccatcttactgttgtctccattgattcactttctatctatgtttccgcatataccttcttcacttgtatcgtttgtcaaggagttttttgttgcatggtatggtttaagtgctttattacagcaaataacatgtagcattggatgcttatattgagataaaaccttgtagttggactccttctctttagacctttgaaagaaatgttcgcatgcagactattactaaatttgttattgtgtatgtggcaatgaacttggcattgagtaatgatgagtgatgaaaaagaattttcttggctaatagtttttgcagtttgtgttgtgctttgttggtaataggagcatgtattgagtatggaaaattaacttctttgaatggaataagataaaagatgctatagaaacaaagcttagataatgcacctttaaatgagtgtagacatttgcatggtggaagctgctagtaaagtgtaagtatattcttaaatactaagcattgttgacacgctaaggatataatgcgcattctgagttattgactactggagttgttttagttatgtacaatatcatacttctagttttttctttttaaacttttttggtcagttgcatttctgatggaactgacaagaggatacattttttgtcaagtgttacagtgacatggatgaacatgtaaataagttgtagttgctgttaatatatgcttcaatttttcctcattatgcgagttcttattttttatttttctaatacaatttaatgaatgtaagtaagggttaagaaagataatctgtggtgaactaattataagagtaataaattgcctcaagaaataattgatttgtatagaacaaaattaaatattttagcattgttgagtatatagcattattgtaaatacaaaagcttaaatgaaacaatgtaactccttccaatggtaagatgattctttacctgttcaaattatttttcatacgagagagatgcttttggtgtgtacttccatagagctgtattgccttttatccacttgttgcttacccattctgtgtatctgtaaattataccttatgctttttgtggttgagttgatgactagtgtgattgagtattataaattaatgtcaacaagatttattcaatacaatagagtagccaattgtactccattctaggtccgtaatcataattatccataatgaagctcatgaagaaaccactgggttgcttttttttccatcagattatatcttcagattctatattcatttatccattaatatttttggtatatactgattcttctatttctcttccgtgtcccttaaggaagctaatgcacctcctgtttctttgtggaggtgctgatcctcttccttatattgtctacttgtaaaattaccgagtttgcaggaagccacatgtgcaggcacacaaaatgtaatttagtagttgcatgtgtgttagataagttactatatcgtggttacttgcattttttaagttccaacaaattctttgcttttccaaatttcagaatcac

SEQ ID NO: 5564 - DNA, 1662 bp, Manihot esculenta
  Intron number 1 from transcript cassava4.1_010090m (locus cassava4.1_010090m.g) derived from phytozome v7.0 (chr-ID scaffold07891; pos 99180 to 100841)
ctcaggaacgtatgtgcctatgttcagttttatttggtgtacaggtgtttgaaaatcaacttttctaaattgtggggaattaggatttcagtaaaaagtagttattctgaatattgttttcttttatttgtgaatatgcaagtagcatggatgttgtaatgaaattataatgaaaagaaactaattgaaacatgttaaattctcacatttgtttgataggagtaatataccccttgtagtgccttggatgctcctcccttgagctagattttagatttgacttaggcctagccctttttttaaagaaaacatagtaatagtttttgcagtttctgctttcttgcaccctgttaatatgtttcatatttgtgtcaattttgttctttagtaagcatcaaagcatatttgataatggaatcagcagtttttattcttgctgtagttttaagtagttcactgatatcaaacatagtgtccatctgggaagtaaacttagggatttgcccagcttcctttgctgtgtccatgttgagacctaagtagtcaggtaattcaataaagtgcataatggttatcatttttttttgggtaatggttggatggtatggcataagagtgtgataccataagttcaactatttatgtgaattggtaattcgataagtgatgatattgttgctgctgtgttcattcaggtcaggtgtagcgtccacctggtagagtaaacattagggcattgcctaggttatactttttgcatttgtctcaagtattaagtaggttgttgatacttgaaaggcgcatggtggttattgtcagctgttttttttagagagctgtaatgcaagtgttatatacactcagctatttatatgagcaggtcagtaggtattgatccttgcgataatcttagaattaaagtctggtgttgctatcaactgacttcttgttcttggtaggccatatattgcctatgtcaaggcttaagtaggtgacctatttgaagcattcattataatttttaatgtttcattatctagacaagagatcagtttccattgaaaacagtttttcctttttaacataaaataatttctaaatgcttgcagggacttatgtcattgtttaagagaagaatatgattgaggattgattgaataagtggctagcttttgatctcacttatttatgacaaattggttgtatgcatttgagagtaagcatgatgatggtccagttctaggtcgggccaggttcagaacctgcagttttgggtcaagtagtgctaaactttatgcatgattagcaagttggtttctctttggtgtcagaacctgcagttttgggtcaagtagtgctaaactttatgcatgattagcaagttggtttctctttggtgtcttgattgtttttgcagtcataacaataaatctgttatgacctattatctgccccccatttaccaatttatttttacaacgaccactgaggtagatttttcaatgtaatttgcattttcttacactttcttggtctttcttttgtttctttgagaaataccattgcatgataagtttattgaaatcaaatgctgtttctgtgcttgatgtttgatgaagaaatgagagttctttctgtggcaggtaggtcctggtgaggtag

SEQ ID NO: 5565 - DNA, 1125 bp, Manihot esculenta
  Intron number 1 from transcript cassava4.1_013154m (locus cassava4.1_013154m.g) derived from phytozome v7.0 (chr-ID scaffold11287; pos 69023 to 70147 reverse strand)
gactacaagatcaaaccatagaaaacctcctcgtatgttcttctctctttaaaagaaacaaaataaaaaacatagtgaataacgagttgtgggttcttagattctaatcgggatttttttttaactttttccatgatattacatagttatccttctattgattttgtaagataatggtcttttttttttaatttttctttttggtttggatattctgggatattggagaagttactgtttggttgagttattgctttatatggtttcatttgtttttgaattggtagcaatgatgtggttttataatgatggtggaatttttctggttatggtgtttcatgttaggcattgaagtgtctaattgatagctttgataatgaaacactttcttttgagggttacagtttattatgattctgaggccccacatactgtgttcttggtgattgaatttttggctgaaaataagatgcatggtcaattttgattgttggtgtacttgtgctcttggagatgatcttgagtggttccttgaccctttttgctcgttttgttctgtttgtttaaggtgtttgttgtcatgtgaaattcacagttcatgctttgtattttcttttagtgttaaatatttctctatacttgttttgaataatgatgattgtcagtttggcatatgattccttttcttttttaaatgaaattttagccagctagcttcacagccatcatttcaataatggacaagacgttgggaacctggagttaaatgtttccttttggtctggtttgatagagttgtgaattaaatttagtcttatacttggtagtctccaactatatggatgatgaaatgtctgatatggaaacatggaatgaagaaaacagcccctgaaaatggaagttatgcaggaagacattacttgtgtcgcatttgtttagtttatgcttaaccgtgggttcttcttgtcgttttctattatttgtcatctgtggttcatttaagagaccatgtatttgtttttgtttatgtttctgataataattccctttttcatgttatctgtgaatattttagcttgttttattctctttgcttccaggtagttggcagccaactgtaccatc

SEQ ID NO: 5566 - DNA, 1213 bp, Manihot esculenta
  Intron number 1 from transcript cassava4.1_007571m (locus cassava4.1_007571m.g) derived from phytozome v7.0 (chr-ID scaffold03245; pos 97198 to 98410 reverse strand)
aagctccttctcatcaacaccatactcatcagcctgtgagtctctctctctctctctacttcttttcgtccttttaatatctgtagacagtgaatgcattgtctacgatttggttttgcaagtgcctaaaagagaaggaaaagaaataaaaactaatgcaacttttccaaatttattggagattttgtcttcaggcttaacttttttataactagtttattgatttctttatgattatacctaattctctgcatttttctttattttctttcttcttaacaagaacaagaacatgaataagaagagtcaggaaaccaaaaatccaagctcttcttgttcttttgctcttggttaagcaattgcagaagcctcattctgatgaattgaatcccaagaaataaaaaccccaaggctgtgttattatatctgcaattttcttctgcttttttttttttatgggtttctcgacgatatatttttcataactcttcaccaagtaaacaagccatgtaaattttcttcttcatcttcctctatgttctgcacagaaattataagttttttgagataatgggagagaatgtttagtgttttggctgtgtgagacttttaaaataattggatataaattaagggtctagttgataattctagtataattatttttttaaaaaacctttaattgactaagaataattttagattattattaaaataatttcacatattacgatattgatcttttgaaaattattttaataaattcttttttataataatatttcaaaattcttattttattttttaaaaaaaacaagccattatttttgagtttccaaacttgaacatgccaatgtttatatagaaaagcatatttttaaccaacccaacactgccaatttttgtgcattgattttggtaggttataatattctgaaattctgtaattttttttttattttatttatcaagaaattattgcttgcaactatgggagtcaaaatttttctgtaaatcttggaagtgacctgccagaaattccaactcatacacatatatattttctttccttttcttttattccctcccatgtggcctgctacaaattaaatagaaataatcacagattgattaaatatctatattctgatttggtttatattttggatatcaaaatttgataaaaaatttgtttgtaatgaatcacagactg

SEQ ID NO: 5567 - DNA, 1821 bp, Manihot esculenta
  Intron number 1 from transcript cassava4.1_029935m (locus cassava4.1_029935m.g) derived from phytozome v7.0 (chr-ID scaffold08860; pos 53773 to 55593 reverse strand)
aaagggaagctcttcgaatactctactgattcttggtattattaatacgtactactctttcatgctttttttctatctgggttttgaggttttcttttattttttaagatctgagggttttctgtattgatttttcctttgtgtcttcacctgcatcttgtttggctacactttctcggaaaatcgtctttatttttcctgtctctcttttctttccccccaagaaaatcagtcactgacgcttgcagataaaaactattaccttgttctggactaaattcatgcacagataattatcagctcaatttacgtacttttatgttattccttgtactcaattgatcagaaatgtcattttgaagtgaagttcttgtctttcttttctgtaaagccatctcatccaagaacagctccagacaatttttaacctatgcttcgatgcagtacatgtaatgatctagtctgaatttcatctttttttcttgtctctctattttttgttcaaaaaacaaaaatgtctgcaaaagctgagacgagttctatatgaaagtatattggaatttgaagcttagtttataacaccctgctggacaagtgtcttagattcgaggagtactaattagaaacagttgtattattgtctgcatgtatatatgcagggaaactctttaaagtaaagccaaatctaacagcaaaccctactgtgtgaataaggaaaagccgatcctgttctgcccgttataaaaaaatttcatacatcattttgaaaataattttcttgaaaataaaacagctatatttgttttaattcttgtttattaattaataataacaaaaaaaatactgttatattttagaaaatctagaggagggtgatttctgagagaggggggaactaatttgatggatgcttaacttaatctcttaaatattttattttcctttttttttaaaaaaaaaaattcttgcttaatattactgcatgatttctggtcataaccaattctttatatttaaggttttatataattcatgtccaattaataagcaatctcacattattatgtgaaagacatcagcaaatataattatctagatttttttttaattattgtttggcatgaaattagattttcctaatattaattaataaatattaattatgcatacttccccttagtgtatgaacaattcaaaagctagagaatatgtatttctgctgtcatctggttaggaacttatcttgcttgatttttccctactatgcctaatgtctactgagatttatcatgataatcacataatttattaattaatcaatttattcgatattcaaaatttactaattcgactaatccggatttacgacgaactatcttcgactcattagaagggcaaaacgctctcttctaagtttttaaaagtattatgtactcagaatttaaactcgagacaatgagtcggacaaaacactctcttctaagtttttaaaagtattttgtactcagaattcaaactcgagacaatgaatcgggcaaaacactctcttctaagtttttaaaaatattctgtaatcagaattcaaactcgagacttctaagtactgtggcctttaaatcaatgttgtgcttgtagataaggataatttgatattatatatcctacatcttcatgatgatgaaatattcagcggcatgcatgtatgttctcttgggaatgtttggaaactctatactagtggccactttctagctgaccattcacttctatttcttgatcaatctttaaatctccctatgtcaaatttctttttgcaacagc

SEQ ID NO: 5568 - DNA, 1610 bp, Manihot esculenta
  Intron number 5 from transcript cassava4.1_015502m (locus cassava4.1_015488m.g) derived from phytozome v7.0 (chr-ID scaffold05219; pos 80313 to 81922)
cagtggaggtaagctttgtgaaaatggaggtcatgaaatatgatgacagtagtatatacttttaaaatggtaatcttgcaatcctcgacattttgcttgatctattctttgtatctcattcaattattaatcaagaatgttgaatggcagaatttctgtgttcggcctgcctatttatacattttatgcatctgctacagaaaatgcctattttatattgtctataaatttgaaatataatatacataggcaaaatacctgttttatattatctactaaccgttggttagaataatcgacatcatattcataagattatattaaaaataatgttaaccatgagaaattatagtaaattagtaatgttaactatgagaaagacaataaatccatagagaaactgtttaatatagagcttattatcaatttgctatatattatgtcaaaattctatagtgatgttacatatctattattgatgagatgctcatacacatttaataattgaaacgtgtgtttggatgtttaaaaacttatataactaatgatgaaaactgtgaaatgtgggttttgcataaattttatatgtatatatatttatgtgatgcacaatcacacaaatactcaattactaagctacgcgcttaatgcaatgggaaagaagatgtaaattgttattatagtgtttaaacacccaaaaacataggtgatccttttgaaagcttgctatagccctgcacaatgaatctaaaaatagatttgagaaaaattatgaaaattttaaaattttttaattactataattttatactctgattttaattaattatatgtgaatataaataaataattaaataataattttatttttaaaaaattaattattaaccaatatgaaaaaaattaaaaatgaactattgaaaaaaattaatatcctactttttcaagtgtagatctaatataaagtagactttttgatccatttatacaaactgatctcaatccaatctaccacctacgattaaaattctcttaaaagtcaaaataaaagactaaaaatttgtttgctaggtgagataaaaaaaattaacccacaatatagctatttttctctccataaaaaataagaaaatagaaagagaaaataaaaagataatgagagctaaagaaaaaaataataataaggagctctcattattggttgagagaggagaatgttcttaaattaattagttaaattaagttatattaattataattaactaaattaatttttcttaatttaattaactaaatctattaatcactattaatgaattattagaggtaaccgacatttagacttatctagattttactattacgtaacttttaagttcacataaaatgagaatttagtctatatattaattctatggttttaaaaacgatttatacatgtggacgtaacaggtttattattaaatttaaaataattactttaattaattattttttatcaattaattatatgaattgaatatgattagaatatttattctaaattcattaagataataaaatttgaactctttattcatgttaatactgtattattcctgtatcaggtt

SEQ ID NO: 5569 - DNA, 2756 bp, Manihot esculenta
  Intron number 3 from transcript cassava4.1_008913m (locus cassava4.1_008913m.g) derived from phytozome v7.0 (chr-ID scaffold03283; pos 191668 to 194423 reverse strand)
gattttggtatgttattatttttcccagtcttaagtttattaaatgctgctaacaacttgagaatcactttgttcttgtttacggtggctgcttaagtttctactgcaactaaagatctaactagactctttttatgacttcaacatattcagttagcttttattgtataggcactattatattcattgatatctattattcatttactatttcaatacaagtaaatattccttaaatatattggcttttcccacttgctctgtttgtctctctcgaatacaaatgcccacatttgctgctgtggagatttgaaattgggaaaattacactttaatcatgagttttagcgtaattaactgatcggttcttgtattttcagagtaatcacttaaattcctgagttttacaactgtccaaattgaaggtccatctattaacaaaatctgttaggtgaatagaaaaagcatagtcaatggtaagagataactctttatttctaaaataccttcttcttcaacctccatttcaaccttttatctctaaaaaacaaaaactccattttcaactcatagcttcccacattttactattttctttttcatacttttcctaacagaagctatattttccactccttgccatgtcatgcatgtttgacaatagcacatgggttgtctcatcttgtggattaatctcaagaatatgttgtgcatatactcttccaagctcaaatcatccatccaaaaactttgaaatggtctctctttcttctttacatatggaaaaggacccagtataccttactttccttttcttcttcttctctcacctctttccaactattattttccctatttgtttgattgtaatggtcatgtgtatagaacttgagagagattgtcaaaagtacctaattagaagctcacaagaaaactagctttcaccagcttgccaaaattagaatgggttctctttcctccttcatatcgggaagagattaccatttctaattaaagctctagctttattgaattgccatcaccatcatccatctatttttttttaatcaggattttgaatatcaatttcttgatccaaaatgaaaccacacttgttgatctgttataaacctccttattgagtgcattacgatgctatttttgtaattttcaatctcaaaaagttgccaacttttctactggattggtggttttcatattattttaagaattaatctgcaaattttttcaattctttcttttatgggtttttaaaaaatttatatttattcttgatatttaaggttcttgaacccttctctttctcactcctctttcctttttttttttttttgggccttaaagaaatgtttgtattggaaagcaagctaaaggcttgcaagagagttcagtgcaaaagaatcctggtaaacaggattaaactaaaagctttcattcctaaggagttttgtcctagaatatgggtgtcatatttgcttcatgttttacaaaagagaacctaacagaacagagctggctggctggctaaaaaattgttataaaaaaccacatcttgaattcacagaggaacatccctagaaccacattgcaggaaccaataaaaatagaggaatcaccctcgctaataacctgttgccatcctctgttccttgccattataatagcttctcattctcttttggatttatgatcacttccacaagtgcatgattcatgaagaagatttcttgttttaaggaaaataaaactaacgcatatatgttgtttgataagatgtttgatagaagttgagtaacgtatatttgttgtgtgtgaatgttttctttagaagtttttaacttaattaggggtactatggtcatttttatgttttactaacaccaattttaacaggactttctatttagacggtcgtagaacttaggaatttaagtgtttgattttaaaaatatagagatgaatccattaattacgccaaaactcagagagtaaaatataatttaccctttgaaatttaaacttcgtttagatttttttaggagcaattcatttgagggagtaggaaggttagatggagatactttttgtaaagcttatctaacaattttcagtgaagcaatagctaaagacacataagggtacaagatggtcaatttgcagtccctctaaggcttataaaatatactccttcctgctggaagttgaatgctcttttcaagaggtgtctcaaacagaagggtttttttagtttactgtgggggtgggttggtggagaaggtgagcatcctgtgtgtgtaaaagaagggcattattggtgcacaaaacttcctgctttaagctaaaccttgccattgtgcctgcacttgcctcattttgacctccatacgcttcataaagaatagttgcatgttagtgcttagtaactctctctctccctctctctctctctctgtgtgtgtgtgtgttctaatttttcatcattgctggagaaaacagctggttatgcttagtaggttatttaggttaagctcatgtaacagttggttgaggtaataatctatagtttgtagctttgagattgtcaagttacccacctacttgcatgttgccatgttgctttctcattagtttatattatcaaacacatgctatgctggtcagacataggattacacaaggccgtatcctcattttctacttttgttcgtagtacttaagactataaatgtctgcag

SEQ ID NO: 5570 - DNA, 1661 bp, Manihot esculenta
  Intron number 1 from transcript cassava4.1_011174m (locus cassava4.1_011174m.g) derived from phytozome v7.0 (chr-ID scaffold00247; pos 103409 to 105069 reverse strand)
tgtcgcccgccgagttagccaggatccaacaacaggtttttacctcttttgggttttcttaatacttgcaatttagtgcaggttcgtttggaattgtcaatcttgggttgatcgtagttactactggttgaatttggttttcttaatacttttattttcttggctttgtgtatttgtgtatttgtgaatctgaatagaggggcttccattgttgcttcttcttggtttcgtggtggtgtttctttgaggattttaggttaattcattgtttgagttattggtcaatggattaattaattgcttgaatagaattgtttaatgtgcaaatcattggtcgtgaaaggatattgaaatgagaaccaaaatctgtaattttatggtttactagtggggattggctgaacttgttaatccaacattggaaacctaaaatatgtagtaattctaggcatgatttggttgctggaataaacattcacaatcactacaataactttttgacgatagtggatttctgagaagtattgctggtataggaagtttgtaacattatcttatctgaccagaagtataaattctctgggatttagcaaaattttatagggggaaatatacaaagaagagaaacagattgctgtaatactcctaatatggatgcatattatttacataatttgtttatttataatttttctgtcagacatttgattcttttttgagttgagttgcatgtttctgatgttatatgaataaaaataaaaataaaacttttgctttgcattatagactacatctatgattgaaaattatttagttatgaatcctactttttttttttttccaaattttttatttattattagtggtcgtagttagtaatgtatgcatatagtaaatctaagacaccaggtgctacagtatgacctttttactatttgacaactaaaaacagacaatcaaattttcctaaaaatctccatcgcaaattcttattttgaaatctacattataataggcacacaagcatttatataacatgcataagactattccatcaaaacattattatcaataaaggccataatgtctaattctcttttttgtttccgcactatatttggaagaaaaattttgaaggtaaagtaaagatctttaaagtaatgcttctatttagaggaatattgtttagcaagggaaaatttttaaaggttttattttttcaacccaacaaattagtggactggggaggttttaatacttaaatctcttatatcttatttactttatagaacctctcttcactccatccaaacatactgttgaaatcccaattccatgagaatgcaattcccccatcatccttttggatgggaaaattatggtggaatccaaaagatcacgaatgtaatcttttacaatgtagcacccaaaaaaaggatgttatattcgaagatcattttactgggtgattcctacaaccaaaggaaaccataatagttttaaccactcttgtttataaattaggctatagctaatttttatgcttatgctattcttttgatttgttttttctgaccatcattttacatctctggcttgttttagttgctagcacctagattttgattctcagttctcacaaaggacaattggttttgcag

SEQ ID NO: 5571 - DNA, 4127 bp, Manihot esculenta
  Intron number 3 from transcript cassava4.1_011521m (locus cassava4.1_011414m.g) derived from phytozome v7.0 (chr-ID scaffold06631; pos 204468 to 208594 reverse strand)
tgaagaaaggtactggatgttttttttaaatggatataacctatcagataattaatcctataaatttttatgcatttccattttacattatgcctaattttaaattaaagtttagtggtatcattgatcacattagaactttgtcagtatttattgggatgtgttagaaataattaattgggatgaagtaaaataattttggtaagttggcttgcaatgctgcgaagatgagtcttcttgttttgctgtggtgagctagagttgccatgctacattttttagctgtcaatgattttctggtttctggttagtaatgtgttcaggttgatatgtttgtgtatgggtcttcaagctcactcttctctgtttattctttccttctattctcttattctcttattctccctacccccccccccccaaaaaaaaaaaaaaaaaacgagaaaagaaaagaaaattgcatctgctagatcgaacacatggtttgaggttctgaacctagcatctgattctgagttgagtcttttttgttccagtgccatgggtgcctccttttacttgtttaggataaatatggtagagcggtccactgcaaaaggttgtgagagctgacaatctatgacaatctccaaccttattgccagggtatgcatgaagagcacactttcttgtgtcccttcattatttttgttgcccatttaaaaaacatagcaagttaagtgattcactaaacatgtttgcaatgtggtgtgtgcataaaaaatgtagtacgctggcattccagaaggaccagaacattttgttacatgtcttggatcgctaaaataggattctgaagggataagaaagaaaataggagatgaagaagaataagaagtcacttaacaagaaaaagaaaggaagaatgttgtgaaggttaagaagataatgggactctttctttaattttatcttaagtggagttaggtgagggaaatatttgactaattgacagcttaggtgagattctaggaaataggaactgttgttatttcagaattaggcccttgagtagtgtgaactttgggatctgccagtgggcttcacagttggcccagtttgccaaaatggcgtaagccatttttgactttgctgggccaccatgcgtatgcccattgttgctttcattcccaatcaatgtgggaccgaatttcacattccaacactcctgcaactgggctggaccttttgaggccctattataattttccttacaagtgcctgggtctagcctccatctttatatccagcctacccatgcttctctatatgggcttgggtctagctctattttgagctcattcatgcttctctacatgggattgcgtttggtcaccatttttttttggtaaattatgctttaatatttgagttatatcataattaacggatcagtcctgtatttttaaaaccgaacacttaaacccctttattttcattttatctagatgcacaatccttctattcatttctctggatgttcaaaggtaaatgattggtcaaacatctgaaaactattttttctactcacaatacccttattgcaccgtacaacacatataaaagaaatttttatatctaaaaatccaaattctccttctttcgtttttatttttattttgcaacttttatgtattaaaacagatcagtttctggattcaaaacctatagttttacatttaagtccttatcagtccttggattcaaaatctgcagttttctcaaaatttctactatttttaattttcttggtatgaaatcaaactaaatatataacattaactcttttctttttatgtacaaacacaaaacaatttgaaattttctggcttgctgccatttcacaaattttctgggtatagaattcaaataattataaacacttaaatccttcaatttttatgtattaaacaaatattcaaaatttgtagttctcaaaatatctaccattttcaattttcttggtataaaataaaactaatatataacattaactcatttctttttatacacaaacacaacacaatttgaaattctggcttgctaccatttcacaaatttttggagcatagaattaaagtaattataaacatttaagtccttccatttttacatattaaaacggatcagtcctggttttctcaaaatttccaccattttcaattttttctaactttccaagccaaagcaaacattacaaaataaacattttcattcattcaaacaccccatacaattaaaccatttttgttactactacaagcaataaaaatatacaaattaacagtaaagttttcaaatttcctaatagacatctattaacttgctattcaccttcggaggagaatgagaaaggaaggaggatgagaaaggaagaatgaagatttagatttttagacgtaaattttttttatatgtgttgtatggtgcaataagggtattgtgggaaaaaaaattttcagaggtttgatcaatcatttacttttgaactaaaggagaaatggatggagggactatgcatttgaatggaatgaaaatagaggggtttaagtgttcagttttaaagagactaaagtgtaatttacccttttttttaatctaataattagtaccactaataataatcgcaattatgttctttaatgatttaaagtaataataggtgcactgaattgtgtcaaataagcataattcacgtgccacgatctaattggcatacttacaccttgtgtgcactggatttagtttagtggcatagaatgtattataccagtatcatgaccaaaggggtaccacattaaaacaaaatacatgttaaagatttcaagggatgctcaatatatagcatgtatattgtatggttgtgagatgtctgaaggaattgacatatgggaagcctctgggattgagttagttttccctcctgcattttttttgaaagtttgagatggctcaatcctccagtatggcaggacgtgatggttggggatgatagaaatcttgtgggagcctaccatacactttacactctggtgttcaacaagtaggctttggtggaagactgcttggcatacgaggtttggtgattaactggaacccattttcttcagggatttcaatgaggatgagaagatttctattgtgcttgtctttagcaagttggcagcaatgaggagacagattgcatgggtggaatgctacaaaggatgtgaatttcatttataagcttttttggatctaattagagttacaagtgaatatttcccttgcctgaaaagtttaatctaagataaagatacattggatgtggatgatttaaacaaaacaatttccttggttggatgacagatgtagtgcaatagggaatagggatgaggaattttggaagaacttcttcaagattaggatggtattagagtggttgcaaaatggaaaaaagtggggattatttatattcctggtttttctgaaattggagaggaaatgcatgggattgaaggaagtttcattctgaattgaaagtctaaaatattatatcttgtgatgtgctgcaagtggaacttcttttttccttatatttttgttttcttaacttgctttgtatgcattaagagtcagggagttagtatctctcttctggcattggctacttattaatttgttcagtttcattatatataaataaaataaaaggctgatagtttgtcaggtcattgtgctttataccaaaagtggttcagttgtaaatctgaggtgcttttggttggtgaaagttcttggtttttgtttgggctttggatgttcttgtggcttggcctttttagaaccaaatcctatatatgtgtatatacattatccatgctttcatcattgtttttctcatctgagcaactggtcttcaaatgaagtttgcgaatatgttatcatctgggctcaaaatacaaaaagctaagataataagttgtaaatttataactggattttttatgtgattgcttgttattttgatgatatgagtgtaatgttctaggtacatgacattatctaaatatcttttgagcgttattattattatttcaaatatgcag

SEQ ID NO: 5572 - DNA, 4451 bp, Manihot esculenta
  Intron number 2 from transcript cassava4.1_005044m (locus cassava4.1_005044m.g) derived from phytozome v7.0 (chr-ID scaffold06711; pos 420011 to 424461 reverse strand)
cggagaagcagaaggttaggcaaagtgttctctttgagttcaacgatggtgattgtgtgatttatagattttatttaatcaggctaaagggaaaaagcgtaaacattagttgcattaaatgcccaatttcggttatggcgtttaaagttgtttgtgtgtaagaattacttttagccattctaggctgctcctatggtttgtttttctaggttgatgaaccaaaccatattcgtggtcaattatcctttgaagtggcatagcttgcagattgtagtaagaaggcaattttgggcagttactgttaagatttattagataagctcaggtagcttctattgttgaattatgaataggctgatattagcgtgataatgtgaggtctttttcctagaagaaatgtctgacctgatacttgcaattgaaactaatcactagtatagattgtcatgagtttctaccactatatgttttgggttgttgactttgcttgtttgtgagtgtgtcaaaaaaattatccaggtttattgtgaaactaataacatgtgcttttaatcttgtaataagataaaggaatgaccggataatttccgtatatttctatattgaagtgtgtatatatacagattataaggccttgttaagacaactcctaaaaatcctctattgatcaattagtttataattatgtaatctcctatgattatatacagattatgttcacgcactaacactcccctcaagtttgattatagatgtttatcatgcccaacttgttagaaaaatattctattcgagacatatttaaaattttggtgagtagatcactcagttgctctcctatcttcatttaaccggtgaaaattaaattttcttgaattttctcacggatgaaatgacaatcaacttcaatatgcttagtctgttcgtggtatattggattggaagtaacgtaaaaagcagcctgattatcacactaaagttttgcgggtgacacaacatccataccaacttccttcagcagatgatttatccacaaaatctcacaagtggattgagccatgaccctgtattctgactcggcactggatctagataccacattttgctttttactttttgctttttacttttctaagatattagatttcctccaacatatacacagtagtctatattcgaccttctatcccttttggatcccgccaagacaacattagaaaaacagtcaagtgcagtatgctcatgatcactgtagagtataccgagttcaggagtcccttttagataatatagaatttatcctagagcggtccaatatttcgctgtaggtgcagacatgaactggtttacaacgcttactgcaaaaacaatatctacccgagtcatcaccataaggtagttcggctttccaaccaacctcctgtacctctctggatcatcataaggttctccgtcatcttttgtaagacatatattaggaatcattggtgtgctatatggtttagttcccatcttcctagttgactcaagtcttcgactcctaagaaatacttaagctgactcaagtctttggtatgaaaactcgcatgcaagtagtttttgagagaagagatccctgtattatcattccctgtaatgacaatatcatcaacatatacaagaaggagaataataccaatatctaaatttctataaaagactgaatggtcacacttgctttttttcaacctaaatttttgaacaacttcactaaacttgccaaaccatgcacggagactctgctttaaaccgtataaagatttcttcaaatgacagacttttccatactccccctagcaacaaaccttcgtggttgctccatatacacatcctcttggaggccactatgtaaaaatgcatttttgatatctaactggtgtaaaggccaatgctgagaagcagctagggagatgaacaagcaaactgaggtcatttttgcaggtcatttttgctacaggagaaaaagtgtcagaatagtcaatgtcataggtttgggcataatctttggcgacaagataggccttaagcctcgttatggaaccatctagattgactttgacggcaaaaactcatttatagcccacgaccttgttgctagagggtaaatcaactagttttccaagtatgattttcatctagagtcttgatctcttcaaacaatgcatcacgccatttagaatgagccagtgtctctttaattgttttaggcaaagaaatgaaatctagggtgacaattaaggaggtagaagaaggagataggtgatcataaaacagaaagttagcaacagaatagatagatttatactgtcatttaccttttcgaagactaatgggaaggtcaaggtcacttggtggtggatcagatggcgaagaagattctggtgcaggacatgtatcatcaggtaaggtctccgagagtaaacttgaacaactgacggtttaacaggaggctgagtattagaaggaatgttaccatcagattgtacagcagaaggcatactcgaagaggtcccacaatcagatatgattctatagatgagccactcgttgtccttctcttaatcagaagaggtttgtgcaacaggataaaaaagaatttactcggaaaagactacatctgttgagaccagatatttgttgaggtctggagagtaacaccgataccctttctgaaggcgagaatatcccaaaaaaacacacttcaaaactttaggatcaaatttagtcacatgaggcctaacattccgaacatagcaagtgctgtcaaacagttgtggttcgggaggaaataatagcttcttaggaaagaggatattataaggagtattaccgtttagtactgtggagggcatgcgattaatgagaaagtacacagtagagatagtatcggcccaaaattgcttagaaacttgcatttgaaacaatagagctcgagcagtctcaaagagatgtcgattcttccttttagctatcccattttgagtgggtgtatcaacacatgacgattggtgaaaaataccatgttgagtcatataagtctggaatgattctaacatatattctttagcattcttgctccgcaaaatttacacagaaatattaaattgagttttgatttcagcacaaaaggcaaaaaaatgagaaaatacttttgaatgatgcttcataaaataaattcaagtcattctagagtaatcatttacaaaggtgataaaatatctgaatccggtcttagatccaactggacatggtcccaaacatctgaataaactaattcaaaagcagactcagctcgtttattgactctaggacttaaagagtttcgatgatgttttgcaaaatgacatgacttacattccagtaaagatacctcatgaaattgaaggcataactttttcaaaactggtaaagaagggtgtcttaactgacagtgtgcttcaaacggagacattacactagagcagtcaacagatcgaggcactcatgcatccaaaatgtagagacccctaggtacatgtcctttaccaataatctgtttcgtcacaagatcctgaatgagacaatgatcaggaaaaaaaagaacacaacaatttaggtctttgataagtttactcacagagattaaattaaaggtaagattaggtttaacagtcccagaacccttaacattataagttgacccatcagctataataacaggagaaagtgctttatgagatcgaaagctaataaaaatatgaggattacctgtcatgtgatccgtggcactagaattaatgacccatttatataaagaggaaataagacacgttttacctatctcagccactattgaagacgttgggataattttaataatatgggtcttattgtcagaaactatttcaaccaaaactttatactcctataccttcaaacgaattaaaagaagataacaaaatctaacccagcaaatagtaactcagtgaacagtacctggcttgaacggtatcggaaacgcctcaacccaatatccaaagggcaaacgaaccacaggtctgataaggaggctgcaagccttgggtgggcagtgagagataaatattaccctagatgggtaacctaaaaaaaacaggagccctaaatttccaaaaaaatttaaaactcgacgggagagaaaaaaaaattacgggaatagctctgatactatgtaataagataagaaataattggataatttctgtatatttttccattgaagtaagtgtgtgtatatatagattataaagtcttgttaaggcaactcctaaaaatcctctatcaatcaattagcctataattatgtaatctcctataattatgtacggattatgttcacactctaacaaatcttttggatttgctggcctttgaatatgtaggttgttgataag

SEQ ID NO: 5573 - DNA, 1590 bp, Manihot esculenta
  Intron number 1 from transcript cassava4.1_003683m (locus cassava4.1_003683m.g) derived from phytozome v7.0 (chr-ID scaffold02853; pos 291935 to 293524)
tgatttcagtgctcttctggggatttgcgaatcaggtaaagtattttttgatattgatgcattctgtgtaggataatttatctgcttgattgtcttctgtcttgatttcagatgttgattttgattctggtatcagaatttgtatttttttaaatttttttgggatgtaatttacaaatgtcttctgttacagatttctaatttatttgtgattttatgctgtctttcctgtcttgtaggctattgagagtaacgcctatgtttgcagttgactggcttattatctgatgctggtcatctgattgattcggttgtctataattttatgtttaactggacttctggagctattgttggattcaattgataggaattatcatttaggattgggatcccctctcacacatctccaagatagagagttgtgatggttcttattctgattttgaatagtagttgaaacaaagagtttcatatttgaatcaattttttcccaactgatgcatgagttgtctattcagctttcatgcttttgttatggataggtgcaaattgaagctagacattaggttgtgctattatggagctattgtcttatctgtatggcacgctaaaagaaatgccgcatatcaggttgttaggatgatgactggtttgattagtgatacctttattttataggtgctgcttttttctagttctctgcaggatgtgttatttcatatgtgaataatcattaattcttgctgaagtgaataaacattgcattgttcttgtgacaattctgacatttggtgtttaactaagctgaattggaatggactgcttttgttgcttgaagtgttcttgaaatctttagcatgttgtacagcttaaatcatattgcggaggcgtaattcccgcatcttttttaacggggttaaggaggttggtgggggtgggtaaccatatacaatgtcaatgtgcttttgaaaattttattattgttgtcttgctaaattgtgttttatagtggtttcagttggacattcgtttaataatacttttgattttgcttactgttgatgtgaagttctcctcctgtggtggtggtcattctatatttcttaaaatgtgtctcattgcgctcaagtctttttagtttttgcatgaacttgtaagtcccttgattcattgccttgaatctgccaaaaggtttgtgaatttgattttcctttttccttcttcctttgaacaaagaactagagtctcctaatgttcataaaagtttttcattgctgaataatctttggggacgaatgcaattgaccctattaactccaaaggatgatgcaaatattggaattatcttgccacattcagcgatgctttacatcttcttagttgcaatttgtttttgtgagagtttctgggatgtgacaagtatgttcaaaaagtgttatgattcaaattccatttctctgttggcatgcttatattaccatttgtttcgactacatcttttcttatttaatctatatttcatccgactcttggccatggaagctgcaactgactatgtgcatgtatttgtgcagatcacaactgtag

SEQ ID NO: 5574 - DNA, 3546 bp, Manihot esculenta
  Intron number 3 from transcript cassava4.1_009952m (locus cassava4.1_009952m.g) derived from phytozome v7.0 (chr-ID scaffold06512; pos 1405527 to 1409072 reverse strand)
ccaggaggtaaatccatgaatatatgttcttagaacttcttgttcccttatatcttctgctcttttggaatcatggttttaaatcgcggtcgcggccacgttcgcggtcgcgagtaacgaaaacagacctgtaatggccataacgtaacggtagcgctctggcgctacgcaaatttttaaaaaaaatttgcaaagttcataaataaaatgatattgattagatttaattcagaacaatatatacaaatgcataacaaaacataaatatataaaatataaattatttaacttaagttaaacatcatatagtttaaaattagaaaaattaacataatctttgtagatcgagtaaactaatagctcaaagtataattttaatcaaaactaaaactttaatccacaaaaacttataaaaaaaggggaaaaagacaacaattaaaaactaaaatagataaaatttaactaactttttagaagaaataaacttggaaatagagtagtttataatggatctaagtttatacgagaaatatgcagggaagattgaaatttgaaagagaaaggaaagagaaaacttaaaaaatgtagtttttagagctgctgaaaagtgtagaaactaaagaaaatgagattagggagcagaaaataaaggatataaaaaaattttaattattggtaatggccgttaccgttatgtaacggtcggtaacggccgttaccgttactgttacgtaacggccgttacgcctgcaaatcaggaggggccgttgtataacgggataacgggtaacagccctccaaaatccgttacataacggccgttacgttacgtaacggccattacgttacgtaacggccattatgttacgtaacggccgttatttaaaaccatgtttggaatacatgatggagaacccgttatttaaaaccatgtttggaatacatgatggagaactcacaagaagttggtaatggaagctaacttgaataacttgtatttcgtgtaggtttttgttaacctttgaagcggagaaatagggagagaaataaatagaagtagattggattgaaaaaagaaacagaaatgggaaaagtaatagtgagatttagagaagaggatagagcagaaataggaagaaagagtttatctttaattgctaatgattttggatacctttttctttacaagccagttcctatttatactattttgggtcccgtaactactttctacagttacaactgactgaagagactaatccactgcttctttattctttagtcataacattccccacccattgaaatcattattgtcctcaagaatgaagaaaatactgaaaattcaaatgaatggctggtgcttctttccttggccttggtcagaaggatgtgaaaatccacacaatagcttttactggccggttaatcccctgaatttggaatcccaaatgttaacttccagcacatgctttagctgaaatattccagagaattgggataaagttgtaggtgatagtatggacagttggacacttgattgacaaggaattttttttctcctttttcttctctaaatttcccatgcttgttctttcaaaatcgcatttccatttgattgtggaactttcttccttgcccttcttaatatttccggttcatcttccaagtgacttataggattacaacaactgaactccccattttgtttccgaaaattctagcaattgcttacaatattaacaccttttgtgggatttgtcccacaacggaagtttaatatttgaaagtgtatataatagcgggtctaaaactactaaatggtttgggttaattattttgggataagtaaaaaattagcccaaaagatatttaggccagtttaggtcaaattgttacaattattataagagccaccttgagtcagaaaattatgcgggtactaattggcctgcgagaaaaaagctacccgtgctagatgaggttgagctgctcgagacactaacgaatcacaatacccgagagtcctatcttggcatagcaattgtagtcgattcagcatagtagaattgcgatggggacgttgcaaaattaagtgggcgaataatgtgggatttgtccaacgtttgaagtttactaaaacttgaaagtgtatataatagcggatccaaaactactaaataatttgagttaataattttggacccaagttatttgggtcaattggccagactgttacaccttttgtaactcctctatctcgttttcaagaacattcccaaatttctatagcaaaaatttcaatgtagcttctgctttccctattgcagattctagttttttgtctgtcaccatcttcattattctccttctcatagatgatctcatttacactagacaaatcagcaatcaaatcctgcttcgtcacagtacccttgtctttcgttttggaagttgcatgtaaggtatcttgttcttcattagggttttcaaaaagttgatctttatgaacaaagtctgcaaccttctctctttaagtggattgctctaatcttcccattttttgatccaatcttttcattttctgaatcacgtttcaattctttgttccagcaacccttgttccttcaatattctatccagaatttccactcttctattaagaaacatttgtgccaaagattgtactttcatgataaagaatttcaagaatagggtttcagaagagagaagtagaaagtaatctttggtcaagcctaaaacaaagaaatagaagtccaagaggcatggaatagaggcccgaaactggaaaagggacagggttgagaaaggaaatagaaaactcagaaatgctaatccgagctgagaaacagaggataatcctagattgagattttcaagaatttcaagaacagatttcttggaatgcaggaattgaaaactttgagaaggaaaacaaaagatataagcagaaatctacaaaagaacaataaagaaggaacgaaattccaaggaagcaagcgagaagaagtaggggaaagaaaagaaaaaaattctcagagaagaatcaaagaaggaagagaggaaaagaagagaggaagagagatgaacagagagaatcctgaaattctggaaatttgaaagaatcccgcaagtcttctttgtattgcaacgccagaagaaaggattggaagaagaccaagtcagaatagagctctgataccacttgttacacagcagacttgtaattctctttgaaatagagatatagggagagaaagaaatagaagtagattgggttgagaaaagaaatagaaaggagagaagtaatagagagaattagagtagaggagagagaagaaatagggaaaaagagttttatctttgattgctaatcgttttggatatctttcctatttatattattttggatgttgcatttccaagtcaaattttccaagtcaaatttgcatgttccatttccaagtcaaattttcgtttggaattgcttagagttctaaaaaagtgggtgcttacatgcaggca

SEQ ID NO: 5575 - DNA, 3733 bp, Manihot esculenta
  Intron number 1 from transcript cassava4.1_019916m (locus cassava4.1_019916m.g) derived from phytozome v7.0 (chr-ID scaffold10173; pos 350607 to 354339 reverse strand)
acatcaagttccttccttctttttcttctttcgtggtaggtgttcttcttggatttttgtttgtgggtctgtttggttaatctggttttttgtgatctttggtttggatgttaaaaatttagggacttcatgttttgctcttagttataatttttcagaatttcaggtctttgtcgtctaggtttgattgagagagtaatacttagcgttttttgtatgaattttctaattaactagattttttacgagttgcttagtgagtttaccattcaattgaatttctgttcgtgggttatttggatttgaatcctaattgtggagcttgttgaaatccaccttttcattttggagattttgttccgagattctactgctgggctattgctcgagggtttattaattgatggctgtttgcttgaaatgatgtttaggtatggtacttgtgtaagaatccacaagtattttttgtgggtttaatttgagtccaggaatttatgttcttttggatgttgcattgatagttttttgtcttttcttctgaagggatgcgtttaactgaaaattttgatttcaaattctaaagtctgtttctgtctgttcagtaattttatgcaggtttattttattggggtttttttttatgaacgagtccagctgcactttttactcaaatttcggttaaggttccagctttgggaaatttatatatttatgatcatgatggttcctttgcaaattgcaaaattattgtggacttttttgagaatgcattggaaacttgtggttgcaaggactattgtctgtgtattggcttgtacaatggaactactcccatatgtctttacagagtgatccaaaataacgaggtaacaacaagaaatttgtttgttaccttcaaataactttgtagtgtactcttcaattgacttcttgttttgcataagataatgaaccttctcatataatcagaaagtgaaaattgcttcgatagcctatatatttatgatcaagctggactattgtgtggatgataattgctttgttgtgcacgttgcttttcaactcttacgctattgaaccgcagttgtctcaaaattaaagctttacagataaatcctatcaattttctgctatatgcttttatttgaaaataattctccaaactggttttccaatccaaattatcatccacttgtaactttctgtgaaaatcagccacttcaactttgactcctccattcaaatcagtggcattcgtaactgctcttccaatatgcctcttgtcgctcaatcaatgggtccagcttgatgaaaggggctgtcctctaatttctcctcaaccctcaagaccaccttaaatctggagatggtcatggtcatatcaccttccagattctctatccaggctcccactggttcctgatggttcgaggcttgcacaactctggtcaaggccccaatcattcttcgcatgtttgcaactccatttgttggggctggttgcctctatctcaacttttgcctctgctaaccactgtttcctagcatacaattctagtagcaatgcaggtttttcagctctgataccacttgatgtggtgcagaaggttaagataattgggtctcaacaattgggctaaaacaaaggttaattgttgttggaacaaagcaataatagtttacagaaaaccacttggtaaatttctgaattgaagaaaaaaaattatatatatatacacacacacactgatatatttgctattagcataaatctcattcaaaaggaaaactaaacctacttagtaaaagaaatggacaagaatcctaaatgaagatggaaaagaaaaataaataaaatccatgactgaattggaaaaactgaatgggacttcagattttgctgcatcagctaggttgaaattgctgatatagatcagctagttggaagtcataatgcttttttcaatgcttaatatgattcatactattgctcaaattcttgaaacatataaatatattttgtcggaagctatcttctttcttatttagctgaagaatccctttgtcttcgcattattaaatgcttagtgattagtgaaataattattgagacctgagtgatggatgaaattattgaaagtcaatgcctttttcttggaagaggcaaaaatggaagtgcagtaactgtgattactggcatgaaaactgtatcacacttcagacaatggtacttggacttcaatcattgtattgctatgttttatggtaactagttaatgttcttctctgagcctgaactacaaatagaagaggaagaggaattctttactgtttctttgttttgcttacaattgggaaatgggagctaggagaagaattgagttgatgccttttagctttcttttagggctcatctctgtaacttatccttcgctatgggttggatgttatggattatgttctcagacacaagatgtacatttttctgacctggattatgttgctgtattagtttttttcccatgatatagtatctgtatgctttatgtgtattcaagcttgattttctgagattagactagagacagattggggggaatgaagtttcttcatgtaattgaaaagaatgcagaaagttaaagaattcttctgtcagattttcccccctttttcttttggatgaagctggtgttctagggttagcaaatgaaactaatgctaatataaaagttgtaccaaccaatttgtattttttattgcagccttatattaatagcttaataaggaacattgtaactagcactttaagttcccttagcccttgcctttccccaagttacagtgaaacagatgcccgttttggttatacaaattatctcatgatttctaatgcctcaatagatcactacaattgttggtagtaacgagcttattcatcagtttggtttatttcctaccatgtgaaagctgctttattttccaaagctcaaataatttatgcccatgagttcttttgagtttaaatcaaaggccattttgttcttcatggaatcaaaatccttgcatgtaatttgaacgaaggattgcattttgatggggaaacaaagatgaaatggaatatggaaaaagaaaagatgtgttatttccatttctgcatctttgttcttcataattaatgatcttgaaatttcagtcattgttttgcaattattctttcattgcaaatttcattgttcttgaactgtgttatatgtgcatgcttgcatgtgtaagatcatgagtcttcttcagttgtagttggtagtagcttagttgcttgcagcagtcatatgattgttaatgaagttcttgaaatttgggagcagcacaggtgaaggcattatccattgcacaactatagttttttgtttaacatagaggaaaccattttaaattaattagaacatgtgcagctgaaagacatgcacatgctgctgtggggatgggcagatgggtaaaatgcatgtagttgatgctagtcacgatggatgtgttgccaagtacaactcttctctcagctttttcctggaagcttagccattgattggaaagctactctttgcatccaattgtggtccataatgcagtgatttatgttttgctttagttgtgttctggttcgcagttttatttttgttgctgccatgacattgattcaagtttttgacatgcagctttcaaaattcgcagagag

SEQ ID NO: 5576 - DNA, 1385 bp, Manihot esculenta
  Intron number 1 from transcript cassava4.1_009060m (locus cassava4.1_009060m.g) derived from phytozome v7.0 (chr-ID scaffold00224; pos 526893 to 528277)
ctataggggagtaattcggagcagtgaagattcaagtaagaaaatagatattgctgttaaacaactgagcaggagagggctacaggcatgcatccttctttttcttcaggccttgtgtgcatattttttatttaatcttggattatgcatcgtttattactctttcagaagcattctgcacattattaactcctatttctctctagatcattccattttttagatttattcagatattatttttgtttttcatttgttggccatagtgagttttattggttttgcagttttgtctttgaatctgcaaataaccccaaggtcttcataatggaaagtgggcagcatgaatatttattggttttggtctaaaaattacatgattaaatgcttttactcagtactgttctacgacttgttacagttttctttaagtctgttggaagatgcaagaaaagttcagggaatgcacatgttacatacaataattcactttggaattaatttattttccatatattagatgtctaaatagcacttcagctttaaaatctgatttcctgttttcctgacttgtatgtgataataggagtgcttgtttcctttctcttgtgctaattgctaatgcagcggaggcaaaaaactagtactataacttagattcagcagagagattggatgtgagagttgtagttcctagagttaaaatgacttgcaagaattgattgcatcatatgctctttctagctcgaatttgtttcaacatttgacataatgcttcttgatttgaaaactttagggcaaactatagtttaatccctgtagtttaatgaaacctatgctttagtccctgcatttttagaagctagcagtttagtctttgtaaattaaaaaaaaaaactaacaaattagtctatatacaacaagattcctttattatattcataatttaatctctataaattcatacattccaagaatttaatacctataatttaaacacatacaataaattaattcctaaaaaatatttcaatagtggtggtttaactatattcttcatggtagggactaatttattggttttctaaaattacaaggattaaataactggtttgatctaatgtgtaggttttactaaactataggactaaaatgtagttcactaagaaaatttaatttcataatggccattttataggtttctttttcttttgttcaacagtaaagatttcatcaataaattgttttcgttttatctatctggctctgacagtttgacatactagatttggatatcttacattttcttccagggtcacaaggagtgggtgacagaagtaaatgttttaggagttgttgaacatccaaatcttgtcaaattattg

SEQ ID NO: 5577 - DNA, 2598 bp, Manihot esculenta
  Intron number 9 from transcript cassava4.1_000777m (locus cassava4.1_000777m.g) derived from phytozome v7.0 (chr-ID scaffold10673; pos 138537 to 141134 reverse strand)
ctagggagaagcatattggttcagccgttgcaaaggtgatgaatttatatgtggtggaatgctgtttaggcatcatgggttcaaagattctttttttttcttttcattcttctcaatgagattatgatgttaaaagcaaattgcttaggatatttatttgcgcaatatttttctaaataattaaaaggtgaaaatgagagggaacactttatcaattgtgtgttcttttgctatgcatttcatggggtgttataaccaaatcaaaatgtgtaatgatgatatggatattcacattttttttccagttggttgggtgcaaaacatttttgtaaatggtaaaaaaaggtgaaaaggagaaggaaccctatcaatgaattgttttgctctaagcttaacacttttttgctttgtgttggaactttaacctatgtaatttttattagtatattgccatcgaaaagatattggtgtatttgcaaagttagaaagaggtttttgatattaatgagttttggagggtgcctaacggaatcaaaatgggctccagtattgcaagcatgacaagtacatgcttagatattctttagtactgtgattattgtgatgtgctctattaataaagaattgttagtatgtttaggcttgcaactaacccatcacttacaccttaacttcttattgctttatagtggtttacccttattgggatgctacaagttttgtcacgcttgaaagcaaatatgaagtaaaaatttacaatgtctaggtttatctacatattaactaatgcggttatggtaattttcattccccataacttcaatatcatgcttttgtattggtcttaaattagaatagaaaccatgttgtattaatgagcattttacaattctatttgatgcaattttctttccattcttaattgcaagacctaatatttatcaatctagagaaacctaaaacttaagttagtaactctgtgttaattttatccatatttatgacaaaactttccatttcttctaataccaagtttaaaatttccatttactttgatctcaaattacttgtatatgctatccttatccattttgttctttttatttaagcaacacaataatgaatttttcagctatatttcatgagtgataagattgcaaccatgacttcatttatgttgttgaaatggctaatgtgttatatagatataattgtcgtaatggagaagttgcaactcttaggatatgtttggtatagggttaataagataaggttaatagttaattgtgcattcttttatggaggaataattaattcctaaaaaaaattttcttttcatgatgtttgattcaatattgaaaatgaggttaactattaacccattaacctatctcatgtatggtatgacaagatcagaaataaaaaaagttgaggggttaaaatgtaacccatttaaagtgatataaaatcattcggaggttgcactagggtgaggtagtgcaatgaacatgcacctatcagaggtgatatattaacctagtgtaaattttaatgcaaatccaattataactaaatgaggttaactattaccgcgtaatacataaccctatttaacctcatatcaatcgtacctgtagaaattaggttttgtacattgccaaacaataaaggtaaattgaaaaaatgaaaatttttatgaaagtagaattgatctcaaagtctagtattccttccgttctataattttcgtccatcttttcatttttagttgtctcaaaatattgttattagcatggggaatcagaacgacgtgagtaggtctgaagaggtggtgtagaagtggaaggttgacaaatttgagatagagaagaaataagagttgagtataggcaaggttgaaggaacaaaggttttgtgtgcttgattagaggaaaaataagaagtttgaaaaaggattatatttgcagatacaaaatatttgttagtagtaggatcacaatatttgtagcctaattaaagttgtgaatatccaaaaaaacacatttaatggatttaacttcgagtttgtcttttctaagagtatgatcatgaaaaaaacatatacatttaaaaacttgcaaagataattggttggaattctgggtaaaaacaggacaaatgaggactttgatgctgcagaacttatgaaggtgtacggttatttgaaaaatagataataactcagaatattctggggtatatggggcataggcttttgtattaatgtatttgcatagtctctctacaataagctgcaaacatatatattgtttttctaacagaaacccagctggataataaccttctggctgtctaactactttatgaatctatacccaatttaccctcaagtctaattacatattttcctctacatttctcatctttctcctataacacgtaacataaaccttacaatttttaagatttcagcttttttaattttgttttattagtagttattgggtaaatttcatgactatagccaaaaatgattcataagtgtttgttatttacttaataggagctaagagaacgcattcaaccttattttttacg

SEQ ID NO: 5578 - DNA, 1213 bp, Manihot esculenta
  Intron number 1 from transcript cassava4.1_020182m (locus cassava4.1_020182m.g) derived from phytozome v7.0 (chr-ID scaffold11689; pos 165675 to 166887)
cctatcagtctctttcttaaattcctttttaccaggtaattctccaaacccacttccttttttctttaatatatatgtatatatttgctgcaaatgatgaaaatgtgtccaggttttagcctgataggcattggtgaaagaaaaagtttgtaacttcagagttgtgtatgaatctgtagatgatagtaattatatgagctaaaagacgtgaattcccatcttatgctatttccatttcattttcattacgattttgaacatttttcttttaatttacaggttgcattgtcgctaaccttgcattcaaatagaaatcattctaaaatacttgatttttctactgacatgggtggtagttggttgtccataacttccaagatttgtttaatcttagctgtttttttgtgatggctagaaacagcataaatatctacaggctaaggtgtctgccggtagttctagtagttacaacatgagttgttgaatcattatggtcatatggtccttgaacgaattaaaatagaaggaaataaagtaattcatgtttgtcatcagtcagtagtggggaaattgattttttggggacttggcaaattcttacttcatccttgtttaatgacaaaggtatgtggttgatatttttttcccttgcatttcatttacggtgaatccaattatgctgcaaaggattttcctattacatgtttttcactcatttaccctcttattctctatatatgaaattgtgctagagcgtagaagtaaaactatttaccataagaaacctagcagtaaatttgctgactttgttcccttatttaccccatacttctgacatataagattgtgctagagcctagagctgcatctatttactataagaaactctaacagcagatatacagagtcctccttggccaacaatgagcataactttgttgaatttgttaagattttgtatgaatcattcccttcaaacttttttacacaatatagagagattttcatatctaatgctatgctttgaaaaattaaccttctttcttcttgttcttgctggcacatgcatcaaaggaactcatgaaaatgaggagaactaagttatacagacttgacgaatttttgttgacattttggattctcactttaatggttcatgtatcagcttttgttagcttacttacctggaattatcttactgattctgcaggat

SEQ ID NO: 5579 - DNA, 2731 bp, Manihot esculenta
  Intron number 1 from transcript cassava4.1_007318m (locus cassava4.1_007318m.g) derived from phytozome v7.0 (chr-ID scaffold08359; pos 1221226 to 1223956)
gacatccagacaaagagagttacaaagtcaggtatattttctcacaaatgtcttgaattagacttcagcctttttttaaaaattaattttcttatattgctttgaaactgaaatcctaattaattgttttcatgtaactgataactactggcattgatcgaactgcactaatccagctggaagttaattggttgcaagtcatgtgggtcagctgcagattaattatactgtaaaccagtaataattggtcagggatctgttggacgtataaagagttcaaatcaaaaacagagtgaaacagttttaatatattctttgtaaagtaagatgccatttatgtgagatcactagactgagatatgttatgtgcgcctgttacctcatctgtctcattcttttgtcttaacacattgctgtctccttgcctctcctttttcacttgtaatgttctctttcactattatccttcacttttttggtttctcacttctagtctcccgcacccttccccctccctgttaaacccaattgatcaaatacagattcaaatgcacctcgaggaaaaggaatagaagggtgttgataacaaattaaataatttaaattagataatgggtctcactaagagaatatgctaaaggatattctacatcctaataaaaagtaccaataaatgaaaaagtggccagattttaattctagagcacaacaaccctaacactctctctcctcaacttcttctcttctaatccttttctgcaaccttcttagaggggtccattagaagttcatgggtggtagatcccctttttggtgaagctgtaaaagcacctttatcaggtgtgatccatgttcttcttggtattggctgttctctacaaatgcaaagctaagtcaaattggatcctaaaatttgcatttttcggcttcctgcataaattttgtccttgtccacattaggtattattttattttcccttttttctgctagaactggcttgggatgtttggtgattgggtaatcagtgtgaccaattgccggaaccgacattccaatgaaactgatgtgctctttttgtttgcttcattgttcagtgtcaatgagaggaaatatgaatcccatgatgtcaagtcagctctagaaatcacatgcaccaaaacatgaacagccctaattttagcatgtctgatccagatacacaaaagatttgcaaccctattaagaaattttctacttatttatgtagagcactgaatggaaaaatacgattaacttctatttctaactcctctgctttcgtgtgtttatctcaattgacttttgaactttgctatgtttttcctggttacacaagaccttatttaattaaaggatagggaatttgagggaaaatagttgtcacctttattggtgcaattttaacaaagttcattggacttgtttcctacaatgaggtatgaggttcctagcaaaaatgctggctgtcatcaatgtgtggaaatgatttgttctcaagtctggtttctcattttacctacgacatgatcacattattataaaggaaatacaatcagtcaatcatcatgtttataattacatgagcttttaataacttcttcacttgttttgttaatgtgcacatataaacagtgagatttctacatgattacttgactaaccatctttgaatttccacactgtcatgcttgtttaatataacacctggtagggttgcatgaattaagagcagctaattacttgctggtgcaagcaagagttgttgaattgtaatcaactttcaatgatctatagtagttggattggcagtttaatcaaaacattggtgccatctgctaagctatcttggattctaggtataataccctgtaccagtgattctcaacttttataaaccttaatagtttctttgttctacataacaatgggagacacagctggaaaagtactctgtctcacatgtaccataaattgatttgaaagtaacctattgttttaatcacagccttgtgtttttgtattaaaaaactttgtgtttgaatcaacttttctattagttgtccagactctggagttctttaagcagccaactgatcccagacacctttgtgcccctttcatttgcaccagcaagtaccagaatataaagtttgcctccaaagagattggcaatgacgttcaaactctggtaattgtttgatgaggcatctgaatcaaggatgatttaacacttaattaacactttatgcaatggtcatgttcaagttgaatcggctaaggttgatcttataagtattggttcttgctgtaaaatgtttcctggagggtctgaaatgcaagtgctagcttactggaatctgatacatgtaatccttcaaaaccatctcatggagatactatcctgtaacggacagtgcactaatcagattgtgtaataagattgtgcgatacgtttaatggagggataatcaaagagagtcagggtatatacatgccttgagtattgagttgtgccttcctagttccattaggtcatttctttttctaaagaaagtaaatgtcttttggttagatatcatttctttatttagcctgtttgtcaactaaaaactaacaccactaataaagataagaggggaatatcctgcatatgaaagataatcttatccttttacaggcagaagaagcccagcgtttacgcaaaagaagaaa

SEQ ID NO: 5580 - DNA, 3789 bp, Manihot esculenta
  Intron number 2 from transcript cassava4.1_019953m (locus cassava4.1_019953m.g) derived from phytozome v7.0 (chr-ID scaffold08593; pos 117359 to 121147 reverse strand)
ccaccgtacttgtcaggatcgctagtagtctctttgtgagtcttgctgttttggggaaaaaaatggaacaaaatgtttttgcatgtttgatatacatacaaagttactctgaataggtttaatctcaaactgtaaactctctttccttttcttgaatgactgatcaaattagcaagaaaattattaggtttttgtttgttcataaaactcctattagctgacttaggattgggattgggattgggattgggattgggattgagattgatagagaggaatggaaaagacgagtgattcacatagacttttagtcagctaaaggtgcaggattattatcatgattgtaggtttctttttctattttacttgttctgaacaagaagatgaaccttagagttagacattgaggcatttggtaacatgtttgtatgtttaacatcaaaagtttgacaatatatcatgaagctaaatgcttatgctgaaagatatacttagcatttggttttcttgttatgcaagtctatagtaaacttgttttcggtggaaaaaaagtgaaaaaaggagaaaaaagtgagggctcttttcaggttctgaaggtggatgtgcactgatatgacataaaaataaattcattaatgattgattaatcatgcttattgattagtcatgctactttattttctttacacatagattacactttgtatacatggtttagaactttttggcctttgttttccttatgctaatcattagttaagaataagaaattgtcatatttttgtgaaattctaatatatgtatttaggacgttcttcatattatcatgaaaggaaaagctttcacttttatattcttttttcttcttttgatatttgtagttcctctgcaaattgatggaggtgtaatatatagcatatttacttctctagtgctattatttgacagctttatcttgatgaatacacatctatatgtatggttgccgattgtagatgtcacacacgtgtgggtacacgtgcttggggtggggtgcaaatatgctattccacttcaactagaaatatgagtaaaacattgtgtttctcttcattccaaatgatcaagcaatgttgtcatgtaatcctctttagtgttagtgaatgattagtgatttggaagttacattcttgatcaagtggtttacttcttggcttatttatctcttgctatctttttcagaacttccctcaggatcacttgccattttgaaacttaaagggctttaatgtatcctccttccatcattaatgaagtattagtaaaataatctacattctttctccggtagtatatttctttgattttcattgatattgtagtttatttttggggtgttatgtgtatgtcttggttactttttgtcatttcttagaacattattcaccatttgagaaaagattaaatctagcatgacgtatgggtaaaaagggaaaagcacttcgcctcatctgtaatctaaattaaatgagtttaactcaaagtgtaaaacaattacttgtaagattggttgggcaatatatgttatgcattttctgctaaaagtatgtcttaaacattaagtttccttctttccattccatgtgttgagcaagcattggtgacatatggcttcactattggaggcttaatactcattaggaaagaaacttgttgtctagcagttcatttgtttacctgcgatatttatgttttgcttcttcttttagtacttcaaaatgactccctttttgaaaaattaaaggattttgattggacttgcatgattattgagaagagaaagtaagaaaactttggtctttccccttttgaaacacatgaatctcaaatgattatttaccatgatcttgtggttagacaaacataatgaacctatcatgttacctagggttgtaaatgaaccaagccgcctttgagttattcgaaacttgacttgataaaaagttatacttgggtccattttttttctaaataagtcaagttcaagcctaatttttaggttcgtttaatgaatgagtcaaacttgaacttgcaaatattcggcttgtaaatgcttgagagtttgtttgtttatgggtttgtgagtaagctcatgatatgcttgttttttttctaaaaaaaaaaaatagttctaaacatattattttaaactaaaattattggtcttgtaccttagttaagctgcacatgagttatttgagccttagttcgataaatttttttgttcatctaggctcgtttgctaaacaaatcacatttacgcttattgatattcagcttgagatcgaaatgagtcaaactcgagctgggttcgagcatgaaaaaatttgacaaaccgaacttcagctctttaaaggcttagtgtgcctcggtttgttaatacccctattgttaactagaatattggaattttacttcagttagtaaatctcatgagattaattttttgactcatggaacttgttccacttcactatgcatgccaaaatatcataatagagcataaacgagattccaggtttcttgttttaagtttcttaaagactttcttgtattgttgtatgttattattacatgtcagaaaagaaggtataagaagaagaggtagtaagcttgatgaggtggcattagaaagcgagaaaggaaacaagtagttagttgaagctgttatgttactctatagctacttaacagtagctgaattaattactagcaggttgtgaatctgctatgtaactcagagatcatctcttgtattggctttcctcatcatctcttgaatctgctatgtcttctctgcctattctttctaattctctctaatttcttctgtcattctactgttagtttctaatcctgacactatgatactgattttacattggaaagagctgatttctgaagcaaattgatcactccctgctatccacaccagaataaatggagttttccaaaaaaaactgctagtggaggaagacctcctagggatgagagacatagggctaaagagagacaaaaaaaggatggaatcattgggtagtaaaaaaaagcggaatactgtatgattaatctcaactagcatctttccaagtttctgactatatgccctcttgtgtttctacagtgcaaggctgacaagaatgaattccaagttcttcagtacttgaatttgttatttactgcaccatttttttttcttcgagtcagtaagcctttgtctgggaggaggttttttaaagtaattggaggtttttcaagatttaaaagccttgaacatgtgtttggtagagttcaaggttttttaaaaggtttttgcaggttttgaagacctacatttttaacccagaaattggtggattgaaaaggttctctttaaaacttctaaataccttaaaaactttccattcctctcaaacaacaaaaatttatgaaaatttaagaaccatgaaaatcttgcttcataaaatttcaccttctgtttcttttgtttttccttgctgactcttttatgggcatcctatgctcttctgcagcatacctacgcatttaaatatccatctttaatactctcctaaataatgaatttggggggaattatgacttcaaaggataatatctgctagtactacatttggagtttcatgagatttgttatgattacaaagccacttgacctttccaatgtataactcttatatgcagattttgaacggtgtactccattattgcaggtacttgaagagcaattgg

SEQ ID NO: 5581 - DNA, 945 bp, Manihot esculenta
  Intron number 2 from transcript cassava4.1_017223m (locus cassava4.1_017223m.g) derived from phytozome v7.0 (chr-ID scaffold05875; pos 552747 to 553691)
cccggacagaaggttggcttcataacttgtatgaactattatagatgatagtgtttgcaaaactttgtgcaggatggttaatggtttatgatagggattatgtcaaaattatgcagtaacatggccctccttacttaacaagattctgatttggatattgcaaaacaaaattgtcaatatgattattaacaaaattgcaatgtgcttttataatggtgttagtatgaaagttactcttttgtgcatcaccagagcatgaaacacaggcctaaaattttttattatgtaccaagtttgggaagtgatcagtgaattctctctggcatggaatgtttatctttgaacacgagatatcattgagttatctaaatctcaatattcaattctattaagtctgaagctcatttgcctgctctaaattgactccatccacacaaagagaatcaccagtagaattactgatgtgtattttgtcaatgaagtgttggctggtggagaatctttgttgttggttttatattttggatttagtcatatagaaaactctggtcaagtatcaatatgcaatgctgctttagatgagacaaatttccatattttacttcttttcatatgattcttaactgtctgatagtccatgcatgtaaaacttactccgaagttaataactgaattcttggaatttgaaagcattgctatattactgaagtagtgatgattataacatagggctatattaagtatctgtagttgtaatgattatacacatctgcattattataaaatgtgccctcacaatgttccttgtagttgtatacattataactgctgcagtagactagaaaagttgactgtgacctctgagattctgcttagccagacctggagttacaagatacctttcactgcattcctgatatcttcctttatgcagcggagatcaca

SEQ ID NO: 5582 - DNA, 2977 bp, Manihot esculenta
  Intron number 9 from transcript cassava4.1_000427m (locus cassava4.1_000427m.g) derived from phytozome v7.0 (chr-ID scaffold08265; pos 1422262 to 1425238 reverse strand)
gtttctgcaattgctcaggtttgcatattttcttttatcatttaattgattgttgacttattacattcttgtttcttagtttttgaatgaaccattttgtggatcactattcttttgatctgtgttattggctacatactgatgaaatattagatatataattgcttattccatggttgtcaaaaccggattggcccggccggccggaccagtttaactaggaaccggatcttggtccggttcggtttaagtaataaaccccctttttactgaaaccggtaaaaatcagagtgaaccggccagatattgatctaactgaaaatccggacggtttgattttggttgtctgaatcagactgtattcaccaataaaaagaattttgtgtttgctgccactagggtttgaaactctgatcctcagaatgaagctaaaggcaacttaccttctgaacaacttcagtatcttgcaagaatgttgcgctagttattctcatgtagttcctttgtaattaaaaaaaaaaactattaataataatttattttattcattaagttaaattactaagttgttttattttattatctcttagagattaaaacgtacatcaatttgtatttattattttatataattctaatataattatatttatttttcatttgttatcataaaatttcaattgtaagtttttcttattagatgtaattatattattgtttaaaatattgagtttagatattcaaattattaaatttaagtaaacctattttaataattatttataagaatatataaaagcattaattataataaaaatattattattaattttataatatttatttaataatataccggttaaatctcggtttgaccatggttaaactttaaacccttcaactctctgctttcattggttcattgactagtccgagtttaaaaacattcgcttattctgtaaatttggaatcgtagttctaggaattttaatagtgttgtctgatacgtaaattcagaaccaaaaacaagaacacagagaaaagaaagctctagagagaaaaaaagacacttccattcatttctacaaaagatatatcatacaagagcatcatcatctattatttatggctgccacgtaacaaaatgctcaaataacttctcaactgcctaacaatactctctaacggcattttgtgcatgctgtatattctctaacaatactccctgatcaagcttccttgtcctcaaggaaggaaagaaattggcatgtgttcaggaagcaacaaaaggaaaaaaaaatactgctactttaatatttatttatttttattggctttggcaacttttccagtgatatgagcacaatctccaccctcttcaaatttcttgccttctgcatttctaaaactcatcttctttaaggataatgtaatcatgtgaattgaaccttagatcattgtcacacaaatcaaaatcacgataattatatacttctagtatattctttttccagcaaccctttctttttgcttccctttttttttttttgcaataagaacacaagtctccatttccgtaaaccatatcacacttaacaacagaaatggtacccttatcatgatcaataaaagaactctgatcaattgctgtttcttgattactcttctcaatctcaaaattttcaaaatgcctgaattgaccagagatcttggatttcttgaaggtacaacaggtagtttggtagttgaggtgttgatacaaggctaattgatctttagcacgacaggtttagacaaattgggttgagtaagacaagaaatgaagtattaataatggttgtgagttcagttactgatttggccttattccaaattgctgctgcagttatcccttgcgacctagccagtgagcaagcctctggcaattgtccctggcttaaacattctcactggcatttgcaactcatcagctaatccagagaggaaaaaactcaatccttgatcttcttgaattcctgcttttgaataaaacagattaaaggaatccatataatcttgcaaggtagattcttgtgtcaacttccttaaagaccctccattaggtcctcatttattcctgtatattctccttgaatcataatgtccctaaattcagaaacatcatcctgctctcttggggtgatcatgaagtatacttttactaggggttgcgtgtggaaagaagaagaggacgcaaaaaaaatatcactaaggttgtgtgagagatcagttcctcagttctcaccgacttgagtgattagtgagttggaattataataaactttcgttaattgaaaatttagaaattaccgaattttcttaattttttttcctgaaatcctcttcttctctttcttttccaactgtgcattttctttttcactttctctttcttccgttctctccaaataacttgtttctgagctttattctgatctaaatgagtggatttccttacagggtacccctagatattattattattgtgaagtcatttacacattaagcactagtgcagctcatcctatttcttatcattggcatgctttttccctccaatttacagcattggagtgaacatgtcaaccaagcaaaaagatgaatgctatttctgtttgctacctttcagattgttattttctctatctgacgttgagtgctatggcaagctttgttttagtgctatcttgcttatgtttcgagcttgatattttcatttttttaaaaatatttatttgcatgatctcatggtctgcgtcatcctcgaaacagatgttatgatctttccagtctaactcctttcatatttctttgatgtacaagttactcaagaaataatgatacgttctagtatctaatttttctgctcaaattctgaatggctgccaactgaaatattgcagaaattgtggcttgctggattttcaaggggcatcca

SEQ ID NO: 5583 - DNA, 1554 bp, Manihot esculenta
  Intron number 2 from transcript cassava4.1_019426m (locus cassava4.1_019426m.g) derived from phytozome v7.0 (chr-ID scaffold03241; pos 350374 to 351927)
cctgctggtattattgctgggataaggtaacacaaatcatactcttcttctggtgtcaagaaatcttactcttttatgctaatgtagtttaggtttattttttaaatacccattcctgattgtctgctatgacctccatttcacagctgagtatttataacatttcatgcatcccaacatatctttgttcaagactagttctttgtactttgggaggaatagatttctaactttatggaagacatgagctaacacatgactatgcactaaaagatagatccttttctttttttccttttggagattgggggtggggttggtaagtggtgagggtggtggtcattgataggcttaaatctcttttgcttgcagcctatttttggaccgatatgcattttataaatgaagaccactattttgtgtcctgggtggacaaaaatgagtatatagttctggtagacctcttcacatgatttaattccacaatcaatttcattgcatagcttctgcacaaggggctggtaatgtgctagggaaatctactaagtgaaaatttcacatctgtctatcaaaccgcagaatatcagtaaccagtgaagcaaaatgaaggggaaatcattccttgccatctgagctggcattcgcattccggatgtgccaatctgactaggttcaggaatattgtgggttttgattgccaaacagatgcgttttgcaatgttctttttgtagttgtcttaaataggaaccaacaaaatcagagaacttacgatctattatcttatgatgatatatagtaaccattagtttaagaattgatttttctctgctagtttcagtcagtatgctgaaagttgaaaagcatttaacaaacccattagaagaaactgttgctggctagagcaatttaaatggtaagagaaatagataaattttagaaatggacagttggatagtgttaatcagcaagatttgaagcataaattagaagagctcagggagggttgggaatgggatgagacattgatgtcttgattttaatatttgtatttgcttgtgaactttcgtcatgacctaatctattgaaaaatgatggctcagctagatgtttttatagtttggacaggcaagaagattcgaacaactgtaatcctgaatgtatgatctcctttgttggattagtgcaatttataaattggtgtatgatgaaaagtaatattatgagaacatcctgtgactagttctgttcagttgctatgtttggtgaatatagtaaaacactcttttatttgtggttgacaagttcagttcacacatgaactcatactgcttttcagcgtctctcctcatggatgccactgcctaaattttcttggttgcaggaaaaccatattgttttaaaatatttgaataccttgaagaattttctgcttcttttcagagtttctgacagctacatcaatactttgggattttcattgttggtagaaacattcatttcaatttttatgagcagctttggacttaacctttgtaatttcttgcagtgctctc

SEQ ID NO: 5584 - DNA, 4727 bp, Manihot esculenta
  Intron number 2 from transcript cassava4.1_014140m (locus cassava4.1_014123m.g) derived from phytozome v7.0 (chr-ID scaffold06582; pos 660643 to 665369 reverse strand)
cttgacaagcttggaggtgcatttgtatgttgtctaaacctagcgcctttttgttttggtatatatgttattattgtctattatctcttattcattgtatatacattgttctatgatttactgtgcaggcccccaaaccatcatctggacctcacaagtcaagggaatgcttgcctttgatcctcattctgcgtaacaggctgaaatatgctctcacatatcgtgaagttattgcaattttgatgcagagacatgtgcttgttgatgggaaggttaggacagataagacttacccttcgggtttcatgggtatgtcacttcactatatttatttgtttgtttatttagtttacccttgagattagatctttatacatgaggaattgtttttatttttcattatgtaactgggccttggggatatctgggtagaggcaattaataatttcagctgctaaagcgtttggccagagatggttgctttgggaaatattacatctattggcactgtccaatgattatgaaatttgagatcagcaatatagacttcttgttaggaggtggtcattatatgtgattgacattgaggacaccatattaatgtgaagtcttctttatgtatttttatcctttgaactatgtaatattcatttgcatcatatgctgtgttttgttctctataaacagatgttgtgtcaattcccaagacaaatgagaacttccgcctcctttatgacactaaaggacgcttccgtctgcactctatcagagatgatgaggctaaggtttttctgttcttgtgcttatttcttatgtgtgaaacattttgtattcagttaattttgcgctcttatttttttcatttgagaatggtatgaattatacatgtggtttttttcatgtttgctttatagctttgacgacttcttgatgccattatttgttaatggtttgcagttcaagctttgcaaggttcgatcagttcaatttggccaaaagggtatcccttacataaatacctatgacggccgcaccatccgctacccagatccactcatcaaggctaatgacacgatcaagctagaccttgatagtaacaagattgcagacttcatcaagtttgatgtgggaaatattgtcatggtcactggaggaaggaacagggggcgagttggaattataaagaatagggagaagcacaaggggagtttcgagacaattcacattcaagatgccactggccatgagtttgccactcgcttgggcaatgtgttcactattggaaagggaaacaaaccatgggtgtctctgcccaagggcaaaggtatcaagttgtctattattgaggaggctaggaagaggctcgctgcagccccaactgttgcgtaaagatgtctcgaattattgtcttgggtgttctatcaggatgagggaaactgttaattgcctttcatttggtgcacaagaaatttttatggggacaattttgaactatatttgtctccataattttttactgtatttgtatttcaattttagtcacatttttcctgttactgagatgaaaattaagactttatgtttgtcagtcttatgctagtatttttgagtttgtcgtgcccttaatgagaggcttgtgcaagcgttgtgctgtgtgctggacggtttttttaatttaattttgccaaagctaaacaaaaaaagattgaaatcttaacttttccctaatttaattttaccaaagctaaacaaaagaaaatctattagttcctatgcggcacacatttgatttacagtattatataggtatctattgcatttttaataaaattggtaagtttgtcctttatcatggacagatgatttaaaatctttcctttagattttttttttttaatctacatcatagatatttttataaaacgaatttaattatttctttagagatgaatagataatttaaagcaacttaaagatatcaatcatatgtagagaattataatatggatcaaaataaaggcttatttattttttaattaaaaggatttatttaactcatttttaaaatatttatttaattcacttcaataaataaaagttttatttaaattaaaaaagtttagacctctcatggcaaaatagtcattttgccttttcattaacataaattttgtaaaatttgagagagggcggtgcttctcatttttacttatttaattagattttatgaaataaaaaaaaggaaataaagtaattagggttttggggttggaggagaaacgagagtttggaatatttaaagccctacagccgcagacccttcccttgggattcagcagcagagcaacacagcggaaggcggaagtagagggaggagaacgctcttcagagaatggtaaggtttttacatctcttcttttcgcttccacttgtttttctagttgatcctctattttactttcatgactgaacttattctcgcttgcttagaaaattcaggtctacagcaagaagagtgtaaatttgtagttttgccttgttctgggaagatttatgtaaaagctgtttatttttaccctttttccccctttttgtagtttcggactagaaatcttctttctccaagtttagattttgaaatatgtagtaatccaaattaataaaacggtgatccaacggtaacatgcagtgtgagctccaagttgttggtagtgaaaaggttgttaggctagcatcatctattagttactttggggggggggacttgtaactattgttagtcttcagcaatgaatagggctgtagtcgttcatgtgagaatattgtggaaaattgttaatgagattagtgtggttcttggagccattgtgattctttagttgttttcttgctgtttcttgatttagtctctagtttccatcaattggtaattcttttcaggacttctattttcttgattcaattatttcttcatctttctcgtaaattttatttctcattgcattgagaatcatggatcacatttctcttgaaatcacaagaacaaggtcagagttggatgatagaagatgtgagggtttatgtttatggttttaagaaacctattcattgagccacaattgtgacaaggcaccattatttgtgaccattattgatgatgaagtagattaagaagatgggaatctagagattgcagaggagttatctgttgtaatttctgatgtaatcagacctgaatctgagtcacaattagtagctgttgaaaccttgtgaacctgctcttcataaagtcatggcaatgaattcagctgacagcctgcaggatgagatcgtggaagtggggcttgctgagaattcaaagtcaagggggcccatgaaagctagaaaagtgaaggatttgggaaaattggggagtggagatgaggtggcacctttgattgattgaaccatatcctctttcgagaagaaaattaaatgggaatgtggagtttgtgcaagaggagatagcggagtgtctttaatgtttataggtgttggtgaagcatttgccaaacagttggatgatagtcccaatgccagctgtccttggaaaagttctttgtagtgtatttttgataatttggttcttttgcaatttctattgcttcctattgttgctgcatttgctactgagcaaatatggtttcttgggattcaatagttagttgtgactttacttctggagaaaaagatttgacgttagaaggcataaataggttgaaattttatttgggaaaaatcaaatgcaagatgaacaagtgttgagacaagacccgactggacatttggaaattaataattaataaaatgcaagatggagctctgtaaattgcaaaaagattcaattgggcatttggaaatgataaaattcaaggtgaagtacttcaaattgcaaaagaattcaacttcagttgggtatttgggaatgatcaaatgcaagatgaaacaaagctatgccaacccacaagaattttgtctcagttgggaagaaaaatctagaaaatgcaatttggagtatgctgtagatattcaattgaggctcctgcatttacttcttgaggacaaagagctttcgcttggggagtattgtttaatccaaagtaataaaatggggatccaacagtgacatgcagagtgagctccaatttgttatggtagttacaggttgttaggcgtgtgcgatttgttagttactcgggcgggaacttgtaaccattgttagtgtttagctataaatagggctgtagtcattcatatgagaatattctggaaattttttaatgacatgagcgtgcttcttggagccattgtgtttttttagttgcttccatttttgtatcacaacaaagtggaggccctatttatctgaacgtatatttaaattgttgctgatccggttactaatattagaataatatccttgactaattgctgtagctttccattgatctttactttttggtgcatttcaggcaagagggctgaagaaacacttgaagaggcttaatgccccaaagcattggatgcttgacaagcttggaggtgcatttgtatgttgtgtaaaccttgtgtctatttttttggtatatatattattattgtctatactctcttattcattgaatatacgttgttctatgatttgctgtgcaggcccccaaaccatcatctggacctcacaagtcaag

SEQ ID NO: 5585 - DNA, 4211 bp, Manihot esculenta
  Intron number 1 from transcript cassava4.1_006117m (locus cassava4.1_006117m.g) derived from phytozome v7.0 (chr-ID scaffold05780; pos 332535 to 336745)
accttcggataccgaatagagagagaaagaaaagggtatgcttttctctctcctcttgctaatgttctttgctaaagctttgtattatatttgttcttctttggttttgattttctttgctttttctgttgtgcttcttagggtgttagctgctaatatattacatatcactttcttgtaccgagcaaaagtaggttagattaaagagaatggaatacacatttctgaacgtcctggcaatttttggtggtgacttgtgtgttttatatgtatcataaatatgggactgaagtttcctttgagaacttgtgtggtataaatggattctacaacatttttatggattttgtttacaagtcacacttgatactcatgcctaattggtagaatttacagttcttctaaaattcagaaaaccaattatatacagatatgatttgtctaaaattggtaaaatttgcaagtaaactctatatctaataaataagataccaaatatcagaattgattcatcttcaaataaattgatttcatatttatttgcaatatatagctttcaattgctttatttgtcacttactgttaagatgataccagatatggaaagcacaatcaatagtcagagtaggaattaatgcaaattctgttggtggttaataaaattttttgctggttttttttcttcatcagagaaagacacatttggattgttcagttaaaattgtgtggatggagttcaattttatgaaagcaaaattgaatcattgaaattatagcttcccaattatatataaaaaaaaaaagaatagtagattaaaggcaattcatgggaaggagttttggtttgcagcaaatttttctggaaacaaaattttctttggttttagtcttcctgaccctggttttgcttctacaaatacctttctgtagtccggggacttaatgcatctagatatttgacttggatttctctgttcttctaacttcaaatgctgaaaagaaagtattctctttagaatgtctgtaaaactaccaaaaactcaccaaaatgatgcgtgtggataaggtgtgtcagacctggacaacccaaccagttgtccaggaccaggtttggtatgcaaaatggggatcacagacgtgaagccatgatctactgcctgatctttgtaaaggacttgtcagttgaatgatttgaatgagaaaaaggaagaaaccgtccaaataattctagttatgcaatcccacaacaagggtattggaaattgtttgcacgaattcatatatttgctatgctaagatctgcaatgagtgaattgcatgtctatctttcctcaagcaatgttatacatttcattaagtattgtgagtttgctttcgattactgagtctgatctttatgtccccttctgaaactgcttgattggattttgtatgcttgtaaaggattctttagagttgcagaagctttgcattcctgaatgtcgggtatgccttgtcaattcttgactggaccaccctgtatgagacttgtattaaaaaaaaaaaaggacaaaatgttcaatctcgcccctttccaatttagttctttttcaactctttttctaaattagtgaagaagtcctaacttaagcttaatttagctaaaatatcaaaagtacatggctaaatttatttgatttcttgatttagtttaaaactattaagtttaatttcttttatttttttaccaaattagttaaattgaagtttttaggttgatttggacaagaaaagaattttagatggacttgaattagacatcttaacaagaacaaggatgaaatgagcagtaaacccattgaaaaaacgtgtttcacagtatctgtaagcactgagcataagaaaacaaaataacacctttcctttctgacaacatgattcttatgtaattgtctgttacttagttgaagatttgctctcttatgaaattgtgtgatgtgttatcctgcatacatgaaacccagattgtgaaatctgatttaaaattgaatatttgggagactgtaagcttagtttccagatttctgcatttgtttagcagtagcttaatgggttatcaatggagtcattatcctgggacccacattgtttgattggtggattaaaacagtgatcagaacctttttcttctatggtgtttgaactttgtgtataatttatatttaatctccgaaactatggtgcaattatttttggattttgtgaattgcaagaccatgagggtggcaatgtgtcattgattagttgaataatcaaggtttgaagccaagaaagactagttacttacagctggatcccagattaacaggtgattaatcaggctgtttattgattggctatttctcataaccaatcaaacttccatttgattagctactggccactaaatttttaacagcttttgcttgattatttttatttgctatttatatggattttagatttttttttccttttttgtctgtcctcattgaaaagaatttattgtattaattattcttttttctatctttaatcactatttattatactcataaatagtcttcaaaattaataggatatttgacaataataaaaatattaaaatatgagttctaagaaaaaagttaaatgcatttaaaataataataaaaaatattatttaatctctggattataaaattttttttgaaaagactattcattagtccattcattattttttgttgttaaatattattgaaaggtcgagtgtgctgatgcttagagtttttgtaaagctgagtgggcgattaataaatttttttatattataaaaattaaatagtaaaatatttaataattaaaattaataaaataattaattaataatttttttaaaatatgaaggatattttaatttatattttaaaattaagagattaattaataaattttttaatattatagagattgttaaacttaagttaggtttaatttatcaaaaactagcttgagggaatgagtgtctatgattcatataggggtattgagaatttaacagagattatatagtagtttttttaaaattaattttttatattttatatttatttattgaaaggaagaaaattttgttttatgaattaaatataatggagcttaaaagcatatgtttgaatatttactagcatttttcagtgacatttattaatttatattggtcatatattttttattttttgaaatgagaattgagaatttgaggtagaaactgagacttttcatgtttattgaaatgtgtttaatgataataaatattatattttattaaattatatttaaattaataatagtgaatataaattttataataaaggcattataaatgtatttttttaacgatttaataaataatatattatcaatttattttaaaatacactaaatatcactgtaatgtcacaatcaagtatataaaataggttaatgaattaaaatacattactcatttgtccatctttttatctattctaaaaaaattaaaagattctttgtcgttttctctttaatttaaaaggcatataaaaaattttaaaaaaattatttatagaaaaaaagtattaaactaatacttaaagagaaaaaaggctttttgtctaatttttgttttttttcctttttggtatggctttttgcctaatttttaagtcacgtgagtaggtaatttggcatctttcttttcttttcttttattatttataaattaataaaaaaaaacctatgattttaatttttgggtttttttaggtggaacttaataggtgggtggggtccattttacgtatacaaaaaaaaaaaaatgagaggtctaaaaatgggccacatcttcaaatgagacattataatattatattagctttttaaaattttttttggtaaagtcattttccttgcacagtagtttctggctatgaagcatcggaaaagacaagctgaattccgagggaaagccgctgtcgttgattttaatattatatatatcttgacttctttcttaattttcctttaagcttctaattatttcattaattagtcataatcgctttcatgaaaatatatgttttgtaaattttgttttctttttgaaatgatatgttctgttggctattcaatctcttagttatttgcggtcttggcgtgctgctcgtaat

SEQ ID NO: 5586 - DNA, 1542 bp, Manihot esculenta
  Intron number 2 from transcript cassava4.1_015635m (locus cassava4.1_015635m.g) derived from phytozome v7.0 (chr-ID scaffold08873; pos 422241 to 423782)
atactgcagggcagacaaatatctactctgtagaggttggtcatttgcaaatcttccaatacatatataaagctttctttcttctcttatttgcctattctgttaaagtttatgttgctccctaacacggtacctttgcctgttgctgccaaattgtttacaattggtagtcaccaaagccaactacccaagatataggtgaagatcaaacaataggtattaaaaggattgatgaatctattcaatgctcaacataaattttcaatgcaccacattctgttctttaagtggcgcacgattatgattttgttccattcagatgaagttccataaaaaagtctgtattttttaagccattaactgtttgtgacataatacacctcaaattaaatctggcagttcctctgaatttatgcccctgacctcaactcataaggtgcatgagctcctacgaaaagaatttaccattatctagtttgtggtttgctgaatgcccttacgactaggtgatagctccctttaatctaagcagcataactgctattctaataggttcatgaggtagcattttttttaggaccataagaaagaaatggctgattcaacaccaagccatcactagcagtgcaacaaatctttttgttggaagattttagcttggtgattgaatatctcatagcttggttattggatatctcattagagagagcccgtggttggtgtccaaaatatgatgcttaaggttttgagcctcaacatttattccactttatagacaggttgtaaggccaatggtattccaaatgtatcaccgtaatgttctgtggcattgtgttccagttccatgttcagttgtaactatagttaaccaaagaagcaagctatatatttaagaagctatttttctgcacattttttggtaactgctactaaaggtatggtttagggctagtcatactagataggcagttaatcacttgaggcaattgtttgtgttttattcttccgtaagaagttaaggttctgatgttgcataaagaggtctgagaaaagattcttgattgcagattcacattcttttgcattagaaagagcattacgaattgcaaactgtaataagtgtgttggtgttttgggaggagagtagaacaagagtgtgaataaaactgaaatatggtctactgattttattaatctactgatatttatacataaaaatataactgaaaattcaaatgagatcatgagtatttttgaattttaaacttaaaaatcttaacaaaataatttaaaactaacttattggatttagccaaacaaccacaatcttatatttgcatactaagtcaattattatagcaaagtggtcactggggtggttcgtttctggaatacatggaaacttttcaatttaatctgtgttcccatgcatgcagtcatacagtgtctctctgtatatctcttctccagttccatttctatcgagtaaagaactatgctattgttcatctaatagcttctaatattttcagccaacagtat

SEQ ID NO: 5587 - DNA, 519 bp, Manihot esculenta
  Intron number 11 from transcript cassava4.1_000025m (locus cassava4.1_000025m.g) derived from phytozome v7.0 (chr-ID scaffold04450; pos 207908 to 208426 reverse strand)
ctttctcgattcaaggagtcacctgtgagaaggtaagaagtcaaagcttttacacactttcaaagcttacgctgttttaatagtcctttcatttgtttagaatctaagttatcttgttcaataggctatttgtagtggaagttgtatgaaacttaagcttttttcattaagtgtcttattcataccttcttaatcctatggttggcacatagtccattcaagttgcctcttgtcacttcaatctcctaaacaaatgattctgatttttttatactgttggccttttatgacagtgcaaggtagagttctgttattattgctatcaactccctgagttatttttgttattatgtgctctaacaagtttaaaaagaaaatgcactcatgaagattgtggttttcttagtagtttggttaacaggttgtaactggttagaggatattttatatgtatattaatttcactttgtaatgctgatgatccactgctttaattgacagggagcagttaatttttga

SEQ ID NO: 5588 - DNA, 2483 bp, Manihot esculenta
  Intron number 3 from transcript cassava4.1_003656m (locus cassava4.1_003656m.g) derived from phytozome v7.0 (chr-ID scaffold06814; pos 623268 to 625750 reverse strand)
ccacaacttggccttcttaagaacttgcaatacttgtaagtagtatctctaattttaaagttaaattgcatattttgtttgtccaattgttacagccataatacaatgcactagtttatagctagtttcatgaaagcatatgtgctattaatggtcatatccttcctgttgatatgatgcaatgcattaagtagtttggtaatctggtcaatttaataggatatgctagtctttttatctcttttttttttatttaggtgagaatttcaattttcaataattttcttttcctataatgtccttatggcccatagtcaactttggttccttgtacttcgaggacatgaaaatttaaaaagtttgtacaaagacacatttggagtggagatgagaattacattcttggaaaaatttatataaaatagtatctgataatgcaataacaggaagggaaagtgataaaaagagaatgaaaaacttcatgaacttgtttttttcccgttttatccatttttatgtggagaatattgtgcaacttgtttctttcaacctgatgaaatttccctttgtaagtttggtgagttggaaagaagcttctaggggactttatggaacaagttgcttgtgcaacagatgaacacttcaagcattttcttttctttcaattttacatctcttctttaggaatataaaaacattcttgcttgaatgattttatcgcacagaattatccaaatgtaagcaccttttatgctaaacaggaaaatagttccctttgattgtttggatacttgacaatgatggaaatgaagaatgctacttcttttgcaaaatagttgaagtgtatgcgtatgactacttcggtagcacgtataagtgcatatgcagatttctgtagacagatttggatatgataataaaaatacaggattctccaatgggagtgatttttaattctcctctgctggtgaaatgccctaatgagtttagattgttgctctcctacagatgtagtttgatatgtagacaaaggttaaactgaggttcataggttagttggagaaagctgatgaggtgatctgcaagggctagtgcttcataagacagttcacaaatgtatgcagatatagacttatagtaagaaggggtaacattcttccctcattgaaatggttgggaaaatagtttatgctacacatatttaccaaccatgcagattgtggtggttttcaaccacactttttgcactaaaacacgtagagtagtttcacagaccaatgagctttgaaggaaatatatgctcatgtcggtgtctgtcaaaagttccatttctagatcaaatttcctccaccaataagtgtaatggcatcttcagttagagagttgacgtacaatggtgaaggaaaaattcaagcagtattttccaagtttgtatgggaaaagagctttctatgagaatgtgatgtttctggtgtggaatattcattgagttgcaacctactcattgaatttaaaatttgctctgttttaattatgacaagtgaaattgagacatatcatgtgctggttgacataggtaatggcaataattattatctttttatgtagattaaagatctattgcgatatatattttcatcccttaatataacagactaatgtgcaaatatcaacatacaatgcgtaaaacaggtcctggagaagctttttgcaaaacatagtgtaggattgagcgcttaccaccttccccaagctctagcttttagcagaggcacaacttcaactccttgtattgtagcagcccaagcgccatgggtagaaggaatctgggcaagatactggttcacctagccagcaaaaccccccaaccaagcacctgctagggatttgaaaccatgagcctggtttttgatgtcaattacaggattaagcacttaccactgtgccaaaaggttaagaatttagcaaagtgtaacttcaattccttagtgtaacagcccgagtgccatgggctaaaaggatgtggacaggatgctggcaagtgctgggtgcataaactaaaaattatattttggattcacatcttgacattttcttacaatacttgcacctttaactctagatttgaaccaatttcatttaattgcattaaggacctgcatgctcatgcaaacactttaaaaactaattaatagcacatgaattatttattagcatcaaaacttagttaagacacctaggtccaacgcatagtttcaccattgtgaatttcattttagtttgctctacttgaacaaaaatgaagaatttacttctgatttaattatagatatcctgaacattgcctggccatctgttaaaattgcatcaagtcttgtgtgttgacagttataaatcttatttcatcatgaaccttcatgattgactaaagcagtatataatgaacagggagctctacagtaataacataagtggaccagttc

SEQ ID NO: 5589 - DNA, 2766 bp, Manihot esculenta
  Intron number 2 from transcript cassava4.1_013209m (locus cassava4.1_013209m.g) derived from phytozome v7.0 (chr-ID scaffold11297; pos 219747 to 222512)
ctacaggttttggtgcagaggccaccaggattaaggtaatttttttttcatctctctaaccttttgtttttgttgttaggtctttttctgcaactctcaaatgggtttctttgatactacgttttctttctttggttgctgaagctgactgtgcagaagataactggctgaaaaatacgtaacttggttcagataatctgctgcatctatggaattccattgttatcaaatcgatttaggcactatagaataggcttcaatgataaagattgtgcttttcagatattttctctatttccttgctgactgaacggtgggtgaaaaggtttttcttgccaactcaattttgggttattattacaaccctcaatttttttttttactttggttggagattcatattctgtgaaaactttggttttatttcgattcataattactttgagcaatcaaaggcacagttctgtgtcagggcatcacgacgagaaagtgaatgaaaagagaaatattgaagtgaacgttttatattggacgatattctgtgtaggtgctgctttttccgtttaaaaagatccatgaaatgattttacagtcacagtaactttagatgttctttgaaggttcacatgaatttgatttgggtttctgcaattcttgttttcttttacttgccttctcttgcctccacctacaaatgttgaactataatccttatgtgtgcgctttttgagtgattatgtcgactctgttctggggacatgcacaagtatgtgcttgtcttctactgaagttgatcaagtgcccatgggttattgtaccattcaattctttgcccttttcttttcctgtggcaaacaagtcaggaaaattaatattgcacatcttaaaaagacgtcttcttaataaatagaagatattcctgagactaaagtgttcctgcatctcttttccagggaacaattaatattttagcaagcaaccttttcctcttctgaaatatatagagtgtgctttgagtagagcccaagcttttaaaaacacagtttacaaaagcagctagttaaatgaatataataaacttgtgtgtttcttagaagatatgtggacttgttggtaatttgatccaagtgcctgtcttcaagaataagggcacaattgctagtaaatagagaaagaagaagaggatgaaagaaaagagaaggaaagtagaggagagaatatggttctcttcatcaagaatttattagtgctgcctgccaaatattgggcttttcactacaatgcctctggtacaaaaagtaaaaaatgcgaggaatgtcattttatatggtggatgaatgggtttgaatcactaccatggactgccaatcattttgtgtcaacttaatgcttttgtaagttacttacgtttacctttgtccaataccacattatctctaattgctgagctgttgatacaaaagagaagctgttgcagcttttggtggactcattgctgatcaatctgcttaagttgattctgccattcattagtgtgttgcctttgacatatccttttcatctctgactgccacaatggatgattttaaattacgtctttcctttgctacatgaatgaccaatgggtttgtttggttccagcagcacttcttttttcctcatgtttgatgtttattttgaagaaaactccctgatacaagagtaattctcctacagccttattcctattggctaggctgtccttttgatgctaaattctgtttcattctgtttgaactctactatcttgtgtgcttatctcatgaatcacagttatcaatcttcagtctgtgatgcattgagatgttcaataatcttggttgtgaagatattttgaatgtattttcaggaattcctcatttttttaataccatatttgtactatcatgtggataggaccacgcgaattagaattgacaattgttatgattgcttggtacactaggtttatggcatataattctgccatcactaaatgacacagtaatactaaagaagtgtgtatggttgtgcaaatgtaagcatgcacgtgcaattcatttcttctgatattgtatatttcttttatgcatcgataaaaagtttgtctccgtattagactccagagtggtactataagtcaagaatttcaggagtgaatatattttgtttaacaataaattcaatgcttaggccttagagtaaattttatttctctctttgcagaatgattaatagtagtagcatgccaatatatcatatttgtgttttgctttactaccaaattgtgcatgtttttggctattttatgaaagaatggctttgttttatttgctgcaaagttagaagatacaattaatatccataaattgttatgcctagctgaagcaccagttagaggcaggatgtgatattagattgatctatttataattggggcttgccaaataatagatggcaacatgatattattctttaattattctgtttctggtgattatcacaacagatactcatggtttagattttatagaaaaggcgaaggctaaggttttctttttcatcactggtccttttttgtggtttctgatctctatatcttctctatagtggcatttttcttgaatgatgcagtcatataatagcttacttcatttctcatagttttttttttttaaaatttttttattttcttattccctttataatccttcagggctctgaagttcagttcacatctgctactca

SEQ ID NO: 5590 - DNA, 1420 bp, Manihot esculenta
  Intron number 3 from transcript cassava4.1_008865m (locus cassava4.1_008865m.g) derived from phytozome v7.0 (chr-ID scaffold07996; pos 291348 to 292767 reverse strand)
tctgcgttctggtaactctttttctttgatgcctttgagatgttgctagtgaaacattattttaacagttcaaaactggtcggtgctgggattttgtgcatgacttctaaacttcttgtgtcttggatattttggctcaacatattcagagttgttttttctaatacggttgtctattttctactgatttcatacatgtttccctagattgatactcatagtatatttctttctggtgttctggtattgccttagtttcaatttgagtatttggccaaggaattgacccaaaacaaattattcagcaaaactaacaagttgtcaaaacagttccagaaaataacattttgggaagatgtgcattctactcagttttacattttcaaggaatctgatgggcacttgagactgttgcccctaaatatattgtaatatgataagatccattagtttataatgatcagaattagttgcattatgttgggttggttggtcgtgtatgtgatatgatttggcactggttgcaaatagatggcagatttgaggtttgagaaaagttgaatgtatatatggattgaaaattaaagaattaaaatttgatatggctgttatctgtaatagatattatctaattaggtagatgccgaggagagaatatgtaaatgtaagcctttaaaaatttaatggggaattatataaatatgtaaatgtaataccaaatttactctttgctacctatatgtttggcctcaccagtctgtatcataacctgttgtgctgtccctgccccagcctcacaagagagagtggacgttaatttgccatatgtgaagaagcgaaataataggatcttgcttgtttgatgtgactttgtaatttgaagctttatctggacaacaaatgtattaatagcatgagcataatgatgttaaagttgtgttacaatataagcagttagttttatatggtaataattagcctaaacactgcataatgtttgtgattttattcttacctctacctcagaaatcttggcagtatcacagtgattatgcgaacttgtattaattagctagcgattgcgtaacatagatccaagttctgtacttcagcaggaattgatgctgatttgcatgtgctattaatgattcatgtgcatgtgacggtgatgtgtcagtacagaaaattttaaccttcttgaacacaatctggtaaaaacatgcttctaaagcaacaataaccacaaattttccctccttttttgtggggtctttgaaggagttaatgcttacttctctgtaagatggctccttggtggggtgatgtctattgtctgattttgtagttaaaagtacacttatttctttcatggttgaagtatgcagctaatgctctgttctcttattaaatgcagcgtagt

SEQ ID NO: 5591 - DNA, 558 bp, Manihot esculenta
  Intron number 1 from transcript cassava4.1_002546m (locus cassava4.1_002546m.g) derived from phytozome v7.0 (chr-ID scaffold12525; pos 702760 to 703317 reverse strand)
cactctgtttgtggttgtcccttcacagagttcaggtgccttttccatcttcctcttgttttattttttattctttgcttgtcaactttactagcatgtgttgattgagatatttacttttttaacaatattacgtgtaatatgaactttccttataattgacaacttttgccaaattccagtcatgcgtcgatatcattttattcattatactttgactaatgagtacttccagatggtactagggaatttaccttctagtaaacagcaagggaacttcattgatatttccctttttggaaggtatttactgaagatgaagagttgcaatgtattagctgttttctggccatctaccttacaaagtattttttttcttggtagtactgatgtcatgattttgtctttgaaaattttaaggaccattgtgaatgaattatggtatttctgaaatctacaaaatgcagtagcaccatttttctttctttcttttcattgtagtttgttactaaatatgatactaacaacttgcttctgtgattatttaggtcgaaagtt

SEQ ID NO: 5592 - DNA, 2757 bp, Manihot esculenta
  Intron number 1 from transcript cassava4.1_000149m (locus cassava4.1_000149m.g) derived from phytozome v7.0 (chr-ID scaffold01447; pos 74381 to 77137)
ctgctactaaggacgctctcattaagctcttaaaggtacgcatttttctgaattgtcaaataattgctttaattttgtatgtttcttgtgaatttggggaggaagaattgttggtctgtgcctgtttcctgagataactgtggaaagggaacgaaagaaattatacatttggtttcttgtctttgtgtgttgcgtgtcttttggtggtgagctgaatttgctttaactagagttactgaagtagtgggattagttttcgtttttaacgtgagctctgggaaatgggatttcgatgcttcaatttgctttgttttggggaagaaaggagcatttggttaaatttgattgaattagggtttattacggcattgttctttcaaggttttgcatctaaaactggataaatagaaaaaagatccaagtggatttatgaagtacaattgtggaaccatttaatttctgattagattaaataaaagaaccgtaggattaaacatttgagcttgcttccaatttggtaggtcgaatcatttgggcttaaagtttattgctttgatggaaatactgagcattcttaccagaattaatacggatcttggtgggacttctgtgcctggaaaaattaggaatcaataaatgggtcctttgttaggatgatgaagtaaggacttggtgacaggttatggtgcttcagacttgaagggttcttctctgaattgttatctgatcagcctcattaattaatatttgagtaattttggaatatctagcagtcaaatttagccctgtgggttgttaactattaagttgtgcaccatgccatagtgcaagcgtgcagcagacggcaataatgtggttacatgtcattggtgctggatacctgattagtagcttagtctatctagaacatgcttgctaggtttggtggtcttcttggaatttttgcattgggctgaacctagtggtttgtttctcagagcaatggcatatttacacaagacatttgaggtagaagctattggatggattccagattttaacttgcagtttttttgtccctttttctggcttttcatgtatgtggggcgaaatgggagtcagggaggacttacaggcgtgtggtgaacttgggcaatcattttataacataatcagtgctacctggctagttttaaggttgataggagacaatatagagctctttaatatagggtttggtttgatggggttggggattattttgcatgcatatatgggcttcaaagtagagtttttgaacttatccttacttaacagaggctgtcccgttttgttgctgcaatatagcaatcataaaaaaaaggggcattatgattcctctttgcagttgtgagatgtgatattcttaaatatagcatggataacaggcaatattacaaaagattattaagtctattgtgacagtaactttcttccatggccactcaacttagcatttaactttagtgtggtaatttaatttcaataattgtggacaaatcaccaaattaagtgtttgtgcaagtcattgaggtcactttcgaattaattgttgttggaaatttgatgtggtaatttgtcaaaaatctactcaactgcgagaaaaattaaggaaaagcaaccttttataggggcccacttttacatgtttttgagtaggataggtttcatagactgcaatactagatttctggaaagattttgattggaatgtgtccctagtaccatcattgaaactgaatttaaattctgtgattttcctgaaactttttaaaatttttctactttgttggatttgttggacttattggacttaaatgttaagttgagaaaatgagtgaatttacgctaagtgatgatgttaaagatttgtaattattggtttgaggtccgttcaacctatgtaggattactcacttttacttgcaaacagtagtttttttttccctaaaaattttattctatattttttgaactgcaagtaaataataggtcggggtgcagacttggtgtctaacaaagctaaatggcaaaaaagaatccacagaactacaacaactagtttcggattaaggtttaatggttgttattgcatgcgaatgctagttagaaagtcatctcatagttacatctaatttattgttccttacattaaattgcttgccatcgatttaactgacatcatctgttgaaattgagttagatatctagagaacactcccaaccttccactctttcttctctttgctgaaactctgcatggttttagatgtattttcattttaactcaccatttaatgcacattagtctctctctctctctctctctttttggccttgaagttgctactgcaatggggcttctttatgtcactcttccacttagtgctacaaatttatccttcctttctttgatgttttatattattcttttttatttcataatttcctaccattgtatttcctttggctaattatctgttgaataatgttctgtatttcttgaatagtatgccagtttgcgtccttggtgcccaggcttttttgctgcgttgttcactattttgtggaataagaaaattctacatgatgatatttacattatgatgaactaagaaaattgtacttaatgatagttatattaactttgatgctcatgcttgttagtttttttttttttcattaattggcaatatttctgaattatatatataatttttgcatgtagcaagctgcttc

SEQ ID NO: 5593 - DNA, 1557 bp, Manihot esculenta
  Intron number 1 from transcript cassava4.1_016324m (locus cassava4.1_016324m.g) derived from phytozome v7.0 (chr-ID scaffold09434; pos 147580 to 149136)
cctctctgctgcgcaagctgctagatacaactctggtactaaatggtttcgtcttttttctttgttttgtttctggaattgattatctatttgagaggtttgtagtctggttctggaagttttgagcgatctttttctagttaacacgtctcaagagtccttctcttttgtttaagttgtttgcacatacttctattagtaaattttctggaatgatctgttatttgagggatttcagaagagcatgtgtttgggaaattatatatatatagttttggtctctgagctagtgaggacaatgcacaactccttatttggtagaagttttgtagattcactttgattaatgccctggaatttaattaatgggtccacggaatcttcgaagattttattttcatgcgctaattataattaaggaattagggttggagccatagaaggtcatagtgagcagcttcccttgctaaggaaggagctgaaagttcaatattagataatgggggttaatcaataataaaccaccaaaaaacatgacaaattataaaaattctaaagggcagaatccaggggaggagttctttgagatttgtttagatctgtcaaaactccagcaaacttcagatgaacttgaggcattgagattgttgttttccaaggaaagaacaaatcttctgaatgcaaaatcagaaccttcaagccaaaattcaaaccttttgatcaagccatccggttccttaaaatcaaaacatctgcaggacagcaagaatattctagtatctaatatctatcatgccaatggtgtagaagaatgcaatgatgaatgtgatgagaaatcaaaagatgaaaccagtttcagtgaagatgagaggttaaacctttcatttgactagcccagttagcatgtgttaaatgcatgtattttggggaattttcagtgagagctatagaaaggaaaaaagttctataacaggtgtagtttgaagtggtccacgagttatgagaatgcacatgggaaatttctctgggtgctggtatttttacgtcgattcaaatgtgttgctcgtttctttcgcgaaccaaaaaacaaagagaagaaaaatgtgtttctcattctgagtagttgttcctagatttgaatattgaacgattatagagaatgaattaaagtttttgtttaattctgagtagttaaagtgcagaatgatatttacttgttagggacatgtttggttggagcttagcaatcatctgtatatgtacaagtatccgcatgaaatcactcctgcagtcctggcttcctgctactataatggatataattttcctctgtctctctttttcttttcctttttgtttttttccatttttcactcttttgatttgcattcgaatcagtcgccttgtgttagtggaatcctaggtgttccttggtttcaaaaccatggtatccgcttttctggtctttattggtcgctgctgctagattgatgaatatttaatccatgtaacttttcttttcttctgttgttcaatgtatcagcagatcatttggca

SEQ ID NO: 5594 - DNA, 2179 bp, Manihot esculenta
  Intron number 6 from transcript cassava4.1_008916m (locus cassava4.1_008916m.g) derived from phytozome v7.0 (chr-ID scaffold11388; pos 59688 to 61866)
gtgcagataatcattcaataacgagggaggatcaggtatgcattacgtcaatccattccattaatctcattgtttcatgtggtgttttggttcctattctcctcatcttaaaaatatgtgcatatattaattccaacaggactagaactctttagtgcctaatattatctaaatactaatatattcatcttttctataatattctgtgaattttcacttgggataattcccagttttggttggaaattgtcatgcagcttgtttgctgccttgttttctgcttcctttctataaacttctatgaaaatacagttttggcaaaaggctttttaagctcttgagaaattggccaaaaatcacttaaacggttaaaccttgattaaacaaaatggtctatttagactcttgaacattttataatagctatttgagcacttaaattctataaatagctcgaaaaaaaagatccaaaacctaacacagttaagtctccatcacaaaacaatggacattaacgcctcaacaaatatcctgatggtcatttaagtcccttgaataaataaatttaatattacactttaataattaaggttataaataaattatattaatttatattgttaataatgtatattactaattttataaaatccattaaacgaataaaatattatttaaaagttttatgaaaaattaaattaaaatttgttcagaagtgaattaaaagatcctttatttgaactaaaaccgtaaataattcagattttctttttttattaataaacatcaatatttaaactcaaaacatcctttaaaaattttaaaatatctttaaaaatacaactattatgatatatgtaacaactacaagaaaagtcctgaatattaaaaattctcaatttaattttattatgtagatataggatttaaattatgctataaattgagaaaatctcttatagttttttattagcatttataatttcaatgtatttttatggtttttgttatttcccttacatatataatgttatgtataattttagtaaaatttatttatttttagtgacactttacaagttttaaaataagatgttaagattaaaatttggtctttggttgatggaaaaaaaaattaaattctttttttaagcgaattaatttttttatactttgtattaaaatttgaatttaaatacttgtaaattttcttataatattctatttatttcataaaattattattatttatttttaacaatataaataagtataatttatttataaacttaatactgaagttttaaaattaaatttatttatccaatgagagcttaaacggctattggctattttttaagggcttaaatatccaattttttcaattcacaaatggaggcttaacagtgtttttgggcttaagtggctgttttaaaaagtttctgaatttaaatgactattataaaatgttcaagggcctaattggaccattttatttgactagagcttaagtggttttttgccaaattctcaaaggcttgaaagagcttttgcctacaattttcacaatgctagttttcctaccaccgctagttaggtgtaggtggtgcaatcttaggataataaggtgtaaagaattaattaagataatctccaccataaaaatatgaacatgtttgtgggttcatgtttcatgtatggataaaaggagagcagcccaaaaacatgagctgaagtggtaagaattgtaaagacagctcaaaaatgttttaattctaaaaggttccatgtatctccaactagtttgagatcgagttgagttgaatgctacttgtgccctatatcattggctagcagtccattcatatgaggacaacctagagggctcatttatagttatggaggatgtaaaaaattagaagttgtggataaaattgaaaaccgcgcaaacttgtttggctctctggtcattcagcctaaaattaatgtatcgcctcagaactgcattagagtaagcactaacaagtagtctcgccgttgatcattttcttttactgataaattccacagatcagtattttcctcctccaactttaaatcccaattacatagactacatagttgtttgtttatttatttttcattttaacagtatattcgtgattctggcaggacaact

SEQ ID NO: 5595 - DNA, 4835 bp, Manihot esculenta
  Intron number 2 from transcript cassava4.1_017186m (locus cassava4.1_017186m.g) derived from phytozome v7.0 (chr-ID scaffold03773; pos 86113 to 90947 reverse strand)
ctgtgttgggtcttggtataattcaacatgaaactttgatgttgtgttggtatatttgatttagatcatggaagaactctgaaatttttatctgttgtttggctttctaaggcatgtgtaatggtttggcgcacacaattttagatgtgaagaattttggagaatattagagtattcttgtagtttactcttgatctttataagtgatttacatgactatttatatacaaagaattataattaaacaggaagcaaataataaataataattactaagataattaatgatcttagtttatatttagaatccgtaatcaaatcaaatcatatcattagaatcagcaataagtcaacactctctctcaagttagtatatagatgtcgcagatgcccaacttgcaaaacagattatagtagattctactgttgaaccctttagtgaacacatctgcaagttgctgagtagaagtcgcatgaattaagctcaaaatgccgtctattaatttttctttaatgaagtaccgatcaatttctatgtgcttcgttcggtcatattgaactggattttgtgctatactgatgacagctttattgttataatacaaagttatcttgtctctctcgggcaacctcatctccttcaataacttctgcaatcataaaagttcacacaccttgagccattgctctctattctgtttcagcacttgatcgagcaacaacactttgttttttgctcctccaggtaataaggttccctcccacaactgtgcagtagtcagaggtaaatctcctgtcatcgaaagatcctgcttaaccggcatatgtaaaaacttcaattcggagatgatcatatttggagtaaagaagccctttccctggcgcagatttaaggtatctcaagatgtaaaggacaacctgcatatgagtctcacgagagttatacatgaattgactgactaagctaacataataggctatatccggtcgagtgtgtgagagataaatcaatctccctaccaatctatgatatttttcaatatctatggactcacccgttcctgcttgcatcttgtgattactttcaatggaaaattctgctcataagaaacaaaattagaaataagatgtttagtataagatctgacaccttttctttgtgcaatgtgtttacttaaattgttggagcatttaagagttatggataactcacgagaaaaagattattgaccctgagtagactgcaaggcttcttctgtcttgtttcttcttgaatacctcttcaaatttggtttgtctaaatgtccaattctcttcctgattgaacatctccacctgtctactagaactctctcgctgaaccgtatcattcagaatcacagaattcggggtcacctcttcttgctcattattcttcctctgaagaggtgagttggtgaatttgtgatactgaagtaggattcagtttcttggaaggtaatatccatactgacaaagtatttcctagatggaggatggaaacatccgtatcccttctgtgtcagagaatacccaacaaacacacgtttaagggcctcggggttcaattttcccaccgtcctagcatggacaaagcaatcacacctaaatattttttgtggaacaacgtatgaatttcttctttgtagaatctctaaaggactcataaaatcaagggctttgaggggcattctattgataaaataagcagataaaaggagataaaaggactgcatctctctaatatgctttgggtaggttcatggtgaacataagagattgagttacctccaatagatgcctgtttttcctttcagtaatgtcattttgtgcactagtataaggacaacttatctggtatactatcctattggtctccaaataagcagaaaacctactatccatatattctctcccattgtcagttttcaaaattttcgtcttagtatcaaattgagtacaaatcatcttgtgaaaggattgaaaacaagaaaagatatcacttttagctttaatcaaatagagccaaatcattcgagcacaacaatcaataaaagtgacaaactatcgattaccagataaaaagacagtttgagtaggtctccaaatattagaatgaatagttacaaaagaaatttggcttttattatgactcaaaggatatgaggttttagtgtgcttagcatactcacaagcatcacaaaataaagaatcaaactgagttctagcaaacaaattaggataaaatttttttaaaacaaaaaatgatagatgccttaaaactgtctgtgccactgtagtatttcctgattgacatctttattttctccaaaacaggcttgagatatcgggaacttggatcaccttccaacatgtataacttggatcaccttccaacatgtataagtcatcatgcagtctaccattgccaatcctccttgtgagaagattctgaataacacaatgatcaagaaagaactcaattttacagttaagaacattagtgatagtactgacaactaaaaggttgacaagaaaacggagaacatgaaggacaaatgataatttaatattggatgcacaaataaaaacttgttccggatatgggagtaaaagtgctatcagcaattttgacactgtctttagttagagaaagaaaataattaagaaagtctttagaagagcctgccatgtgtctattcgcatcagaatcaataatccatggaacagtatcaagagaggagagaggaagcattaattgattttacaaagttagatgtggcaccagaggaggaagaggtgtcaatatgagacagtagacacttgagactctgaatttcattaggggaaagaaacccagcaattgttgtctccttaaaggactcatttacggtttctgctaaattagcttgagctctagaggtactcgttgttttccttcacagcctctaatgggacgaccatgtaacttccaacaagtctccttagagaaagaggaagctgcggtgtgctcaaactaatagtcaatccagccttttcaagtgatgcagtatagagtataacatgtcggcaattttcttcttgttgaacatgggcacgggcctcttctagagaaggaaaatgatttttctccaacgcttggacccgaattggatcatattcgttattcaaccctgcaaagaaaatcatagacctgttccttttcaatcattttttgaaatttgattgcatctccattcccaaatttggaataagttaaggacaaagcattccatatttttgcagtatcgattaacaaataggacttagagatacgaggatgcatagactttaaccatgttataacaagacaattatctgagttccattgaggaaaatttggatcactttcatccggttgcttcttattatcagtaacatagccttgcaatcctttagctttgataaacaacaaacaggactttgaccaagcaagataattggttccatcaagttttacgggactaatttgtaaggaaggattatcagataggaatcgaaatccttttaccttttgctatggtaaaaacaaatgaatcgtgaaagaataggagataccaaggttgtacacacaagagagtctaactgaatcatcaaaagacgaggtagcggcacgaaaaagcggaaagatggttggaatcgttgccggagtgatcggagcagcgaagcagcgtcgaatgatgtctcacacgtcgggaagggagagcatgtgggactttccgacatcggagctgggcagttgggctaacgatggttcgacaagcggtgagaggtggaaaggattctagatagggtagtaccaaaaaggtagatctagggttttgaaaccataaagaagaaaaattgaatttaaactctaaaatcaagaaaaagtcttgataccatgaagaattttagagtattcttgtatttcattcttgatatttataagtgatttatacgactatttatatacaaaaaattacaataaacaggaagcaaataattaaaaaataattacaaagataactaagaatcctaatttatgcctagaatccgtaatcaaatgaaatcatatcattagaatcagtaaataaatcaacaagatgaatatggaacttcgtataaatcaacatgaaattgtggtctttgaggtaatgggataggtggtgagagtaatggactcgcacacacacctctatatcagaacaatgtgtatgacagaaaagtagggtataaaagaagagaagtagggatttaggcctaggcctttgaggctagaataccatgagaaaatagaaaggtaagaattaaaaagagaacttttggaattaattgcttgactattctctcaagcttggttatttaaataggatacataacatactaagtagaaaaaatatataatgactggcaaatgctattcctaattaagtgtaatttttaataatttggtatgattttcataatctattgcatatttgcagcaatctttcttaacaaggagattaaccagcaagctcggaatggattgtatccattcgccagcttgagggggagtgtgggaaaatgtagttgtacagctgtggggacaactgtgtgtagagcccctccctcaagcctgggtttatgtctctttaaatcctgtgctcttctctgttgtagaataaggaatattatgtataaagttgtaatagttccgatgtgttgtgcataatttttctgctcctaatatcaatagttattgctcaacttctactgcaggaagaccttttcctctagctgctgctcgccattta

SEQ ID NO: 5596 - DNA, 1015 bp, Manihot esculenta
  Intron number 1 from transcript cassava4.1_010330m (locus cassava4.1_010330m.g) derived from phytozome v7.0 (chr-ID scaffold10899; pos 23883 to 24897)
ccaggaaacgttaaggacgctctgctcttgctaaggtatgtatggttatttcttggagccaataaacgttgcacaggatttgctttcttcttctgaacttacagtataaggatttagttttttcaagtatattgagtaagttctgatgtggaatttggactgttaacagtgtttttagctggaaaattgataaattaatgtcccgtttaagctgagattcttttcagttgaaattgttgccatttaccaaaacataaggagaaaaggaaaaaaggttttataaatatctgatgccggactaactgtggttgtattttgaatttagatcttgactatcttgttaccatttatattttatgaagaaaatttagtagtacatgtgatgcatcttttgaggtcagcatttttttgaagtttatttattgctttacgacgcagatatgaaattacaggggccaatttagtttcatagaatgttctaatcctactgaaattctgtaacttcgtggatatgtctgaaattacatttgaagttgtgctataacagctgttgactatgacagtttgacaaaatatgtcaaaatgtcgaccctgtattcttcaattgtgtggattttcttgtatttaaatcctttctaatctatgttgtagaggtatgtagacccattaagttaactcagcttatcttactttcttagaacttccctaggcctatggtgtttcccatatcatctgtctgatcacattttttgcttcagatgataccattgcaggtggaaaaaaaacagtaaaaatattttcaattgcttctaataaatcagtacttcatttggcattaccatcttatgtgcactcaaattgttaattgagggacacactgtgattaagaatgtagtttgacgtggttagcttgggttctcatggtgttgcatatgcttccatttgcttctgtttgatgtactgaattgttttgtattcattggatgtggcagagcatctttggattgcggaattg

SEQ ID NO: 5597 - DNA, 1802 bp, Manihot esculenta
  Intron number 5 from transcript cassava4.1_004138m (locus cassava4.1_004138m.g) derived from phytozome v7.0 (chr-ID scaffold00668; pos 99411 to 101212)
ttatttactctcaagggtgagatagatgctctctcttatctctctctgtccccccaccacacccccccccccccccgcgttttcatctatctatctatttgtaattctcatataaagcataatggtcaatttagctttgtttgtttgttctatcattttgaggaccacttattgggcatgccgtaatgcaattatttcttaggtggttccggaactaattactatgttataagtgattggttgaaggggtaactcaagattttgatgagtgaaccatttgcttttttgtggcgccaagtcttgttgaattcagtagcatgtaatttcaagggcgatattgactgaatgtttttgtaggtgtagatagacatattttatttgtggttttatgccccatgtcactattgcttcttcagaatatcttagctggagagtattctcctgattttaagttccgaaggtgctggggtttcatgtttttgataaaaatagaatacttgagtttcttcatgttttgaaatagtgtatttgagaataaatcatttattagaagacatactgatgtagaaccaacagggtattggagagcaaaggggtgaatatgaattcttcaaatgggacaaataaattctcaagtgtattattattattatcaatagtcaatcatcaaaaacagtctctgaatatgtagacatcctagatcctagttatagagttttgcaaccctaatcccattaagatttggaactccaagtccaagtgtaattagtaatactaagcaaaattcctaataataaattagtaactgaattcctaaataataaaagtactaatatttcataaataatagaaatatataatcttactagttttacaatagaagattgaattgaagcaatttttaaatctagtcttcttgtagtgcatgaccaccattgccctttaagagttgacaaatactgacaaaagaagataagactgtctaactgccatgaagatttgggacgttatcaaggcctaatgaaactcattaggttattgttcacagattatggctcctacttagtttagacagatcagagttgcagcagaactgccatctaggttactggcccctatgaagcattaacttaagcaacagtaccttgataccgaacttcaacttgctagttcatctagtttgcagtccatgcagcagataaacattactccaattttctgtcagttgttactaaataaagttgcatctggcacaagaagttacccatttggaagcaaaagatttgaagcatatgtaataagctgaaattctggtttggatataagccaatgggatgtttttcttctgaaacattttgtaaaccaatttcacaaatatttagtttacttcacaatgttttaatgatggatggaaactgcttccacggactatccatttacaaaatgtgtctttttggtagtgtgaacttttgcaaggaggcaaaattcagaatcttaaaagttttctaggttgaagttattgtatgcatgcaaataaaccttggtcgcttgatgatttttcttgggcatcttttactttgatttctcagttagcacgttttgtgtatcgtctttcctttttatactaggcatatgtcttcataattcaagggtcttgctagcagttggatttttagcctcatacctgccttttcaatccttgtacaagctgcagagtgtgatcggtaattatttgcatatcttatgctttcttctggatgctcaaaactcttgtttgtaaatttgtgttataggtggaggga

SEQ ID NO: 5598 - DNA, 2016 bp, Manihot esculenta
  Intron number 7 from transcript cassava4.1_029282m (locus cassava4.1_029282m.g) derived from phytozome v7.0 (chr-ID scaffold09657; pos 120667 to 122682)
aagaggttagatttattttaagctacctattacactgtttatgttgctcattcgatggttaagaattttgaagtcatgctgaccaggaaaacctaagctaagttgcttcattttacctgttgtatttgtgatgaatcaattaatattaagccttcccccttctcctcactgctgattcctttagtccgttagactactgaacatagatgcttggaataatttattcaaagggacaattactttttcttctctgaggtatagcataattaacggattcgtccttctatttttaagacccaacacttcagtctctgaagttttattctgtcgaaattataggtccctctgtaaaaaatgttgttagtagatcgaactactcattttagaatctaacactttactcattgaaatttaattcctgcaaatttataggtccctctctcaaaaaatcaaatcgataaaaccttatttacaaattaaaataacaaactgaaaatctcaaactcaattgcaacaaacaaataaaaatttcaataaattcaagatttaaactcaataaatacaataaaaatcaaggaaaaaaatactttttcgtctatgagatataacgtaattaacagatttgtccctctatctttcgaatccaatgctttagtccctgaagtgtaattccgtcaaaatttaaggaagaaaattttaaactcaatctccacaaacaaataaaaatttctataaattcaagattcaaacttaacaagtattataaaaataaaaaattaaaactcaatagaaattgtttttgtgatgtcacttgctgtcgatcactgcttatcgtttgaaagatgcattagaacgtctttaacattttaaaaagtctactagttagtccttttgttaattttagtcattaagtattattaaaaaaaaaatttaaaatacccttgatacggagggactaattagtaaattttttaataatttaagtgaccaactaataagtttttcaaaactatagagactatatagtaaaatacttaatgacaaattcatggatggactaactagtagattttttaaaacattggggatgttttaatgtatttttcaaaatcgagagactaattagcggatttttccgtaccatagagactaagtagtaatttttccgttttattattgacaagagtatttttgggattatatatattctctttcctttgactagatgtaagtataaataattaatttaacagaaattttttatggagagatattggattttgatggaattaaatctcatggatgaaagtgttgggttttaaaaatagagggacaaatccgttaattatgctatattttaaggactaaaaagtaatttttcctttattcaaatcttagaattaaaattcacttgacatcaaaggatatatatatataaagaatggtaagatatatatataaagaatggtaaggacatcatggatagagttccacgggtatttcccctcaactcttaggttcattatcctggtcctccacaatccacatcttgtctttgttatgatagaagaagaaaatattttgtagtgaagttagcaagactcagtggtgtttaattcaaaacaactcagccaagcatgacagctaagccacaagaatgtcaatcttgactacttccaccttgtctagagctgattgctgtggcagtagatatatccaatgaagttgaagtggttatctactagaagctagtagttgcttaactaatggagtatgcatttctaccaatatataaaattgtttagatcaacattaatattaattcaataacatgggggtgagcacaaatcccacttttaagaactatagcatatcaagtggaatagaaattgtagcttcaattttcagtatcagtcagtattagtagcccatgtatgatccttctgtgccaatgatgatgatactattttcatttaatcagttttggcgaggtactctgggggaggcaaaagaaat

SEQ ID NO: 5599 - DNA, 4377 bp, Manihot esculenta
  Intron number 1 from transcript cassava4.1_010829m (locus cassava4.1_010829m.g) derived from phytozome v7.0 (chr-ID scaffold00749; pos 27682 to 32058 reverse strand)
cgctggttttcagtcccatctctccaccgaaaacggtgcgttttccatcttcctaacttttcgcgttatttttgaagattagaagagttataatcaaatgacgtttatacctcttggattggattattttttcaaatgtgagcatgggtagtttgggactttgacaaatattgtggatagatgagtgggcttaggacattgccatatttgcttggttgttgaatctattgattaaaagtcactgagccatccagcatcccattctgtctttcgccgagtcaaccggaggttgaatttaataagactggcttgagtggcgtagtattatttgtaaaaaccagttatccaattcaattttgtatttaatttatttattgactgtatgcactcaaatattatagtaatttcatattaaaatttaaattaataaaattttattatttgtaaatcagagttattcgtactttaaatttttgaaaaattataatttataaagtttataaattaaataatacatttttataaatgttgccagttatatattaagaaattaagatatcaactttttcttttatacacaaaaaaaatgataatattatttagtttaagtagcagataaaatctatttagttatatctaaaattgatcatagacccaatagctgagaattttttctttttttttttttgcatggttgattctgtggtattggggattctgtggtccagtggataagcgttgaagaaaatatagatcaagttgtatattatattaaaaagacaaaagtaccctcgagaggaatagttttaatgggctgagttataggaatattattgtagatagtcacgtggggctggtggagtagaaagtggaacagcctcagtcctttctcatcacaattttttattttcttttctgtcttttctgtttggctgtatgcacttaggctgttctttaactatggtttaaagcttatcagattaattttatttaaaataaaaatgtcttcaagatgggcatacacattataaaaatattaaatgtaaaaagaaggagagaatagtattagtaagaggaaatgtgaagtgttttagtggtttggttgagggatgacatccccatggacctacctagtactttcatgaatatatatattttgtgctaatgaaagttttgaaagggatgagattgctttttttaattgcatgcattatcagataaatattgaattattattccaatagctcatatatgttctatggtgttgatttcatcatctcatgtttggtgttcatattgacaaattaacaagagtttaagaatggaaggtaaacagaattttggttgcattcgcaaataacaggcctataatgactgtaatgttttgatactggcctggtactatacaattcttttgtgtaaatttgcaaagttcagaataataatatatatttaaagatgtaattaaaattagaatatgtaattaaataataaatataaatatattaaataaattaatttatgagagataatttcttgattatttatttttcttaaattttatcttactaaagcctaaatttatatttggtcaaatcaaacattctttgatactattttctaattatttatatatttctctaaaaagtagtaaaaattagaacagaacctatataaatttcataaatagcctgatgtaaatcataattttttttatcaataaacaaaagtcaatcaataaatgcaagaattaaattataaaagtattgatattctcttttcacttcaaaattaccttgtctatttgatgagatgagctcttcaacttaaaaaaaatcataaaagaaatgaaggatgccacttgattgtaaagaaaaatgagaaaacataacaaacgactggagataatttgcagtgaagctcaatgaataaagccaatgccatcttctgctttaagaaaagcctcttcttgttgccttacaagaatagtggcctatacgatatttaagtaacagttagtacagtctttacctttaactaacggctgtagctctttacccacaattttaaaaatttgttgtttataagctataagggtaatgataagctatttttccattaaataatagtcatgtcgtaaatgctccaagtaatttcaatacaaataagcttgactctaaccctttattttctatttgtttctgtctaaaattgctatcccctagaaacagtaacatgaatagacacaacctcatcaaagaagaaagcattgttatgatgagtccatagaatccaacagctaaaaaatagcattgaccatctaggcccatgctctgcccttccactgcaccattaatgttgatagaaactcacatgtagcttgtcatattctggagctttccatggttttctctttaaatgagtagcctgaacttcaacatcagcaataggagcataaagtgcggtaacaaaattccaagatagattgaaaacatacctcaaatggggtaggctggtggcactgtgccatcctcactatacaagtatctaaaaaaattcactgccaactcttttaatgcaatctgactgtcaacccataataccaaacatatgtcaaattgtcaacatcttaatttttgttttcactttcatcggttaacaaactttaggtgcaaataagttgtgttcttgttgaatctattcacttctagatatttgataacagagaagttcctctcaagacatgatcacttctaaatctcttctcaagtcattctcaatatgcaaatgttgagaagagtactattcaagagcttgttgtatgctagcaagcctagttggaagctgctgtttccactaaaacaagttatcaaatacctaatgattacatttccgtagcaagtgttagaaccaccaagcctctgcttaaagaattagtccatgaagaatataaccaaaagattgtcatgtgccaatttagttttctagaaagcagagtgggtgtttgcaatcagtggaacttttaaaggtatgtagatgaagcattataggctgatgattcaatattgattactcaacctgaaagttgattttgtatgagggctcaagaaacggtttagatttatcatatatttttctctaatgggctctgcttgcgattgtgtttaggaggccaaaaagctagttggaacttgtttattgaaagctgttgaaaccaaaagcagcttatagaagttgttttgttggtttgaagtttctattattaaaatatatcaaatttaaattaaaatgacaattcaaaggtccttaataaatgttttgatataatgctgttttcagactgcagttgaaacaatagtgccaaatgaatgcatcatcaataatatgacttggtttcatgcctctggcggaagtagggattccaaaaaggacaccttgacacacccatgtattttggcagttttgctaactcacttttaataaacaacatttttcctcatacattgatggtgctcaaatgaataggaagaaaaaaaaaaggttgaaatgaaattagggagaggcctaatgtgccattttcagggaactgtgatattatatatctaatattagtaatattgtaccatattctaatagcaatattgtaccatattctaatagcttgaacttattgagcagttagttgcttaatatgatagcgtggttgtttaaccaattccccaaacaggctgtttaactgaatgcaaaaatatgttatcagctaagattatacattgtgaaaattttattcttcttcagctattggaaaaatatgtattattagtagatagagaaagcaaatttcattgatattcttgatgtaggaagtttcttgatgccatagatgtcatgtaccatctctttatttattaaattcttcatcttcttttgttgaaaggaaaagaaggaaagttgcttgactattgagttccatctgcaagtttcaatttgggaatttagtcctataactggtttggtctaaatgagcggacatttgtcagcttcatctagtagaaattatttaaaccaatggattactttgatacagaaccaaggggatgttaccctagtatagatagaaagacagctcttagaagtataaaaatggtttttttcattattttcaatgcaaatccttaaataaactttgctgcctacaagtagtatttgtatctctctgctccaaagcctcatattagctgttggattaactattggatgatttgtgatggtttaaatgttgtagtcttgggggttctaacttctatgtattttctatcctttttgtcaatttaaatagcaggtttttcaatcacacgaggaagtggagggcataac

SEQ ID NO: 5600 - DNA, 2928 bp, Manihot esculenta
  Intron number 7 from transcript cassava4.1_010088m (locus cassava4.1_010088m.g) derived from phytozome v7.0 (chr-ID scaffold11028; pos 22065 to 24992)
ttattatcaaaaaacttagagaaggtttgtcttctgctgcttagatttgttgtttgtgtgtctgaataaatattttgaatgatcaacatggagtattataatgaatggtggctattctcttgttgttagcaccttttagttttgtttctgtcaacgtaaagaatatcatggaaaaggaaaaaatgcaatattaaggtctcaactaagaaaaatgtgctctatactgaattcccatacactacgcacttattaagcttactttaatgtgctgacttaaaatcaaaaactggacaactaggaatccttgcttactttctgtagccacctgaattttgatttattgaaacatccaataggttgaaatttgaaaagcataaatctcctttaacttcaaattgatttgcgttaatgtgagtttgcaagcataaatgtctctggaatgggtttttacattttatgaaggacaatttccacaacctaaatggctaatgctacaagctcacaaatattgtggtagcaattatacaaaatttccctcctgtccccctatgtgtcaattatcccccattgtgctagtgtttctctctgccagtcctgaagcacagtcacagaccttttcctcccttttgcttgacttgcaaatttgcttaatcaggattttcagattttaaacaattgacagattttttgctgattgctgaataattttaaattatgacctcaattcatgagtttgctgattaaccaattaacagactttttgctctgttaatgattttcaaacctactcgtgatattgaagagtaaaccataaaaactagcagtggaagttctaacctttgaagagtattttttccctctttttttacgagatagatatttctataagagaaaaataaaagaatttaaaaacaacttgtatcaaaagaaacttaaaacgtcatgtggaagcagaacagaatggaacaaaatgttcatagttatagaaacaggacaaataattgaatgagagtgttttggttaaatcattataattctggttgtggaaatggctgtaccctgtatgtatgatatatttttcttaattggctctatattttttaaacattctatattgatcaattgtatgaatatatatttttgagagcattgtaagaatgcttcactaaaatcagattgtaatattctctaaacaaataattaaagcaaactttaattagtgcagtgcttgttaatacaccactaattctgtgagatatatcctttattcttatacatcaaagaattgcagatttggatcttccttgttcataacttgtctgggttctttatttgttttggtgacacttcattggttattttgttatccttgtttttcctttgatctcaattagttaacaggataatttgtttagatgacatttgtgatcaatgtatttgatattttgttgattccaaaaattgtgtaaaaagtgaagttaaaatgactagatgcaaagggaaaaaaaatgaagactggattgtgaatgaggttcatattgtagaagctaaattataataaagaaaatcaaatgctcctgaactattgaatctgttcggtagggctgagcaattggtaggtttagttccgaaccaaattgaatttgaaaaactgaaaaaccgaaaagaataatattataaactggaaccaaaccaaaatatatagtaaaactgaattaaactgaaccgaaaaagtcagtttggtttaatcaatcgatttagagactttcttcatagcaagctgaacgataatgtgattttccaaacactttcaactcagcagcagcaaacatgaaactcaacattcagcactaacatattcacatcagcaacaaattacatgtacaaaaacctagaattttcaatcaaaagaagtttcagaatcaaacccacaattttagtatccataatcacaatcaaaacctacaatttctgcacttaaaaaactaagcatttcagtaccgatatttcaaaaagaagtttcacaataccagaacccacaatttcagtatcaaaatttaagtagccaagatttcagcaccatatgtagcatccacaaatccaaagccctcgactctgcatcattgttgagatgaggattgatttgcgtcagaagctagtgacatggaactacaaatgtgcgatcaaaatacccaaaagctggcaaagaacagtggttcttctttgttgcgacttgtgatgggcagaggtcgaccttcattgcaaggagcagtggtcctcttcgttgagagaagcaatggagccattgtctctttcatcacgaggagctgtggatcgggaggaggattggtcttctttgtggcaaggatcagtggagtggtttatctttgtcacaaggagacgaagaagaagagcctttgtctctttcatcccgaggagctgtggatcgggaggaggattggtcttctttgtggcaaggatcaatgggatggtttatttttttcacaaggagaagaagaagaagttgacaaaagagaagaagaaaggttggaggttaattctgtcaggtgagaggagttgagggagaagagagaggcttggggtgggaggcggcagatagatagaagttaggttggggtttaaccatgttatataaataggcagtttggttcggtttttaccattgtttaactgaactgaaaatcgaattattctaaaatcaatgaccgaatcgaaccaataggccaaataacctaactgattggtttggttcgttttttagtttataactgaaaactgcatacccctactattcggtttttgttacatttactttttttgctttgtgctgatgagaatttaagggtgatggaagatgcattttcatgtacagctgaagaacttgtctttggtaatagtgtctactgg

SEQ ID NO: 5601 - DNA, 947 bp, Manihot esculenta
  Intron number 2 from transcript cassava4.1_005669m (locus cassava4.1_005640m.g) derived from phytozome v7.0 (chr-ID scaffold11297; pos 869936 to 870882 reverse strand)
ccactgagtcccagattggttactgtgcgaagaaggtactaaattaccgtttgatgctgttgttattgcaattttttaatttagcacaagtttaatgatgtcttctgcagttgttcgaagaaagttgccgacaggcaaactaatcattttattaacagtatttgcattcaaaagaaaaaaggaggggcaaaacaatgatccttccagacttcagtcatacatttgtggattatgctgtttaattttaaccatataagcctaatatcctagtcttatcatcattcaattgaataattttggtagattgcagttgtaatactatcctaatcttatcgtcattcaattgaataattttggttcatttcagttgtgatactttccatcatattcctttttctgactattaccatttttggttggtaggataatggtaatgactgacatcttttcgtttgttggattggattttctcaatgagattataaaataaatgatatgttcgcaaaaaaagaagacaaccatttattcaatgcattcttgaactacctcattgagttcctaacaggtctaatctaaccttgttgaaaacatttttaataatcttgttaatgtcggttgcatttaatacataatagctctattgtgacttgtgatatcacttcgcatatttccaatttagaaatttgatcccttcttccacttctaaaaataaaagatgaagaatatgagaatggaaaagaaaggaaaatgatcagttgcttttttcacattattctgcaacattggtgatggaacactggttttggagttaatgctctgttgatgttttgaatttctgtagctgcacaaataaatttgaattatgcacttctataattctttctgcttttgcccctatttcttcagggtaaggtgccattgttatctatagaagcactacaccatct

SEQ ID NO: 5602 - DNA, 771 bp, Manihot esculenta
  Intron number 1 from transcript cassava4.1_015770m (locus cassava4.1_015770m.g) derived from phytozome v7.0 (chr-ID scaffold11373; pos 29253 to 30023 reverse strand)
tcaggggaaagaattatctaaaggataattctaaggtttgtttacttcctaaaatatgattgtttctgtatcacgtagctctaagttatatttctctcaaaaacatttgtttatggtacaatgcatatcttatggcaatatcaaataaaaatatcttgcacctattttgttatggtccaccaaaaaatatactgcaattgcactgattaacctttgctcttttattccaagtttactaatttttctttcctcaaatactttgtaatttcacaaggagatgaaataaataggtagatagtatcttgtatttctaccccttatattctgtatattttcctatgctgatttattataatttcctttcgcattttgtatattacatattatcaaaaagttcaaatttaattatccttcttagatggtggtcttatgaattgtggatacatttcataggagggtggcagattagttcaaagttcataggttgcttgattgcattgcatgatttgcctccaagctccattcttcatattttattatttggtaggtttacaattgtgacatatggtcaaacacaaaatgacgctttgatttatttaagattctaaaatgtgaataagcggtgttcgtttacaagtaaaatttttatggatagaattttttcattgaactaaataaatagaaactcagtagtctttaagtttttgatgcatgataaggctgccctttttccttattgatgggtactttattattgacgtccttcaggta

SEQ ID NO: 5603 - DNA, 624 bp, Manihot esculenta
  Intron number 2 from transcript cassava4.1_013862m (locus cassava4.1_013862m.g) derived from phytozome v7.0 (chr-ID scaffold03307; pos 879 to 1502)
tcctgattttctctctcaactccatcagtaaacaggttagttcctccccttctttattctgttcttctctttcctgcatcttttgattcaatcttgtttcatttttccttgctcatttctctttcttcttcttctgttatgcttctttttttttttttgtagttggattctgcttttgtatctttaaacctagacctgcatgtaatctgtatttctatggcaatctccttttttaaaaatgcttgatttgaacgcttgattgaggactgtaattgaatatcattacgttttatccgatgaatgcctcttgaagattttcttgttcaattgagattggcatggaaacaagcaaattctagggtatttaagcttcattttgagaaacatacccttgtttactctgttgctaacctctctctccatttggaacttgtcatgccttatttgaaagaagagtatttaactctctactgttgattcttatcttccctcaattggcatttatttcctgtgaatttgtttaagcgttacgctcgcatttgttgatggtatggttcgtgaattgtttcattcttcttgttattttaattacttgggatttaaccctttttttttatagccacc

SEQ ID NO: 5604 - DNA, 2073 bp, Manihot esculenta
  Intron number 1 from transcript cassava4.1_014714m (locus cassava4.1_014714m.g) derived from phytozome v7.0 (chr-ID scaffold00435; pos 85085 to 87157 reverse strand)
caatttctctgagttctgttggcttcaactcaacggtaatactttttatctttaagatcacttggtctcatctttcctttcatttttgcttgcactgcctggctttaactgctgtttaagtttcaaatccttttaatctcttttgggttattaatttcatgtgctttaactctgaatttacacttcttcctgtgaatttctttgctttgattctttgctagtgtttgatgatatacaatttgtgcctgttctttatctgggtgaatttttgcagataattaagttgtttaatcataaaattaaacatctttcagactttaaaagaaaaattgcagctacagctatagtatttaggctctgtttgacattattgttgacctctggtttgaatttaatataatattagttagataactttaacatagattttaagctaaatatgatatattttgttgtaaaaaatttaaaactactaaacacccttttcggacttttttaacagcatccaaaatggtgtttttttcaaaaagcaggtcagaaccacaatcttatgctagtgtagaggtaattttttaatttttctttaaaattttagttgtgttgaagctatatgggctgttagtctgttggcaatgctggtaattgcttacagttttggactcccaagctctccaattcttttggtcgcgctagaaatttatatattcgaaataaaattccagagaattggttattaattgtctgtactgattgtcgaaaagaacactttatcaaccatattcccttttctgcttgttcagttaatgtgaggaccttattttatgcttggcaacatgaaagcctgttttgaaatgatagggcgcattgaagagagcgtggtaaagggatttcagccaattcttgtatgatagcagtgttgagttttcaattcataagatcaagtctttttgtcatacatcttttggctgaaattccctatccttctaggttttccttctgttaattttgtgtttaatttcaaattacaatgtttgtataaatttagggaaagaaatgtagtactctgcaaaataccattgttttgtttgtagctctctccaaatgaagaagctttccagtcaagttcaaccatttgaaaacaaactcctccttttttgtgcccccttctttttaacttttttgtaatcggtgtaatcattctatttgtgcttgctgtttaggtaagaggaagaggtaggataatggggaagggtgcttcaaccacttgacctcttgcttcaagctctctaacaagtctgaaccataaattatgaggggaatgttgtcactgcaagcttatatgcaattcatatttgtagatgtatacatctttttttgaagcttatgttgttagttctttcctgcagtttatcccctattgcaactagtgattaataaaagcaaaaataaaatactagcaggcagcttgcttcatcttgcttcaagtatactcataagctgtcatgtgaatttaagaaattttgacatgtttactatgcgtgttcttgtcttgctgtctattggaaaatggttgtcggggctgctccctggtttcagtactataaactcaattaatcatggtagggaagttcatgatccttagagatacagtgtatttgtatgggctcagaattattgtccatctcaggcttcaccacagaaaaaaagtagggcatatatccctgcctgtcctaattaaatgtacctagaatataactatagtcaagaagttgtaatcatgggtactttttctgcacaagaaatatgtaatgtttctctagagatcctgttgcatgtgggtttttaatagttcaaagatccgtttgtatcaatgatatcaaatgaaaaacatttaaaaaatgtgttggaatgaatttcaaatcatttcactggagaattttacacttcccaatgtgtctttatatgatgggtgattttaatctctaacaaataaaacgtggcgtttgcatatttaagcctcatgattgctaacaaaaatcttccttgattaacagttttcagccatatatcagc

SEQ ID NO: 5605 - DNA, 3609 bp, Manihot esculenta
  Intron number 11 from transcript cassava4.1_002340m (locus cassava4.1_002340m.g) derived from phytozome v7.0 (chr-ID scaffold05214; pos 285522 to 289130 reverse strand)
ttactgaactagtaggcaagtcttttctaaataggtgtttggctgttttatttctgctgatgctgtcatgcattaaagatttgaaagagttcttacatgcttgcaaggagatctctttacaagcgtagttgttaatgatgcacttgagtcacaatgcccctgtatttcaatcaatgaaatactgcattgatcactaatgcagggacctttatgaggagtgcatacactattttattctcttgctattctctgtctctctctctttatgtaatgttatttcatccacaaatatccactattgatcatggtttcaaattgcggtcgtggctgcatgtaatggaaataggcctgtaacggtcataacgtaatggtaacggtctgttgcggcgcaaatttttttggaaaaatttgtaaagttcttgaaattaaaatatattgaaaaatataatgaaaattatgttatacaacttaataataagtacaaatatatcaaataaacataaaatacataaattttaaacattatatatagtaacttacctcaattaatactaccagaatgatcgtttagggtaggctttttagtagaaatttaagtatataagctgctataaaaaaatttaagagaaatatggcagtttttggcttaaaaagttgaaatggaggctgaaaataagtatggaagaacgctggagcctagagctggagtttggactctggagaaggggagagagtgctggatggaggactgcttggcttgctagttgtggcgaagacacaaagtagtaaagtgtaaagaaagacaaaaggtcaaagagaagaagtagagaaatcagtttttttccccttcaataatgcatacaaaggctggtgctatactactggtaaggaaagtagcggccgttatggccattacatcacagtcgataacggccattacctttgcgtaacggctataacggcaacaaaattttcctgccgttatttacatgccttaacggccatgacaggctcgaaaacctataaataacgtaatggccgttttttaaaaccatgctattgatttaattatgtgagtgaccttatcatgatacaccaaatctaattaaaacaataaaaagaaacagaaagacatccatgttgctagacattagacatgggcaaccttcagcaagaggggaaagaaaacaatgttgcctattctattactttgatcacttcactccaacaaaacttgattgtgcaggaccctctatacacacatgcaagcatgcacgcacactttctctgcttttctaagtgccttgtagattccatctcatttctagatgctttgttcttgtgattattactttaagattcttttgttgcttaatttacttgacaagaggcaatatacaccgagggaaaagataggggttagatcaacaaatatgaaatgtttgctgtcatgttagattgttaattttgctttgttaattctacaatgtttattgttgatttcattgtgtttaatcactaattgtgctgtgtttattggaataatctatatttacttggtttagtcaaagcatatttggaatatggaaaagatagtatttttgcgtatatatattctagggggaagggggtgtcatatgtgtgattgagcacttgctgatttctttttctcggaatggatacaaaactattttattgcaattgaacccatttaataaaataataagtccaaaaattattgctatgttattcttttaaaatgttttactttttaatacatgtttgaaaaatttaactggtttgtaaaaataaatataaaaaaggccctcttccttttcattatgaaaaattaacctgatctcctcaggcaccctcttgaccatcgcacattagctatcaacccctcttcaccgttcccactttcttgtaatagatgcactcttgcaatgaccctcttaccaccaatcatggagctgaaggtagcccacttaatcagatagttaaactcatattcaacagttctttagttgtttatgtagtttacatatatagatttagggtagagctctggtttcatatggaataagaatgaaattggctgaattttagtttccttctggtttcaatgaaaggatagaaaaataatttgggaacaaaataataaagggggactaaagctttgatgctaaagttggtgttttggtgattgtagttgagagtgacgatggaagatacatgtgttggaggcttggagctatatctctagttatgggacttgggatttgggaatgttggaaatctgatggaaaggagaggatgagaaagaaaaagagaaactgtggacaggaattttttttttttagtttattccattttatttttattaattatttttctttttttatgacattttattatttacattttactcaaaatcttttagaagatttactaaaacgtttcaattattaacatactcaacaacataaatgttattttcaagatgactcaattgatcaaaacagaaaacctttttgtaatgctgaatataatgaaacatgaagggccagattgcatttttttactacagtacaaggctttatatttgagtttcaaaaacattgacactagaattttaaatgtttgctattaatacaagtaaattttggtttcatttctattgcgcctgacatttcatattgtgtgtgtggcagtggaaccttttgcacctttagtaatgataagaaaaatgttcagtcgcagcccagaagaaaggcccaaaagaggcgacagcatctggaaactatattctggaatattcaagatcagaattctgttctgcagcagaaacttttgttaagggaatggcgatgtgttgcatgagtagactgaatctttaaaatgggaaggaaggggtgggagaggatatgttaatttctttgatttagaatgctagcttagagcatggcatgggggaagggcatttatagtgctgggagaatgattgtgggatattctccatcatcagatatttcattccttccctttttaatccatttccttgaatgaattaacagaagtatttggttccattgttctgggcttttctgccggctccaccttgggcttttctatcattttctctctttcttctctatttaattctctagattccttacttgaccaattaactttcttcagagggctgcttttactctcactcttattttgctccattgaaaatttagggatttccagcactcatttagattctattattaggcttaccatttaccgtaaggtgaactcaactctaagtacttttcttttatcaatgtgatgaaatttctaagcaagacagaagcacttcgtatcactaaaatatcacttaggtaactttgcaactcggtgttgcatggacaaagcttcagagttcatgctaggaaaatttcttttgtttgtaaatacaaagaaagaaatataccggtgcagttggtacatgaatagctgttagtcaagtttttctttttgagcatttacaacctaacttgcactttctatatattgtgaactgatacaatttgatgcccccttcttttccttcaaaga

SEQ ID NO: 5606 - DNA, 1272 bp, Manihot esculenta
  Intron number 3 from transcript cassava4.1_002194m (locus cassava4.1_002194m.g) derived from phytozome v7.0 (chr-ID scaffold06512; pos 1758267 to 1759538 reverse strand)
tgctcttgaccaggtaatattctaatttagatcaatctcatatgtgtctggcatctgattgagtatgagtcagttaacctaagattatttcatttaataatttagaaatcagtattatgtaatttgtaattttttttgttataagagttttttttttgttgttgttgtaagagaataattaactggatgcgattttatctgctgactgattttatacataaacttcctgtttttgtttattaaatttcttattgtagtttatgaatgaacaccaacttttatcctgtaaactttccaaaaactttgtagtgtatgtactgtgtagtctattgtggtgccacctaaggcaatcaaatgctatatctaatgctttcgattataattagtggttggggcgccaaattcctgttattaattatttaattaatactataatctttggactagtttagcaatactgtaatattaaattgtactttttgttcattcaaaaaggatttatgccatttatattatagataagatgtattactgtctctctataggactagatagttgtccaatggaaggtgaataggagcacaaaaaataggctggaaactttaccctgtccgattggacaccattggacaggattaaattgtttcctatggtcgttcaatccatttatccggattctgaggaattcaggtctgattacctaacaaaatgctgatagatttcactattgatatgttgcttttaatttctagtatttacttaatgggctatcacatgtaggagaaggatatatagaaagaagtagactcgggatttggagggaaacatttgttgagtgacagttacaattgttgattgttaaagatagttgtatccacctttcagctacagtatctgagtactcgtctccctaaatgaggaaagagtcctgttttcaaattcttagtccctttactttaagaagtttgtaaaaaggctcagcagaggagatctaaaagactatagcttagctgtattgatcatcttccaagatcaataagaatcacctccctctctctcaatactcatgttctctcttttctatttctttctctctctctcttttagattcttcttcttctactgcagcagagttcccaatctaaggtttctgttgacaggggcttatagttgcagattcataaacggaatgctataacttaaaatcaaatttcttttgcttgtctctccttcctaggttggggttgctgaacttaaagttgcagttgaaaa

SEQ ID NO: 5607 - DNA, 3061 bp, Manihot esculenta
  Intron number 11 from transcript cassava4.1_000964m (locus cassava4.1_000895m.g) derived from phytozome v7.0 (chr-ID scaffold05694; pos 49344 to 52404)
aatttgatccacgtagtcctgtttcaggtacaaagacttgtgaagttgtgtaatgccaatattttagtgtttcagtgattgcatcttgttcctgatcatcattagtatcttagttcacttgttaagatgtgtttagcaagagtgctgacatgtttgttatcatccattttgagcaaatctatttgatatgataatcgatgtgattatgtgataattttatgtcttgatatgagagtttctatgctacttgcatggacaataaaagtgcattttggatgcaataaaaactgtattctacctactcgtgtgagtgtatctttcagcctttaggtgttgattcatatggaactcttttgcccttttggtaactcatttgcatcatatgtggatatactaaagatttcgttgaagctatgacttgattaggaaactggcatagctgatccattacgatatcgttgatatttcattccatttgcctgtgtttgacacttgagtggacaaatcatagaggaattcaattacccaaacataatgtctacaattatgacaatgttgctttgtgtaatatatatcactggttatcaaactttaaagcaatataacctcggccattgacctccaatttgtcccattttcttcattaaatattagttgtttagctatacttggagactccgcctcaagttcaggtctcaactggcactagatctagtatatttactgtattttgtcaggtggctaaggcatgcaaggtgtgaggtgcaaccaaggcatatttatgtcatattttgactgccaccttttgttttttgtttgtttggtgttattaatctggaaattgatgtaaggttgagtcttacattgtgcaccctattaaattcaaaacaactacaacaaaaaaatgacagcaaggaataaattgtaagaaagaagggaagaagagggtgctccaattatgttgtctgtggttcctttaaccaatctcctctctcttaatctcttcaatcttctctagtcttcaattaggatgttatttttatattttaattttcctgagcccctctctctgttttcttctctactcttcctgtcttttgtcctttattggttacccatttatttcatttttctttttttttttccccggttttgtttcttgaattctaggattccttgaatactgttttgctttactttaatgacataggtataagccttactttttcatttctctcagatatcaaatctaatacttctgtctttatgttatttgtcctttgcctcggtagagaagttggattttattaatttgaaaattgaattccagaagaggtcatatatggaacacaggcttgttaaatcttaaaggattttttactacagtaacaattgtataaatgtgttaggataattttgaattttctagcaaattctgtttcttttgtgcctcactctcaaaggtacatgccttgtgcctaagcttcaggattctttttttttttgtgccttactgtgcattgcacctttaataactatgttgtctacaaagaatttatgatggccaacattagtaagacttcagtgagcagcctacactgtaaacctgaaatggtactcatctagcatttcaggtgagattgctcactggagttggcttttcaggatcttggtaatttaggccatgatgaatgcattgtatataaaatcaattttcaaaaatgaaatggctaactgaagtttagtaacaaaaaaacttctgtttttttgatattgcatttacattcacaaatattgttctttatgctatcttagattcatctatgttgggaaaaaagtttttaacagttaaatttacaaagttcttttgtagttcttgatatatgtctgatactgcaacttcaaaatcatgtttatgaagtcacatccttgtgtaaaatctttagaagcatttgtgtcaaaaatatgaaatttagtcattatcaccaactgtggcttaaatgacatgcactggaaatgcctttttgatgggatccttatatccttgggacaaaccagtagcttaaaacagaaagtgttagaagtacttttgagttcctgagaccttgtaaccggcgctcttttttatgataacctgttccttttggttatattggtttgcttgaggaactataaattttaaacgttgaggagcgactataacctgctttagttacagtttcttcattaaacaccgcgctacacttagaagaatcagatttctttcatgtgattgcttaattgctttagttatttgtttgtttattctttgaacttgtgtatctaggaataacaagtgactgagataagacaaatcgtaactgttatctacttagcacttggtttgctaagggcttattggtgtccatggttttttcttttaatttttaatttctatgttttttgttgtcttttaatcataaagaatggtctatgtgaaaaataagttgatgaaagaattaaatattgctttttatggttttatcgtttttggatctttttctctgtgtgtggatttaagacattaagtaacaaaaaatatatatgttcacatattgaaccaaagaaaaaaacagcatgagtgccaaaagagctctagctttgcttttctttccttgtcatatggtaagtcctgcgtaaattacttgtcaccagaaaattcttaggtacatgtttcttacagcaaggaaagtttatagagatcattttaacattcttgttctacagcaaaactaacgtgcaccaaggtttagattggaacccgaactgggtatcatttccctgacaggtaggtgcagggattgggattagtagggaagaataactggaaagctttcctggagtatgaagtgttttgagagggtggtatttgatgtttgtcgtgggaaaattggttttaagtaatacaagttggctttgtttgatattgagtcttgctaaaattaagtgggaattcacatctttttgtttatttttttaaataacagctggtcccatccacacagctgctcctgctgttgcc

SEQ ID NO: 5608 - DNA, 3358 bp, Manihot esculenta
  Intron number 3 from transcript cassava4.1_016716m (locus cassava4.1_016716m.g) derived from phytozome v7.0 (chr-ID scaffold08673; pos 212709 to 216066)
aggaagtagattcacgatcagtgtttgttggcaatgtgaggactcttttccttttaaattttatggtttgcattggtatcaaacttgaaatgtaaatgcatacttccacttgataaccaaatgctagttaacccttcatagatttggatatatgcaagtgcttgtaggctagtgctccattgattaaatgtgtgcatcttccttaacttgtggtatgtgccttttaattattgaaaatggcaggtttaaattcattcattatcttggttaaattaaatcttgtagtataaattactgttctatcattgtgctcatcttgcatgattgattaattgtactttgttgatagttcaaaaaacaaggatgcaatatttggcctgaagaatttgatgcaaacttgcatttcattttcagagttaattatcttttatgttgttttaactagtggatactcctgtgattttgagctgctttcttgtgatgcttagaaggcccatcaattcaaagaattaattttgtcatgttgtaaattagatagcatctttatgcaagtacaagtcatcagttgagcttagaacatgaaggaaaggcctggtgacctggtggagtgataactaataaatcgatggcccaaaaacaacagtgcatcattatcattggatcctgggcctaaacaaattaccatacataaccagaccgtagaacaatagtggacaagtgaatggtacaattaaaactgaaagcacagcagctgaagccaactaaacattgctagtgttcaaccagttaatacagtctggatgctctacattaatttgaattgaccactaaattattttttgtaaaaaagggagggctttttcctaaacagacaagttgtgatgcagaaatattttgatatgagattgaacatgaagtttgtgtcaaaaatccttccttcaacatctcctttcaatagttagacaggacatttcaatagaaattaatttgccatactaagttgaaattgtctgattcaacttgttggtcatgatttttttctttatacttggttccaagtaacaattactgttagtttttagattacaatttacctatttgttgtcttccctactgtttcctccaaagtctctactcaatgaaaggttggtcttcaactttacattggggcaggacagttttttagcaattagtgattaatcaactttaaggatgggtttcatttggctttcttggattcttaagaatgagagtgagtgcgaaagagagaaagaaaatgtgcctcgagaatcagctcaggatttagttttgttactgatatattttatataaaactgtgtgcttcagtgctcaatatcttttgaagggagaaaatagcaagtgaccgagtctctcctctctgtattctgtcctttttcatgtttttgctatattaatgataagttgtgaagtcatcaaatattttgtttgggaaagtcagtcctaaaagtgcgaaggtgggcaatcaaatgagtagaatgacaatgtcacttgaagattctggagttatgagtgggtggatcagcaataaacaatataaaaagacataaaactcatctcttttttgcatacattctgttttagcgatttctatattattttaagaatagagcagttctggttatggcaccccactgggtcttcatcctgtgtggttgtgcacctggacctgatcgtgcaatggtctttcctgaatttagcattttgcttgttccaaaagcgcttagttagaggctgttttagcatttgctttctctttttatgtcagctgataatactcattctaatttgaattatattgacagaatatagattctgtattgcagttagatgtgcagctgctagcatcaccattgattggcgtgatgtgaatgttatgatatttgtgctttcagttcaatactggaattcaaaatgcattagagaatataaagtacaactggtttgagcaaatgtgcttgatttctaagtcttttttcccctcgccctttctatttctaagtgaagatgtttacttgttctaccaattcagcattttctgtattactgcttattgtgggcttgatttttttaatatgtgcggattgttatcagcttcacaatcctcctttgactttcttctttgattacaatcgcaggtcacgcttcattcttcaagtttctgattaactggttctgggattgggtcatattgtttatgatattaatgtctgggctagtaaaaaaaaagaaatttacatgataatgtggcaaagaaaatgataaaaagaaactttgagaaaagaaaattcgaaggcttttgaaaccatttacttgaaaaagaaaaataaagaaagaaaagagaagaaaagaaaggagaggtgataagtgctaaaatctgagtgacgtaacagaaaagaaatggagaatcaacagggctgtaggttaggattaaagagtgttggttaacttgagcgagttcttgggccaggatggacagaggaaaagatgtggttcaagattcctgggcctagactcaatcaggtacaaggagtagcatgcaggaagggtaacgactagctatgtacaaagtacaagcccacagagctgcctgtcatggagattaacactcacggaatgagtaggcattttactccttatggtgagaggtctttgatctctttttcttctcgcttgggatagatagggatctctgatttctttccagctattgttatttctctccttttatacacagacgagggattaaataaaaacatttctagaatcggatcaagcaagatgtaagcaaaaccaatcactgacatacttatgtgtaacaaaaatgaacaagtaatttgcctctcaatttagtgtgtttcaactttgctttgtactgtgtcattgtacaccatggacagatgtgttggcagtaggtgatggtgttaccctggtttttactcggtggtttcctctttatgcttgatatagacttatgtttagttctagggtaacacatttgctaggcatccagtgcaagatatgtcatctaaatgctttttattccaacttccactctgtggcaatggtagttctcaattgaataatggagctgcaggaagttgataatattaaactactaatgttagtgtttgacaagtcaaggcaatgcgaataactacaaaattttcgtgaatgttatgcctgatgatgaaacaagatgcttgcactagtgaagaggaataagctatttccatgattaatcattagctttttattggatttgtagctgttcctctcgtactttttggctgataacttggttgtaggtggactattc

SEQ ID NO: 5609 - DNA, 1934 bp, Manihot esculenta
  Intron number 2 from transcript cassava4.1_017636m (locus cassava4.1_017636m.g) derived from phytozome v7.0 (chr-ID scaffold02774; pos 114803 to 116736 reverse strand)
acaaggctactgcccatcatttgggtttgctcaaggtatgttattgatttttgaaatctgattgtggttgcatatttaaactcgggagaggaaaaataagttaatttaacgcgtatagggtgattggtgtagcttatgaagtggccttataggcacttctaatttaagtttataagcatttaattttaagcaattgcatgtttaattaaattgcttatatatggttgataagtagctaaggcgtttggtctttattgttaaaattaagcatttaattttaagcaactatatgtttaattaaaatgcttttaagtgattgataagtagctaaggtgtttataagaataaatgtaatatggtaaaatatttggtcaaactaggttgtactggtgtttataagaataaagaaatggtacctctagctttttttttatttttttatttgtttttagcttattagctcataaaatgttatgaataaacattctagcttatttttagacctataagctagtttgatcagtttataagttaagacaaacaccctcttaattttgcacagagttgtagttctgatttcttttttgttttttttttttaaaaaaacttttttatgcatttggacttattacatttgcatgctaaaggaaccatgtcatttctgtgttctgttagttcaaaagtttccaaatttagttcaaaaattgtagcaggaaacctttttgtaccttttattttcttaaaaaagatgagttgaataaactcattgtctgcatcctgtatgattgaatggtctaacatattgtaagttaatacagctttgttaatacgctatttttgttcttggctccttaattcatactagtgattttcattcatcaggtataactcagtttgaaaatttaatcattaatatcttctacttttactggcggtaataaaacatattaaacatttgggtagtggctgcctcagttccccaattcagtgtcagtaattttagaataatgactgagctctataaatctttcatctggtgttatgttaggctcatatattacttcatgtaattttattttgatgcatgtatttcaacaactgtgttttagtgttaaacttttttttaagttgcatgcctatttctcattggaaggattatgtgctgttgacaaaattagtcaatttttgcatggtttcatcagaatttgaagctgaaaacaataacaggacaatgcaaatttagcaaggggttgttattatgaacttaagttcatttttggctgttgtatgctgttgtacgaacttcttctaaattgcaatggggagcctttggttgaggtttgggctcccaacttatacgcgctttgagttttttgtcagtaatattccttctaattcccttatttttcatcagaaaacttatggtctatatttcagttgaatgttactatagaaatatctgttgtttgcaaaataatgattatctgggtagatagccttggctgcttttagaatttgtgaattcaaatcatgttgaatctaataattttataaaattttcttcaagaattctagttgaatatattttgatctttgatggaatatgattcaagtggtcacatgccatcttaatttttatgattcacactttttccctgaaatgaggtactcgattttgttcttcctaccatgtttgagtttgcatgacatatgaagctatcgttgtgttatggattcattatctacaacttctcttgttgtttaatgcccaaagtaaaaaagacaactgtagctagtgtgccaaagtactttatgcccttgttaataaataatttattatttcttcttcataaagaattctgctgtatttttcctatgcgtgtgccttttttttgctaggctaaacttgcaaagctgcgaagagaactccttga

SEQ ID NO: 5610 - DNA, 1390 bp, Manihot esculenta
  Intron number 5 from transcript cassava4.1_000335m (locus cassava4.1_000321m.g) derived from phytozome v7.0 (chr-ID scaffold01672; pos 44586 to 45975)
acaaagataatttaaagagtaagtcatttgcactgcccccctgaaatattttgtttacgtagctttttattgaaattttatgtctttttatatgttgcttgtagtatagttatgtaagttttgtttttcaggtgcagaaaacagatatcatttactgcatagtgttaatatgttcttaatatgtgttagggtaaattgaatcttaatcattgattttgtcccttagattcaaagttcttcaaaaatcacaatcccacatatatgaaaacgagcattcagatgaaatttcacatgctatccaatagcaaaatattagcattaactaaatagctactagattctgggaatttttttttaaaaataatttgagtagccaatttaacaataaaagaaagagaaaaaataaagaaaaaaagaacttagagcaaaagggattaaaagatacgtaaatttggagagaaattagagattaacataatttctgaaaaaaaaggcttttttttttatcttttcaatagctgtgtaatttaattagaaagataaaatgaataattatgatgtaataatatcatccaatacattttaagggtatttaaggaactataatttttttaaatgcattttggtttaattattatgagtgaagtaaggtttggggtgggttgtaaatttaataaaatgtacctgactcataaatatgagtgaagtggaccttattttaaatgcataatataccttatatatattttatttttcttaaataggtctttgtagtgcaattgttgtggttggattccatgaaatatccctagtccttcctccctgcattttataaatgggactaatgtggcaaaacaggtgcacatgtcacccttggatgagcaaatacttctgcagaaaatgtcgtggtctaatcatatttgcaaattggctgcattttgttatttgagaatttaactctattagatttactcctttacatttttaatataaagtgagctaggggtgctaaatccaattaggatatgtgattttgcttcagtagagtgaagcccaagtcaacttgttctgtgattttgtgatcagtaatttaacttgtggaatccggtacatcttctgtgatgacaagttctatgtgtgaatatatatttaatgctaggaaagactaatatctgtttccctgagactgcccattgcaacactaagaataagttctgatttttgtgtggctttattacattaattgccagtatgctgtcttttttcaggtgactatttagtgtctttttctttttattttttaatcttatccttttaagtgtctttgacatggtttcatgtgttccaacctgtcaatttttgactccggttgctaattctaatgccaggt

SEQ ID NO: 5611 - DNA, 1726 bp, Manihot esculenta
  Intron number 1 from transcript cassava4.1_012711m (locus cassava4.1_012711m.g) derived from phytozome v7.0 (chr-ID scaffold06609; pos 371242 to 372967)
gaggcgctgttgtaagtggttggtcttcttttttttttttcttttcatttctttttttctttttccttttcagaaatggaaaacttggaatgaaactataatatttagttactgtataaccggagattctgtctatgtcggaatattccgataatttcaccagtctcggaccaacgtgatcattttatgtcgcaccagttgattataaaagagaaatgctctggccttaactgagtcagcttgggtttctttctcatgcaagtgctggggggagcaattaagcgaagatgccactgagcatctgtttggtagggcgtaatgtgatacaaattaatcaaatattctattgaattcaataaaatatttaattatattacattccattgagagttttcactgtaaagttttgggagtcgttgaggatatgggaccaaacttatatatagtgccgcagaaagctattgaaaaatctcatgtggacaaccctggtcataattttacgattgtacttatttttctcactaaaatacagtgatgaatagattgtctttttgtgaacacaattttagaatccagtaatgaacttgaagagaacaataccatcgtacataatatgctattttcccttctaaggatgtcatcagtgaagaataataataatgccattgccgtgtcatttttaagttaatactggtttctatccttgcaagaaattctggatgctataatttggcagtgatgttcttgccgtatccccaccctagtaaaatgctttcatatgcagtaagaatgccattgccatggcaggaacctttgtaattactaaactttataataaaattctaaaatgtgcacttgatcttttattgcactcattcagagaaatttgaaatgttttattctaaactaattataccgcagaggagtaaaactaacttgttccaacttacaacaaagcaaaactaacttgaactgggaaaatagtggggtttggcatgttttatcctaatccatttaacccaatgcaagagacgggcttctgttgagtagaaaatgtcacttcctaactctgcatttggcatttgcatatcttttaattggaatcatttatttcccatgttactgaagtattgtggattctactatgagtagcttttgagaggtgatatggatgtgtgagaacacgtggagtacctggacaaatgcatcaatacataggacatattatggtgaaaataagcagtgggacggctttctgtgttgggttaattaatccaacataaacctatgggggggagcaatttggaaaaaacagtagtttcaggcagtaagagatggatgaagaagtgaactggttatgatattgactctggtagaatactggcataatattgagacagctaaaacagagactacctcaagagaggtaatggaagaaggtgatccgtgaagctgacttcaaattgatttctgatctagaattagttcaatacttcaatcaagttgtatttgggaggtgatgtagttgttattgtttcagtgattttgggatcagtagatgcatgcttctactcttttgctcatgcacatgttgaaattgagcgccagattgtttgctgtcaaacatcattatgtttctatctatttgctttcttttttttcttttttttggtgtttttccattataatctattcattaattattctcttgtatcttcaggctgtc

SEQ ID NO: 5612 - DNA, 1437 bp, Manihot esculenta
  Intron number 7 from transcript cassava4.1_002274m (locus cassava4.1_002274m.g) derived from phytozome v7.0 (chr-ID scaffold06631; pos 352773 to 354209)
ccaaatctttccatagttacagaatttcttcccaggtatgttgccacactgtatagtccattttagtttatttttccctcagaactatattctgggggccaaaatgtcaggagtttttagttaccattcaaaggaacaatgcaagataactgtgttctataaagcagaagaatcataatgtcagtgaatgattaaaaccttccaataatatagtttaatgcaataggtaatgcgtatatctattatctgatgtcattagtccattacaaattatttcaggttcttaatttatagaatgaatgctggagtaaaatacctaaaacttttcattgttgttattattatttttcctaaacattcaagaaaagtttcattattgtttaactatattatattagattttagcatcatttttttaaaagaaaggacttgtagttctgtcaaaaaaattaaatgactttacataattagaatagattgctaaatcatagggctaattgatattaattgattaggagaggataaggagagaaattataagagaatgatttgtttccataacaaggacttgtacgcggtatataaacattcttgttcaatagagaatacacaattttctactaatctgttttgttacagctttattgaaacttagattaaatttgaataattttgatataatttaatactccctctgtcccataatttttttccctctttcattttctggttgtctcaaaattattgtccactttattttttagactatactaacatataaattagactatagtaatatataaattgactattataccctatttaattatctcttatttccaagaaaccttttaaaatatctcttagtatttagtaaagtttaatatatttaaaacgggtgtaattggaaagttaataaaaaaaattgtatttcttaatatatgtgaaaaagtaaagtggacaaaatttatgggacggagagagtaatagaatccagtgatgaaattaaactgtgcatgttaaatcaaagcaaattttctaactaccttttccctaatttaaggaattagcaattaatcatataatttcaacagaatgataaggaaaattatttaaaaaatgaaaaaaatgagacaaccaacagattttctgtatttattttattcttaggactgcaaccaaacatgatattttgttctgttaattttctttttagtgttttggacaatgatgccaaacagcccctaagggcttaatctactaaggattctcatagtaagtttccatatctgcacatatttaacgatacatacagtggccttgaaatccattaaatgttgtattttcctttgcctaattttcatgttaatgtcacaattgaaggctgttacatgttttgcagaggtagtttatatagattaattcacaggcccaaca

SEQ ID NO: 5613 - DNA, 311 bp, Manihot esculenta
  Intron number 5 from transcript cassava4.1_000707m (locus cassava4.1_000707m.g) derived from phytozome v7.0 (chr-ID scaffold04851; pos 521764 to 522074 reverse strand)
aggtgactttttggcttggatttatttttttatgacagtaatttggcaatttttttttagtaataattctgtgtagataattttgcattttcttggaggggcaaagatgcatttccaaacaaacttttactctgcatatgtgttcaacatggttccactgatatcaatttctaggcccaccttacatggatgggggtgcatgagcaaaacattgtttttttttaaattctcttctttcatattggaggtgctaattatgccataaaaatgtcatagattcgcgattccattcgagctctctttccagacag

SEQ ID NO: 5614 - DNA, 3931 bp, Manihot esculenta
  Intron number 4 from transcript cassava4.1_000514m (locus cassava4.1_000514m.g) derived from phytozome v7.0 (chr-ID scaffold09980; pos 37001 to 40931)
tccaagaggtaagattttctggtaacttttctagccagatattctgtttgtgctacggccatctcgttttgtttcttatttaaagcaaaagatgctgaattcaatcatgggaaattacaaattctgtgaaacaaactgtcatttaccaggtctcttatgttttctgatttgaaattttttggtgtggatctgatattcaatttgattagcttgtgggactaattattcaattttagttttggatataatttgaaacagggaaacctcatttgtattagtaatcaaattagattttctatctagaatgactagatgctatagttgttaaaagcaaaagcctccagtctaccagggaaaggccagtgacgtgtagtgaaatatgctaactgaataaaatcctgattctaataataataaaaaggaacaatatgatagtaaaggaaaatacaatgaaatttaaaatgtaaaatagacctgaatattcatgaatgattaaaaatgaccttgagattgataccataagattaggtttgagattagcataatctgagaacaatactttatacttaataaaagatatattgataccatataagttggctgttttaagttaaatcaggagatatgctaaaaatgaccttgtgagtagaataaggattttttcccccagggaacaatatgttagtccaaaagagaagtttacaacgagcattcacatatttaaattttattataaacgcaatcatgaaattaaaagaataaagaaaaaaaaaatcaccaaacctcacatatatatataccctttgacttttctttggctcttgaagcctttcaggcagatacctaccattatcatatgcgtatttcagtttaatagaagtcaataatatgatgatgatagtgggctcgcaaatctagtatgattgagcatttgggttttatgttcaaataaggataatttattgatttaaatgaagggtaaattatgttaaaattaacacatttgttcctctacttttgaaagtcagtggtttaatccctgtgttttactttctccaaacaaggttcctccatccaataaacacatttagtcggtaattaaatgctggtcaaatgaaagagaaccatttctaatcccaaatatgcccttattactgaagaaatacctcttacccttcaatatccaaatttttgttccatcttctctttcaatcatccctgccatggtaaggaacttttaagtacccaaaactttccaccataactaaaacttgtttttggtatttgatgccactatttggttttctaatttctgcatctttactctcctttgactcttgcaatcaaagaatgcagcttggttctttgggaatacgattgcgaggtctgacttgcaatcaaagaaatgggtgataaatattttagaagttccatatccttaatgatagaggaagttgctatgacaacggagctgtacgagagaatcattcaaattcagggattaaaaagtaatttacccttaaatgaattaagaatttatatagatttgaaagtcttaagaattgaaattaatattttttgtccatattttataatttaagttaaatctttgtccatgtttataatctttaatccaattaaaattttcaccctcataaattataatggactttggctagtaagggatacttggcaaaggtatacttgttgagcaggaaatagtaattagatggattgatgattttaaagaataatttactaagtttatggcataaataagcgagcctacttgagctttgaagaacttaggcttggactctattagacttgagcttagcttgcatttagctcatttataatgtttgagagtttgtttcttatttagcttctttaacaagcttgggagctcgacttattgagcttatgttaggatcccgtgtgtaggatctagttatgggcttgtgtaatgagtcttttggcaagataggagacaacaaggatggattttctttttgcgacctattttgaaaagctatcaagctcatcagagagaacctgtaagctcttgagtttaaagtactcaaagactttttggaaattttttagctaacgtttattaatctgctgtcaacttaaatacaagttgaagtttttactatctcctaaaaaataggaacttaaaatagcatagtggaggctaacctcttacaaatcagaatttggaaataactaaacaaaacatggaaataactaaataactaaacagaacatggtggtaacatcataagacccatgatctttgccactatccattattatgcataaatccataagctatgcactacccactattgcttcagtgatgaagaatctgttgaagtggtggtttgctaacagcttactttgccaaattactataaaaaaaacttttaatggttattatctaaaaattcatttaatgatatgcccagtaaatcatagtaactcagttaataattataaagacaccattagttaattataatgtcaataaattatatcttttatacttgtataatttaattgcacccctactaagtttatctttgatgcttatcattgtttataatgacggaatgcttgccataaaagttttttttttataggttttatgaattattttttttaggatttcatattatattatttattcttttttctagttaggctaaatcgcaaaaggaaaaaaattcttgagcttgtggagttcttcaattctatcaaggagttttggtttaagcaattatgggtttgaacttatttttattttcaattctgccactgactagcaagtaaaatttcttcctttactgataacagtagaagtagtgggagatatcctaagctagtaagctcattaaactcataacttgtatttgagatcaatggtgacaattgcggtgattggagaaaggagattgattggagcagggacggaaacttaaatggtcaatttgcctaaattgctacttcggttgagtgtggggccaccaccaattaactattggcaataacattctcctagtggtataaacaattgatgaatataatcatactgactcttagtaatttaactggagtggcttttggttataaaattgaaaagagaaaaaaaataaaatttaaaacttaaagaacctgattgcaaaaattatgacttttgtgacaaaattgaagaagggccaatgttcatttttttaaagatattattaatcataatactattttccattcaaatattgttctcgccatctgtgtttttatagaaattatatttgtatagattatagatatactctttaagaatgaaggtgtttccttttccttttatttctttagatgaacaacaaattgttctagtaattgaaggggcttctgactaactctttatggtgggagctacttaccagtacggacttaaaaactccaaaatacctcatgtcttataaactggatataaaatcatcaagtctagaaaatccaagtatccaacgtaaccatgcttcctacctttgctttactagataaacttatggtcaagatacgtgtatttttttgaaatttattttctgcatgttatgctcaactatgaatagaatcagctcatgatgtcttctatatatgttatattgctctttgttatctgttggttcaacttcatatttgattattgattgatgtatgatctaattcatttttgtttaaatgaaaggaaagagggattgtgattgctttatacatttgtggatgcttgctggtggtttttgcttagtgttcacttcactatgatcaacatgctttttgattattattttaatatatgttgttatctatcaaataaattgatcttttttttccccttttaggatttgcacaaacagttcaagttgga

SEQ ID NO: 5615 - DNA, 3118 bp, Manihot esculenta
  Intron number 2 from transcript cassava4.1_019188m (locus cassava4.1_019188m.g) derived from phytozome v7.0 (chr-ID scaffold08745; pos 5432 to 8549 reverse strand)
tggacagtattaaacaaattggtcttcaagtccctgtatgtgtatatcgtttctggtttctctgcaattacttttctttttctgtttttacttttgtttaatcttcattcactgtccaataaataaaggggctaatgaggtactaaaggaaaataaaatgagaaacgaaccgtgaacttttgctttgatatctttgattttaaatctggtgatctctgatttaatactggagctggattgtgactggatttgtgcatagggcataaaatcaaccaatgggctttggctcatctggctaaattcgaacttcaactagcgcttaattgattggaattgtagagaaagagtggaattgaaatttgtagactgagtagttctttaaagggaaaggaaaaaaaaaaggtgtaatgtgattttatcaatttttattttatataattcaatttatgtcaaagtagtatatgtatatgtgtattgatatgaaaacatactaatttaatataaattgaacctaatagcctaaacctaaaatgaaaaggagtgcaaccgagtaaaatcatacagtatctttcttttataatttctcttttcaattaataataatattttagttatcacagtacaaaaaaaattattgctatttgttaatgagtagtattatttggacagtattattttattgcaaattgaattataggcctagaaataaaagtaagcgacatgattgttttttttttttttacttttctcttttttaaacgagaaccaaagattgcctacaagttggttttggaagttttttggtcccccccataataggcaaccgaaccaaaaagccgttcatgcaatttcctaggggagattacaatgatagaataatatagccattcatgattctgaaaactaaataaaacaatgtttctgcttcctttatcagctcgctagcttttcttatctatcaatgaattgtttgcaattctgagagggcttaggccaaggaaatgtgggtgacttatgcatgtgattttactggtgaccgctaattcaaaatgatgtttctggatatgcttttggtggatttccagcacaaagaatttagagaggatctaagagtattttgagcagttttagagggttcaaatgatgtggggttggtgagggaagtagaatagcaatgaaataacatggcattggctaatattaagttccaatgttgactatttagaataagggttatgagcgattatcaaagtggaacactagggaataccagagtaagaaatgttaaataactgtagttggcaacaaagcagtgattagatagtaaatctttgtgagagaaggagataattgctgaaagaaaatataaatgggtattgtaggtaaaatgctatttatggagaaaagggaaggcgttcgtaatctagtaagccagattccactgctattatggttaatgatcaattagaaggtgccaaatttcttacagaacacatggttcacgttaccagcctactgatgaaagagagatggtaaatctactagccttcctaagtcaaaattctctgaattaattttattaatctgaaattaaacttgaatttctattgctaaatttcatagattaatagcttgattcgaatcttctatcccgtaagatgtgtgcttaatggagcctcagaaagtggtagcaactattgaatatttgataatagaaatgtactgaattgagtgtaaataaacatatttaagtttcatgcatccctgcaggcatatcttgtccaatactaactccagtattcagtagtaatcatgggcagagtaccattaccaactgaagatttttttttttggtggggttgggggtggcaagttcaggagagaagaacaaaaacaagagagagagaataggacattaatctaagttggagctttgaacttttgaagcataataaacataaaaaatttttttatgctggaggatagatataaggggtattcggttccaattctcatacagttttagctaagaactgaaatgagaattaaactttcatttatttaatttttaaaaaccatactttaaatcaaattatggtatgattttgtttcggttctaagcaattttaatatgattttggttcttatttcgattctattttaactttaatctctgtcaaatcatgattgttacacataaaattataatattcttatgtttattctgaaatggtaaataattttaaatttttaacttcaaaacaataataaaaataataatactaacatttaaacaataataataataaatattaaaaatatattgtatataattctcaataaaaaattatattattttgtatgattattaattatataatttttaattaaaagatacatgtgtaattaatatctaaaagtattatataattgatatgttactcattcatataattaagaattataaagtaatatatttatggttgaaattagttaaaaagtataaaaataatattaaattatatacatccatacctaaatatatttgtgttcaattttaattgcatatgagtatatatataattttattaaatttataaatacatcaagaaataaatatataaaatcagttttttggttcaattttgatttggtaaagtttcgatttgattattaataaagaattggaactaaattgaaatcgaaccaaacccgtaagtataagttcgtttcagtattgtttgattcttacaatagcccccttttttttttcagttcttctacggttcactacgtgttttaggttcaattaaaaaccccaggaactatgcataattctatataaattagataagcattatatttcaaatcgaagaatttattttaccctaaatacaaatcagatcatttcaaataaaccttaatcccaaggtagcctcgatgaagttttgaatcactcttctggccaattcatacagtttttgttcatttgatttctcaaaatgtttcagttctctctagtttcagagagaaataaaaagtgaaaaaggggatttgtcgacatcatattatttcagtgttcattttatattgacattttgatacgttttgcagattg

SEQ ID NO: 5616 - DNA, 1367 bp, Manihot esculenta
  Intron number 3 from transcript cassava4.1_009849m (locus cassava4.1_009849m.g) derived from phytozome v7.0 (chr-ID scaffold04526; pos 4303 to 5669)
agctacttcaagagctggtcccaggctgcaacaaggttagttgtcaattaggtaattgattaattaatcattagattgagatttttggggcttagattatggagggtatcagtccaaaattatcattaaaatgttgtaattatatgtttggattatgtagattagttaacggtttggtcactgtcacctttttcacgaaagtgggccttgcttttctaccaagaaaagtgtcgagctttggtgtcttggtggcattctcgtaatttcattatctttgccattttttcttcttctgatggggaaacttcgttttagccaataggtgctttttgaggttagttttgtcatttgaggtttctcaatcctggttaattggtaaagacgctgaattgaaggtttgggctttaacccagaagaaaaaaatgcgtcttgagagttctaacagttgtgttatgcagttgccaaactgatacacagtggttcacttgaaccagttgtttctcctcaagcggataatatttggactagaaattatctgaagaataaaagcattggaactggaaattcagctagtttttatgtaatgacaatagtacccttcatgggctaaatctcgtgaatttatttgtggggaagtgctagctggatgtgccttgaaatgcctttgttctgtctgtgttagatcatatgtctggggtcccatcctagaggaaaattgcaagataccaacttctcttgcaagtttggcatctatcttttattatgatgaaaaacaattgagaaaaagaaaattgctaagacaaaaaattgtggggcaaattcctagacctaactgcaatcaggcattagttggtaaggatttgctcagaagagttggtgttcaatcttcatatcactaaatgctgacatgtggtttgtgcatttcattttgtcaaatttaagaaaattgaagctgtagttaatgaaagttaggcagtgcaaggcagtaacaaattaaatcctaagtgtgcatatctataaaggcttgccttgttttggctattcttagatttggatcaactgctatatcatgtatactgtggatgatagctaggatcatcttttcatatcaaatattttagtctacagaatccttttgccatatgaggagctccctcagtatcatcatcaatggagagaactgtatagccacaaaccatgctaatctcagtcggtttaaatagttaacaaaaattttctattcatgccttcatatagcaactcttcaacattgtctataagctggcttacgcttctaaacttaaggtcattgaatctaataagtggttatctttctatgcagatttctggaacagcattggtactgg

SEQ ID NO: 5617 - DNA, 3054 bp, Manihot esculenta
  Intron number 1 from transcript cassava4.1_005793m (locus cassava4.1_005100m.g) derived from phytozome v7.0 (chr-ID scaffold00621; pos 21579 to 24632)
gctctgatcaccaactatactactgggtatgttcttccttgattaatttttagctcttctttacatatatttttattttccatggattttgcattaaatcccatattaatggggctaattctgttggtattttgaaataattagggtgatttgatagacagaaatcaacatgacttcttattattgtctcccactcaaacttcaagcacaactcaagttgttttttggttttctcatattatgcagattagattctgctttactttactagaggataaaaataagacaagtaaaacagaaaactttaccagtgacttttaataaagaaaatttacatatcttttctgaaagaaaattccattggaatatggacaagaagaaaattatagaaacttatatccatttcaaaagggaatctcatagcataagtagtatattatagaggaatgaatccaattatattcatgttttggaagccattgaatctgtattgctttgttctatgattgtttgataaataagatggtgggaatcttagtgtctttgagaaagaagttctgctattttccttttaagaaggaaatccattcaagagcttctcttctaatgctagctagatgctattatacatgccactagttttagcttgacagaccactaagttagatttcaaccaatcaatgttgatgaagccacctggactaacatcacttcctctctggaccaccaaaaattattgggtatggtttattttcccccactttttttttcccttttaggagtggaacaaggcatgttttgtttgtcaattatgaatctaaccaaatttaattgattaatctacctatttcttgtgttcttttcaagaaatcaagcaaaaatgctccatcttctccttggcttagtattagacagtctaaacatgcccaagggaaagaatcaagtaatttaacttaaataaatataaagttagaagtaataaatatacactacatttgaggattaggcagtagtgttttagaagcaagtgtaaaattattgctttattactactaaggttacaattcggcaacaatttaaaattattttgaagaaaattcaattttttactttatataataatatattttaataaatggctttttataattaataaggttgtgattttagtagagatttttattcattgcataaagataagcaaatcaatggtttattctacggccatagcatagccaaatataacggttttttaatcattgtccttgacttataactgcattttaagtatatatgacaataatttacgagtagtgtgttagacctatatttgtaataatgatatcaattgtctaatatgtagaataaaaatattgagttctctattttttcctatttttttaaatttatgctatatataaaaatattagatattttaccctttacatcacaaggtagattgtttttttttttaattttttttatataattgtctccacttgaattcaaagtcgagaacttacagctctagaaatgactcctatatgactgagctagctcatcaatagatatatgttttcattaaccaaatatgagtgatctttttctctctaaaaaatgtgactctaaattctttatttttaaaatttatctgtatttgtcttggagtaatcaatgtcttcttcttctttcttagatgtcaagcatatccatgttattccattcatgaccaccaagccatctttcaaaagtcatacatacagttccatttccttattacaagaatggttacttttgttttccttattatcttcaatgccattgaaccaaaaaagcaacccaaatagtttttaataatttataagtttttttcccatttcttgggaaattagttgatctctagaaaacatacaatatctggcaataagctctctgcttaagcctctttgatatgatttggcctttagcattaagtggtaaagactgaaggctatactgcttgttagctgtctacacttccacaagcaaacatgccaaaaaagcattacaaaagtggctacacagaaaactcctttatgtatctggcttatttgatttgattagaactataaaggtcaagaatattttcagtatatgaatgaaatcttttagctttcatttcccactcttatttactaagaacatgcttggggtagtctaattgaaagttaaagccctgccctcataatcatgaagatagtggtaaatgcatatctaatatcctagtaggtagactatcaaaagaattccacacattaattaacttatactggttaatttatcttcttttatttaattcagttcttttctggaaatttttcataatagattaaatggctaaatattcaatttcacccttgtacttttcaaagatgttcaatttagttcatttataattgtcttttaacttagccaaaaaatcaaatttgaactaaatttcttgttttctttagttaaagcaaaaatcaagaagcttaatttcttatggattaaattgagcttaaattaaaaattttaagcaaatttggacaaaaaagatgaaaattgttcagattaaacttccccaataagtatagaagtgaagttgaaatctccattacttgaacaaaaccctccttgccaaaactacttggcaacatggccatatagtttgtctaaagaaatatgatgtagttggtgctttatgaggcagatgaaattggtagcttattaatcgttttacatatgaaaaaaatgtacctatatattcagtttctcataaccatgtgtcagaactttagcagaccaagtacaaaagtaagcaagcaggtgagagagagagattaccctctctttgcacttgcacaatagccctttaataaatcttaatatgaaacaaccaaaactatgtgcatggcttgtagcaggggtatctgggatctcaacacaaagaaacttctacttctacctctgaagacttttctggggtgtgtccttcactgctgctctctccctgatcatcatcttcttttgcag

SEQ ID NO: 5618 - DNA, 2098 bp, Manihot esculenta
  Intron number 6 from transcript cassava4.1_001963m (locus cassava4.1_001963m.g) derived from phytozome v7.0 (chr-ID scaffold06697; pos 51685 to 53782 reverse strand)
aggtatttctggactttaataatactaacctgtaaaatttgcacgagtatcttggttaaaagtggtcattctgatgcatttaatctgtgctgtaggcaaagggagaggccccaaaatcacggtatgggatgttcttggcctagttgcaagaattttttcatagaaacactcaaacaagtgcttttctcaccatttcttaatattaactcatcatttcttaatattaactcatcatttcttaatattaagaagtttggttgttggggccatggaactaattgccattattctactaatgttaaatttagaataataaaagaaagaagacaataacataagaagattaacgtgcttcagctacgagagcctacatccatgtctcaaaacttcaaaagggctacatctttattgaattggcttatctttgcctacatccatgttacaaaacctcaaaagggctacatcttttattgaattggattatctcactaatacaaaagattttcaatttataatggaaaatctaacacatatatggtatatgataacataattctctaactataataagaatatatcaaatcccgtgactataggaatatatagacataattattctatccatttaggaatacaaaccctaattaaacagattcaactttctataacattccccttaattgtaatttggaaccttatcaattctaacactccctctcatcaattctaatactccctctcgatgagattctgcataaaagccaaaaacttattcataacagtttccaaccagcaatttatgaccacattcaaaactactcacacaaaggcacttacacaaaataccaaaatacaaaacaatccttagaattgcacttccctcttcaaaggcaataccaacgagaaaacatcaacacaaaatttctctccaaaggtaataccggcgagaaaatatcaatacgaaacaactcataagattgaacaaaccacaccaatcgaacacaagagtaggtgtgaaaactatccataatcagtactaataaatagtgcccataaacagtacccaaataaaaacctcaaaaaattgaaagttctgatatcatattaaatttagaataataaaagagagaacaataacacaagaagatttacgtggttcggctacaagagcatgcactgacacaaaacctcaaaagggctatatctttattattgaattgggttatctcactaatacaaaaggttctctatttataatggaaaatccaacacatatatggtacatgataccatgattctccaactataataggaatatatcaaatcccataatcataggaatatatagacataattattctatctatttaggaatacaactcctatattaaatagatttaactttttgtaatattctctcttaattgtagcttggaatctcatcaatctaacatctaaaccataggtagagatcaaatcagtgaattatgagcagatggtaacttcaaattagaacttgggccttgatagggtggattatgaaaatgcattatgatctctctcggcgagcagagaaaataaaatccaatggaatttttgtacttgataggcattcatcaatttattgtcatgcaaccaacaactgccatggcgccatctcagtaattcacaataataccaccaccattattgattctgctgacctccctaacttcctgcgttcacaatatctgtgatctgtgccattgatgctgttgtcagttcaatgattctgatgatctccaaatggccaccaatactattggtgccttttcattgtcagcatcctaatagcactatcacaatactcactccagcacccaaatatccctatataattgtttccatcaagtcattattgtaatattgacactgctgtatatccagcatatagttgcatcatgtcaccaaaaaactgtgaaatgatataattaggtcaagatgagaagtaatgattacattactgttgttagcttccttaacttctttctttctggacaagacaacctgtttaacaattgttacatccttctctgcagacataggacaaacttagagg

SEQ ID NO: 5619 - DNA, 1699 bp, Manihot esculenta
  Intron number 5 from transcript cassava4.1_001018m (locus cassava4.1_000773m.g) derived from phytozome v7.0 (chr-ID scaffold02264; pos 730550 to 732248 reverse strand)
tgcccactagtgaggtatattattttgtttgcaattttatcctctctatcaggttgctagaacttttgtctcaagttattgtatatcactaaaattatgaaagcagcagcagaaactttcaaaatcatcaaaaataaatttttacttaaaaaaaatttatgataatagtaaccagagtcaattccatagagacggataagcaaattaattctatgaatgaataagaaataaaaaataaaataaaataaaatggagggaggttttggatatagaaaagtgaaaataaataaaattaatttaaaaaataagtaattaaatttaagaaaaaaaatcggaataatcttaatttcaatttttattggttgattccaaatataaaaaaaatttaaattaattaatgatttattaattaatgataaatcaaatttagattttcagatatccaatccttacttagattttaaggttcttaaaattcgttaactagttttagctcttgaacaacataggagatgctcctaacatgtaatccaattacaacattaagatttagaaggaccttattctaactaacaaatgcgagagattcggtttatttaagttagattatattattctttcggaaggtctttatattgttcggaaggtattacacaatctaattcaccacttgtttgaaattaaattaaacaattgcggatttaatcaatctgaatagtaatatattattctaacaactgggcaatgagtcattattataataatcaatagaataataataaacactagttaaaagaataatataaatatcaaaaacaattaggaaacaatagaatcacataaatctcacaaacaattaaattaaaaccttaattatcagttaaacaagaacttaactacacatgttcatggctgaaacaccataatgagaagggtattttcaacctcctaagctaattaaggatgataaatgagagatgtgactagatatcagatgtctagtacatcaatttgtcctcttttttacagtgctaagagtcctaactcaaaaagttgagtacatagcaacggtttgttatgtacgtagtctatagttagtctgggagttagagttcaagcatgctctacttcttatccttatgtgaatttggttacgctcgatatcatattgtagagtttaaattttgttattttccgatttctgtttaacagatatcaaaattcaaacgaatgaacctgattttaaacttcatatctaagtgttttaaaatattaaaactaaaaaaggtgcatattatcactactttttttaacttttttgtacatcaaatcataaaaattatataaaattatatgattcatgggagagtaaagttttgtgagaatactcggaaagaaattagttttagtcattgacgaggttttttacacgtattacaaaaaaatctaaacattttcagcatcggcttttttcttgccttggaatgcttctgtatgttgctagtgtgtggtcctgggaagagatttttccatcatcttgtggctatagagatactgaagtttgtcagctgattttttttttttcaaaatataatttcatagaatttgtttatactcgattgaatttatcgcatgattgttttttttttcctcagcttaattaaaattttttgacttttccagtgtattgttattgaag

SEQ ID NO: 5620 - DNA, 3665 bp, Manihot esculenta
  Intron number 2 from transcript cassava4.1_008845m (locus cassava4.1_008845m.g) derived from phytozome v7.0 (chr-ID scaffold11661; pos 322977 to 326641 reverse strand)
tccagtggggaacatctgtagtgttgctcacagtggtaagtgtacatgcatttgaaagataattgtttgtaatgtttgagtctttatgttgttccaatgctcattatctttattcgtttttctatgatgttgttttctgatggatttctttttcttgggaaagagatgcgtgtctttaagtagttttacactgcataatttcctgctcttcaaattttcatgagaactagaaatttgcaattagttgacgatatggaaagataggagcagtagaataccacatttacacttcttaagacaatgttctttgtgttatatattcactttggtcttgtaagcagaataaactaagggaataattactgtttagtcatgtggtttagtaaaactatctatttaatccctttattttaaaaacagtaagttttgtcttttagatcattaattacttaggccatcccgtttgtctttttagatcgttaattacttagtccatcccgttttctataggaactaaataattgttatttttaaattacagggctaaataattgtgcctttaaaattacagggactaaataattgtcctttaaaattacagggactaaatagctatgttttgaaattacagatactaattataactagtagcttaaatagatggaagtactaactagttatcagtttcaaatgaaagcaaattaaatagttaatggttttgaaaatatagggtgcattcagtctatttttgaaattagattcactagttagttaatctctcataaactagtgaatctaaagagtatagcaatagagtgtcagttctcttcccagttaaagagacgacaaggtcaacagcaaggtatgctggggtgggaaagctagagcagaatgatgtcatgtcatttaatctaatatatccattttttttgttgtgttctacaaatatatgttcgctagtacaaatatatgtttgttaggaaggaattcttgaactcacttgttacccgtggcggctagcacatagctggcatgatgaattaaatcagggctacctttttcttttggctaatttacttctcctgagatatgaggagatttagttacatgcctggggaatctatatagagtgagggaattgggatttaattggttctacttctgccagaacaaaacctcaactagccagtggtggagatcaggctgggtggggggtggcgggaagtagcttaaataaatgtttataaattttttaataggtttaataaaagttagtcttttattattaaggtagcctttttaaatatcttaaaagattaaataaatgaaaagaagttttattttttattaattagactccttaaatttctactggcacctaataacttataattgatatattctttaaattgaaatatttggattttttggttgtccttgtttgagcaaaaaagttcaattgaacattaatatttgattttgaacttcctcttcctccttttgtgagtacaatatgatctttttttctgtttatcatccctatcatttagctttctcttctttatttcattcagattaaaaatattttatttatatttgtacaagtagacaaaattagtggtgtcaactctcgtgcaaattttgaattgatcaactttaatgtatattaaggatttgttataaaatttaatgccaattgactttatttctttacataatatagtttatatgtagttacgtaataataaatatgtatatttattattataatttttttcaactgctaaataatcattgtaatttgatattttgtgttgcttctaattattatatgtttatgcactttgcggtacacatatgtatatatgttatgattgccttctctccccctcaatgaaaagttttttggcttggcctctgcaacgggcccttttaggaggctaaaacttgctgttgattttgatgttatctatttgtaaccttttttctgaaagtatggtcttgttgtgggcaactttgtttgttatttttttgccatctttcttattttgtatataatccgttaaccgcatgtgtgataattcattgcacttttaatcaacaagtggacgttctttgtagggagtacattcaatacaccacgggaagggacaagaaataaagtatagtggatttgcttttaattaaatttgacatctaaaaattgtgagtgtatggaattgggttctaaaatgacttctactaatatatttcttttatggtccctcttctctttcttggaaattttggcaggtattatcaggtcttgtatttcattaaaatcaattatttagtcctttccttatccaattaaaatttccagtatttttataattgaaacttgttttagctttaaatatgtatatcatttagatcttgtaatttttgctatttatattattgagtctgtaattctaattatttctactatttaagtccccttgactaaagctaaacaatttgaccaatgataaatctaacataattttgatttgtaaaatagggacatttcaattgggttttagaaaaatagggactgagttgttaattttgataaaataaacggacatgatggtaataactcaattttggtcttaatttatgcatttaagaaaatagtttgtatctaagactcctctcatatgcatatggatgagggattgcactaggctgcagcatagaaatttgttgatatcttttcttttcttgtcctctcttaaatatgtttttcctcataattaattcttctaaaatgcaatttttttattgtaagaaggttgtatggcttcttaattgcgtgctgtggaatcaagggaattattaaatagccagtataagcagtacaatgctgaaaaattaaagaatagtttctttttgtatgaaaatcagtttgggacttgtgcccacatgtcaaaaacttttttctttgaattttatcaagttatgtttatttatttatttttatttgtatgttttggatagccaggaatatgtgtgggtgaaaatgaagaggttgaaaggaattggatagcctaagagttttttgtgtttctgacatttctgttaagtttgagactgggaataaataggaaaggtaagagataacaagttgtgtataccattgcaaattatcatgttgaacacttctgaattttttattatatctgtataagtgtaatgctgggttttctactgaagaagaatgaatattagtgtagtttattttgtttggtagattgctagataggtactaatctggtggaaggaaggagggggttctcttgaagttgaagtatatgattatgatttgctggtttagcctttgaaccattaataagatgttaattttagtttgttatagtgtgtaattgtaatagacacgtatcaccccttggttttcttaatagcagatggtagaaatccacattattttgaatgattttgatctagcaccattgccatattctcttgaatcctatgaatttggtgttgcagacaatttttttttttgagctcatcaagactagtgtaatactcccttttcattgattaattctgaacattattgttgaatactactggtagtctgataagttctcatgttgagtaactacagtgatttcaag

SEQ ID NO: 5621 - DNA, 2446 bp, Manihot esculenta
  Intron number 3 from transcript cassava4.1_019318m (locus cassava4.1_019318m.g) derived from phytozome v7.0 (chr-ID scaffold04796; pos 373848 to 376293)
ctgtctcttgtaagtagttttcaagactttatgtactttgcctactaagttaatttgcctttttcttcaagtagtttctggttaacacctttaatgtatgattcttccatgtattacatttaattgattataaatgctttgacttttcaatttaagtagcaatacctataaataatacgtaaaatgatgcagttatgtatcttgtggctggtacatgatgatgcaatgagtgaaattccaacatgtttgatacagatggtaatggggcataatggaattctgggctattgaccaaaatgttaaaaacaaaaaaggtcaccaaaatatgagactttattaagtttttcctatatggtggtcatagccaagtttaacactttgaccgttgattaattgcttttgtgctctgattgcaaactgaatagaagaatataacattgagctccaaaatagccacctgctaatgaaggttgacaatgtacttcaacttgaatgcctgcctgcccccttaatggcactgcagcctgtcaagcagagggtagagactgacacttcaacttgaattaaacacccttcttggcacatggcagaatttacttaatatttcattcactttctatttaatgtttatatccattaaatattttatatgcaacaaattttgggacctgcttgaatatagtttggcagtgttcccttcatcaggtgttgcacatgacattgtcacattgctagttgtattcaccttgcctatcaacatggataggcttgcctaaatcacttggatcaacattttgattgttgatcttaactgtgacttgacacctcttagcatacatggggaacagttatgacaatttcgtacttaggtaattttttttaatttatccatattttgggcaatagccctggaatttgatggaatcagttccatatccattattctgctgcattttagttatattcttttgcatttcattttgatgttaccaaatctcgtaaccttgcattttattttgatgttacaagaaaatcattttctttttgtttgtgtcgggatgccaactcaagatggattttgtaatcaagactactagttgatacccattatattgccaagcagcttgcttatatgttatatcttgttatattttttactagttgattttatctaatgagttgcttgttgcatttatttattgaagccttcatattgcagcttgttatgtgacaaagctaagtcaataatttagtcatggttgtatatttcatcataatgaaaagagaatattttcttaatatataggttgtttaattgagtttgattggcaacaatttttttataagctttctccatcattacaggataatgatcagatccaaaacttttatgattgttgtctaaacaaataagctggtttgagtaatggttcaatttcccaactagtcaagtttttctaggatttcttcctttgttgagtgatgaattcatcacaagagatgccaaaaggtgatctactcagtagttgcgagaatcgactcgataaaagctcaaccaaaatcgacttgataaaagcatgaccgtatttggctcaataaaaattcgatcaaacttggctcgtattttaaatgaaaagttcaaactcaatttttaggcttatttagtgaacaagtcaaacttaagtttcatagtatacgactcgttaagattcgtaaagttggctcattaccaggttatgaatagtcccgcgaacggattttttgagtaggctcgtgaacaagcttgtttagtagactgagctcaatgtcataggaaactgagctcaagctcgagcctgcgtaaaatttttaggagccaaacttgagcctttcaaagcttgtttgcactcctaaagtctctagatatttggtacatcaagatttaagagctcgttttttgtaggtttgcaaggttttttgtaggtttgtgagctggcttgtatgtttactcatttaattaaaattatttagttttaaatttattaattttaaaataaaatttattataattgtaaacaaatcgaattgttcgtaaactattcgtaattagactcgataaaagcttggctcatcttagctcatttactaaatgaaccaagtctaaacttattaatatttggcttgagttcgaaatgattagaattcaagtccagcttgagctcaaaaaaaatttagtaaaccaagtttgaactcttcaaagttcggctcagcttggtacgtttacaccttatgctcaagtatctaggtattgtcaaaattgttgtaagaaatgcgcactgactttttggtggcttaaagttgtgtatttatgaagagtaaagtcaattaacggttcacctatatacaaatttgaaagttgttttgttctgcaggtgaagaaggaaaaagctgaacgtgaggccttggg

SEQ ID NO: 5622 - DNA, 1970 bp, Manihot esculenta
  Intron number 3 from transcript cassava4.1_006764m (locus cassava4.1_006764m.g) derived from phytozome v7.0 (chr-ID scaffold11170; pos 208967 to 210936 reverse strand)
gattggattggtaaggttaacactacttcaaattattatcaggccaaattaatctctgagcacttaattgaaaatgttgctttgaactttgacaatcatttttccagtcattatggtgtttcagttttccataacttggtctatttggtcacagttactagttccataacaaggattagaagtgaaatatagatggttctgcattcatatttttctcaatattctatgggcatccatatctgtttgattgacaattaaccagatggaagtgggctgcaggcctgcagttactacctgatgcctagaaacatatgctacagtgatattgttagcgggaaaactaacgtagacctgttaattgataggcattcttcaagtcaaaagaaacggtgccattcttatacgtaggaaaacaatggccttatatttcccttgcgtttgtcctcgtgcaactaccatacaatcaacataagataaattccatggatggcagggaatggtgattctgcttctttcaaagtagtcatagttatttgttgtaaagaggaaaaacaaaaacaaaaagttggaaaagggggaggaggtgagggaagagaaaaattgagttatttaatcctaatattctgacacatccgggcaaagacacacatgtacggacacaattcgaaaaagaaaaaaaattcttttttcaacgtggtgaattgcaagaaatgtagctctgaagttgttgatagtaacatcattgcaatgagggggtgtatgttcctgaattgcaaagtgcatcatattcaaattttaaggttgaattttgtttcatgaattttaatttgatttcacaactcgttatgtggtaaaacagtaagaacaagtttctcagtcaggaacaattccagatttcagtgctttctcagcggccagcacttatatgctaacatgagcattataacctgctttgtgtttgtcatcacagtttttcaaggctagtatttctgaattttcgtgtgagaaacaatgttaacatagagcaaagggctggatccatttgatattttttttcattttaaaatatttcatctagaccatattcataggttagaatagaaatctaagctctaagaataagctgatgatgatgaaaatagtaattagaaaaaatgttgctgtagaagttatataatccctgcattccatgctttgtgtttcttttttttttccttttaagtgttttgtgatctagagatcactattcttcaacgatgcatctatatttggatgttgcaggggttgagatgtccattggtgcgaaaaagtaacatgtgaagcttctcttaataagtaagcattatttgcatgtattgtgtctgtccttcctcatctaaaattgcaaagggaggatgcatgatctggaaataagagaaggccataaaaacttttcctattttatgaactataaagacaatttgaagtgtgatatactgtatatgtttttggcggatattctatttagtagttttagtttcacttgcctcctctccctctctctatagtcaaatcttaagaataggcctgaaattgaaccttctctaggtgcatcccaacgtacctttcagtttggagaccacttaaatttagctttcagtagttttagctgcatctaacaattaaaccaaatagaccctatgtctttacaactgactaagtttggatccagaaaataacttttggaatgttacatttctccattaccatttttataggctaagttgtatgctttcgttttctttttgttgattgttctattttccttcttccaatgaaatgagaatcctttgtcatttttatgctttttgcctctttctgtatgttatttgcttgagctacatatttggtatcttctggtaatgcagttccattttatggttatcttatagacgcattttattttcttaattcttcttttataataggac

SEQ ID NO: 5623 - DNA, 121 bp, Manihot esculenta
  Intron number 4 from transcript cassava4.1_019608m (locus cassava4.1_018888m.g) derived from phytozome v7.0 (chr-ID scaffold00321; pos 79124 to 79244)
gattcaaccgtattcttttcttttatttctttcttgagtttttgctgatttatttaagtagatgtgtcatgagagcttttttttggcctctgctgacatgtatgttgttttacacccagtg

SEQ ID NO: 5624 - DNA, 1826 bp, Manihot esculenta
  Intron number 9 from transcript cassava4.1_000424m (locus cassava4.1_000424m.g) derived from phytozome v7.0 (chr-ID scaffold02998; pos 152460 to 154285 reverse strand)
gtttctgcaattgcacaggtttgcatattttttctttctaatttcaactagatagcatttagttgtcaatgactcattgctttcatatttcttagtttttgaatggaccaatttgtggatcattattcttttgatctttgttgctgtctgcatgccaatgaaaaagatcatatagttgcttattctataaattgtattctaggaattctattggccaaatacctatttacacacttatattatttcagattagtccattaaacacttgaactaatattgtaacctactaaacatctaaatgtacgtaaatcataataattaaacacaaattaaccatatcattgatgacttgtcgaaaaaaaattagaaatagttttaattagtgctaattatgctcaaaattctattgattggactctaaattttcataaaataaaaaattcctctcatataactttgtcaatttataaaaattttttgagcgcaattagtaaaatttagagtacagtaaacaatatatatgatcaattttttactttttttaatgataaattttcaataatataactaatttgtgtttaataattatgatttttacaagttcaggtgatgaataggttatgattttattttgagtgttcaatgggttaatcccaatcagtataggggtatgtatgagtgttgagccaattctactgctatcattcttttgacctgcgttgctgtgtgcacgctaatgagtcaatttctctctattctttcaacaagatctatcttattgttgttttctacaagattgcaaatgcagttttgcaattattttcttcaagattattcagtttgattactccatattcagtttgattactccatatgttgagtcttttagtttattgtattgattgtgaagttgaaaagagaaataggaaatattctgatatcacttataatttctaaaatgctctgaagcaaagaggactagaatttccaaaacatcatcctggtctctagtgtggccattaagttgactaggggatgtgtaaggaatgaagaagaggaagcaaaggagttgttaagtgagggttgttaaagagatcagtttgttgattgtaagttgtaactgacttgaatgattagtagccaaactataaaaggtttgagctggaggtcgaatgcattgtggtttgttagatgaaaattcagaaactccaaagctcttgtaattctctctggaatcttcttcttcttctctttcctctccagctgctcactttctcatacttccattctctctttccagacaacttgtgtctcatatttgagctctactctatcctgaatggtggagttccttacaggattatcctgggatacaactcttatcaaatgggttgggctatatttttttttatgattggcatgctcaaagttattgcttattgttaaaaacgcctagatatttgaatgcttttgctacttttcagatttttatgttctgtcttattcttttccttgcatatgttttcactttcaccttgtatttggtattgagacttgcattttcaaaattttttttccgagaatttttgtttgcatgatctattggtctttgcaatattatgatctttccagtcgtagctactttaatgtttcttggatgtaagagttatgtagaaactaagcttcaaatatataaatgtctttggtatttgacaatttaatgatgacacattgtggtatctaattcttttgccctcaaattctgaatggctgccaactgaaatgttgcagaagttgtggcttgctggattttcgaggggaatcca

SEQ ID NO: 5625 - DNA, 596 bp, Manihot esculenta
  Intron number 1 from transcript cassava4.1_005169m (locus cassava4.1_005169m.g) derived from phytozome v7.0 (chr-ID scaffold06631; pos 772903 to 773498 reverse strand)
ggaagcttatctgctcttttgcgtgagtatttcttagtttttccctttttgtttcatatcatgttcagcttttctatttggtgaatgattgtggagatctctgttgtaattatctcttcaatctgaattcctctggccatgcaatgatggactgatatagattttgtaattcttttgaattatgtctaaggagccttctgagtcttttgcccatggatttgtttaaatcggcttgtttcttgtggaacaatgtgggttttgctgaatgtgtagaggtcaatgtaatttgtcatttcttgtttgatattttcttgaaactcactaatgggtaacttcaaatattccctttaggtggagttatctagttgtgttcttgcattgatttaattgtcatggaattcacattgtcttatttacatcaatgttttgttgaactattcttttcatgctttgttttctgtagttttggtctgttagatgacagttttggcttgattctttacattttgcttcattaaatttattttcaccattgttctttctcgtaatccttgaccacagggaacaaaggagctggtaggactcctttgagctgg

SEQ ID NO: 5626 - DNA, 4875 bp, Manihot esculenta
  Intron number 4 from transcript cassava4.1_011284m (locus cassava4.1_011284m.g) derived from phytozome v7.0 (chr-ID scaffold10954; pos 14791 to 19665 reverse strand)
gtggtcttattgctgtgagctttttaacttgttcattcactttctttgctttgattactagatattgattggtgtcaaccttgctctgattatacaagcaacttaaggcattatgaaatttctattatcaaccttgctaccttgtccatgtgatttcaactatttgttcaatttacttcaccaatttgcaagcaccaattcgcaagcttctttttttttttcctaaagaacaatccaaaaattccttgctgttttatctttatggtttgtctgtgtgcatcacacttcatgtcttggcaaagggataattgggacgtttaatgaacatgttttcaactaaataaaactaacctaattggggttaccatgtggatcttttcccctcctttcctcccagtttaggatactatgtcctgaaggtctagactctagactccagagtcgctcaatctttttctatcactcaatcattgttatcctttttaacactaaatcctttaattctcttttgcaacttcaatatgctcaaccttctgaactattgcatttattggtatagaattcacctgttcaaatcatttcaatgacccttatcttaatttttctttactgagcaccacttctacttcctatggatgtgcatgtaattcatttaccctcatgtctccattttctttatttttaaggaaatttcattgtcaaattggcactggatctgtttgttcaagttgttgttttaatatgtatcatgtgattgtgacaattattgatatgttataatttcatatctctaacaagggtagaagtatatctctaacaagggtagaagcttggtgtaagatcacttttcatcctgggatgagaatgttaatccttcaagatttatttttttacttcttgaaatagtgatggaatagagagggaaacaaagattttgagagaaagatgcttgatgatttctctcaaatcaattggggtatatatactacttacaagaacatacaatagaaaataaaataaatcaaatctctaattataacctgaccatattccaattatttctcctcaatctggagtgtacatgtcatatgctctaagcttgttactaatatactcgattcgtgaacctcaaagagagtttgtgaaaacattagctagttgatcatttgagttgacaaaactagtaaaaatgcatcccgactcactcttttgcctaataaagtgacaatccacctctatatacttcgtcctctcatgaaaaactggatttgctgcaatatgaaaagcaacttgattatcatatatcagcttcatttggccagtgtcgccatacttcaattcctgaagaagttgtttcaaccaaatgagttcgtatgttaccaaatccattgctcgatattctacttctacacgatcttgcaatcacaccctgttttttacttttcaaggatataaaattccttctaatcataatacaataccctaaagtagattgtctatttgaaggggaatctacataatctgcatcagaatagccaataatttgtaaatgacccttgttctcataaagtagaccttgtcctggagctcctttaatatctaaaaatgcaaataactgcgtcccaatggctattgtatggggtttgaagaaattaactaaccacacctacagtaaaggaaatatctggtcgcgtgatagtgagatagttgagcttgtcaactaatcttctgtacctagcgggattttttagtggctccttgttcaggaacaatcttgacatttggatccattgtagtgttcacatatctacagtctaacatgcctatttcttccaatatatttaaagcatatttctattgagaaattgcaatacctgttttagactgtgccatttcaattatcaagaaatacttcaattttcctaggtctttagtttggaagtgactgaacaaatgttgcataagctgagagattccaccatgatcatttcctgtagtggcaatatcatcaacgtagaccaccaagtagatgcatctatcataatgaatgattagatttacttcgagacattccaaactgttgaactacagtgctgaatcgtccaaaccatgctcttggagactgttttagaccatatgaagagcgtcgaaaacgacatagtaagcttgactcctcctaagcaacaaaccttgactcctcctaagcaacaaaccttagaggttgctctatataaacttcttcggcaaactcactatgaagaaaggcatttttaatgtcaagttgatgaaggatctaatgattaattgcaaccaatgagataaggaggcgaacagaagagaaaacaccactgtaatgaagcctaaaaatctgtatgtaacttttagctacaatgcgagcttaaggcgattaattttgccatcaggtgtcaccttaactttgtaaacctattgacaactaaaagtagacttgccaaatggtaaagatactagtttccaagttctattattgtgaagagcagttatctcctcaactattgcattataccaactaggatgatccaatgcttttctaactctattgggtatagaaacaacatacatagttgaaataaaagtataataggaaagagacaaatggtggtaactcacaaaattataaatgaaatgaggatttcgagaagagcgaataccttttcgaagagcaagaagagtagctgttgctgctgaaggcatgactgaagtaggtgatgataaaactggaggtgagtgattagaagtatctacatcagggagagaaacgtcattgttattatcagatgggtgaggttgacgcgtatagacttgaaaaggtggcgtagaagtgggagatggacacatttgaggcaaaggagaaataagagtcgaaggtatagtaaaagctttaagaataaaagttttgtgtgctagactagaagaaaagtaaggacaagttttaaaaaaggtgacatctgcagacacaaaatatctattagtagtaggatcataatgtttgtaacctttttgaaatcgagaaagacgcatttaactaatttaggctggagtttgtctttgttaagagtatgatcatgaacaaaacatatacattcgaaaacacgcagagataactggttgaaattctggttaggaaatagaatagaatagaatgatgattttgatgctgcaaaacaaaagaaggcattcgattaatcaagtaacaggcagtgaggatagctttcccctaaaaatagtacagaacattgtaatgtaggagtaaggtgcgagctgattcaattaaatgcttcgctcgacaaccccattttattgtggggtatgagaacaaaaagtctggtgagtaatactctgagtagacaagaagtgagtgaacgaagaagacaaatattcctttgcattttcactttgtaatatcttaatgcgaataccaaattgattatgtatttcaacataaatcttctgaaaaatagagaacaattcagaacgattctttattagaaaaagccaagtgcaacgaaaatagtcatcaacaaaagtaataaaatattgaaatttcagagttgtgctaacctgacttggattccaaatatctgaatgaaggttctaatatcacaaaacattgataaaatagagagggaaatagagattttgagagaattgggttatatatactatttacaagaatatacaacagaaataaaataaatcaatttcctaattatgacctaatcatatttcaatcatatcacgtaatctaaacacctaattaaagagatgcactagggtaaatgatcacaaatctgggaagactgctagatgatggaatgaccggactgttctttggtcttagtagatctaattatagtacaaatatgctatggaaaatcaatagggaggctgactatgaagtaacgacaggcttatgtcctccatttacatttatgtttctgcgcacacatgcacactcacaacagaaagaatttcattaaagaatctagtataactcaacacacaagaaaatggaatctggattatattccaaggtatttgatgatgccatcaatattcaatagttcttttcatagaagaatgtttggctttacatacttttgcacggataaatgtagcattttccagatagactacagcagaatgattctcttgatggaaaatctgatggatagaatttatatattgggtactggtactagtacattcatgttgtacatgtgtacgggatggagacaactttaccaaaaaaaattttaaagagttgttactgttatacagttgaccaagaattgagattatgtatggatgagaaaatcacgtgtgagataggtgggaccaattattgtattatttggtacaatagtcttacttaggagcctgccttctgtacctttgcacagaatttctccacctttttctttaaagcctggtattattttatttcactatttttccttcttccttcctttttaattgggtttgtctttcgtatacctcttggatagtactgttgtgttccataaatacttttaccatctagtactaccccatgctagaaaattttaaagatcccatcaaggtgtgtcttttggcattaattctttgattcattcaatcaagcaaaatcgttctttgaattcaacagtaataaaattgctggtccgttagatgatattaaattttgctttcttgctgaagatatttgagcagtaactatgttctttagattttatgcaagcaattcaaatactattatactagttaaccattaatatactgaacctgcatatggttaatttgtttactattgacaggctgcaaaagaagcaagat

SEQ ID NO: 5627 - DNA, 2633 bp, Manihot esculenta
  Intron number 1 from transcript cassava4.1_024222m (locus cassava4.1_024222m.g) derived from phytozome v7.0 (chr-ID scaffold09276; pos 99660 to 102292)
tccgaattcatccctcttccattttatcaaccaaggtaatactcgaaaatggagaacaaagatcaaacacctgaaccctaaagaagttttgaaattatgtatatctttgatgcgcgtgtgtttgtgagtgttattgcggaaattgggtgataaatttgtaaaactcaaagtgggtggatgatgcctttgggaattttccattatttagcaacagatttgtcatctgttctctaccttcgattctctctccttttctctgttctggttctgtattgcgatgtttaagctatgatgattatttcttatttgtggatgaaataatttacctcaacactgtatattaaataaacagctgaactgattgataacttgtcactctgcttcgatgtttttattcatgtaattgccaattataacagagattatctctcattatgtttgaggacttgctcaaggtgagacaatctgcagtgctgggggagaactattctacatggcatgtactagctattggatgatagaaagagaattaaatttcttatgacactccccatagaacttgttattctgtgtcttattctcattgtttaaacatgtaatagtgttgaaaatatttaactcctttcttgcagtgcttcataaggtccttatgccttatactttgtgccttttacattgtcccttcttctcttttataattagtgtaaaaagtcccatgtccataggaaatataaggagaataatgagaaggaaaaaggctctgattgaacaaagttgtggtggagaattataactgggtaatgaaaaaggagaaagtggagagaagtagacccttgagttctatttcttcaaatcaacaactgtttcactgtctttgttcagtgcaactctgcatttcccaccttcccaaatgctgttctgttacttgtggaccaaaactgctgcattaaataaaaatgggactgatcttcagcggcactcttgtgtatcccattctcttctcttgcaattaggaattaactaagggtgttagtatgattggggtactttagattacttaccatttcatctgaatcaataaaggaccaaatctcattggcataattttgacaatattaatggtgaaaatgagaatgattctatctatcatgcttggtgttgagtgttgatggcattaaaattttttttattttttcttatcagtgttatgtgttgggtattgattagttttttaatgtgaaaaagtggtatttttcaaaatccaagtgagttttgagtttgattagtttactttattttgctgaagttgtaaaagaatatatcgatgccttttctttggctgggaaaatgagttggaagtggaactagggatcacatttgaccagatattcataaaataggcattgtgtgctttttcaactgtacacaaaacccttaaaaccaaattaatattgcatttcttttttccaatttggtggtgttgggatttttttaagaagtaatttggttggttgagctttgattgatacagtaccaggtcaatacaactaaagtgcatacattgttgtaatggcatgcttaatatgcgtgtgatgggtttttaaggagtgggtggagcgctggagctgtatggtttgttctctatttgtcagtaccatagtatacgtaggtaggagttcaattgattttgaccccccacgctagaagttaaagcatggaagttggggatggcaattgagggtgatcatgatatttgatatagatcaacagttgaaattgtagtgccttttctgaatgacatattatgggcaatttgataattgtgccttggtatctatgatctaatattgtggtgggccaactataaagacagctcaacagcacatttaagggacaaaagtgagatgcgttcttggaggtgcacatcttttaaatttttgtcacctataagtaattgcataatgattctgcacatcttcagttaagagtttatttacgataaaattcgaatcttcactccctatgcccatctggttttccagttcttgtttttcctcctttgaaaaaaaaattcttttggtagtatccaatgtagagtatcaaatcttgtagtgtgataagttagtggggaaggagtgagactgagaagggaaagaggcagaggaagacctaagatgatgtggagggaagtagtctaaaaggatttgcaagttctagatactgatgcaaacttggtgtctaatagagttgaatagcaaaaaagaatccacatagctgagcccaacaagtttggattaaggcttagttattgttgttattgttgaaaacgttcttttggttgtactttgtgagcatcatatgttgaatgcctgtttgttaattatgtaaatagcaatattgaggtgctagtgtaattctttggtgctctctgttacctgattttgttacattctggcagatttttaatagaactatattgtatgtttgtgacctattaggaagctgacatttatgattattgtttttaaaaataatatttatgctggcttctgaggggttttagtttaatatttttatttgtttcatttgtcttctcaggccttttctagtttatctaatacaagttcagcttt

SEQ ID NO: 5628 - DNA, 3022 bp, Manihot esculenta
  Intron number 7 from transcript cassava4.1_015527m (locus cassava4.1_015540m.g) derived from phytozome v7.0 (chr-ID scaffold03651; pos 324659 to 327680)
atcagccaattatagtttatataccagagcacgaggtatgtttgtttacttataggttctggttattaatttcccgtcatcgaaaattgtgtaatttaggtgtgtactctctctcttcccatctcttttcggtacttcaaagtgtggtgcatgcatcttatttactaaattccttggaaatgtagtgattttattttgattatgatcatcaaattgaggttatagacaggagtgctttgtgcatctttcaggtctatttgctctcttggacttgaacatgagatagtaattttaccctccagtccaaaagggcctcaattttgcctctagtttaaacatatatcagggtttcaaatcgtggccgcgttcgtggtcgcggtcacaggtaatgaaaacaggcatgtaatggtcataatgtaactgtaactgtctgttgctatgcaaatttttcaaaaaaatttgcaaagtttatgaaattagcaaatatttaaagatataatcaaaagtaagatatacaacttaataataaatacaaatatatctaataaatacaaaatctataagttttaaacatcatacataataacttacctcaattactatcagaatgaacgcttagtatttacattatgtaaaataatttaaaatatttaaagaaattacattttaatttaaagtcatgttcttttttatacttaccatctatttttcataaatttttaaatttttaaatttttaaattttatgtttatattttatacttaatatttagttgtcatttattataacttgtaagagtataaaactcatttaataattagtattaatgatattaggttataattctgagcttctaaaaattctacatttctaatctagcattctaagttataattatttttaattatgcattcactaaaaaataatttgaaaatatctaaaaattgtggaaaaaataataacaacttatgttttgaatttctaatataagttatctaacattctaatttctaattatttttatttatgcattcacttcgaaggaaagtgaaaggcttcaaatgtgaagaaaaagtctttctaccttcaatacactgcactacaagtggtctcttgcagcaattctaaagatttctacccatcaaatgagggtaacaacctttatggccattaagtcgcagccaataactgtcatgaccattacgttttacggccgttaccgacacaatttttaatcgccgtgaaataatgaccttaatggtaacggctccttggaaaaccttgaaataacggccactattttatgtaatggctgttatttaaaaccatgaaatatatactccctttgttccataatttttattcacgttgtttttttacacacattaaaaaaaaattattaatttttcaattatattcatcctaaagacattaaattttattaaatactaagatatattttgagaggttttttgaaaataaaataaaattaaataagattataatagtcaatttatatattattatagtaaaaaagggaaaatagacaataattttgggacatgtaaaaaaaagtaaagatggacgaaaattatgagatatagagagtatttatgttatactttgccccatataactttatgagactcattgtacatacactagtctttttgtttcccctcaattattaactaatcttctcttgaatggaggaattgtaagttgactacatagaattttcttagattagtcagattcatgtctgtagatttggttcatgaaggaataaaaacttcattgaattatctatgaacaaagcatcatttcaaatccaactcaaaaaaagttgtttacatcatttatgaatttaatttttatctacaaatctagttaactgaaggattggttaattttcattcaagcaatataaaccaaaagcatatccaagattttactttgaaattatgttatccaaatgtaacattgtagtatttgaaatttattatatatgcattgagtatttgatgtaatatataaaaatactttataatatttgtaaaaagcatatgtataaaaagaaaagcatacccgctccccacctgcaattttaccctccattccaaaacagccttaattttgcctccagtttaaaatatataatttatgttataatttggcctatataacttcatgagacacattatatatatcatttagtgcctaatatcagtcttttttgttttcccccccaattattaactaatcttcttttgaatgaaggaattttaagttggctacatagaatttcttagattagttagattcatgtctgtagattaggttcgtgaaggaataaaagcttcattgagtgtggacttaaattatctacggataaagcatcatttcaaaaaatccaactcaaaaaagttgtttaccacatttacaaatttaatttttaaccacaactgtagttaactgaagaattgtttaattttcattcaagcaatttaaaccaaaaccatatccaaatttttaagttatgttatccaaatgtaacattgtagtatttgaaatttagtacatatgcattaagtatttaatgtaatatatagaaaatactttataataattgtagaaagcatatgtattaaaagaaaagcatacctgctcccatctgcagtacttttccctgtcttccctgtcccattgccattctcattaagaagggtgctgaagttcccctttattacaagaatgatttcacttgagggagtgaggcatgcaaaatcaatgccagaccatttgtggcatcattgtatttagtgaattttgcattgattattactcttaaaacttctaatgttgattatgagcatgtagtaggtgataaaattatgaattcttgaggaagtattttaaatttcttttagtatctcagcaatttgatgagatgcgagatggtgcaatacatctaactacagtacatatttgtttgtctggttgaattgcagcatcgaggtgg

SEQ ID NO: 5629 - DNA, 2789 bp, Manihot esculenta
  Intron number 3 from transcript cassava4.1_006172m (locus cassava4.1_006172m.g) derived from phytozome v7.0 (chr-ID scaffold08500; pos 170344 to 173132 reverse strand)
caaaaggtatgtgtagtgtacttttttggctataaatgcccattacttttccaatcgtatcattagtttatcaaagtaaaatcttacctatacacattgccattcaagttgatgatactcatacatgccccatatgctattagttaatattttcttctatcatgagattagaaataagccactattgttgttgatttttaatgattaagccttatagattagttaactgaaaagactaaggggcatgtttgacattactgatagatatgccattgagaaaaacattttttttttccacatctattagttagagagtattagaaagtaatgtaaaattaaatttgataagttttaattataagaatacttaaaataacatagttgtttcctaactgtttttctcaacatctatgtagtggtgcttgcttcctgacaagcagttttgatccttaaagcacaatgtcaaatgggccctgaaaagcttcaatagatgaaggccttgataaaagagggttgaaccaccaacttaaaacctgaagtgttaatgtcataaaatatgtgattacatctcatcatttgagaataccctcaaaatttttgtcctttatcacttttgaatgccttgtctttttcccccattgtctcctaaaagtctgtcccttgttggtgctctactctatagcagtggtcggggccgcattcccggtcatggttacagataatagaaatagacctgtaatggccataacattatggtaatggcctgtcactatactaatttttttgaaaaatttgcaaagtttatagaatgaaatattcaaatattcaattaaaattgagatatccaagtccaactaaataataagtataaatatatcaaataaaaaactaaaataatcaatgtagaaccaaaataactatgtatatagtaaagaattaactatttaatttttaagaattaaataacaaaggtaagaacctaagtatttaattaaaacattaggttttaaactatttaatttatgaaaattagtttcaatagttgattacttatttttcttgaattttatgttgcgaaaacttaaacttatatttagcaaatattattaaagcctaaaacttttttgatatcattttctatttgtttatgtatttacctaaaaatgattcaaaaaagttaaaaattagaaaaaaaaagaagaataactcacacttggctctcctttacttcaaaaaccactttgtctatttgatgatttgttctcttgaggtcaaaatgtgtagagaaattaagaatttcaattgagttgattgtaaaaaaattgagagggttgtgagaaaatggcttagttgcctagaaaggaaatgaagaggagttgaaacaaataagttagataattttctgccctaagcagaggtctcctttgctgcctttgatgtgaaaaatatttagaaaagccaaaaatgagttggaaaaataacggccattacacctttgaataacggttggtaatggctgttacagcctctacaggtgcatttttaaaaatcctttaaatagcggcagtgatggtagtggcaagctaaaattcctctaaataacagtcgttatggaatgtaatggccgttatttaaatcatgctctattgcggtcacatgtatggctaatattaaaggaaatacatatggaaatataacttaggaaacagaacagcatagtttttttttcctccatcctattgtatcggcgtgcttgcagccttatgaatcaactacttgattgttttcatcatattcattagaaatcaggggatgtccttactaggttgcctcctttaattacttgattcttatcttctatcgtcttctttgtgatagcaagttgattctcaaaacaggcctggagttgtaggttcaggaaattcaattgtgaattattcacctctctctgtctatctgtctcctctcccccccagccccccactgtagtgtacagtctattttacacttgattaggcaatattgacatctcatcttctatttccttaaatctggttgatcattgtttggtattactttgtttgtgtttttaatgttgattaatgcttatgcatttggtcatttcagattctacagggatttttgaagtacattcgctgtttggtagattgtttaatgctatttcctttttcgtccttgcaatttgtgcaacccttatatcaaatccttgaaataatcaaacaatctagcactattaaattttcatttcagtaaaaggaattaagcgcacattttgaattaggtttacttcttcaatcagtagggagttcatctatgtatcaaatcatatgctagaataggattttgcatttaagatgacagaatttaagaaaatattaaaattgactgaaatacaaaggaattaaataaatgtttctgacatctattcctttgtgtggcactcacaaacctaaaatatggtcatattttattctagaaaacttaggtgttcattatctataaaaaagaactaaaataaaagagcatcaaggtcaataattccgtttgatctgttcatttccttgtttttcgtatttatttttcgaagtgatttttatgctttatactgagagaatgcagcaaattcttgatccttgttgatgaacatgggcataactattgcggttaatatatttaaagagaattcatgtcgatattgcatagtttaaccattgaaaatttcattgtgctctaaactttttcttttgtctttttcaaactttcagagt

SEQ ID NO: 5630 - DNA, 3294 bp, Manihot esculenta
  Intron number 6 from transcript cassava4.1_007874m (locus cassava4.1_007874m.g) derived from phytozome v7.0 (chr-ID scaffold09423; pos 9044 to 12337)
gaaaaatcactaactcatacactcttgcatatcaggtacctctatgttctctttctttatggtgttgtgtgtcttctcgtggttccaagctaacaaaaatagatgctcactgaaacccagatgaccatgattaagtggggtccttaatcagttgcatataaaacgtttgtcaatgacacaatagtatgacttaatccttcattccttctgtggattttaactgaaaaaaatttgtaaatgaaaaccaaaagtcatcattaagcaaagtttctcactgatgtggtgtgtcttcttgtggttctgaaacaaaatagatgcagattgaacctaagacggtctccattaagctgagaccttaatatctttattaattacatggtagtgtgatttaatcctatctgtttgtggcttgaactggaaaaatacatggatgaaaaccaaaatggtgatcactaagtgctctttcttttatgatgattgctattctggaagaaagttttgtactttatagctagcatagtatcttgtcttggaattttccacacacaattgggaattgggacttgtcaaggtctcatttgggtattgctggttacgtaaactctattaaaaatgaccaaactgctcttaaatcataggaattttaaaatcaatttactatcattgtctcatagaaataaattaaaacaaaaactcatttaagatcattttaaccctgaagtgtaaggactcgacctagaaactatataacattttcctcaattaagttacaaaattgaccgtgaggtgtgcatttagacatttaaaaatagtttttgatagcattgaacaagcagaatttctgataacaggttcatgttgctgatatttagtgaagtctgtaaatgagggcggatagacactagggctaagggaggtcataggcctcccctgaaaattcaaaaaatctgtaggagtatttctgtaattttccaaactctacatgatttaatgcataagcagccaaatcttcccaaaattttctcaaacccagtcagtaaacaacatactcatattttccattattttttttagtagtggtagatccatattagccaatgagagcattgaacttttgaaatatttttaaacattaggagtacaataatcttttatataaaagcaaaacgtaaatcatattgaacccctattttttaataaaatgaattttaattcttgtcatttttattgtaaacataattatggctcaattttttttatcttaaaacgccttgtacaattaaaatatcacatgctcaatctgtaagattttgctttaaacagtattgtagtccttaaattttttgataaaattaatttttaatttataagaaaagtaaatccaagagattaaaatgttattcttctaaaaaatagacaataaattgttattctacttaaatatgagggattagaatataatagaaggtttgaattttattttattttattttctaaaaaataagaatgatttaattcttttcttaaacattgagtatgcaattgtgaatttaactattattaataagtttaataatttcttccaataaaagataatcaaacccatttctcttaagataaaaaatatatctaaaatttttttctataattaaaaaaaaatccgtgctaaaatatgatttagtttttgattttaacatgtctcatagcattctcactacgaattatatataatatatttttaatactaatattattattgtttaaatgatagtattgttatttttgttattgttttgatgttatttatttattattttaaaataaacataataatattgtaatataacgtgcaataatcaagatttgattatgattgaaactaaaactaaagttgaaatggaattgaataagaccggaagctatgtaccgaaatttgattctaattctgattcttaaaaatgaaagaattagagaattggttccggtctcggatcttcgctagaatcttactagaattagaacagaacatccctaatatttaagaaagggtaacccatgaataaaagaaaagtaaaatgtttttacaaaaagatttgagtccttgcattaagcgaccaaacttatgcctaatgaaccctgatttatttcaccagaggtcggaaaaaagagaggaaattctcaatcctttattcatgccacgagtaggggagaggattcagtaggatcagtttgaaattgaattgaaatcagaaaatgaaaaatcgaatcacatattttagagaattgaaccaaaccgactttaagtacatacttgacaaatctagagatggaaaatccggaggcagatacatgcaaatctggaggtatgaagtcacaagtggatctagacttaacaaatcccttctcagtgacaaaatcttaaataagtccaaacaactccccctttgccacttcttacacatgagccacatgaatatgaaggagaacaacaaatttggagaactgtggaacggtgaatctggagaagaacgacaacaactcactctcgtttgaatgcatgaagatgaataagaataataagaagaagaggttgagtatctcgtcgtgtaagaaaggagaaggatgaaggcaattgagtatggagagaaagcaacagctaagttggttttatttgagagagtagggaggatgagtaagggagataatactctggtcggtcatttcttttgagagagtggagaggaagatgaatgaaggaatctcttaaacatgtaactaaggaataggattgtatataattttgattcaattcatttttctttttcattttttcatgcacaaaactgaaccgaatgaatcgaacaatcaaaattaattgaaactcttaaccataccattgtgtaatccttcggagttgatttaattcaaaactgcatagacatagccacacgttcatagaaccatacctcaatcttggactcaagacatattaggaacatgcacaattttatcatagcgtctgtaatcctatggagttgatatgtaaattccaggtggaattctaagagatcagaccactagtggtttttctttaaatgaatgggattgcattaattgatattgaccgtagtatgatgaaataattatctaaaattatactatgatacaaagaggccctccactcccctttcttttcccattcttttcctccagatttttatttttcttattgcattatgatgagtcacttaatatagtctgaatattcttacagagtagagttggacccgtgga

SEQ ID NO: 5631 - DNA, 1209 bp, Manihot esculenta
  Intron number 2 from transcript cassava4.1_000510m (locus cassava4.1_000510m.g) derived from phytozome v7.0 (chr-ID scaffold06871; pos 717310 to 718518)
aggccttgggtgttgagaaacagtgtgtgcttgatgtaagatttaattttcttgtgtacacacacacacacacacacacacacacacatgatacttacctatatcatctagttgctaaattacatgaatacattcagtagtttggtttagtgaatatctggtatgcatcagtagagattagaaccagtgcgccacttctgtagcagacaaaatgccatctatataattgttttcaccactataaagtttctatttgaaaaagcttgttagtcaccctcatgcctagcctggtgatagggacactccttcaaattgggcgaaggctagagtttgtgtatcccttcccttcctttgtaaacacatttttgcattattttcattttttaaaaaaaataaaggatagtatcataattttgactgttggataaacaatataacctttagatcatatactataaatttcaagtcaatttggtatttatatgtttgtttaaacaactttttcaggctgcacttcttaaaaaaaaattcttgaaaattgaacattgcccaagtatcattgttaggcaattaatgttgtatcaaagctcaacgacttattttcttgttagtatgatgttttcgaattaactatttgattttcaagttcattaaatcaaaatcggaagatccaatgctagaacttttatcattagcactaaacaatccccgtctcatgcaattaaggcgattaaacatgcacaacttgacttgttataccggaactcgtgaccatgtggcctattgctgctgcattctttgaatttaactttttgtgccagttatctatcactaccgtcaaatgttgagatatgcacatttttcgtcctttatgttataggggcattactgggttgattattgtcctttgaacttagaatattattatttactattattagtaaaattgatttgatattctatatacacctatttttaaatccagcggtcaatttttgaaaaattgaatcagacaagaagttatgaaaattgtgtaattaactcgtgtagtgtaagtatatccttttccctgcattctagtaatttcattaggcatctgatttttaaaaggtttgtgtagtttgctattgtgaatctccgagtaatatggttctgttaataatttctggagaatgtgggttgctgcagttggagaaggcagtgcgtgag

SEQ ID NO: 5632 - DNA, 2189 bp, Manihot esculenta
  Intron number 7 from transcript cassava4.1_006996m (locus cassava4.1_006996m.g) derived from phytozome v7.0 (chr-ID scaffold01686; pos 41280 to 43468)
agctgctacagttttcacccttttgaagctttgtggtaatttctcgaactttcccttactctatttcatctttttgcttatgtcaaatatttctattaggagcatttttattctaccaaatggaaaataaagtaattgaaaatcagattgcctcaacttggttctatgatatatcagttaagaagtttgtggtgaagaaaaacttgtaagactgattagataaagacaaattcatgaattggagttaagtgtggctttttcttattagaaaaagaaatatgtgacaaagtgttcttcgtgaattggagttaagtatgactttttcttattaaaaaaagaattaaaatgtgtgtgacaaagtgttcaattgcatcttcaccctgattgcttgtgaattgtgattagagtttttgcattcccctagggaaatggcagatcttgcatttggcaaagaaaggaaaagcatctaatgaataagcaggctgtaaatcctcatagatgaaatggggtgaacttttcttaaactagttagtttcctttgcttggtaaaccaaagctacaaaggcaaaaattttcttgcaatagaattgtaagttgtaacctttggcctctgcttttatatggatttttatctcaagaaattcaactctcttttcaaccattgatgccttatgagacaaaataagagctactgttactgcaacgagcattacacattattttgggatttaatgcaatcacaatgtattggcttccatacagtcacatttttatatttactatttttaattttagttatagcccctacaagatttttattactcgatttttaatttatcctacctttttgcctataaggtttatgtaggtgcaatataaatttctattatctatatgtttcagtgattgaaaatatatgatgtttttccatgatacttcccatttgctactgaactttgagctggctaaaaatgtgcaattccatgtgtacttctatttcacgattacttcattcttcatggagtcctttcacttagtcaatcttttggtgtcagtatttgactgaatttgggtagtgtttctgggattaattgttggaataatgatttttgcaaattgcaatggcttctccatttgttaatggttttgtaagttggtgaagggttacttcgttccatgttgttttccatatccagtttggaaaaattacgtgtgtcctgcccatttttgtgctcttttttttttttataatcctggagttgtgtgccacttgaaaattttagaaactttagcttcattgcaacctggagagagatttttagtttgctaatgctgtgtttgggggaggtgggaaaagggagggggagagaatggggctggagctggagggcccacatcttaagaaataaatttgtgagctccacaacccattttctctcctcctttcctctttgcgtgccaaacacagcataattgattttctcaaaatgtgagcattagttcttcggatatgtttaccttctagcttggaacctcctctacatacatgcaagtaatatctaaattcgattggagtgcagatattttatcaggaaaagattatctgtcttgggataatgcctgttggattctttcttgattataatcccaaattaagcagtgagacaaattttgtggttcagttcagtgatacatattcttagttaccttaggtctatttttgaaaaagtgaatactagatgtattttcaagaagtattgtgaatctttgaaaatttgattaagaaatcaaactttttgcagaactcttgagtgcatcatgtacagatgtgcacaagacttaggagtctttcataagatgcttcttcctctgatgttccttattctgttccctctcgaaaaaagaataaattttttctatttaggatggtttgattttcgtccagatattattatttaggatggttatttgatatctttccttatccagtagaaattcattaatgtatataaatggtaaatgcctttcagtcatggtaattggtttctgtcctaatcttttctcagcaccatgatgtaatggccactcctgtaatgtaattgtgtatgaaagacttattgctaaactttaatcatgataattcctatcaaataattatcttttttctgattctgaatatattacaggtg

SEQ ID NO: 5633 - DNA, 1164 bp, Manihot esculenta
  Intron number 1 from transcript cassava4.1_015700m (locus cassava4.1_015700m.g) derived from phytozome v7.0 (chr-ID scaffold08542; pos 366613 to 367776 reverse strand)
tcctttcccctctgtgacgccatctccagcttgaggtacgatttcctcctgcatttccttcagttctatagatttatacgtaatttcattctcatctgtcatgtctacctcaattagtcaattctcagatgggtttagtgaattctgtggaggttcatgttggtattggtttttccatgttaaagtttacagttgtcccaaatatttggatatttctattaagatattgaagctttttcagggtttaacacgagtttttgatcttataacttgggattttagtgctttttatttgtttgggttgaaattaatgattgttgtttgtcgattaggtgtttgatattttgcttaaatgaggttgtgttctctaggcaaaccatatgttgaaaatgaatttgtgattgagggttagttttgaggcgtggatgcttagttatagttatgcactttttacgagtgatttgttggacaaggtatgaatcttttgaagagcaatggatttgaatctgatgaaacaattaatcatttctacttgtggtatttgataaagaaatgaacaaaattaaggagaattcagaatttgtaagtaggtgataatatgtgatttcataacttgcactgttgctcataaaagtgtacatataacaattgggtgatgagcatatcttcaactgttcataactctcttcataaaagcttattcattggatcatttgatttgttatgcaactggatttccaattagaagcctacagaaattcttctttactcttcatctttattggaatatgagaatgattcaataaatgtgttaaatgtttgttatgaaatttaaaaactaatattgttatgtgtagaaactacattttttatgttgtttgagtcctaacttccagtgatttgaagttattctgatggctttaatttcatctattctaattcattccttggagattatgttagtcattatctgacatctcctagtagatgacaagatagggttatattttgggttattaatatttcagatttcatgataaaatatgtcggggattatttcaaatctccaagcaaagccacatctggattcagatagcgtattctcaaagtcctaaactctacttttgtgtcttctctcttttgcagaagatttcatttttgacg

SEQ ID NO: 5634 - DNA, 1189 bp, Manihot esculenta
  Intron number 8 from transcript cassava4.1_010268m (locus cassava4.1_006024m.g) derived from phytozome v7.0 (chr-ID scaffold12794; pos 1187278 to 1188466)
cagtgcaacatcccgtcttcttgtgcatgtaagtatgaatatggcattgcgcttctttatataacacttccatctaagaattgctctctctctctctgtgtgtgtgtgtgtgtgtgtctgtgataacttgtagttttctttattttttttattgttttattatagttggctaaccaaatcacagttttgtagaactaaatcaatataaccgatatggttcagtgtgattgcaatgaccttaatttttctgtgtaacattaaaacagaaatttgctgctttgttggatgcatcatgctcttgcttgcctgatgtaaaatgaacatcacaataaagccacaaagtgaaaaattaggtccaacatttaaagcaaatcaagtaaggggtgaaacatagacaataaagaagtaatttattcattaaaaaagaatttaaatctgtcaatcctaccttgttaatgcagggtttgaaaattgaaacacttggggtgtgctatggtatctgcgtagagtagatgcatgaagtttcatttaggcttttgtattgttcagtatttaggtgattgttttctattcttcattattggagcagaactcaactaatcaaagttcccattaacattgatcagttgatccataatcacccgtatatgacctaaacaaataaattcagttccctgcccctgcaatatagaagccagcatatttaaccccacacaaactccaagccaacatgttgcacattctacaactcaacgcagggagctaccaacaagctgtggaaacaaattcagcaaacggaaataaaattttagaataatatatgaagagaagggcaaagaaatcctcactgctaactttcctgcactgaatggcaacaaatgagttatcagaacatacattttatcttcaaagttttattacaaactcctttttatcttccaaaacttgtacttctaaaacatagcaataaacacaagtctctagtttggtgtatgatgacatggaatttactacgcagcagcagagccaactaaaagtttatgggttcacaaaaagtggacaaaagtataaagagcatctgaggccatgaatttgtttttaaaattttttggtgccataactcgagataatatatgtccaacttaatgtttcaggaaagcattgcaactgaatttgtagacaggcttgt

SEQ ID NO: 5635 - DNA, 3046 bp, Manihot esculenta
  Intron number 1 from transcript cassava4.1_016283m (locus cassava4.1_016099m.g) derived from phytozome v7.0 (chr-ID scaffold00752; pos 172143 to 175188 reverse strand)
ctgcaaaatcaatcctatttttctttctctgaaaggtaagtttcgaaattccaaaccctaatttcctccccttttcaatctcttctattgcatggaaatcagaatttcgtttccaatctatctttattttgactctgtttctttgctacttcttctgtgtgttcgaattgacaattcggttgccaatagaatggttttaaagcgttgtaaatattggattccttaccccctaggcaactatatggataagcgtgtgatttcggttgaattgtttcccgatggactccttgaggattggaaatgagtgtgaaaatgttctgcgattgtttgctactcattgccacgctagcattaagtactctgtttcgttttcagttgatctttggggtcttgtgagttgattgaattcaatttgggttgtccaagtttaaaagttgatttttttaaaataaaaaatttagcttatgtgttatctagttgaaaattatgtagcttcttgaattaattgagcttactgatcatttaatgtcagtgaatttaggttccttgagctaattttatgggtttgagttgatggatttcttgtcattgttattattgtgctcatttgggattttggtagtttatctataaaatttgtccgaaactgactgatacttttgatgtaattcattttttgctgtgtttgcacattccagtgcacttctcattttacaaatgattttaaattttgggtatctttttgcctcaaagaagtgaccttctgcagtagttctccttcctgtgatggattcagtggtctagcaaacatcaaagatgaaatttgattcagcttttaggatctaaatttaatgttacttgcacgctaaatccatttgaagtcaatcttgtcctcaaggttcatacttctttcattttgtaatattagcacagacaagcatgtccaggaggagaaattctcttcttctagagtgatttttttttcttctctctctcttattccagtggtttgtggtattattgttatattttgggacatccctttaaattacattttttcatttgcttccttaatttctcctaaaagatctactcattttctagccagtgactggttcataattattaatgctttagaaattctgtgcaatgttgttcttcttttttcaatgctgaaagtattgttgatccatatgaaatgactccagtccaactaaaccttggtgacatgcttagatctccttgcacaaactgctagtcatgaattgtttattctgtaaaatggaaagaaaataaaagaaggatgtatacatacttgtgtattttgtggcaataagttttgatgaatgaagcttaaaaatctggcatatattagtctaactaaagcatatgagttagaacagttccaaattccaattcattggtctctataaagctggtctgactctcatgtgcttcagcttcatcaaatgaactatataatcaaatagtattaatcactcttcaaactaaaatcctgttagtgcctatgtgaaagctaccatggaacataaggttatttttctttcagttatactcccttaagggcgttttgttgcattgcctttgttaaaagaagtggaggcaaccatgccagtctcttgtctgcctgcacatttgtagaaaaatgcaagcaagaacttgatttatgacataatgaatagaataggtatgaagaatctttgaaaccctaccagtttggaaaatatagtttgctgctttaaagatcatttctcgctttgcttctcatatatatggatatatatatatgtgtgtgtttatgtgggtgtgtgtatataattgtccttgccgttacagctcatcttcagagttcagaattgactctaaatagttggttggctctgctttcctagtcaatgttttttccgtgtcgttctcatttttgcagttccaaatggtataccaaggaatcttagaataaaatttaatttatctctagttgcatgagtattattgtaatagtattttagtttattggatgcttctttatgattttatcatttgttggtttagcgtttgattccctcatatcacaaggggattgaagtcattgattagcttaatttaaaagttgtttatgggcagtgcagactgcagaatataccatttagatgtcagatcacattggcaacataacagtggtggtgtgctggtactatatacttctgtgggtttttctggagttgttgataaatatgaagtagtagtgaattttatgttttcattaaaacttaccatgtcataatcctgcttggaccatcattagaaattttgttttcatttcttttcctttgagggaatcattgagggaaagcttttagtaactccttttgttatgtactttgaattcagggaaaagaaattatctcaaatatattaattcacttattttcttaaatgaatcttgagctgcagaatgcaaatgaatacatattgtgaatgtacatgaaaaatacttggggaaaattgttctaatatagagtctgaagttaatcctaaaaatatttctggcaagattttgttatgataataaatagatgtgaggttatatagtcacttaaagttttgaactggatgagataagaattacacatagagcatttgaaagttgaagcataaatattggctagttatagatgtaatgtaatttgattcagacttctttcttccaatatttttcattttgacaagcaatgcaatgggaagtttcttctcttctcctctaattctctttgctcatcacattgttttgtttgatggttctagatttcagcttcttctattattattaattttcaaacatagcattgtcacatagtcatagagctttttcaattctcatgaatcattgcaatattttgtagcattggtctgcttgggtgtcatttgactagcatcttattgaaagctttggtgtcacattgacctaactatttaaattgcccagccagattggatattggggattctttgtgcatcatagcct

SEQ ID NO: 5636 - DNA, 1055 bp, Manihot esculenta
  Intron number 3 from transcript cassava4.1_010325m (locus cassava4.1_010325m.g) derived from phytozome v7.0 (chr-ID scaffold03942; pos 155827 to 156881 reverse strand)
cggtgttcttttcagccggcacatcctcaaacaaggtatgactcggtttgtgtcaattgcaaatataagatacttcttttactggaagcataattacatttctattgtgcaattagatataattgtatcagtttcaatctttttgcagactaacaactaatcatacagaaaggagtttttttctttttctttttttttggtaataagaaaggagttgttttcattacatttaacatatgttattcttttggtagattaatgggtcttagaattttgaattcctttccattgacattgtaagcactggcactaatttgtatatttgatagaatggctttaattagtttttctttctacacgaaaaatctctctctaactgttatgtgtaactattatataccttcatatggatgccaaagttcccatgtacaatttttataattttcgtttactgacttattatgatttacgaatgaaaatttctttagatctttatcatctcatgaaatatgttgcatcctatagtcattgataccatgaatatagtcaaaagcatggcaaaatgcaacttccttttgttataaattgaatagttagttatcattacttgtattaaaatggttgattggctgaaatactaagccatgaacataattgtcaattgcctaatgtctgttacctaatgcagtttgtttgtgcgtgtggtagttatgtgcctgtatttagaaattggttttaatccaaagaatgacaatgagcatgagtagcatacccgaaatttgccatttcttccagtttgcattttatttgtattaattcaatgaactttaccattcaattctttcttgttaactttcacaactcacagttaagcttatccttttgtcctgaagaaaattgtgcaaactttggaactatgaagtatgaattagtgactgattttgattatttaattgtttatatgttgtttattccttgaaatattgcagactatcttaactcatacacatggtgctgcagtttcatcatcaacatcaaattttaagcaagatctg

SEQ ID NO: 5637 - DNA, 3963 bp, Manihot esculenta
  Intron number 1 from transcript cassava4.1_006218m (locus cassava4.1_006218m.g) derived from phytozome v7.0 (chr-ID scaffold08614; pos 209548 to 213510 reverse strand)
ggttgttgtgtcattataacgccactaaagcccaggttctgactctcatttttaacgttgattttaaaaaaaatcgtgttcttttctttgtttactttgtgaagtgcctcgtttggtgcttatatgtggatgactggtgattttgtttcaattgcttactttacaattctgaagtgcttaaattttcctatgggtgtgtgtttgtttactgagaattcattatctgcggggatttggtgtgattaatgtgttgtagaagttctattggattctctagtacccaattcagggttttcgatctccttttgtgagaagaaagctattgatgggatttggtttttgaaagagttcttttattttctaaggattgtgaagaattgtaggataggaaacttgattttattgggaaacatatcttagcctgcattatcaagttgacaaatttgttggtactgaattggaaatttgttatttaactttaactggtcaatgaagatgaactataaaatgtactggacagtttgtactgattgatcttgaactaaaaacttggaattaatgcatcctccccaagtaagaactgaacttgatgaactctttggtccaattatcttatggttcacatacttgagctgctttatatcctcttttgttagtgtaatgagaagttattttttaaggaaaaagcccctttaaacccttataaaatagtcaaatgttcacataagccaaacactattttttagcccaaaattaactgtgttacttttaactatcatttcttttcaaatcatcttccacaatgaacataaaaaaacaagcagccctttccaccaatataacttaatacacccatcttttcttctattctcatctctcaatcgctgtcatactttcttaacaatcctccacctccattaatggcatcctctctaaataccccacctgcaagtcctatcattctcatcctctcaactatttctcttttccttcattcatctctccatgtttgattaatgcttggttgcctctccttccattactcttctttcttcactctctgcccttcaaaactaagcttgttgagttcaaaaacttccataagaaattcactcttcttgagaaagaatttgaaggatagaagaacaaaccaaggactaatttcatagaattagagcaaagatagtcggaagaacggttttaacgtttgtctatcatgtggtattcacttgatcccattttggctaaatttaatctgaattaaataattatttgacttatttttatttttttaaattttgaaggatgttaatggacaaaaaaaatattgaccagcgcttaaatgaacatttgactatttcttagggcttgaaagaggctttttgcctattttttattagttactcatgtatagtaggtgtgttactgtagctgctgtcataagcgttccttgtataaatactcttgtacagtttgttggcaataaaacaaactttttcccaactctgaatactttcacatctttatgtgtgtgtgtgtatatatatatattttagaagagattacaaaaaactacatgtggtttaacatatttttaagtagggccttgtgatttaatctataacaaaaagactcatgtggtttcacgccatcactttaaatttgcttataaattacaatttactccttgatatttagtgaaacctacgtattagtccctgtattttttaatttagtccttaaagttttatttcttaaagttttatttgattgataaaataatctcttaatttaaactttatatttttatttaaaattaatcctcatatcaaattggttcttaattaatatcattactaataaattcttacatttattaatcttataaaaattaaataaaagttatattgtaacactgtaacaaaaattaaataaaagttttatcatttcttttgtgcctaattaaataaaagaagggaaagttagacaaaaaatcattctttgagcttgaatctgaatgtatattgtgctaagatcctttgatttaatttttattttgttattttattgctaaatataagatactaaaatttaatagacttggaagattagtttgtaaaaattataagaacttatttaaaggcaactataatttagggatcaatttgtaaaaatatagtgatgaaaactaaagagactatttcattaataaaacaaaactttataactaaatttaaatgtggggactaaattatgtgttttactgagctttgaagattaaaatgtaatttactattattgaaaattaattttaaatgccacataagcatttattaaccgcattagagggaaaaactccattttgcttcagagtgaagccacgtgatttttttagttataaatgaaatcataggatcctacttgaaaaagacactaaatcacacggtagtttttgtaattattcccatattttaaaattaaactctatgaatcttcaggtgccttgaatcatatgcttgcttgtttgttatttttgagttctctttatgttgaatttgatgaagattctactctccaatagtgtattgtaagtttttcctatttagtgtaggatttttattcttaaatagatagagtaatttatgtttggccaattaactcaaataattcaaatattttggtcaactcacgattatatcctaaacctttaattttggacaattaaatcaaacctttaagatttgtcacgattttatctataaactcaaattaattttgactaaaatctgagattgccactctgccatcttacttggtgtttttattattttttaatttatatttcttttcttattggctaaaataattcaaacgtttttatggatccatgtttatatcctaaccttgttggacaaaataatctatactttttagaaaattcatatttatattctaatctttcaatattgaatagttgcaaaaacaagtatgaagatacttaaaaaatcagtagtcacatcattagttaatataccgaccgacggataagaaaaaaccaaattggtcagtggtcttttcgcagttttggctgtaatgaagagaatagaacctaaacaaatggtaataaaaataaaaataatgagtaagggagggtagtttggagaaaaagacagttacaaagagataaataattgttttcttctccaaactaattttacatattacttctttctttgttgccactctatttatttaaattctatcatctcctttgcaactagagctgcaaagaaagctgcagaccaatttgactttttttcctatgccgatgccttggttaaggatgcggtcgttgatcttttgtgtgttttgataattgtattcccactcttcaagatttgaatattagaatataaatataaatttgtgaaaatgtttgattattttgtttaatagataaaatgattgggatataaatgtgaagttataaaaagttttggattatttcgtccaaaagtccaaaaatatagttaattaaaaataattaagaaaagtcacttgggatgacatgtggcattttttaaattttggtcaaaattgatttgggctcatggataatatcgtgacaagttttaaaggtttggtttaattgtttaaaattgaaagtctaggatataaacgtgagttgatcaaaacgtttggattatttggattaatttggcctttatatttttgtattcctatttcgtgggtgaattccttaattgatggtttcatgccatatttcttttggatcttccattataaataagaaagtttttaaataatgttggaaacaattgaatgaagatgtagttctctgagattttgtctccatagacatagctgaaccacgtaaatcttattgtattattttcttttttattatttattattctaacatttacactatacaggagggct

SEQ ID NO: 5638 - DNA, 2649 bp, Manihot esculenta
  Intron number 4 from transcript cassava4.1_005146m (locus cassava4.1_005146m.g) derived from phytozome v7.0 (chr-ID scaffold05494; pos 195070 to 197718 reverse strand)
agaatttgttggtggtggtgctaaaaattctaaaggtgaccctctttctaataagttggactttcgttatgcttcgcataacggatcttgctagttaactttatctttgtgactggtttaaacaattgcccgaattgtggaaggtgtgtgatgttctgagcctatagaatgaatttggaaagatatgtttttgggcagagatttttctccttatctgtcgggagcttagaatcagtattacaacttttcccatgttgaagttagaataataaaaaaaagaagaaaataacataagacgatttacttggtatggctatgagagcttccttatgttcatggacacaaaactacaaagagctaaatgtttatttaattgtattctatattatcatgatataaaggcttgtctatttatcataaattaaggaattctctgatcaaataggaatataacaaatccccctaactaaaaatatataaatttacgttattctgcctatttagaaatatcaattctatgttaagtgggaatgcctttccttaatgctcttaattggagcatggaatctcatcaattccaatactctttgatgagattatttgtggaattaaacaacttcattgcaacaactcaccaccagaagcttttaagcagattttaaaacacttgcacaaagcaccaaagacaaacaacctttagaattgctcttcgctctccaaaatcgattttggtggggaatatcatcacaaaatcctctctgtaggcaatgctagcaaggaaacgtcaactaaagtccctctctaaaggcaatgctagcaaggaaacatcaacacaaaaaaactcatagagttgcataaaatgcaatcaaatgcagaaacttaggcatgaacattatccttggatagtgctgatagatagtacccatgaatagtgtcaacaaacaatatgcatgaatagcgcaataaacattacttgtgaacaatattctgtgaggagtaccaaaaccctaaagaatcaaaatctttgaccatgttaaagttagaataaactaaataagaaaaaagaaaataaaattagactatttacgtggtttggttatgtctaggtacccaaaaccataaacgagtacatctttatgtaattgtattctatatcttatatatacgaagggttgcctatttatagtggaaaatctaagacatatatggtatgatatcataaattatgggatttttaaactaaacaggaatacatcaaatttctctatacctatctaggaaaacaaatcctaccctaaatagaaataacttttcataatatcccatatcccttgtatatgtcaaaactgtaacctaaaacaaatctttaattgaatgagacttaaggtcacatgccttatgttgattctgagatttttcttgacttagtaataatgcatattggttatgtcacattatgttctacaagattggtcaatgcaattaatccttaatagcctaccagtttttgttggctactcacagatccttttcttcaattcatttggtttaaggctatgtcttccaaaaactctaatggttgtaaaactatctaactattttcccttatgtcatgctcagtttgccctgttcgctttcttgtctcccacagtttcatgtgctcaactattaaagtcttgggtcatggatcacatgatagggactttggatagggaaggagctcattggagggagctcctaacaccttattaatgagagtctcaaatctcacatgtgtttataattattctacttacctttctgaataaagaaaaacctcttatatggtggaggtttatgcattcataatacttcttgttaaatttgggccaggcctaattcaccccaaaagctagctcaagggggaggagtgcctatggctcatataaggggcacattacccctttccacaaccgatgtgggattcaacacaccccctcacgcccataattttttactggtatgtggcatatttgtggggcgcccaacatcggatggggaggctctgataccatgttaaatttgggccaggcctaattcaccccaaaagctagctcaaggggaggattgcctatggctcatataaggggcacattacccctttccacaactgatgtgggattcaacacttctaattaaagtaaatttctaatacaagcaatcattaaataagaaactactaagataatataatagaaatctgatatgaaattactagacaaatgaaatctatttgtcgttgataaaatttaatatgctattagatgataaacttatttaatatttagattgataaatatctttaaaacactttgttatatgtcttttctagatcgataaatattttatgggtatttcttttccattagttcttctccaacaaccttcttatgacttgtaaggaaataagttgctttgttagtttggaagaaatttgagcttgaaggagcaatgcacctgataatgtgcaagcaagttcttatggcggtttttgggccatttgtcatacaatttcttggccatttgtcttataaatttttctttgtttttgcttgataatatacgggctttatcctgaatgttgttttattttttatttttatttttaga

SEQ ID NO: 5639 - DNA, 1070 bp, Manihot esculenta
  Intron number 1 from transcript cassava4.1_018221m (locus cassava4.1_018210m.g) derived from phytozome v7.0 (chr-ID scaffold07595; pos 236343 to 237412)
aataatttccccaattggagtgtcgataagctcaggtatatatctctctacactaattcttgtatctagctgggtgctgtctttgaatatgatttctttaactccaaaaggtgaagtaaactctcgctaaaactagtttttatttttgttatatgggtgctgttattgaacattctttgtttaggtttgataattttaaaattgcaaatagaagagggggatttctcttcatttaggttgagcttttgaaacttgtttagattaacttgcagatgacaagatagagtttttatgtcatattttatttttgttgggttctttagtatccaagctgaagacagcttattcaaactgaaagtagaatatgatcctctagacctgcattgaacctgatcaaagtgcaggtataacttgatgtgtagttattatacttgcactgatcctgatcaaagtgaaggtctaacttgattagtagtttgcaagcattattcaatttgcttttgtgctgtttatgtgctttggatttgtgttgtattacgcctaacttatacatgcaagtaccctcagtttattcacagagaaacaaaatgcactacatctgcatattggtatagttggcatttggacttatgagcacctcggttataaattaatatattctttttacaagtctcatgagttatgtgagttatgtgagaactacataattaaattatttaaccatcacaatgaaaattgattttttttttttgagttttagtcggaattgatgtttgttatctattcttcgtatttactattctaatatgggatgggtatagctagtaagggaggaattcattgaggttgggatgggtacaagaatggacataaggattattaatcgagtcgggatgagcaggcaattttcattggttcccctttacctagtgccatcccttggaggaatggggcttggtccacttggaacttgcttttggagaatgccgtgtaatgttgaatgagggtgaaaaaataggcttcatcatgctgattcacttttcacgggttcacattctaggtaaaggatc

SEQ ID NO: 5640 - DNA, 2293 bp, Manihot esculenta
  Intron number 11 from transcript cassava4.1_002813m (locus cassava4.1_002813m.g) derived from phytozome v7.0 (chr-ID scaffold03850; pos 54366 to 56658)
gctaggaagagcccaagacttctagaaagaataaggtgcatgctgtaacccgttattcattcttaatctggaaatatgatttcaattttttttattttctagtgagcctttggaatttgggcactgcaccagcctgtctaacataagctagttgtcaaagacataagctgtatacacactacacagggcataggtgaaaggtgcatgtgcctaaaatatgtatataatacttttcagtttattaagttgaaatgactgaatgcgaagcgtgctaaaatctattatgagacaccatgaattactaagattaattcgactgaagtcaaagtacaaactggttgtaaaaatgcaaaacacatcaacacaagatcataattgcatgtttcaaatttttctcatgctattttggtgcaaagaagatgactactaagactagttcaacaagagtcatgtacacatgaatgtaaaaaaaagggaaaaagtcttttcaaaagtgagcatatttcaacagacactacaatcaaaatagtggatcccaatattctgctattctagctacttctagaaaaactaattagaatcttgactagtattaactaaatcagcatagtaacattctgcaaattctattcttcaagctcctattggaaaaaagagatcaggtggattggaagggagaaagggcgtttaggttattggatatttacttgctgagagtttattcgatttaagtgtttcttttattggcatttttagtaacatccattgttaaagccaaatccacactccacttttataagtttaaaatgatggtactagttaaaattctcgactccttgtcatagtgtgtcacctgtgtcaacttgaggcagaagacgtagggccttagtgcactgtagttcaggcatacctttgacaacgatgcatttgagcagggatggagccatataatttttcagttgggatatatatatgtatatctgtgtgtgtgtatgcatgtctgtgtactgcagagattaaggcttacttgttatatgttctgtttggcaaataaaaagcccaatgacatctcttcatctataaataattcttgatgtgaaaatttgacttcataattattttcacatatggaaatatgaaattagtttcatgtgacaagccaagtgtatactatatgaaattaggtacaaggattcctaaagcataattataacccacaaatttgattcctaatctcactttgcaatttctggggttggaaaagaaagtattaacaaataaaatgaacttcaagtataacaacaatcaatattatatgtatatatatatatatataggtgactgttatggtcactttatttaaaacaaagtaataattagtttgttacgagaaaattttatattttacttaatttttataaaatgaatctatttttcgcaataaatcatattatggaaaatataaaatttaatggaaaaatgataataattcaaaagaacatataaatataaatttttgtcaaattttttaaaattaaaatctttgatatttgtatgcatatttcatagatttataaaagaatgatatatatttcgagaagtaactgttttatgaaaaattattaaaacaataacaattagtgatgttttgagaattaaaacaataacaattagtgatgttttaagaaatgttaaaaaacatttactcttacataaagataataacatatttttttataaataatgtaataaaaaataataatgttattaatataatttcacatattatctgtaaaatgattattttaaaaaatagatatgttatgataaacaatatataatttctatgaagtttaatttgtttttgtaataaagtaagtttattttaaatgaagtaagaatggaaacccctgtgtatatttggtaaatgagattgcaaaatcaaaacatccaaatttgagccctttcacctatttaaatcaaaatgcacactgtaatgttttttttttaataagttaagtggggttaataaaggcccaaaagaattgcgtaccaatatttttaatgtttcgctaatccttgattcccccaataaacgacaatgccatgccaatgcacacaaggtgctttgagagaactcattatgtgattgatttgcttgcgcatggaaaacctgaaatttctgttgtccatgactgaaagtgtttagttggagcttcttttttggtgctgaaatcacagtatttacagtctggttatcttgacagagagcgtccaaagtaccaaataaagg

SEQ ID NO: 5641 - DNA, 246 bp, Manihot esculenta
  Intron number 1 from transcript cassava4.1_009588m (locus cassava4.1_009588m.g) derived from phytozome v7.0 (chr-ID scaffold04857; pos 120139 to 120384 reverse strand)
ctgattgtaagttcagtactagtattctctcttttcctggttttttcattaggattttgtttatttggaaaggatccattaagaagaattgactgaatgctatgtagccagcttcaattagtttgggattaaggcttagtagttgttgttgttcatgttcaatgcttaaggccttcttaactcttaaaatgtagattttagttaattggttcttggttttgtgcagtgactgtgctgaaggctgtt

SEQ ID NO: 5642 - DNA, 2887 bp, Manihot esculenta
  Intron number 3 from transcript cassava4.1_005138m (locus cassava4.1_005138m.g) derived from phytozome v7.0 (chr-ID scaffold03053; pos 40417 to 43303)
aacggatcaaggtatcttactttatgtttttgttcacatcaaaactgtatattgattgtggtcttccaactacttcaacaactttagttagtttgcaattgcaaagtatcagcttagagctagattaatcagaaccatttggaccttgtttgcataatggcaattctgtagatgtgtacatggccttagtctgtgctgagagcaaaacaaagtttgggaaatgctgcatttgcgtggacgatccatatccttcccattttgtttttggattaaccaggtctcaactacaatgcaagcccataacctctcaacctttaagataactctaggatcactaagccaagttcattggtaatctaatatccacttgagataaaaaatacttttataagtgcttcagttttcctacagatatttgagtattaggcttcaaaattaatgtctcaacagtggttcattttgtagatattaatttgcatctagtgatgctatctggtttggcatatttaatgagatatgtgttccaagattgggcaataattgctgcagggctcattggcattgggagtaaccatagttacatggttttttgaccacggttgctcaaaattcctaaagaaattagataatggaaagatggtttattccctcttggtgtatgtaactctatacaagcttgtttaccaagcattcttctgaatcatttatcccttttaagattcctatttatgttgcactcaatattgaatagttgcagaggaattttctttgattgatgtgagggatggcatgagatcatctggttagcttgtaggtggcatgtaattctgtctccaggggtttgctacagattttttagtgttaggcttcaaaattaagtagcacagcagtttggtagttattaatttgccgcatgtacgtttgtctggtttgacatatttagtgggttatgtggtccaagattggccagtaatagctaagcggttcattggaattgggagcaaacttagctatttggattttggaccttgttcgctcaaaatctctaaagagatcagataatggaaaagatggtttgcccctcttggtggatgcaactcttatacaagctgtttacctagtattccattggatctaatgccttttccaaagattcctgtgttgcattaaaatttgagtatttgcttagggatttactttagagtgatgggaaggacgttaggagagttattattgttagctggaaggtgtctggtaaacctatatctcaagggaatcagttaattcggtgtctaaaaatattgcaataattgtgaagtacttattggcattttcctttaagacctcattatctgtgacatgatggaattaagagtgaatataatatagcctgcatatagcaagtggatgataaattttacttttgaatgttgacagaagttcatatgttggggatggatttatcacatatttgctttagcaaagagatatgtagcagataaaataatttttctggtctttcatgggttcatttcaaaagacattcttggggtactttctctgtttaatttatttgatgatgatatgtgatttcatccattttcccattccatttattttgttaatgcaaatatgattctaagataatgctctccagcgtaagcagtgttatgaacagtaaattccccatttccagttcattaaataagtttagcatatgagcatagagttccagaagcaagtgtagcacttcaaagaggatagttaccctgtatactgttctattagagccctttccttcttgtttttgttgttccccaacccccctccccctcttaagaatacgataaggtctagcccctgttatgctcctagatttctaggtagttatgaaatggatttgagaaggttttttctgacaaggcaatctaatttgttgatatatgatgaataaacctctccattttctaaagtggctaggctatgtttcatttacaattcataagaggtctgtctactttttatcttgacaatgacaaggccaaaagttgggttgaaggatttgaaaatcaggctgttgagtgttgatgttaattaatctccatgaaacatgatatatttgcttttcaatggatttgcgcatgcacaaatttgatgttctcctaacggttttgctagcagatggacaagcactccacattgctgttttgttttgagggagtcattccttagcttcctaaatgttctcatgttgaattcatggatgtcgctggttattccttggaatagattctggcagtaatataattgtgataataacaaagttgctaaccaggttatttacatttatgtgattgtggttcccaatgttgcgtggataagctccatgttaaacactttgttgtctgtcgcttctgatgcagtaattgtgtggatgtgagacatagacctacctaggagtgagggactcttctttgtagaagcttttcccatttcattcattgctatcttggtgatgatgtaggggacctgttgactatgatgccaagttttcagactagcaatgagctagtggtcatttatctatgtatgaacaaatgtgtcttgcatattttcaaacatttgttgtattgtagttttggcttatggctgatatttactgtacctacctgttcaagcagactatgagtacactgtccagctagtctcatttgtgttctagatatgccagaatttaatgtttggtcataattccagtaatgtgaggctatatagccttttgttttcttttctttcttttcttttaaaaaaatctcaatgttgcaattggtttaataagaatctgatttcaggagaataacagaagtgaactagaaaggcttgacag

SEQ ID NO: 5643 - DNA, 1234 bp, Manihot esculenta
  Intron number 2 from transcript cassava4.1_009964m (locus cassava4.1_009964m.g) derived from phytozome v7.0 (chr-ID scaffold05280; pos 109583 to 110816 reverse strand)
cactaaagagctatctgctacaacagttatattaggtacattgatatacttttgccttcttgttttcttagaaaaattaagtcatttactttttgggtaatatgttattgataaaaagttagaatatatatgtaaggatgcatagtcctaagaaaattttttttcctttattaagataagtgttgccacactcacgtagcatgaaaagtacataatctttaacttcactatggaaaaccagttggtctgtcatattaaacaacaatttatattatcacaatgacatgcaaaggaacatgaacctaatgaggtgatgactgaactagatgatgatgtctaattagatgaaggatcacacaagggaaggtgcaacttgaagtgtatacaatgattggaagctgtagatagcagttagcaccatctggggatgatggaattatctaggatgcttcaatgttctttggttggagaaggctaaaaagacatgagaaatggcagctagagaagtgggattctggagaataaaatgtggaaaaggcaaccataaaaaagagaccctttcatattggtaacaacatgataatggccattaatgttatggtcatttcccttgcaattgtttttttttcctttctgccattatatatagcacataatgggtatggggttcataatttttaattattttatgccacggtgcaaatctaggatactccaacctttactgaattgttgcttgtggcatgctgtgtgaaattgagtaattaggttggcatgcttattgatatgccattgttgtgcttcttcattcacatcttcgtgtagttggatatccttggtgtactttgtcctatctattgtgcacaaatgtgtggtttatgtggcattcataattctatatttattgagtggtggcaccctccatttccccccttctcattattcatttatatgaatgttcatcaactatgttttgggttatgctataatttattgacttacgtagtttagatttctatttacaattaatttactgtggttatttcttgataatggcttgcaacatcatgcactttggtttttgggatttagatttatttttctgtgcacctggtcttaattttcttttaatatagatactaattgcatttcatgtgcaacaatgttacaaattttttcttttgaaattcattgtacagagagattgcgtgagttagcttggagtggtgtacca

SEQ ID NO: 5644 - DNA, 3347 bp, Manihot esculenta
  Intron number 3 from transcript cassava4.1_018605m (locus cassava4.1_018605m.g) derived from phytozome v7.0 (chr-ID scaffold08085; pos 242339 to 245685 reverse strand)
ggtaagtgattgtcaagtttcattcaatatgtttgcatgaagtaaatattcaataacagttttcgactctctaatctctgtatttagttggtgaacaaaaccataacattcccctgctagttatatctctttatgcctttttgacttattttctatcaagtggcttgatgttctttttgtcttcttagagtaccaagtgcgggtgacttgactcaacacttttatctaaatgaacttcagctctctctctctctctctctctctctcttggtggtgggaagaaggggaggggttggggtgggggatgggagggggagaggatggtttggtgtgcagtgtagggaggaagaaaatctatttggtatggatttcttagggctaaaaaattgtcctatctcatgtttaaggatagggaaagatgggtaatagctattttttcccattatgaacttaaatgactgccaatgtaaacctggttttacaagggctagatttggtttttagaaatttagtttgaatgttaaattttagattaatttattactaagtccctaatgtttgccaacgttaactactaactaggtaatctttctatgttaaagttgtcctagtgttttgaatccattaataaattcatccttctgtctaagacatcactattgtgccattaaaatcaaaagaaaagactagactacgcatttccttccctctgtctctctctctattgtgttctttgtttacgcttaatgctctctctctctctctccctctccctctcttttttgtctccaatccattaataaaatcaaagcaacaaaactcaaaaacatccaacaatttggtccaaaatttgcaaaactataatgtgaaaaatactcataaaatctataatctacaaaaccaaattctaaaataaaaacaatttctaaattgtatttcaatcaatacttaaaagcttttaatcaccaagatcaaataaaagattctatgaaatcaaaagcaaaatagccttgccaccaaatccaatggggaggttcgagatagatcatgcacttgggatctccacatgctattcatcgacttgtaaatcatatgatgaattatgaaaggaagtcaatgagttccccatacctttgaatttgtacttgtttatgttagttatgaatatgataacaattatatttaagatgatgtctaatggtgtgtattatttgttgatggtttgtcttggtggataaaactagtgaaagagttaaccaaatttgaagttgtgaagcattcttgagattaatggttttaggctaaatagaaggaagatggaatgtatgcattacaagtttagctctggtatacataatgaaagtgagattcaattggatgtacttttggtgtcaaaatgtaaccaattaaaatatttagattttattctgcagaaaaatagagtagtagataaataatctcataggatcaaaacaatatgcatgttctatgtgattgtagaatgcctaacaaagtgaaaggtaagttctatggagctatggttagaccagttaagttgcatggaagtaaattttgggcatttaaggtataacttgctcacaagatgagtggtagatatgcggacgctaatatacaggataatggataacaatgattacatcctctgggggtgcatggagtacacattgggaacaaaatgagagggtcaatgaggatggtttcatcttgttctccaatatggggggtagtgaatactgaaattcagtaagtgtgataagttaatggtggaaagagtgagaaaggggaggcgtaaaatgatgtgaggaagtagtgtcaaaagacaattttttcaatattgatgcagaatcagtttcaaacagctccaattggtgaaaaaggatctatgtagctgatcccaactaatttggaaataaagattcgttatttgtttgtgagctcaatagttgatggtagttgctcaaaatttagtcaaatggatgatattctgtttagctgactcctgttagtttgagaagttttaattaagttaaatttggttgctcattggaaatacaaaataagctacccgtatcaatagaatgtttcaagtcatttagagaaaacgttgcttacttttgaggttgcttttaacaaagttgaaaaaaaggtacttcgtgcgaaagtgacatcaattcttttagcattttagagactcttaagttctaatcctgcatgtacaattgatgtctttctgccaacggtatagtaaaatcttaggtttctgcatgcaattggcattaaagggcttatcaaattgtttcttcatctcttttgcatattataaccatcattcaccaaagccttgtttggagcttttggcagtctgcatctgtggcacctgacaatggtttggcaaatgctggattttccatattttctgaatgtttgcaagaagtggctaaaaaaatagaaataaaataaaaataaaagagcaaaagctgtttctataaccaaatacaagaccaagacagggctcacatttctcatggttctcattcttgaatcttgttactcaattcagatcttgaattatctcttagccagttgtactttaacctacacctcccctttttaaacatgcacacgtacacatacatatagttatgcataattggatctgtctttctggcctggtaggcactgtgacactgtgtttatgaacagtataatatattttaggcttcacaatcacatcttaacttccttaggcatcacagccaaagttccatttgtattgcttcactcaatccaaataagtatagttgctaaacttctatttattgaaaactgaaggataagattacaaaagtaaactaatcctaaaccttcaaattgctattccaaaattcccaacacctaaagtaaactaaaaatataatgttgtcctaagccaatgagcactcaaaattaatgctctcataatataaaaaatactcctaaagacaatcagccaacttactccagcaaagctggaaattaccaaagtggtgttatttcaaatattacaggtgctaatttatttgaatattgctatcagaaacactggaaagtatctataagtatgttctttatgaaaatgtggaccataattcatctttttcgagtttaatcttgtttttcctggagcttcttgttgtctgcatcatatagcaaatgaaattcactgctcatgtttaaccaggttttctgatgtcaggtttatcatctaatgtaaattgtaatgtaacatctatcaattctgtcattttgcagaggaacaagaaaaagaaaagctgattggtgaagag

SEQ ID NO: 5645 - DNA, 1522 bp, Manihot esculenta
  Intron number 5 from transcript cassava4.1_032640m (locus cassava4.1_032640m.g) derived from phytozome v7.0 (chr-ID scaffold06659; pos 261286 to 262807)
gtaaaatcttggacactcgtttgaaactcaacaaggtaagggaaaattagttttgatttcttttcctttacttgtattttgttggtttctgatttgattttctaaaagccttattcaattattagatttagacgaaaaagcggacagttttttaatttctattaatggcgtagggttattattaacttgagaagataagctatcattaatctgaagtgtgggaaatatttttgtatgcatgcactgcaatctttttgctttttagattgattgactcacttttttttaaagttagtacttagcagataatgacattttatgaaaactgtatgctttttcttaaattttcattatcacttttcccagtattttttttgtgtgtggtcaaatgacttgagtttttgtctctaataatctgtcataggtaatatttatttaaaaataaatgtttcaagttgtatattactgagattggctaactggaaattgtattttactcgatatttgtgtgatattaatctacatgaccaaggattataatatgtttcgtttggtgttgcctgtgttggtgttgtctggttgattattgcccttctcgtactagtatattccgctagtcttcataaaaaaacgtaaaaaaatagaagttggcatgaataacgtgatagagtggacaatttagatgagaaaccaatggaatttgttaaaggatcagtcatcatgagacttgcgttaatttactttggtataattttagaccatttgaatattaattaagaaatcacccagtcagaacttaaaaagtaaggatggcctgtttgaccatcacccccttaataatcatgataacaaaccacaactttaaatgaacttttctattagaggactcctgcaaaaagccataaatttgacccaccaacatgtcagatttcaatcatatagccatgaattggattaatattcaccatccttttgccttttactccttcattagcttgtaggcccccttaactcaccattttgcactaacctgcacaatggtcacaacaatgacctaaggccgaagaccactacccagaagttgagatgtcatatcaattcaatataataacatgaaaatagctagacttgtccatttcttcattaaatgttctgtttttgtcttcacttaatccaattgctctcaaatgagaaaatcaaagaacctctttccctacaattgctagaatgcactgtggtctttgggaaacatcccataggaagccaattgactagttgtacgtccagtatgcacagatgcttcttcaataagtttctaccattttgatgccagaatactgcactgcacatattttcttggtttgactttaaagaatcttatttgggtagttattgtcttggactttgctactatatttaccatcagagggttaactccattttttttttttcaatgggtggggattttgtatctgcaattgggacagattgttagagaaatacagcactcgagaaacggtgt

SEQ ID NO: 5646 - DNA, 783 bp, Manihot esculenta
  Intron number 4 from transcript cassava4.1_002710m (locus cassava4.1_002710m.g) derived from phytozome v7.0 (chr-ID scaffold10173; pos 396401 to 397183 reverse strand)
aaatttgaaagatatccgtgtacgccttctaagtaagtctgttttctttgttgcttctgtactttcttcttcttcttcttctctctctctctctctctctctctcttgtacttgtgctcctttcatggctgggatcaatgagtttaaggttgagaaaattgtattctgtgtataaccatattcatggtttaaggtcctgtgattcctcaatataatgaaatttaggaaacaacttagatttgggctattcaggtttttggtatttcgctttattattaggattaggattatttctatatataagcattattttggattttgcacattgagaactaatatagtattggaagtgttgtttcttccattgtgtgttccactttcatgtggttctacatcaactaccaaacgtaccctaaatagtcgacatacctaaaatctctaacaaatgctctgcagcctgctacacccaggcaccgctgcctcagaactgctctctccctcatttttcctccctttactgggcatgtatctacttggaatttgatgtttcactaacaatctagaacttccattgcattgagtgttttctttaaatgacacctcatagctaaaatatctgttgtaagttaaagaccgaaattctcctcttttcaagtgctttgtattttagtaaaaaaaagtgcattgtattttggaatttgcaactttctatatctgtaaaaggccaatttgctgatggggagatgttttcatgtactaggtgttcaagctgcttactgggga

SEQ ID NO: 5647 - DNA, 836 bp, Manihot esculenta
  Intron number 4 from transcript cassava4.1_007333m (locus cassava4.1_004746m.g) derived from phytozome v7.0 (chr-ID scaffold07520; pos 157806 to 158641)
taacaatttggtgggtctgctattcaaatacatgcttgtcctttctgattctaatttaaaaattgaggtatctagaaaatagaataatcttttggttacataaatgtgttttagtttacaagtgccattgtattctactccagcaattcaaacttatacatctaatattatgaagaaatacggggtctaaactgcttagaattgcattttaatactaggttttcacatcaaagtataatttaatcagaatctcttttaataaattgtagtgttagatttattttctggtataggagaaggccgtttttatttattttaattcttttcttattaaacatttgctaattctggaggataggagatacaaaactttcacactcggaatatctctgggattggtcaaaattgaaggcagggagagggtgtttaagcttatctgttcatttaattatttctggaaagtggaaagtctcatactagtgctgaagtaaaccaattccaaccaaggttgaactcttgacttatgctttgccacccaaatcattttttgaatgcacataagattgattttctcgtgtgatttcgttatttgcccatcatgatatttttttgcctgaggttgaaaaggaattgttaatttatgtgcattttctgattatctgtcatcaactgcgtgttgtagagaatgctgagtatcttttatgtattcaagcaatttgtgaattggagaggtgtcttagtagatactgaagatctaatgtgtgtaatgagaagtaactttacatttggctattgttccaggcagagctgtatagagtcaaaaaatcatttgataa

SEQ ID NO: 5648 - DNA, 2685 bp, Manihot esculenta
  Intron number 2 from transcript cassava4.1_003075m (locus cassava4.1_003075m.g) derived from phytozome v7.0 (chr-ID scaffold07902; pos 41776 to 44460 reverse strand)
tagtggagtgctccttctatagtacgtaatgtcattgctttgtctttctcttgttcaaacaatatcttcttatagaacaggtatgtactagacgaaaacactagataagtggcatctatgtgtaaatgaatatcatagaaccagatccagttacattggtaaaagcttatctaataggtgtacagttgattagtttggctcaaaaccgaagcaaacttaaaaatttaaaaaataaatataaaaatcaaacaaatcgtaactaataagagcactgaaatgaatccaaccgaatagttttgttggttcaatataattcagttttgagctcctcaataatttcctctatctactttgttcttcagtttaataacagagtaacatcaaattggtgttcaatgaaatgcacaacaactttcatttagaacaaggaaaataaatacccaaaaattctcaaactatttacatcaacttaaaacttaatgcaaaacatcaatacatcaacaaaataaatacctagtaatcctcaaacttaacctataatatcaatgcattaaataacaagaaaaagcaacagaaccacaagctaaacctcttgggctagtggcaattaaattctctagaggtgaattcggaaattttggaactggagcacaatctgctgaaccaacaagctttccctcataaacgagcagcagcgaggattgaaggctaagtgagggaaagaaaggagaagaaatacaaaggcttgaaggaatggagatggcagtgggaaggaagggagaagtttgtaggctcactgtatttgatgaggagaatcaacaggagattcaagtaaagggagagaaagaaactaagagtagagagctgagacaggtagataggctaaaagtagaaagcagtgacaaactaagaggctgagagaaaaagaagaaattggaggccggggttttgataaacttatgtatattgtgatatggatggctaagatcatgtaagttggacggctacaatcaaaccaagttgaacgttaaaaggtagaaaaaaagatccagtgtagatgttgaacacatgatgtgcatgctattactgcctttctaccattaagctttagatgccttagatgctatacatttttttcttggtaacaagaagctatacatgtttttgaattttattctcattgtttttttgaatttttttaatcaaaactgaacagaaataactgatttattttaaaatttcaaaacaaactgaaacaaatttcctactaaaccaaaattgaaattttgaattagattagttcttcttttttccccctaatttgaatagaataatactcatccctgcatctgaattctcaaccttttattcttgaaaaacttaactaaatacatacattctgttggaaagaaatttttaaagataacatgtgaacttgtagagtaatgggaatataaatgacttatttaatagcacaattatttcaggaagttaaagtttttgaggattttggaggttcccaaaatctccaaattaatgtccaaaattaattttactttaatctgtttgagttacatgaaaattaagttaataaaaaattaattcctttaatagaattaatttcttaaattcacttggttgtcccttgaattaagtcaaattaaaactgttgaaggaaatagaggaggaagaatgaaacacataattcaatttaaagaggtttgattatcctaagcttatgtcttgtgctctgggctttctttgagagttaactccactatctgtgttctttggataaagattaagctctttacaatccttgagaactaacttttaccatcttactattattttcatgcaaagagcacttacactctagaagttactcaacaataaattcactcaatacaaataaattcacttaacaaccttactttatttatttttttttcttttttctgaacaatacaataattacaactcaagtagaatccaaagattgaaattctgtggaaaggtgaaagaaaatgcttttggcaaagtagattcacaacaattttttgttgaatttcaactagattataaacacatttttgtataattttagcttaaagttgattgtcagaatgcatttaatgcaattagtgactttcaaccacttaaatcaccgctgtaatgtctcctgaaaatctcgatctggcagaagaaactccaaagttctgcagctgaactccttggagccaaagaaaacccctttttgcaaactgacatcagctgaacattcagttttggcagttgaagtttagtgagtttcgccatgccatttcggattccaataagtgtgggccaatttgaaccattttaattcaaaatatttctttatgatagttcaatagtttagtaatccaaaataatccaaaccacctaataagttttctccctctaatacccattctttatacatgaacctagtagtaaatatgttaaaatacatgtagcacgagccatttatatattatatatatatatattttcgtgtgaagtcaacataccgactttgtgcgttgaagcttactattttctctaattatatcaaactatattattatatttcttgttactgattttattgttcatgtgctctgtgaagcaacttctagcacattcggcttatccaacaaaatt

SEQ ID NO: 5649 - DNA, 844 bp, Manihot esculenta
  Intron number 1 from transcript cassava4.1_002982m (locus cassava4.1_002982m.g) derived from phytozome v7.0 (chr-ID scaffold07340; pos 32213 to 33056)
tccccataacacccacaagtcttactggtttccaggtaattttttattgcttgatttcttggacctttatccccttttttcaacaattcttcttattttattattctttctttttcatctctctccactcttccctgtctctctctgtgcctgtaggaggatgagatgaggatggtgattataagattctaaatttaacttatttttttaactgaaatatctattgggatttgtagatgatggttttgtcttgctttttgctttctgatagcttttgttttagatttttttttttttttattactgggcttcatacaaatgatagtttttgatggtgctttaagtgggatttaggttttggacttgttactgcagaattcttttgtgatatattgtgataaagatgctcttttgattgtattgtaactaaggatttgtcccttataattctcaagtcaatgtattttttcaaaatcctgaaacccaatgtatactatgtttgatgaagagattatttaaatacacggatcttatggtgtttgatgcttctttgtctatggttgaatatatcagtattgctccctgttgaccaatgtaaccatgaacatgtttgccacccagttaatggctttggcatctgcttatggtgtttattgattttggctttggtcatttcttgttttgcatattgttctggtgaattgcttttgcatgagggaatggaacttatcagtaaacacttaaacgatcaaattcaaattctggaattctttcttttggaattgaagcatgatagagctgttggtaatagaagctgtttccaatggctttttcagttccttgg

SEQ ID NO: 5650 - DNA, 1111 bp, Manihot esculenta
  Intron number 1 from transcript cassava4.1_007746m (locus cassava4.1_007767m.g) derived from phytozome v7.0 (chr-ID scaffold02610; pos 23793 to 24903 reverse strand)
gttgtgggcaggcatgttgcttttctcccaattttaaattaatggtttttgtcattttggttggtgaattggtattctccgttattttattttattttatttttaaagaaattgttaatggtatctggtttctgtaattggaaaaggtataactttttcttttcgtatctgtaaaattgtggtcaatgatcaatgttctctttgtttacaggcaaatcaattagcttttctctgttcttagtgcatcagttgttttgattttataggtttagattttagactcttttttgttcattgaccagtaggcaatattgtgcgattaattgcaataactatattccattttgcttcgtgccataaatttggaataatttacagagagtagctattccacgatcaaatttgaataactagttcacaaattgttggaattcaatttttttataccaactcctttccacttgtttctattatgcgagtttaatgaagctttacagttatatgctctgaaatatggggtaaaagagaaacctgacttcattaacattatagtacacttttggttgaagatttattttggcagatgatattgtcgccgtaaatagtggtggaaatttatgtgaagtctttgttccttccttactgatatttgacaacttgctgtgttttatccgatccatcatatctgtctccctccgtttgttgtgtggtagggcctattgacactttggtatgcatacaactttagtggtagtgttattggctaatgttgctgcatatcatctttgaaagcatgtttgtattctagcttacaactagcagctcaatttgatgtttggggtcacaatattagactcttcctttaaaggttttttttcaaaaattattgtcactctatcagtggagcccatgagtcatgcttttttttttgtcatggaaagtataggagatcttgtactttattcattcagtgtcttgctatgtgcatgcttgatatcagtttatgtgctaagcaaagtggtctggctagtcataataaggtgttttttttctaaaaaaatatattttgtagtgaggaagaagcaaggaagaagatctactcggtttcaac

SEQ ID NO: 5651 - DNA, 1504 bp, Manihot esculenta
  Intron number 1 from transcript cassava4.1_005752m (locus cassava4.1_005752m.g) derived from phytozome v7.0 (chr-ID scaffold00435; pos 19904 to 21407)
tgtctggagaagtaggcgcgtatacgaaaggcgaggtatgttgtatgctacttcttttgctttatgtttgtggtgtgtgtgagttttgggcacattggtaagtggtttgtagttgaaaacttgaaattgaaattgttgggtgagtgattgatgttgtggtgtttggttattgagaaactgatggagagtagaatgaaatgcgattactgagtttgttcaagaaaagttgagagttttaggcttagctgtatacttattctgtatgttttgactttgatgattgaatgatgagtgggtgttttcttagcgagtaactggaaagaaatatagaaacaaaaatgaaaaacataaggtttattgtgtttgtttaaggaaagttaggatgctcaattttgatctcacatttctcttggttaagtcatttgttcagtttggttttagtgggcaggaaagttggtcgttgttacattgggttggatttggtggcatgctggttcggaagaaaatgaacagatgaagtgtgcttatcttgtagtgggtgctgaacatttgaatgttcagcgtaaggagcttctagtatttaggaatatgcacatatgatgacataaatatacctttgtactttattggatgatgttttttgttattatgtggtggttttttggttcatattagactaggacaggtttgggtctttgtaattgctttttatgagttagtattgtgtttgacttctaaggaatttggcaaactagaggaaaatctttgtatggtaacaaaattacttaatatctgattttgtgttaatgggaatgataaatttgtgttgaaatggattcaagtggaatatacttttgtgtgattgatttcgccctatttgcttatttgtgaaaatgaagttgattcagctgaatgcatctttcaattcctaatttttacacaaaatattagttggcgtcctgacttatttgtggttaacccttaacatcaagcatttataaaaatgtgattatttaacccttaaactttgtaagtataatgaaaagtcagagcgtgcataactcacatttcaagtcagagtgcaaataactcattatccgcgcataggagttcaatagttacaattaataaagttcaggggttcaagttataattttacagaggttagatgttaaatattaactacaaaaaggtcaatgtcaattgattttgtgtaaatattaggggccaaattatgcatttagccaagttgactcactacttctatgtgagcatgtgcatacattatcacttatcagccgtttgatcagaatcttccattcaaccctaggtttgactttttctcgtgcgctctgaataatttctgtatatggaaacttgcactgagatttgtagtttgggttaaaacataaaattcttcgcaagaagatccactgtaatattgtctgaggtgtagaatgattttgtaggctcgatcttcaacagttgaaggatcagtcaagta

SEQ ID NO: 5652 - DNA, 819 bp, Manihot esculenta
  Intron number 12 from transcript cassava4.1_002463m (locus cassava4.1_002463m.g) derived from phytozome v7.0 (chr-ID scaffold06701; pos 477943 to 478761)
gacggcggatttctgaaacagaatatcagcttcctgtatgctagtagatattatcacttttctcaaagtttttgttacacattctgtttctctaaatcttacataacagtatctatacttgttgcctgtattatttctgattttagttggaaaatgctacatcagtacataaataagaatgtgctgtaggtagtgattgaattattacaattaaagggaaaatgtaaaacttctttgggtcttgctaaatgggaatgtaccttttaagttccaaaaccatcacggtggacctatgacttttgatttgtagccattgtatttgatttatgctgttatatctaagcatatacagttaattattcaatttttgtgaagaattaaagttagatgaatgtatatatatgaagcattttatttatttctttctttattttcaaacaaagttgaggcaaggttctattattagtttaataaaggatgaatcataagaatgactatcatcatgtatatccaaacagttcagtaacttgagttatttaaagggggagaggagaataactttttctttgcatttagagaaggctttatcacaaaatattagtcctataaaagctatttctaagctctttagagtagtaacctagatatgattccagcactatctttaatgaagttaccactcctggtattgtatttgatgcttgttccatggaatgaataaaagctcatactgagctgcttattgcattctgtttttctcggcttaacatctgttatactgcaggttgtggcccttgtttgcaattttccaggatcaaa

SEQ ID NO: 5653 - DNA, 2496 bp, Manihot esculenta
  Intron number 16 from transcript cassava4.1_001251m (locus cassava4.1_001251m.g) derived from phytozome v7.0 (chr-ID scaffold09788; pos 507134 to 509629)
aggagagacattttcgtggggtcatcacattggaggtatgggaaccatcgcttcgtaatttgagatatctcacaattatgctgttggatattcaggaacctttccaatatatttagattttattaccttcacactgtataggatgcacaagtccagaagataagattttgtgtgcctcgacgagagggaagacacaacccactccttaaattcaatttcattctgttttgatagttgagatattattatatagagttggagctttctaaagttttgggtcatttaagattaagtagaggtaataggtgaggctgcaaatgaatcaagtattagcaaactccggcttagctcatttatagaagaaatattaaatttatgcttaggctcagcatagttattaatgactcaaggtaagcttgtcttgtacttgtttgttaaatgagccaaactcatgccgaagttttcattattaggattaagttgtaaataaatcatagggaataaaatgttctttatggtaaaaagttggcggcgaagtgttcattattgtaaaactaagggatgaaataagaatttatcttgtgggaattaaagtatttttcactcctcattaataacaagaataaaatgtccggagggacaatcatatgacctgatcaaaatttagggatgtttttcatctattttctaaaatatagggatcccattgttaattattgcataagatagggatggaaaagtaatttaccaatagataattcacaatatttattaaaaaaagtgatataattttactctttaagtattataatgtaattatatgaacttcttaaaatatatgttatatatgattttcttcatgacgaacctttaaagtaacttttaaccagctcaaatttgattagtttatttgatgaatcttaaaacaaggcctgatcttaacacattaaccttaagaaatgaatctaatggaaattttgtcaagctaagcatttagtagctcaacccagtttggttcatttttaggcctgaatcctatcctttccttggttcagtttttatttttgtagtgttatcaacctaattatcacagcttcaggcattatagcatattgatgttgtatgtttctctaaccatgtgagatgtcagatgtcaattgtttgggcatagttgtgacacgatgaatatatctaaactctagaagtcctttgccattaacaaaagaaaaaagaatttgagtccggactccagagacttgcaatattctgtaattttaatacaaatcttgctttgcttgaagtacagcttctgtggagaacctctctcatctttttctcccattattttaaaaaatagaaatgccattttctcaatgcaggagacatgtaagatgtttcacaatttaagcctcattttaggaaaatggcgatttaaaggaataccacacttgcaacttttgatcagtccttaattaagagatagtgagccctttgctgaatgccttgaatgtgtatcaaattttaattgtgctatcaacataaatgcaaaatcttgattttggctgaagccctaatttcattggttcaagaaaagtggtgatatgtcatctttttgatggcacccttctcttttacatacggtgttaaagtttcaccatctttgctaatgcattccttgtcccgttgactgctgaaacaaatttcggaaaatctgattatttgttaatgggtatgcatttcctgatctgtttctaaatctaataggaagaatctctttcttgtatgtagcttgtctccttttatttgtaaaaatctacctttatcgcgatttagccatctattatatattgtcaatgcagttgaatttttcaaatgttgaagtgcaaatctctttcatccttttcaatgacatagctagatgctggaattggttcaaactctgaggttctttctgaaattttagacattgtggaccccatatttctgttggttacttaacaattcagcgatacagattttcagcaaggatacttctaaagaattatgattttgatgtaatgttaatcataattttgtagccacgttgacattttggctttcatcttcaagctttagaatctagtgagatgagatgctagggatattgttagcatggtttcacccaggaactatcgttttttttagtttttttttttgggggggggggggttaagggaatgctattgctaagagctgttttgtttttgttgtatttgctgtctctagtgcacctcatttccacaagtttcaattgtgtccattacctgcttaagcttgttagtacaatacaaaactttcttaacctctgatttgttgatcgcttataaaatgaccaactatgctgcatcccccctgtgatggcatctccatagatgtatgtgtgcagtgtgctagtggaatcctttatcatttaatatgacattgcatattaatagttttctcatcccacgggcagga

SEQ ID NO: 5654 - DNA, 3615 bp, Manihot esculenta
  Intron number 3 from transcript cassava4.1_013984m (locus cassava4.1_013984m.g) derived from phytozome v7.0 (chr-ID scaffold00524; pos 25929 to 29543)
ccaggtaacttaaatgtgcctcgaatgaattttgccaaagttgtagtttaaattacgccttggacataagatctaatcatttatctcacctacttgtggagcatgagtcttattcagcataaaacacatcggataagagtcatgtccatcaattatatgtttttatgttctttctgtaataggctataatgtagcaactgaagttttctgtggaattatattgctgggacacgaattttggagaaggtgtgtgttacataaccagattctccatcacagaataatggaaattagagaataaacagagaaataaaggggaggaagagaagaagagagaactaagaaagaggagaaaatagatctttattgattacaatttcagagtgacaatcttggagctattccatctcttttataggtcagtttcttctaaagacagctaaaattaactgtttctgcagtagtaacaacctccaaacatatatacagaatataactcccttcttaactactactagactcttatatctaacactactccgtccatgagtgcattcttgtccccaagaatgctcaaagtttgaaactgaaactgcaaaggttctgtcatcctaaataacctcctttgctagtaagaaatgtaactccagtgaaatgacccataaagcttgggtgaagatgctaaactttcttcctgttccttctccaaatttctcatgcttgttccttcaagatcacaaatgaacttgatgtcataactttcttcctttcttttctagctatttcccatttatcttccataagaagtctaggatgacaacaagtgaagtcaccaacttggctcccaaaatactgccactcgttcccaatactcacaccttttgtgacaccttcatctttcttttttcctagaacattttgaaaaatttcagtagcaaaacattcagttttgggaatgagttgtgcaaacacttcagattcaactaatattgtcctgattttagactctagttgcctattgtcactttgttatttggactcggataagagtgtcaaaaatgtgtgcatatccctatgcctgacctgaaaactttctaaactgacaatacggggatatagatataaatttagacacagatgtttggattcattatattatataaaataaactagaataaaaaaatataaagttatatatagtctaagtagatgatcagctacaatcaaatacataatccaaaatacattcaaataattacttttatctaaatacatgctttttattttgagagaaacggatgctttattaactataaatgaatatgtcattaaagtgtccgagtgcatggatgtgttggacgcatattccttgtcgtatcccatgtagtgttgtatcgacatgaatacggcatggcaaaatgaagagccatagtatgagaggtcgtcaccatcttcatcattcttctcctcataaacctcacttacattagatgtgtcaagaaaaaactcatgctccatcttggtggctttgtctttcttattagaagtttgacataagacaccttgttcttcactaggcttttcaaaaatttgagtttcattaacaaagactgcaatcttcttctttctcacttgaattgattgctcaaatatttccatttctgatctaaactttctatttcttgaatcactttttcaaatctttgttctaaacgctccatttgttcttagaatcttatatatagaatttcttgaactctattaagaaaaatttgtatcaaatattgcgcttctatgattcaagaatttcaagaaaacaaagaaaatcaagaaagagtaattgattttcaagaagcaaaatgactcaagggaggaaatttttgggaaaaagaaagaaagtaggaagaagaagaattccaagtaagggagaacaagaaagaaatctgaatagagggagagagatggaagaaagtaggagggaggaagagggtaatcagaaaagaagaaaaagaagaagaagaagaagaagaagaagaagagaggaaaagaaggaaggaatcttagagaagacgcagaatgaggaagaaaggaagagaggaagagaaaagaacagaagtaacctggtatttgggaagactactactgatctgccatagatacaactccaatgaaacaatttccagtagttgcccactgatcgaacagctgtgataccaattgttacataaccagattctccgtcacagaataatagaaattagagaagaaatagagaaatgaaggggagaaagagaagaagagaaaattaagagaagaagaatttacagaggaggagaaaatagatttttattgattagaatttcagaatgacaatcttggagctattccatctcttttataggccagtttcttctaaaggcagttagaattgactgttccagccaattccttttttcctgatagatctgtaacaacctccaaacatcttcacaaaatataactcccttcttaactactactagactcatatgtaatagtgtgaacattgagtaaataatattgaggactttaaaattcttttatactaacttgagtttgaagggcattgacaaatgttttttaaagtgtgtgattccttttgtgcaagtgagtgcaatataatttctttgaaactgaaaatgatggtaatttgcttggaatagttccaaacggatgattttgttacaatcattttaatctgcaaatcaggattaatatgaattgccaagtcttcctgtgaacacatctattgtctcgtaactaactcttgggggaacaccttcattctgctagtagtattatccaaaattttcatcatttgatagtttctcaatagcatgacaatgctgataaagattcaagaacacccaaatgggaaaaaggagtggaactctcaaatcttctgttaattctcaattgttaatataatatcaataataataagctctaaaaaatgactgaattgtaaagttatttataaactaatcctaatactattaggattaggattccaaaataagaaaatactactaaattaaatttccaaatttcttcctaaaatccctagtggaaggtcctgcataatatgccttccttccattagatataataaccttagtaccagagccatatggctgtcccaactgttgctaatcctaccataagcaggatatctttttactcaaattttttacttgtgctcaatctgacctcatgaaggggacattatccataaagtaatgttgcaaagttttcctgaaccagacatattatgttgttttcctttatggaagagagaatttggctttcactttctactgttctgcttttatgtagcagacaattctgacacttgcataaagaaggttcaagaataatctggtttagacaatgaaacagctggtcatttttaatttttttaattatttattattattattattattattacattaggtgtcttgtatgttgatgcgtatgctggacattattataattaagttgttgatgttcatgacttacctttttattcttcaatggagaagtagccgtctccctccatcttcccaggagtac

SEQ ID NO: 5655 - DNA, 2003 bp, Manihot esculenta
  Intron number 1 from transcript cassava4.1_005031m (locus cassava4.1_005031m.g) derived from phytozome v7.0 (chr-ID scaffold09123; pos 42019 to 44021)
cccaagcctgtaacctcagagaccttatccctaaggtatgctccaagtaaaaaccccttaaatcaccattgtacatgatcattatttgtgattttgatttgggctttgtgctcttttttcttttttttttaaatcttttttttttggtgttgttttttttgtatttgtctgactattgtttggattaaaatatgaagtcgaggttcattaatggtgtgccttgataaaatttgaggatatgagcaagtggttgaatttatagaagtggattttcttgttttgtttcaattgtatctgtgcatttttgggaagattggagtaagctttaattctcttcctcataaaactgtggttaatttcactggggattgttattatctttgttttcaactatttaatcaaaaaggcatgggtctctggtttttacttttggattaggattgtccttggaagttaatgtcttatgttaaatagaagattaatttgatttgatttgttctagaactcaaatttttggactttttttaaaaaaattgtttatgcatgtgtaaaaaatagattttatgctaaagcatctgggattattattattttttttaaatcttgattcttcttttcttccctcaaattctcccccctggtttgcttgtcggtttgcgcactaccttttgtttttagctttaaaggaccttttcctgtttgtactcggtagctttttatgcttttctttttgggaatagttaatcagagtgtacagttctaccgttaatttctggatccattctggaattttctttcttttggggcttgaggcttgatgctagagcttctgattctaagaatgacttttttggacggttgatgatatgggtcaattttgttccatttgcttcattgtttttccaatattatgaatacctgattaacaatcggttaactactgtgcttcaatcttacaccgctgtggtgtgcttgcaagtttccgccatttcgtgatgagtgctactagtgttgttgaaggtggaaacaagatagggactttgtagtcctaacttgtggtgttgttatcatataatcttagaaaattttctttcctgtagcacatgaaaaatgctcttttaaatactttctactaacatggtagccatctgttagtcatccctcccctccaataattctcacatctaagaattttgcagaaatgacaaaatctcaagtttataaacagaactacatttctttcagcattttctaccaatcaaatgaaagtcaatgatatattatatgttaatttttcatcattctcatctctgtctgtatgtggattgactgactttttggttaattgttttagatgtttagagtggtttttcttttcttcctttttctttgggttccgtagcttttgagttgaaaagttaaaaaggaatagttatagatggagaactatgttttccttttctgattggccttcgtgaataaattaattacttgcagttgatacgggataaaatggccatacggccagttttgagttttgtaattgtagctgattagagcttgcctaagcagcctggaaatgcagttgccctccaaaaaatgattttgttgtctagatccctcttcgagtcctagaaataccatataattacatcttagcatcttatctgggtaggaactgattttctcaaatatactgtactttgctattaacaatctcttgccattaaaaagtatcttcccaaatctaaagtcctggccttttcactttatcttttctctgcctgcttgtggggagttgccttaatggtgttgcagtttttggcaatatagtctgtccggatatgttcccgttgtgtcattactcacttgttacatcattactcgctctttttctgttatcttgggattttttaccaagattaattgtatggactcaattatcttactttttctttctgtttgcagacaaaatagtgatctgttaacagattaccacggat

SEQ ID NO: 5656 - DNA, 1410 bp, Manihot esculenta
  Intron number 1 from transcript cassava4.1_010388m (locus cassava4.1_010388m.g) derived from phytozome v7.0 (chr-ID scaffold08265; pos 2221667 to 2223076)
gggactctgaattttggattttgtgacattttgaggtaataatttcttgatgttggttatcatgttctgctaattacgattctgtagatctaaacatcttccttatttcttctgcgtcccttgtatttctcatttctgtagtcgtcggccaacctctccccatcttccagtcccttagctgaaaagcaatccaaattcccaaagctttctcccattttcgcctttgatcttcttttctgcagcccattcgccgttgctatagaactgttcattgctttcctcccatcttatagttgtcgtttaacggctgctgctcactaccgcagctgttctgccgtgaagcaatccattatctgctgttctatccagaacaaaatttccttcatctcgcagatgtgtgggttcactgctctttgggtcctgcatctggaaggaattatttcagtgatttgagtaaaatcccaggattagtttctttgggtttaagccttacatgttatttctgcatctgcatttcgtcaaccttctcttcactcactttttctgatccctcttttaccaacattttgcaaatttcactatcctcagaaataatgtagatttactctttttttcccatttatattgatatagtggctggctatgcacagaggtcatgtacgtatcagtgtacgtgttagatttgtgtttttcccaaatccagcagaatgaaacacagttgaagtgttcatttatctttatcatgagtttatagtagtgtctatgcatatcatttttagaattgggtagtaattagtttcactctatgacatttgatctaatcacaaattgattttttgacagttaaagttatgtttcatttctggtatctctaaattaaatagataaaaagtggaattgttgtccaggtgatttggatacaattacttcaacggattgtgtttgggtcagatatatttatgttgtacagcttgtttatgacctacgaacacgaattgctagctctaaattttatgttatgtacacacatgttagagtttatggctgagtttctcaccctttgttttatatttttctggtctttcatctcctaattcttgtgatgaaattgttcctcttcctgcctgtatgaaatgtttatcaagctcaatcacgtatctagtaactactagttgaggtttagcagctttgccataagagagaattcttgagttccttcttatgttttgttagatatatgaatcaaatatcattgatgagtatcttttgctttcttattatgatgaatagaaaaggagatgtagttgtctgatgataatatcatatgttctattcaatattagtctttattaaactgctgcttagtttctgacttttcaatttcacaggaaaagcagcagacattccaca

SEQ ID NO: 5657 - DNA, 1289 bp, Manihot esculenta
  Intron number 10 from transcript cassava4.1_000969m (locus cassava4.1_000969m.g) derived from phytozome v7.0 (chr-ID scaffold09508; pos 83267 to 84555 reverse strand)
gaaactgcttttacaggttgtggtcttgttcttttttccttcataattttgttttctacataggtatgatctatggtacatctgcttatacctgaacctccaatcaatttgttgctcagatactgttgtctatagatcatccttgcaatagatcttgtttgtaacagcataccaccccaccctttgcaacctcatacaaagctattaaatcactgtccgctgtccatctgtaatatgtgacatatggtacttgattgttggccattcggcatatgcaattgtggcagttaattacttcctaacttagggttttgtccaataataatcttatttggaaatgcacatctaagtatacgaggtttcttaatttcaaaaaacatctttgttggtaatggttctattgaatggtataaattcattttgaaaaaatatatatataaaagaaataggcgtcctgaaagggtccaaaaacaaaatcaatccccaatttttattttaaaataatgatggcaataataatcaagttttgaggaaatctttactaaaatctctaaactataaaataaaaattgattctcccaattcaatccatttgattttagtttcagactcattattactctctcaaatattgttttcttttagtagctcaattattattcttaatttataatatttttttaattctttataaagttttttcattcttttctggaaactttgagagaaaaagagtcgtactaagtgtgttattatatgattttattttattgtggattcgttgtttttctttgcaattccatcagagtactttttgcaaattttgcaaaaaattaaaacttttgaaatatagatattcaataagttaatgaatgttaagtcaaagtcttagtttctaatctagtgaaagttaaagctaattttgttttattctatgacttctaatataataatctaataaggaactcatcatatttaaaagaatcagaccttacaatctcctttcttttcacattttttgtcaagggattacatgaaattatttttaaaagggttaacagagagtagttttaattgttttagtagcttctcacacttgggtttggttaacaaaatggacatgtccctgacttgatacatttgagttaaatagatcatatagattctattcttgtatgatagcgtagttacatacacatccaaacaagaatgagatgaaatgctagcttgttatgagtgcatcttagtgcctctctctggaaattaactttcatttgacaagcagattc

SEQ ID NO: 5658 - DNA, 951 bp, Manihot esculenta
  Intron number 7 from transcript cassava4.1_015175m (locus cassava4.1_015175m.g) derived from phytozome v7.0 (chr-ID scaffold06779; pos 48681 to 49631 reverse strand)
catcagcaggtatggtctctttctctctctctatatatgtacatattatatttcctttttggtttggaatggacattgttgtgtagacccagtcttggactgacaaaagagactactaggcccagcctgcaaacctgggttgggcctgggattttctttgggagccttttaattttaacttgcctaaggcctgcgaataatcacctctactgatgcttaatcttttgtctccctagagtagataacctctttgttcttatatcaagtaattcagtaactacgaaatattattccatagtcctgttctcattctaacatagttcccaacctatattcgactttattctattacattggatctattgcttaaattctttaaagaacttcttgagctctcttgaggttttggatttctcttggaagattttgtttggagacattattagagattttgttcaagtcaaatttttggttgatatgcaatgagtttggatggtaattggtccatagttatatgttttttagtggaagcttgacaattttggagtttgggttaccgtgtaatctgtgtattttgtgcatgcgacattattgattgtttctttgtggaatattgtctgttatataaatgtgtaggccaaatgcatattttccaagtgacttttaccaaaaagtactggtagcatcctcatctttattttcgtcccattacatacttgaacttttattttttacaacgtgacacaaatttcctagttagtagtgcatataaggacatgctttaaaaaaaaaatacaagagtggtcactgttgttagaattttatgattcttgattccaatcttatgactcatattatccatcatattgatttgaatctatgaggcaaatcttaaatgtacttgaattttacaattctccattcaattctacattctagcgattcgcatct

SEQ ID NO: 5659 - DNA, 2880 bp, Manihot esculenta
  Intron number 2 from transcript cassava4.1_025055m (locus cassava4.1_025055m.g) derived from phytozome v7.0 (chr-ID scaffold06799; pos 35531 to 38410)
ttttgctctgggctgtttgtagtatccagctacaggttcctgcggccttcctttctcaactcttcctttaatattttgttaactattcctaatactacttaaaattttcctcttctgttaaccatatcctcattctctttttaatttgatgcaaaaaatgaaatgccactgaggatatccattcccccaaaaactcccactccccaaaaaatcaaacaaaaagtataggaagaatgtggaaaataatgcaggtaggaatatattagtttttcagtgtttgatgcaaattttatcatattgtcccgccttttcttcattgatctttttttaatagtttttatttttaccttttaaatattggttgttataatttgcatgttgcttatgaaggtttgacagatttaggggatgaaagaatactggcaattacattttctgccttaacattggttagtctttgtttgctttgaacaagtctgaacggtgtacatttctgcctgataggaataggatacccttaaattaagaaaaagggaagaagcaagatttgtatataattgaatgaaagtgttttgaataagatatttcttgaataaaactatttaagaaaatattttacatgcagtttgaattgcttcaaaaaacctacagtctacaaagcctacatcgtatctgttgatggttgcagcagctcaactgtcctatctggtttcagatttgattcatttgaaacatagcaatccctatgttaaaaaggatatggagatgagttctcgtatattaatatcagaaactttcaaaaactccagctagtatgatttgcaactaaatatgttggctttgatgtgtatactcatgcaatagtggcatggttttaaattgcagtggccttttttcctgcctgccttgggattaattttctatttcgggatgtcttttcttttcattttgttttttcctttacccttattttttgatactagagcagttatttatttatttattttcaatagactttgacaaaatattagattattttttttaatgataatcatcataaaatttttatatgtattttacatatttatccctatttaggggcattttatatatttctatttagttggagaacaagaatattttgatttatatattcatatttaatttattccatatatgttttagatcttcggccttccattataaatatagaagcttatgtatttcgaggaataagatacaattggataaagatgtagttgtttgaggctttatgtctatggacgtaggttcccgtggcataagtacataatattctcttattattttcttccatatcttttcttattttaactttaacatggtatcagggttttgttcagttgagagtcggtactatttactggtactgttcattggcattgttcatggcacaagtttttgcatctgattgttgtgtcttctggaaccttgttagttgctcgtattggtgttttcttgctggcattgcctttagagagagaagtgtgatcttgtgagttaatttgttgatgtatcctcactgctgtcacttcagagggggaagtgcaatcctaaggatttattttgtgttttgatactttgtgtggctgcatttgtttagttgttctggaatctgccctgtgagctgtgtgttgtgtttatttttttgagctgttgcgaggaagttgttggctttagttagaatctcgttaagggggagtattagaatttatgatattgtatgcttagaattaagagggtgtgttacgaaaaatcagtatgtattttatatcaattccattttagggggtttttataagttcgtatttagttttcctagtttatttattctatgtacctctatctctatacgcacgagcagatgcacacacacacacatataaatataaaaatgcagaagcttatgtattatgagaaataagatacaattgcccctttgattttttgtatttgtagatgtggcttgtgtagccaaaccatgtaaatattctcttattgttttcgtctttctctaatattttgttttaactttaaaactggtctagtaaaatgcttcattttcaaggggcaatgtcaatgggaagtcatatccctcaactatagctcacttgcttttgtgttgttttaggtttgctgtggcttccccacccccttaccacccttgacttgggatttacttgtttttttcaatagccttttcagtatgccttttttctcactttgcttttttccttttgtccttattttttaattactaaagttatttttaaatttttttattttattgtagagtttggggaaatatttaaataataataataatagtaattattattatatttttcattgtcatcattaaattgtttattttcaatgtgcaccaaatatcatacgatattgtttagcagattttcaatcttacatagacaaacagcacaaaatattttgttgtcctaaaaaaattttttaactgaaattaattttcatgaaacaatggacccgtgtattttctagatagtacggagtggctttatatgaaattcattatgctaatatgcttttagaaacagtttcagttctatctatttttagtatttgaatcagaagctttagttagtgatttaggtttttggatttggatggatgaataatcttggggtccattttttccaagaactggcacataaactagtttcttttctgttaaaattttgcagactttatagctttgtctagctggaatatagaagtatttatctattgataattctttatggcgaaatgcatgtgtttgcatgcttatttatttctatcacttcttgtaggtgttttgtggca

SEQ ID NO: 5660 - DNA, 1347 bp, Manihot esculenta
  Intron number 1 from transcript cassava4.1_016700m (locus cassava4.1_015700m.g) derived from phytozome v7.0 (chr-ID scaffold08542; pos 366430 to 367776 reverse strand)
tcctttcccctctgtgacgccatctccagcttgaggtacgatttcctcctgcatttccttcagttctatagatttatacgtaatttcattctcatctgtcatgtctacctcaattagtcaattctcagatgggtttagtgaattctgtggaggttcatgttggtattggtttttccatgttaaagtttacagttgtcccaaatatttggatatttctattaagatattgaagctttttcagggtttaacacgagtttttgatcttataacttgggattttagtgctttttatttgtttgggttgaaattaatgattgttgtttgtcgattaggtgtttgatattttgcttaaatgaggttgtgttctctaggcaaaccatatgttgaaaatgaatttgtgattgagggttagttttgaggcgtggatgcttagttatagttatgcactttttacgagtgatttgttggacaaggtatgaatcttttgaagagcaatggatttgaatctgatgaaacaattaatcatttctacttgtggtatttgataaagaaatgaacaaaattaaggagaattcagaatttgtaagtaggtgataatatgtgatttcataacttgcactgttgctcataaaagtgtacatataacaattgggtgatgagcatatcttcaactgttcataactctcttcataaaagcttattcattggatcatttgatttgttatgcaactggatttccaattagaagcctacagaaattcttctttactcttcatctttattggaatatgagaatgattcaataaatgtgttaaatgtttgttatgaaatttaaaaactaatattgttatgtgtagaaactacattttttatgttgtttgagtcctaacttccagtgatttgaagttattctgatggctttaatttcatctattctaattcattccttggagattatgttagtcattatctgacatctcctagtagatgacaagatagggttatattttgggttattaatatttcagatttcatgataaaatatgtcggggattatttcaaatctccaagcaaagccacatctggattcagatagcgtattctcaaagtcctaaactctacttttgtgtcttctctcttttgcagaagatttcatttttgacgatgtcatattttaatcaccttttaagcaatatccaaagtgaagattcaatattagtgagacatatttttgcttctttttcaggtcagaagttactttcatgaagtatctattgtagccagtcactaagactgcatagcactgttgattcagagaccgaaattgacttgtgtgaattggcaaaa

SEQ ID NO: 5661 - DNA, 2253 bp, Manihot esculenta
  Intron number 6 from transcript cassava4.1_000302m (locus cassava4.1_000302m.g) derived from phytozome v7.0 (chr-ID scaffold10223; pos 94981 to 97233 reverse strand)
gcattgaggtgaaacatgtctcttttttcctaattttaattttgaaaaatacatcaaccctcctttcctcttcagaatatcatttttggcatgattattgtagttatttgcttctttgacataacctatattatgagtcttgcattttagtatgttagttttggaactatatgttcagggagttaatgatgtgtttattggtaaaaccgagttaattgtgaatgtatagttggtgtgcaatactttggggaaattctttgttgacaaggcatgcgacttatttgagacttgttttcataggtcttgtttaaactttaaacactgttttcttgctaactcatgaatatgtaccaattatatcaggaaaaaggtctttcctcttgaattagttctacgggtgaatggtgaatgggttttcacacgagttttaagttgaaatcttattcaagtcaattgaggttggctatctaaatcctgtttattcatttcatctgttcaaatcttgattagaaaatgtagctctaatatccttttgtgtgctatatgaggtttggcaacagttgaaacttattgtccacattagcactttgatttgggatattttaggtaattgtaatgataacggcagacagtatgattaaaagaaaaaaaacttaactgattcatgatttaatgcccaggaggttaaagtatgatgtttaggagtgaaattttgcaataatgcccttatctgaataactctcttaattatgttttgtggtacttctgatggatgtttttttgtcagaatgctacttgtagcaaattatgtatgttttgttacttcattatgtgaaaagctagttgttctatacatataactcaaaaattgcacctagattaagtctattgcaaactccaagaagtctatgtgtcttttttccgctgataaggtgtatgttcttgtggtttctactttggaggggatggagtagaaaccaaggttgatgggtgccaaccaattggtttggcctgttattcatattgtgttactagatattgttattttctgcatcaaatgtgcaccatgaatttgttatagctaccctgcccttcttttatcatcctaggcagcttggtcagggtcttggttcattgggtgtacctcactacataacagccaccccactatgttgtcttttatcttttattctttttttttttcttttttctttgaatatgtacaagtctgcctttatatttttatgttagcttgggtgttattcaggatttctgatctacttataatcatcctaggctgggtgtatacatgaggcattacaattttttacttttgccttgtactttaccttttgctacttgctttgccttccaaagcttgaagcaataggttgatttcttgtcctttccatgaatgcatggtatccattagcaagtgtagaattcaattaaagtgtggagaaaattactattccccttttgtaaaatggtgatggctgattctccttttggtcatgcctatttgagggttatggtataacttacaaggtatgctttgaaaatctacataaggagtgtttttttctcccttcaaacttgaggaatttatgtttgtagctattgggacgaatgaatcctttctgcctgctctttgatatgcataaatttgcttactggatcccattgtacgcctgggcattgtgccattgaagacataaattattgcaagtctttaccattcatctgttggtaagagaagaaaggcaagcacataatttacagagaagtaattctcgccttgcattattgttgcctataaacagattcacccatagtttcttggagttgctgagttggttgttgtcagatggtgtggacattgcaactgtaagtttacatgtaaaagtattctcactttctttaccataggatattgaatctccgaatgtagccatcatttaggttaactgatctgggatgcattgccaatgtatgtcttgctgcctgttttgctgttcatgggttgatttggtgaacacatgctagtctggtataattttcctgtgttctttgactgctgcttgctttattctgttttccatattgagttgacttgataatatatttttatatggtatttgttttctgtattatgttcattgaaaatcgattcttcatttgtcatgcttcatgcttgctaattttttgttatttgttccgagttctccaggttctgcaaacgctcattattac

SEQ ID NO: 5662 - DNA, 2966 bp, Manihot esculenta
  Intron number 11 from transcript cassava4.1_002645m (locus cassava4.1_002113m.g) derived from phytozome v7.0 (chr-ID scaffold05214; pos 236035 to 239000)
ttagtgttcttttttcttatggtggttcaattctatgtttgaagctctgttattttgatgcaaataatggggtgtcacatgtgaataacatagaattgtttgttcagttaatttaatcaattttgcttttttaatgataaaccctgtgggttctcttaccactttgaatgaataactatttgtcttctgagattaggtcatagctatgtactatagcagtttgccacacggtattgaagaaggaaataaaggagagaaagaagaattatgagtagaggaggagaagaaataggtgagacggagaaattagataggctaggagaataacatgagatggagaaattagataggcaaggagaataacattctgtattaatgtgtttgggtacctctctacaatgagtcacccgcatatacactgtttcttctaacagaaaacccagctgtataacaaccatccagctgtctaactactttatgattttataaccaaattacccttatttctaattacatatttgcctcctttacatttatcttccttctataatatgtaaaaatagccccttcatgagaacttccttgcccccaagaaggtgtaaaattagggaactaagctgagataaaagtttcgaccattcctctattagtgccagtttcagctcagctgccacttttgcatccataaaactatatgtactgccactatctacaagaattgtattttctcaacacccttatagtagcagctccttcactgccctctatagcatttaaggacaaagtttctcctaaattcttttcttcctttccttccatcacattatgccactcttcatctccctttcctgcatctttctcttcaccttgcacagccataagtgttttcagtttgcattgatgcccaagaaaatacctttccccaccacatttataacagggttttgattgtctcacgccccctgatttggaactaaggtgattttgtttggtgtttggttgccactggattgagatttggtttttggaaggagttgtggttctaaattgggtggttttggtgggtaaggagaagtctgggttgtttggctgaatctgagtggagaaggattttggatataactctttggtttggaacaagactgattggttttaggaaaataagtggttttcttagcacactctaagagttgctattgaaatctagcaatctcaaaggcatgtgctagatttgtgggcttcaatattctacattggcctaatttcatttttcaggcctccaataaatccacaaaggaaatagtcttcccccaactgaggcattactctttccattctaattttcatatcttcaaatttatcttggtattcctctacactttcttcttgcctcattttcataaattcttccactatatcttctatgctttgatccccaaacctcacacacaattccctctcaaagtcctcccaagagtgagaatctctacccctaatccaatcaagaataagctggcaattcccacttcttcctcatctgaaactttgtaaacctcaaaatatttgatgcattttctctctcacccacactctgagttccttcccctcaattttagggagatatttctgtagaccctcaggctccattactgacccaaacactccaacactaccattgcttgatcctggaacctgcttttgattcacattctctctgggtatgggtaaaatccctctaccctcgattctcttcgtgtcaaccctagccacacactcctcattaactacccttttaccctttatgaggagggatcgaaattcctctataatggaattttttgcttcaacaacattctgtttcatctcctctcaacaattctatattcctcctagattcttcttgcataactctcatgtgttcctccaacccatccaatctaacagcctcggcactcacaactatagatctggacatcttacaactcaaaattgcttattgcccgctatgaaacacagctctgataccaattgtgcttagcagtttgccaaacggcattgaagaaggaaataaaggagagaaagaagaagaattatgagtagagaaggagaaataggtgaaacggagaaattagagaggcaaggagaatagcattctgtattaatgtgtttggatacctctctacaatgagtcatacgcatatatactatttcttctaatagaaaacccagctgtataacaaccatccagccgtctagctactttatgattctatacccaaattacccttatttctaattacatatttccctcctttacatttctcttccttctcctataatacttaacaaactactagttactctttcatttgacaatcaaattaattgtcatcgacttttgattcagtgagtccctccattcatttttctgttactcaactgttataaagcaaaggtctgaaatgaatgtgaaatttcaaaaatagactattaataatttttctttgagttcttctttatgttaaaaaaacaaaattagaaaaaatgtttcaagaatgtttctttaaaaaaaaaaagttgtgcctgaaaaatagttttaatggaaaatgttggagaataattaattccatctgcaaacggcatggatctacttctagtaattatgacctaatcttagaggcaaatgaataattattccccctaacatttcaatagaacttgtcacaaatccttgggttttagtttgtagttaaatttctgaatatcttttttttctttgggattggggtgatttcatgtgttctttcactcttcaattttgatttctctattcctttttaagcatttggtctttctatttcaatttttatgttctatttcttctggtaattgtacattgtatttattctgtgtatcttaattggtatgcttttctaagtcatgacctcatgttttaggttttcttg

SEQ ID NO: 5663 - DNA, 1773 bp, Manihot esculenta
  Intron number 6 from transcript cassava4.1_027311m (locus cassava4.1_027311m.g) derived from phytozome v7.0 (chr-ID scaffold06005; pos 164732 to 166504)
ggtattgtaagtatgtaaataaacagtgggcctaaagcagaaaatatatgccatttcatgcatctagatgcagaatgtcttgtttctttaaatctattttgacctgaatatgatgtttttagtatttatttatttgttttgttttcaattagtgcctggctgtggttttctgaagtaaagtagatagagaagttgcatgttctttatttgctactttgacgttaatagcaatatagcattaggttctgtatatatatatatatataaggatagaaatgctttctataggtcactaattaaaagaaaagtagtgcttgaagttagtcctgagaatattttatctgaagttgtacattgagaagttagacttcctttcacatcattgtttaataggcagtatggattccccccttcaatttgtccaaaagagaaacatctaaaagaagcaatttgtgctgtagattgttctttgaatcaatgttttacttctgtttgtccaatgtttatccacttattatttcactagttgtattatctgtgcgttgcatggattatttataatattattttaataatagaatatcatttttatattgaaaaattttattaaaaatgaagttataattatcattaacatatcgctatgatgattcatgttattgataattataatttcatgttcaaatattattaaataaatttttatgaaataatttatacaatttatatttgctaaagttataaaaatatgtaccatgtaattttaattttaaataagtttattattattattttaatattattttaaaattatttgatgtataccaataaatatacaaataaagtgaaaaatacatatgtgctttgtggcatttttgtgacatatcatttataaaattcttaaattttaaatataagaaatttttaaaaaatgaagtaatctttataaataatttttttagttaacaaattatctagtatattttaatataatttctgaaagatagaaatttatttgaatgtataataaaataaccttgagagtttagagtgataacattgttttatccaaattaaataaatgattgatgtttaaaaatatatataatatgataagtagagttttataatgttaaaatggtaaacttttttcaaatctttatatgggataatatatattaatataacatttattaaagtttaaaattatcaaaaaaatattaacttaaacgtatataacctgatctaaatatccataatgataaattaaaaaaattataaatatgattttaataaattaatgatatattatttcttcgaaattttaaactgtaaacatatatatacgttctcttattctcttaaagaatacccttagagagaaaagtggctcaatctcctaattataaacactattagtaaaaatgccacgtaattattttatatggtggcttaatattttaaaatcatttttgaagttcttaaataacgtgttaaaaagaattccgataattgtcttttttgtataaaatgagattcagtagttaaaatttgagataataatttatttattttgtataaaaagacaaaagttaggatagaaagggatcacaccatgtctcgagtttttgggcttcctcattagcttagatggcacactcttggaaagcaatttcagaggcttagctttaatacttgtatatacacacacaccacacccacagaaatgattgttgtttttctgcacaggctacagatttggtgaaatacttg

SEQ ID NO: 5664 - DNA, 2661 bp, Manihot esculenta
  Intron number 3 from transcript cassava4.1_018278m (locus cassava4.1_018278m.g) derived from phytozome v7.0 (chr-ID scaffold07528; pos 35355 to 38015 reverse strand)
cccataagggagatagaatcaaagtacactatcgggtaagtgtaaattgctgctttgtttggatttgggtacttgtatctttaatttttgcaatgtatgtctctgttattcctaagtattacctttatttattagttgatccatatattttttaaattacattaaccgtgtctcttaactttgatattgtctaccctttactcgtgccgtccaaatttccaattctgtgcaattagtcaatcttgaggaaggtaccttaggtgccttctcatgtcatccccatctctctctttccctctattctcccctgtatatattcctctatctcgctctcttgtcattctccccaactagctttccatttcttatcattcatgctaactttctctttctccatttatatctcacagttttagcctactatgcctcctcctcaacatgctcacaccgaagttctctcggtacactccaaaccccctccattttctcttgttcttttcatttctttgtcaatcccaattttgacatatttcccatctgctcctaccaatcaattctaatgctagataaggaacaccttttttcttttcttttaggataaccttcaactatggtgcttttggccgacagatcaaggaaaagttttgcttgttgtctaatagttgatttcaagtgcatggcttttcacttgaccaccttttgcttcatcattcagttactttaagaagtgaaatgaaagagcctttggtttctcctctccttctcttgttcacaatgtaaatgaagctcatttcttgacattgcaagtgcgctttttaatattcaattggccaattggctgaaaaaggcccaatgttgacatcattttgcattttaatccaaacgtttaaattttggataaattggctcaacgtttgcattagagtataatattttatcaattttcacaatcaaaattaaagataagcaattcaattgttaaatatacagtctgtagtttcaactgtgataaattttgtttacaacaataattatgaatattttgtagcagatatgttatttaattcaaaataacaatatatataaaataattaaaaatatatatatgttataaaatgttcataaatgttgctgcaaaataaaatctatctactattgaagctatggactacatataccagttagattattattatttttaagaattaaatacatcagttaattatagttaagtatgagttaatattatttttatatgtgaaactaatttatatttaaaagataataaaatattacatttggcatgccatttggactcgcattttaatttttaaaaattagccaaaattacacccaaatgtaaacattgggacaattcattcaaaatttaaacatttggattaaaatgcaaaatgatgtaaacgatgggcctttttcagtcaattggcctattcaatttgatattttatgctttctttatctaatgatcttatgggaaattgctctagtggagacacagttactccagactgttcaaattttttgagttttctggcctctgtagaagctaggatattgcagtactttcatctactgattcaagcttttccgctggggtgggtttgacagagggagagggtgaggtgggttcaggagagggatgggtatgctgtctccatcaatgtgggtgagtcagtgtgttgagcagaagtttggtggaacatagaaaagagaagcattgagaggaagaggaggatctcaagagaggaggagaagatgagtgaggagagagatgtgacttgagagagagagacaaaatgcaagcaaaggtaaaaggaggagattgcaatacctttgatattttgacagaggaaaatttggtctttttgcgatagcccaatagcaaatatttgaggatttggatggaaggactaaatagtatacaaatcaaaagtgtgggatatgttaatgtaattgtacaaatataggaaaaactaataaataatggcaatatgctaggcacgtcatagtaagtttcccttctgaaaaaatgatgaattactctgtaaaaactatatcttgaatttatataggagcagcacaccataggattaaatttggccacttagcctggcatgtctatattgtttgtaaaatttctggaatttaactattcaataccaaagtttgatcactatattctttgcaactgaaattcattttaggttaaagggctttggcaattggcgaaatacattcatttatgctttttttcttaacgcaaacatgcaaatagctggaatgttattaaagtattctgatgtcatttttaaagagagcatttgcagtattagaaataataggccttgctgattcacagtacagtcaatatattcttcattgtatctgcaatgtgcaaatggctgttttggtctctgacaattagcctggaacattatgcattgtcagctaagattgaagactatttggtttaactgtacacttaagtgcaaatttgttctctgtgcttcattttcccttattattcatgtttacatcttatactctgtccttagtccttgttcttggtataaacaagtttcatatcgattttttggtttatatcatattttgttatgcatttacagggaaaactcacag

SEQ ID NO: 5665 - DNA, 3763 bp, Manihot esculenta
  Intron number 1 from transcript cassava4.1_012160m (locus cassava4.1_012160m.g) derived from phytozome v7.0 (chr-ID scaffold02421; pos 488542 to 492304)
ctgtcacccagctgggtggacctgacagtgcgttttaactctccattttcatttacttttgcattttttttgctgcgtttatctgtttttttatttttattttttgggttgctgaactttgctgttctttatctcctgcttctttaatagaatgtggttttgtttgacccgacggcggtgctgattctcacttgtagatacaatttttttttacttgagtataatatatagtctgcgttcagctaccggttctggttttgaatttgatttggtgcttgctgctctttgtactgttgtttattcctagaacttgaaacttgtgtttctgagttcatttaatgagaggaaaattcttcttgtccttcttccctttttttttttttaaaaaaaaaaaaagaaataataacccagtttgggtgcaaatcttctaatttagctcagtggttcttgtgatcgacacaactactaatccgaggtttgtgccttttgttgcttttaattttctgtgattctgtgtatttaatttgttggaaacctgttaatggggtgattgcagcaattgatgtggagatttcacatgtggctaacttctgcttgataaatttgggtgattataggaatgcctttttccttatttactaggagggtttttgcccttttctccttctcttaaaactattttttggggggttattttttttatcaggggttactttaattttcatgtatttaatttgggtgaagtggctaatttcactgatgtccttgttactgctaacgtgatcatgtgtccatcaagttgctgctctctattcctctttcccactgtgttagtggagatgacccacagctttctttttccctcttaatatgatattttttggaaaaaaaaaagaggatatgatattgacattgcaagaagtgttatctttagcgtatcaattggttttagttgaccaattaatccctcttgattttgtgtgcttgttgtttttctagttcattcttttgttaattctttgttgttgttatgtgcctgttgggcatttctaacttttttatcccagaaaatacaacaaaaaggacaaataggcaccatagaagtttgtctttgcttgggaaagatttttttttttttttaaagtaaaggtttatgatttagctgttgaatggatattatattgagaaataaaaaaactaattcatggtctgtaacttttgcttctctacatttagttaaacaaaagaaccattaatacaagctcatcatgctattatcatcttgttacctgttcttagagtttagaaccttccagtgcaaatggtaatcgtagtagtcacaggaaggatttgagaaatgataggttttatgaacctgaagtcctggatggacttatgcaatgtatttgaactgcagaatactaattccaaggtgttcaaaagcttcaactttcaggatttttttgaatgtggtttttgtttcaatgattgtattggctattaaatgatattttggatctatattaaaaaaatgtttactcatgtccaaaaagagaggataaaaaaaatccaatggaagtgtgagttttcttatctagatggtgttcctgataatttttttgtgagtcaaaatctgtaagaaagatgatcaatttcttctggttactgggtgcagggtggcagttttagcagacaagagctgtcactgtattgtttgatctaaactgcattatgctatgttgatcccttcatcccactgattttctttttttaatgtctgtttatgtttcatcattagttaactaagaactctagtaaattgtctttgtgaataaataattggaggttatgacttcctatgaacatatgaatctcagtatatagaagactactggaaaacacatcttaattaaagaaagtaaggggtactttgtttaatcttttttgttttgttaaatctttcatagaaatctgagtgtttgtgttgaacctgctacttgaaaccagtgaagattcaaacttcaagtcttcatgtggatttttaaactcttgctacaatcattttcattttcgtctaattgcaattgctacctctaggatggtaattgccaaaccatgagcatgaggtagcgtagaagtaaaccaaaccctctcgcaatctgccttgccttttttattttttcaattatatctttgaaggtgatgagatttatgtaaatcttatctttctgaaagcatttcccttttctcttcaaattctaactggcatcccatcatctttggtctcataatttcttatagggcatgacatagagatgctgctttatccatacttatttatctgttgcattttctaaaactttcctttctttacgaagaaaaggtgaaagctttatttaaatatatattatacagtcatgcttctgcaagcagtgcttccttgtcaactcttatttatttatttttgggtatggggattgtgagtttgcctcattgggaaattgataaatgccagataacatggtgatacttccttacaaatttacatttggaacacaaactaacctcatattttcaacgtaaattttacaccttgatgtatagttgctttttcaagtgcctctccagtatctgtggtacccgtgctctcaaattaattgttgggttggagaacagatgttacattgttattatatgctgtctacattatcatgagtgtcatatgtgctccaacttcatatttttgcttcaatgctagattatagtgatgttcaatgcctatgaaataagagaaataaataaaggaaaaggcgcataaaaaaaatacatgcagtttaacatggtacacttgcagagaacattcaaaagtaggaatgtgggtggtggcttgagtgttcattcatagttgaagtgtaggagtgtaatagatgtggtgtggctgtgttgttaaagtggttctcatggatgttatccagatggttgtaataataattcctcttaagcttgctcaacctattagaaagacagtttcggatgttgatcttagatttattcaacccattgttttcatttttgacacattttagttcaccaacaaaaaatagtttataataacttcaatatagttcacgtttgtttttagttgttgttgcaaggaactgtagctgctctaaaagtaagtcatatgcaaatgctgcacgcagtgtagttccctaatcccaattagttgatgcagcatcctatgaatccacaatagggtgttcatatgatgcatgcaaggcctactttgatgccttgagcataggcatcaaggtctgccttgagaatcagtcgtcaaataacgtgcacaagctcatgtaataatctgacctcaaaggctagaagcaaacctggaaaatgctgtataaggcccttgatatttgaatttgattagctaaaagttggatccggtttgttagaaatgatgccagttgcttctattatcggttttagtgctgcagacttcatacgtgctgtgcttttctatcagtgtggtggtttcagctggtttcaagcagaaagatagttataaacttgcaattctttaagttgtcctgtctagtttccatctattgtcaactcgaatcctgaaatccaattatgatcagctaacatatgcatgttaaatgtacctgaattactattcagtgcaattcttgttgattaattatggaaactttctggtttcttgacatgtattgcagaagcaacaccaaagactatc

SEQ ID NO: 5666 - DNA, 1289 bp, Manihot esculenta
  Intron number 2 from transcript cassava4.1_002267m (locus cassava4.1_002267m.g) derived from phytozome v7.0 (chr-ID scaffold04182; pos 476724 to 478012 reverse strand)
ccaaagttttcaatacatttcggctgattgccaaggtactttctttccagaagtttactgttttgatactaagtcacatgggctaaatttcttctgtgtgtgatggagcaggagaattttagtaggtgtcaaagaaagtgatcaacataaacaatgaggcgttggtatagtggtaaagaaaccaaggcttatgtcttgataattaatggaatcaagatatcatttccactatcattggttatgattcatttgtaatttatatcttctactctatcattgaaaaagaaattggtgaatatatgtcttcaccaacataattgtcccatttgaaataagatgtttatgggataatgggagatgtaaattaatgatattgcctaaaactcagtgtctatcctacgtaaactcattggtgaactttcaaatctgaggcagtttttccaatttcatgctcttacatattttaaatattcgatattttgtccatatacaattagtttaagacaagtaaccagttatttcgaaaaaaaaaaaagacaactagttggttcccatatgctgaagttttgtacaagtgtttttgatgggtcaagtatcattttatggttatactatacctctactccatgaacattcaagtcatttgcctgttgtaggcattaatattgtggtataggaatgagctttggattttatacgcctggtatttgttcaagaaatctccctttgtggtgttgtgatattctcacatttagcagtttttatcaatgtggaattggtctaaacagagctgaagtgcaaaaaataatctatgtagatgatcccaattagtttgggattaaggcttagttgttgtttcttgttagcaatgatacttcattaaggtatcagtctccaaattagggaaaacaatgtagttggtttctattttacccaccattcataaaataattaatgctatgctctccttgtcatatacaatatcttcatggctttgtaaggatttttcctatgcgaaataatgtgtggtaccccatacctttgactttattttcggactttaaagtctctgttggaaatactattctgcaatatagaacgtatgcgaaaagcaatatcatctataggaaaaaaaattacagttctaaattaataagcaataaaagaatagatgaagaccttgtgattgaatataataaaaaagtacttaattttataattaacttacccttgtttttgcttggatcttattaggaatctgggaaggatagccaagataagaaaaagaa

SEQ ID NO: 5667 - DNA, 3592 bp, Manihot esculenta
  Intron number 6 from transcript cassava4.1_005901m (locus cassava4.1_005901m.g) derived from phytozome v7.0 (chr-ID scaffold10563; pos 920361 to 923952)
tttgcaaagcaccccagaatttcaagaaagatgtaatgattacatttaattagtctgatgttgtgctccatcaactgtcagatattgattgacatattgtacatctgcatccttcactcataattgtgatttaaggatgggaaaagggaacccaagttgctgtggtgttggctttggtcttgaactctgagtactgtgctttggctaaatgtgcctccatcctatagcttaggttgcgattggtatgggtgaatggaataggggttaacagttacagaagtaacagttaatggtgtaattgttacaggtacagcaattaatgttgttaatcatatttggtattacttatgaaagaagagtaacaattaaacttgtatcgttaaatgtgtttgttatacctatataaatgacaaatataaattaaatttgagatgttggaacttggttgaagtatgtattaacacaaataatttttatttaataattgtttatactatttttatattgacaaacatatttttattataacatctattggtaataatatgtaaattaaaatagtattacttatttataatagttacaagagtaacaccccatccttacagaaattcatattgtaggccattactccactccctcttaggtaacaaatttgaatgtgagtacggtgaagggttaattgggttaaagtttaaacttaacatgctaaacgtgttgatggatggtaacacattacagacgaacttttaacctccattaacctcaaaacaaatgcatccgggtaatgaggatcaaatatgatggaaactgtctctctgcaaagcagaggtaaggctgtgtaagatcaaccattcctagagccaaaagtgttggatgcttcatgtactcagtcaccctttaattgaggatcaacaatgcttattattgtgatttttctttcaatagcatagattttactttctgtgaataatttccgtcacatattgaataatctggaatgatctagaatattggtagtttgtagcagttacgggagttagttttggagggaaatatttggggaaagtagaaggtagttaagtgtttgtagctgctgttactagtggtcagatgtaattaagaaaagtcagtactagaaatacatataagaggagctctcacatgtatgagtaggtattctacaatcaatattcattaatgaaattgaatattaatgaaattgaatatttctctgtctaattcttctctcaacctcttctatctactttctccttttcttctataattcttccctttcctcttttatttttgggagaaagccttaaactaggttttctatgaaaaattggtattagagcactgtacctggctgggttttgcttcaaaatttgatgctgcagtttccaagaggggtctcgcttcagatcacatcagtgttccccaaaatccaaatttcttcatctactttactctatatccttctttagcttcttctgtgcaccttctttcaatttctttctcttggaaaacttctttctttaatcctctgcaacttctctgtcctttcttcaatttcctctgttttccctctatttccttcttctctatttcttattattctctgcaaaatattctttccttaaatattctttccctctttctttctttctttttctctgcaatattcttcaattctctcttcccattttgttagggttctaaaacaaacatttggtcgccgaaaccctgttcttgaacttttcttcttgaaattcttttactctcttttcttgattttccctcaaaattctctttccttgtcttcctattattctcctttcctgatatcagaaacctgttctttctctggaacaaatcttctctgtcaatctttttcccatttgggtgattacaacaatcaagtcatggaagtgcaatcgtgggaactaaagattctcaaattagaacatgcattatgtgatgctatcaagagggtatttagaagaattgaagagttcctggatcagaaaatagaagaatccaaaaagttgtttcaacttgtacaactgaggtacataaacgtgagactcttggagtagcagcaataaactgggatactaatttgagagaaccctgaggatcttgatagagaaaattgccacaatcttgactagaaattgtgcaaggaaatgatctctgttgagctcgacccctcaagtaatatggttcttttttactctactcttgctatttttactaatgaaaggttattagcgagagtgttgtagatttcaaggtaatgaggttaagaagtgaactaaacaaggatgtgaaaagctgcagatatcaatgggaaagattgcctcatttgaatacaataaagctgtcaaagttctctggtggggaaattgaggcagaagattttcttcaggagaaggttgataagaagtaatctagtcaaaagcaaatcaagcaaaggtttgcaacatatgttgtaatcttcagctgaatttcagaatatggtggattctagcatgtgatttttataattcttgggaaggatgtatgggagaaattgagatggcaaagaaagaaataatctcctatgttgcagagagagaaagagagagagagagagagagagaacagcattctcagttctcacattcttcaactggtgagaaggtagcaccaaaaattctttcctatttccagccttttcacatccttggggacaagcatgtgctaaggggaagctactctcacatattgaataatttggattaattggtaattctaatagtagtgtttagagttggtttcgtagggaaatgttggaggaaagtggaaggtaattaagtggttgctgttgctagaacttaagaaaagcaattactagaaatagatataaaaggaactcttaaatgtatgagcaggtaccgcataatcattaatgaaattgaatctctctctctcaaattcttctctcaacctcttctatctacttcctttcttccctttcttctataattctcttctttttctctcttttttgttggcgaaaccttaaactagggtttctctgacagttacctcagaaatggcatcgggtttttactcacccccattaactgttttgcttgagatagttgttaatcatcttgagttattccttgttattttatttgctattaagatgttttgaacttctgagggtggagttcgtctgttcaaaccatggaaattgactctttgcattgcaaggggaaggaagacctgaatctgatcctccttacagtttataattctgaaaatgttgagcattaggacactgttttctgatgatttatagaaattatcaacttaggttaaagtggttggatttgacttatgcatgtacctcttatcttgagcaatgacttttagcatgtattaaacatcaatctgccagccagctgattccataaaagattttaagattttaagtattatgcacaatgcacatacagaatgacatgtgggatatggcttgtactaacttctgctgctaatgaaacagctgagacggtcatatacagaattttttact

SEQ ID NO: 5668 - DNA, 609 bp, Manihot esculenta
  Intron number 1 from transcript cassava4.1_003748m (locus cassava4.1_003748m.g) derived from phytozome v7.0 (chr-ID scaffold10813; pos 21778 to 22386 reverse strand)
ggcttctcaaacttcagggaaaaaaagaaaaaggggtattattctctcctgcattcgtctctaattctggagttctgtgattcatagatctgattgggaaaattttcatgctttattttaaaattctgggctgtgtttgtattggttcttttcctagttttgatttgaatatgatttcattttcttgctgaatccatgatctgtaacttggattggatttcagagcttttagcgatttgtgatttattatcgccaaattatgctacgcgtatgttttgtttgtatcaagttatgaaattgaagatattatcttcgtttttatttcccgtaaattctgggtaaaggaaaatttgcgcgatgttgagtttaaattgtataaaatcacgattaatgagatgagcttatgaattatataattctgcaattaagtggtggtagttttaaataataggacgatttgatttggggggtgtatttttccctttattttgatcgattggctccttgtttggtttgctgataatttgggcataaacctttctttgttatttgtttgaaatttgtattctgatgtaaaattttactgcaggtatttagtgaaaatcaagg

SEQ ID NO: 5669 - DNA, 836 bp, Manihot esculenta
  Intron number 2 from transcript cassava4.1_003171m (locus cassava4.1_003171m.g) derived from phytozome v7.0 (chr-ID scaffold06914; pos 694569 to 695404)
atctttcgcaggtgattctgacacttcaatttgatatgccaatgatatgccaattattgttagtttatcactgttgactggctaatgcatagagttgtctagtatatcatgtggatgaatggatatgtcttgtgcacgtgcttctttcagtttttcaaatttacaattttcaaaatgtcttccttatatgctgatttgcatgtgatgttagtcagtgttttttcttattctttgattttttttatctgatacgatttgaaaattcaatgtagccgatctcaactaatttggaattaaggctctgttgatttgattttgaaaataagattgagccccttatttacctgggcttaataaattcaagattctggtttggaacaccttttactacaaattcttacttctctctgtaagactactttggttcagatgtacccatttctgtttgatgtttgaaattcaaatggcatgttaggcataaacattttagaattcatttgaataatttctttctatatactggcctagatatattaattatttcatgaggaataagtgttaataagaacacatttaggtaatgtcaaacagtagcttttgtagtaggcttgttctgcatgtgattatgtttgtgaataataaattgctacttcattggggtagccataacattttatggtttgataacaatgataagaaattaaattgaatggacaaatttctgcaatatcacatcttcacattacaacttaacattttgagctttcagtgggtaattatcatgagataattcttagtttattttacttttgaaattattgcagctctttgattgg

SEQ ID NO: 5670 - DNA, 4397 bp, Manihot esculenta
  Intron number 2 from transcript cassava4.1_007863m (locus cassava4.1_007863m.g) derived from phytozome v7.0 (chr-ID scaffold03651; pos 105737 to 110133)
tctactcaggtctcagttcgcttgattcttttcaggtactacatactttagttcaaaaattgttgatttttatctagtagaattgaaatatttggtaagttgcaattattgattgatgatttgttaatatggggatttttttaaaatttcaatcatgttaaattaccattgcttattgccttggattcttggcattctattaagaatgtacaagtagcacaaaaagaaaacaacatggtgaatggatttgatttcttctcttacaattcagttggtgtctataggcatatgcatttgatgctttttagtattattgagcagttgtatatttatgttcatgctttagctcattgtcattgtcacattgctcccagatcactaacatttgtatttttaattgtgtgaatttttgtgtgtgtgcatgtgttttgggataggggctggaattatgttgacatatgctctctagctctcctttcttttgggaattatctttgacgttgttttatgtggcattgtacggataatcaaaatgattaggtcacttagattttgataatgcaaagagcaatttaaacttccttcacattgtggtcgcagtagatcactttcaatcttggaattagtgtttgaaggttcctttttctgcagttggcatatcttatagattatacatcttatgttgagatgagcacttttcaattccgtgtacagtggacaaaaaatgtgttttcacaaaactttagagaatgtagtcatggagaataattgaaggctccatttgaatgcatgtgaatttcaaatgatgaggtgtttaaatttgattcttaactatttgaagctcaaattcaaaatatcaattattgcagatgcacatacagcaaaaaaggagcctaagataatttgatttcaaataattagcaatcaatttaataatgctctaaacatattcaaatcggtttggttttctagatgcaattatttctataatttgacttccatgatgtatcgcctcattggtgtaaaagtggatgttttctctatgtgtacatatgatgttatgttcttttgagtgctacaatctaccaaaacattattgtctccaacatttatattttgtagaatgtgagcagagatgcagagtatataaacggcaatgacatccaaccatatcttccatttaattttgatgagaaatgctatttcaagcatagaatttgggtctagcattaacattgggttgctgctccattagctgagaaataggaaggatagcttttagttaggtaacaactgcaatttgcatagaaagcgtgtcatacaaaatatatcaaccttcctccttgagcatccaggcacaagaattgcttatgcttcataatcgatacttatggttgcttgcttccccaaccttcaatgcatccaccaagggtaggtggagagatgacctttcctctagagcatccagtggtaggacttgcttgtgctccatattgttatgtattataggaagagatatcgaaatagaatgtaaaatgattaatagtaaaggttctagaaaagaataagtagttctagaagaaaaaggttggcaggaaaatacaatgagatagttataggagtatttgactctattgtacttcttggagctgacttgtttatcaaaatctgtacaaatctcaggagagtccatattgtaatttcattccaaggattgtcaagaatactactctttcttctctcagtctattcttcttatttttctcttggctaatctttttctagattcttctcctctttcttttgcaacctctgttaggatttctgcaactctaaaatttggtagtacagcattgcattcttggaaaatagtaggtaattggttcttggcggtcggtatcatgaataaatccacaatagttatcaagagatggtacaaattgcagaattggaggaacaagtttggatgttgcacgaagtcacttggaagaatgttggagagttaagatatttcaaaggtgaagtgaggaagacttccagagattataatgtgatcttggaggctgcgagaaaaaaaaaagggatcaggcaattttgatgatggaagaagcagactgaaaacaaaggttcctagtcaatctatgtagagaataatggactattactaatcataatgagactcagaatcatcaggttagggatcaaggtaattttggaaccttttctattactggtataactcaaattttgccaaaaattgagctggtgacctatgagggaaaagagtctaaggcttggttgagaaaatgtgtgaagtactttgaagtactttgaagttaatagggttcctaatgatcagaggatgctattatttctcttagataaagtagatgtgtggtctcttggaatggaagagagacatacaaataatttgagaagggatttgtaatagatttggggatgaaagatttgaaggcataattaaaaggtttacaaaattaagacaagaggagattatggagaaatattgggatgagtctgaagacatgagaataggattggaagactgatgcctcagttgggggaatcatactttctctctagttttattggagagttaaaagaagaaattagattgatggttaaggatgatgaagcatgtctctctttcccaagcaatgaaggtgggtggattacaggagcaattgattgaaagtgagaaggcatgaagccctaatgcttcgtttaggccattcacaaagtcaatcaaataatacctaagctgttgagttttctggtaatggatcatgtcatgggtctatggacagctaagtcttcttcaattgctaccttacccttgccttgattcctgcacttgcatgctgaacctattgtgaacatgggtagagctcaatagagggatctccaatacctcaagactcactgggttaagagagtctcaatctcaatatctgataataatctgcttcattttagttgaatgaaaataatctgttttatagtggggattgcatatagcctgactcttcttatcatggttttaaataaatgccactcataacggccgttttttataggtttctaactctccggttatcgttacacccattattaaaggacaaaaaaaattttattcttgtaactgccgttacttaccgttaatggtaacagtcctttgcctaatctttaaacatatggggcaaaaaataatttctttttcttagattgtgaagttttatgctattgtatctcacttttctcaaatttccattgaaagttaactctatatctacaaatgtctcacttcttttctcttgagctaagattatcaactatctttcaaaattctataaatctaaccttatgaaatttgagttatttatctttgcttttgtcattttttacttattcgttaaagaaaataatgttggatgccatgttcttttcgtcacatttagagtatgaagaattattctttactatctatgttatctacatttttaccttagctataaattaattattgttaaagatgtctaacaataatggattgaatgtcttttcatttcatgagttttgcaatttttttaaaaaaatttgcgtagcgataaactgttatcgttatgttatggccgttataagcctgtatcaattatttgtgagcttctaattgaagtgaatgactaatacaagcagatattgaatcatacaaaataattcctactgaagataaatgttaatcctacaagaatgggttatctttgaaactggtccagctataattataatgttgcacagatgaaaagaatggcttgcattgtttttatggtagttgtcaaatatcaaagctttgcatttccaaatatgtccatgtacgactaattgatcaatgaagaatagtaaacatttattatggccattagaagtttgatattgagctagttttatcattattgctgtgtatcatatggacgaataaatattattgacattgttgctcataaaattaggaaagaatataactgtcaaagttcattttgttatccaacacatttggaaaataccttgatcaacttgaagcaagctacttttccaagttactgctacttacccaagtcactcctcattgcataattccatcatgcctttgcttttgggtaggcactgttaaggctaggacacttaacatcactatccatacttgaaggttgttttaactttgaaatattcttttcgtgttccttgagaacatttgtgtacttaatttctcaagtattcaaggtgatcatctcctgcatttatgctgctctttaactcttttttctcactgttcccttgcagcatagctgtagtaaacttagacacggactgaagtc

SEQ ID NO: 5671 - DNA, 1195 bp, Manihot esculenta
  Intron number 8 from transcript cassava4.1_008515m (locus cassava4.1_008515m.g) derived from phytozome v7.0 (chr-ID scaffold05875; pos 2401801 to 2402995 reverse strand)
cagttccatttgttgtgcttgctggtagtcacaaggtaagtcgtaacagtttctcctggagccttagaacttagaagtgaacaagcagtgcacgattcttgaactgtaaatcttgaatcatttgctttcttcaccttccaagtggtcttaagcttctggtaccagttgcttttcaggtggtgtgaaaaatagttccaataaaatggataataagctaatgaaaaattcctgtttcttgagcattaaatttaatccttgttagaatattgttctatttatattgtgatattatatagtctaaacaaaacgcatatgatatgtgttgagagagagagatccagcatagaagctctcacgtgcagtttgcccagagtggcctgatttgagttggctagggcacaatagagggtgagcattagtttggtctggaaaatctcaaagctgaattttttttatctgaccaaactgaaccaaattagagaggaaccaaaatttttagccgacaaaacggaaccatactggtttgattcagttcgatttatcaattttggtgtcatcctggatttcttttaaagaaattatgttggacttaattctaattcacttatatttcctatttttaactctaatatgagacttttagtttagtttaaccactttttccttcagaaaacctaaccaaacagactgaatttttaaaaataaaaaccaaactactgaaaacctaaacaaatttccaaagcaaattagtttggtcggttttttggtttcaaactgaattttgctcacatgagccggccaacaatttgaccagtctgaggttaaacctatgtccaatcaccttttcaggccagtcttgctcttaaacaagaatcaaccttggacccaatgaaactatatagtatatagctagtttgggaataattgacagagtagaggcttacgtgatagcctaatggtgttggggggtcaatatatcaggctaatttgcatcagtgtccatcatgagatcacgcctggtccaccttgtactttttgctcatagtaactgaccacttaagtcttccttgaacttccactgctgcagcagaactggagaaaacagcttataaattttcttttaaagtcttttaacatgtactgttttgcctgcatggcagctgtgccccttgtatccacacaatcctgaggtctt

SEQ ID NO: 5672 - DNA, 486 bp, Manihot esculenta
  Intron number 6 from transcript cassava4.1_014432m (locus cassava4.1_014432m.g) derived from phytozome v7.0 (chr-ID scaffold07991; pos 351539 to 352024)
caggaaaggttgcaacacctgctcaggcacaagaggtaagcttgaatttgacaggttatttagtcaatgtcttctttctgtgatctttacattcacagttcttgtatttaaattctgtggattctgtggatacttggatcttataagttgattctcgagtgttggttagtaacctacagaactctcttctctatatgagaatgacacatgtagacaaactgttcttattgccaattttaaaataatttggttgccattgaagaaacttctatgtttgattaattttatgctaattcatgactcatatatctgatgctcttgcattatataaccctctactcatgttagtacaactagtctttgcatagggctctgattgatttcatgggaagtagcttaattacctattgaagctgatttgtttactacatttggttgataaatgctttaggtccatttggaactgaggaagtggcttcacgacaa

SEQ ID NO: 5673 - DNA, 2122 bp, Manihot esculenta
  Intron number 1 from transcript cassava4.1_002145m (locus cassava4.1_002145m.g) derived from phytozome v7.0 (chr-ID scaffold12525; pos 773525 to 775646)
ccagcgtgtaagtgtgcattactctttattttcatattctttgctttgattactgttgtgatatgattgcgtgttttggttggtggcgagttttctttggtttgatgttaataattgtgtgtgtggggtagttgtgtggattgcattgtttcgcatctgcttcctggtatgtgaatgaaaaactttaatatttaacacaacaatttccatggttcatatctttgtgttttgactgtactgatattcaaaaattttcttctgtcgccttatccatagagttaaaggaaaaggaaaggagacactctggtgatgcttttatttgtggagttccagatgtgaattgtttctgcgggtttattgtatatgtgattgattgagtggattaattaagacgtatgttgttatgttcaccggttatttttatgaccattgaaaattttggaggtagccaacaaaatttacagatgtttagattattgtttcatggagcctttttctctgttctctcttcctcccttttccacccttttaccccttgtttgggtgaaggggcttcattattcatgccacttgacaaaatctttactatcaacacaataactgtggatgatacctcagtatgcttggaatgggggcatatttttgtaatgctgaattttcttgttgactatttataaaaatgagtgctcattctttattcgtgagtattggttaggtactacaaccccacttaggattccttcacttacattggtatgtctcccatatgagtaaaaggtttgcttatctaggtatgtgttggttcccatcttcttatttacttgccttttcaattgctaaaccctgtcattttttaatatgtggcactagtggaaaagctgcttatgtggcaattttttttcacccttctaatgttatcacatcaaaagttatgctgccagttcaatgagtctattttttgacctgcatcattgcaggtgcgcatgtttttggtgttagtatgacttaatgttctttgtgtcataaactttgagatctgtaacaagttgatgatcttaattccctctcccattcacatcttctagtaatgaaaaatttttatcctaaagtgggagacgagtaaccataagcattaggagtctcaaattatttagggaaataaaattttctcaagcttctgttaggatatccattctacaaagcaaccttgtgaggaagattctggaaaattgataatagagaattgtgaaatttacacgaggaatatcacttatcccaattcagaagtgttgcaccttttatacttagtttttttgtggtctcagtcataggtattccattttgcagattctgtggctagtatattcttatggtacaatttttagtgtaagagattatgtgaacaattcttactggtggcatatgattggtggagcagtagagctcttgggcagatttccatcaaaagaagtaaagaacatcatgataatgcttttgtgcatgtgatgagaacttccataaataggtcacatttggaacgaaatttttttgtgccccaatccattttttggctctgttgcttgtagtatgaggcatatgaattagtttgaggcttgacatttgtgtaggatgcatacttcacttgtatgcaaaaattgggctcaaaatttatcttctgacttgggatctaatgtacaaggatgatgataatttctgtcaagatttgctgccataaatttatttttgttccttatgattgattttttacaaatgcatgtgtatgcaaaagtgtcattttgtttatggtgttctctctgtttatgcttccatctctaattatatgtgataatgtgaaatggctgttctatcagaaactaacaccagagtaacatttagtagttagctttcctgcccaatgaggctgataatgtttctagtatttgttttcagagtctgttatttatgttcgaagtacatgttttgcttgaaggttcgaaggatttgatttctttaatgatttttaggttttctctttgtgtgcatacactctgacttcataaaaactctctctgttattgttgttttagggactggtataatcttgaaaagtcgaagagagtga

SEQ ID NO: 5674 - DNA, 4265 bp, Manihot esculenta
  Intron number 8 from transcript cassava4.1_006559m (locus cassava4.1_006559m.g) derived from phytozome v7.0 (chr-ID scaffold00455; pos 116063 to 120327)
cataagtgacccaagtttgaggttagatatattaatctcaaattaaagtagtagttatgttattcactttacacttattactgttatgggtaattttaatgtcagttttcaagtcaggaagttgtttctgcttcctgtactggacagtattttcctgaataactaggttatgttttttgttaagaatgttagatatagaagaataagaagggaagggaagggaagagaagagaagctaaagaactagaaagactgcatctttattctctttacttctatatctttgattagaataaaagattacttatttatatatacaaacatccctgaatcactaactaatcttaaaattttgctacacaactaaataggactataactaaatgggaatatatgaagtataaatattaacttttcataacacttccctgtaagtttgggcatggaatcacatcaattctaacattttgattcactttggtgtaatgaatttaaagttttactattataagcaagctatttaggcttgaaattttaacttaagcttctgctgaacgcatgatttcccaagccctatcaagaaggcttccgtgagtttgccacacaacagcctcaatttttccacctataatctggaaatgtcgattaatgagtgctaaatgttttgctacaggcttatacatgaggcattaacttctatttagatcacattttttggtgaaactgcgtgtctgaaacaagctattattaattttctatgattgttgttacctgctgtcagctattattatattacttgaagcacagattgttacctgatgaaacaagaggtgtccattcggtcagttcggtttcgaatcgaacggaaccttaattggaaaaccaatttaataaaaaatgcaaaccaaataaaccgaaccgcttatttgagagagatgcgcaaaatctacgttcttgaattcttttgcctcccattcccaaattctgagcactatggtccatgagaattattttgacagttttaacaaatcagtcatcctaaatttaatcaatattaatcccaattgaaacaatacaatccaaacagataaacaaaaagaaattatctcaaattatctgtgcccaaacaaattaaaaagaaaaaattaccccaaattaacaatacccaaatttacaagaataaatcgacaacaacaaattcaataaacaacaattccattttcggtgcaaattgataggaagcaatcaatgaataggaacaataaacaatggagaatgccttcaatggtgcgatgctcatccttcacatacaagtgtaggtggctcatcagcatcgagagatgtgacgaatgcaagatagcccctccttgatggtcagcaaattccttcacatgcaaatgtgggtggctcgtcgataaggttagaggagtggtgtaattgagaaaggaatttaggtcgggttaggttataataaggtagtatatataggtgctcaaaactacatagttgtaaagggtttgtttggtttgtgtattcgtttttttgatgaaaaaattgaaaccaaactgaaaatcaaacttattaaaaacataaaaccgaaccaacttgttaaactgaaaaactgaatcggttaaaccggatcgatttgatttgatttttcaatttaacttgaaaactactctcccctagatgaaacgtgtagcttttttttttttgaaagcaaagctactgattgtattaataaaattccatcaaacaaagagggatatcatcctaaacagagagacattatgcctgatagattctctagccaaagtatgaacaactagagtagcattacgacgaacccatctaacagaaatattagttctatagtctaacaaagatttacaatcattcaaaatcaaactcttgcataagataattgggcaaaaatgttcctcaagtgcctgtctagactcctgcataagataatttggcaaaaatactcttttctcatctatcgagcataaatcattaaaatctcccgaacaaaaccacggaagagagcttctacgagataaaactcgaataaggttccaagacttacctcgtccttgcgattccggaaacccataataactagtaaacctccattggacattaccttccgaaacaattgaatcaataaaatttgaagaaaagctaaccacagaaacaaatccatgactcttccacattaatgaaaggcctcctctcaatcattgtctattgactgagaagcaaccatcaaaatgtaaaaaactacaaaaaaattccatatgaaaactaagagtttttgtttccataaaaaataaaatgtccggcttgtaactagaaatcaaatccttcaatgcaataactgtccgagaattgtcgccataaatctgccaaagaggtatgcatattctgaaaattgattggattgtatgtgaaaaacatccccaccatacagaaatcataagtgacgatcggaatatctctggagctcttaatagggacaacaacatcttctttttcattgatagtcaattgacgcagatcgtcttccatggagaaagggaaagaagaagttaggtttaagaaagaggaaaagccgagagtatcgagccacaaagggaccacagagggaaacttgcgtcgaacgttaaaagcgttgccatgaaacgtgtagcttatagagtcactttccaagatgtatattgccctcaatattatcaaggcgagaggcggcactaaggtgatagggtccttatcgccttaggcgagaggcaaggcggcacttttttgaagtgaggcaccatatttatatatatctatgtataatgtatagatatatatgtatacatatgtgtagatattgtatttagtccttaattagttagcaaaattataaagatatataatcctaattagttagctgaattactggcatacttatatataaatatatcatctttttcaatatttgaatatatttgaatagtggaagtatatatatatatatatatgtatgtataattaggctaactaattaggaatatagccccaatcagttagcataattaaaatggagacacatctctaattaattagcttgattataggatataaatccctaattaattagcatagttatggggatatgttttgtaattattacaaaaatttagctctccaattagctgcatcaaaaggaaatatgtttaaggtttagcctttaaaaagaaaaaaaggaaaaaaagctatgcatgttattttcaagagacaacaaggcctcttgcaagaggcttcgctggtctcgcctcgcctggcaccttgcccaacggcttttggtgccttaataacactttgcactttgtttggtggttgtttgaaatattacttctgctatatggttaaatagttcactaatgctgggttaggtgggtcctacttctatggctatattgtgttgtatgacatgtcgttcaaagtgcagtttccttttgacacactctgatgttaattatctttagtcaacttatagtgcttattttggaaacttgatggaagatgagttttaatatagtgtatgttagagtccttagaaatggatcgagttatgggtctattgctgaaattttctggggatgaaattttctttttgcaacctatggttgcaatggaacagacttctgagagagaatctgaaaatctcttgagttgaaatattaaaaaattttgacaatttttctcatatttcgtttattggattattgcacttaaatgcaagagggaaatataaccatctcctgaaaacagaggaactattaagcaacatggaggatcatccttttaccaatcctaccactagccactaagtaaaagcaaaaactacttgcactatttacatcatgggttaatcactaagaacatggtttaactactaaaaatatggctaaaccactaactacatcactctgaaaataggacaactaacttgcaaaaaactaacttgcattatttgctaacagtgtatggtggttatgttggcaaaaagttgatgtttcaaattgctttcctgtgttttattgtattttcatccaatattatcgtgtgtggataagttgatacatattttattaatcccttttctgtaatccttttgcaatttcactacaatactaccacaattttcttttacctgtattactgtgtgctaatataaattttatgtttgtaggggcctcaaaaatatcctgagg

SEQ ID NO: 5675 - DNA, 2669 bp, Manihot esculenta
  Intron number 4 from transcript cassava4.1_008233m (locus cassava4.1_008233m.g) derived from phytozome v7.0 (chr-ID scaffold03363; pos 225661 to 228329)
ttcgtgttgcttcaaggtttgtttcttattaagagttttgatttttcactttctatatatatatatatatatatatatatatatatatttgtttgtttgtttgtttatttttttcctggcatctttgtcggtcccacaaattcttcttttagttcacaaagttctctacccttatgaaatttgtagcttcaaccagtgttatcaaggcgagagacgacactaaagcaacatggcgccctattgccttaggcgagaggcggggcgatgcttttttgaaaaaggcgataaagctaaaattttgttatatgttttaaatatacatatatgtacatataaacacttcaatgaacacccatattgaataaaatgtatgtatatatatatatacatatagggcaattttgtaaggaaaaaattgcttgaataaatggcagaattaaaacagatacaaatatatgtctccagcaaagagggaagagaggttgaaaaaggggaaggaaaaaaagagaagaggagaaaaaaattagaaaaaagaaaagacatgctgctatgcaagtccattaaggagagaagagaggtgaaagaagaagaagagagaaatagagagagaggaggagttaatggtattaggagcaagaaagagtaagaaatttgcattttggtttagtagaagtattatttgctttttgaaagagatggagagagactaggacttttcttttgttgtttaaaagtaaaaaagaaaaaaaaccttgcttcagggaggtgttgcctctggtttctcttgcctagcgcctcagtagactgagatgttgcctttgaggagggcgcttgactgaggagaggtgagggggtggctcctcacctaacctctcgcctttaaacaacactggcttcaacaaattagctaatggtacccaatagacgttattgttaccgaatattgtagctatggttatgggactttttgatggatttaatttttgaatgcttcatgtaattcattgtgctaccttggattttcctgcgggtgtagattctataagacgagatagaaaaacaccaagtagggtggcttgcggaacctttctgatagggttgagcattcggtcgatttggtttcgaaccgaaccgatatcgaaaagccgaattaataaaaaattcaaatcgaaactgaaccgaaatataatagaaactgatgccaaccgaatcgaaaattttcagttcggtttattgggaaccaaaaatcccaagctgagcacaatgctgcagattgaaaataacagtacaaaaacttgataaaaacacaacaatacaaaaacttgataaaaaaaaataacagtacaatagaagaaaataaaacaaaacaaaaatcaacacaaaccaaacaaaattaatttctcacaacaaattaaattaacaatcatacaacaaaataaaattatactaattgaaacaaattataaccaaatttaaataactagaatcctaaaaacccaattcacaatatcaatcgcagaaataagatctgataaagtaaatctgataaaaaacacccctagaaactagaaccccaatttcaaatcccaaatttacaacatcaacccacaaaaattactatctcaattcccaaattcccaacattcagaggcttactcgatctacaagatcaatggatggtgccgtagatcattgagaggagctttggggcttcaatcttcagatgcatgcaggatgaagagaacagcgaatggcgacaatgtggaagagacccaatcttctggatgggctaaaacttaacctcgaaaaaaagaagaagaagagaaggggttgagaagagagagagggaggaagaaaaaaggacactttgaggttgagagatgatacgagagagggaggcagacaaaagggagatttaggttgagagatgagagaaacaagagacgagagtgagagaggaagagaaagaagcggcagaagaatgactagactgtctaggcttatgtaaagatattatatatatatataatcagtcggtttgggtttatcattgattttggttaataaactgaatcgaaccgaaaactgaaaaaatttaaaaaatgaataaccgaaccaaaccaattaggccaaataactgaaccgatcagtttggtttggtttggttttcggttttaactgaaaactgctctgccctactttcttatgctcaagtcagtaatgggaactgacagaatgtacaattgattagaggtggtagcataactgaaatggaggctgtgagcttctataggtattggttagactcctatttaagttaggaatatgatagtagaaaattcccatcttgaattgagtccaattagagtaggatccaaaatcccagtagggtgagatgcttatccttagtaataaagttttttttggacatggattcgggtatattttagggatttatatcaatacttggtctgtagatttgctaatttttacctttaagagaccagtcttggtggtttcgcttgtcagttcatgcttaattgcaattacttgtatttacaactggcactgaaggctatgcttatgcttttctgagtttcattttgttcattttttttaaaatttaatgtgcagatacttcaaaggtcctgaacttcttgttgatttgc

SEQ ID NO: 5676 - DNA, 931 bp, Manihot esculenta
  Intron number 3 from transcript cassava4.1_005947m (locus cassava4.1_005947m.g) derived from phytozome v7.0 (chr-ID scaffold08099; pos 84024 to 84954 reverse strand)
aagaagctgataaactcgtaagtcagtgatcttagttttacatatttttgctcaaaagttcttattaagtttttataatcattggaattacttatatcttagctgatgccatagtagactgtagaagtatcagaattacattcaagtttctttagtaataaatggttggatactttattaagttttggatcttctttctgttgataaagaaaattccctatagaatccttggtaatcatctttgggtttctctaattctagcatatgcatcacaaggtttaactttgctgttctacttattgttatctgtgaggcttcatcactattttgctatgacattggtgagggttttctgtaattatttgttgtttgtttctcagtacatcatattgttgtttttcttaaatttaaaatggaaatgaaaaaagtgcttgttataaatgtatggacttatagatacagttgtttacaactaaacggtagatttttattatattattggtcttgatttgttatttttgaaaaatgaaacacaaattcactcttgggtaaatgatatgttcaacttagttgaattgggattaaggttggtaggtggattgttttgtcttcttaaatgcatatgaatacatggatttatatctcttttcagtttcttacttgagcatcatccatacctaggttaagctaaacacctgaccctcgtaaattctaatgtcattacacttagttttatgtaaatagattagtggtgttagtggcctgacattttgggattcataagttgcttttctgaatgtattgtaaaaagctttggtgttattttaaacattctttgcatttgctaatttgctcctattgagtatctgatttagtgacttgctttctttgcttagcaagaggttgagaacataaaagtaaagcaagttac

SEQ ID NO: 5677 - DNA, 964 bp, Manihot esculenta
  Intron number 10 from transcript cassava4.1_003494m (locus cassava4.1_003494m.g) derived from phytozome v7.0 (chr-ID scaffold05875; pos 273812 to 274775 reverse strand)
gtgctctcccagtcactgtatcaggttctttttggtccttggtaaatcttatagaatgatttaaatccatataaggttggaatcttcttgtggtaacaaacatatacataatagtttaacctcaaatgaccatttggcaatagatatcctatttactttatgaaaacaaaaattgaaacaaattgctttgttgtgatcacattgtgctcattttctcagtactcgaacttttagcttaggccttagaatgtgttgataatgattgttagtcgttcagtaattttttttttccattcttcatagtctattcttgctgaacttcacacaattcatctggagcaatttcaggttctgaaatttgtctatggttattgaattctagtattagtataaatttttgaatatacctttttctgatgataagtaattaattttcaaaagatagacagaaggggaaacttggttgatgaaaagtgactaacaggcaaatataagtgctggaatatttggttacttgatgattatagaacatcaaagtctcttgatgcagttctcggcatgggtaattgattgtattcagtcagtccttatatggagttgatttcatattttttgttttagaaatgaatgtattatgcatgtatggttgacttttcagttgatatgacttgtgcattcttttattcaactgcttctctatgaagtgtcctcttctagctttttagaagtgcagaaagcaatatacctgtaaggttttgcaccttttatccgatatcccaataacaagaaacctgtttcttcttaagttttgtattgttgatccttcagatttcagtagttttttattttatgagttagatgctgtaacctggttgaggttttactgtgaggcactgtcatatgggcaactgttgtaatgcatgccttgcaaaatattgcacagattctaagggatacttggtgg

SEQ ID NO: 5678 - DNA, 3831 bp, Manihot esculenta
  Intron number 2 from transcript cassava4.1_020165m (locus cassava4.1_019953m.g) derived from phytozome v7.0 (chr-ID scaffold08593; pos 117359 to 121189 reverse strand)
tgctaacttgcgggctttctgtgagctgtctcacggtaccttccaccgtacttgtcaggatcgctagtagtctctttgtgagtcttgctgttttggggaaaaaaatggaacaaaatgtttttgcatgtttgatatacatacaaagttactctgaataggtttaatctcaaactgtaaactctctttccttttcttgaatgactgatcaaattagcaagaaaattattaggtttttgtttgttcataaaactcctattagctgacttaggattgggattgggattgggattgggattgggattgagattgatagagaggaatggaaaagacgagtgattcacatagacttttagtcagctaaaggtgcaggattattatcatgattgtaggtttctttttctattttacttgttctgaacaagaagatgaaccttagagttagacattgaggcatttggtaacatgtttgtatgtttaacatcaaaagtttgacaatatatcatgaagctaaatgcttatgctgaaagatatacttagcatttggttttcttgttatgcaagtctatagtaaacttgttttcggtggaaaaaaagtgaaaaaaggagaaaaaagtgagggctcttttcaggttctgaaggtggatgtgcactgatatgacataaaaataaattcattaatgattgattaatcatgcttattgattagtcatgctactttattttctttacacatagattacactttgtatacatggtttagaactttttggcctttgttttccttatgctaatcattagttaagaataagaaattgtcatatttttgtgaaattctaatatatgtatttaggacgttcttcatattatcatgaaaggaaaagctttcacttttatattcttttttcttcttttgatatttgtagttcctctgcaaattgatggaggtgtaatatatagcatatttacttctctagtgctattatttgacagctttatcttgatgaatacacatctatatgtatggttgccgattgtagatgtcacacacgtgtgggtacacgtgcttggggtggggtgcaaatatgctattccacttcaactagaaatatgagtaaaacattgtgtttctcttcattccaaatgatcaagcaatgttgtcatgtaatcctctttagtgttagtgaatgattagtgatttggaagttacattcttgatcaagtggtttacttcttggcttatttatctcttgctatctttttcagaacttccctcaggatcacttgccattttgaaacttaaagggctttaatgtatcctccttccatcattaatgaagtattagtaaaataatctacattctttctccggtagtatatttctttgattttcattgatattgtagtttatttttggggtgttatgtgtatgtcttggttactttttgtcatttcttagaacattattcaccatttgagaaaagattaaatctagcatgacgtatgggtaaaaagggaaaagcacttcgcctcatctgtaatctaaattaaatgagtttaactcaaagtgtaaaacaattacttgtaagattggttgggcaatatatgttatgcattttctgctaaaagtatgtcttaaacattaagtttccttctttccattccatgtgttgagcaagcattggtgacatatggcttcactattggaggcttaatactcattaggaaagaaacttgttgtctagcagttcatttgtttacctgcgatatttatgttttgcttcttcttttagtacttcaaaatgactccctttttgaaaaattaaaggattttgattggacttgcatgattattgagaagagaaagtaagaaaactttggtctttccccttttgaaacacatgaatctcaaatgattatttaccatgatcttgtggttagacaaacataatgaacctatcatgttacctagggttgtaaatgaaccaagccgcctttgagttattcgaaacttgacttgataaaaagttatacttgggtccattttttttctaaataagtcaagttcaagcctaatttttaggttcgtttaatgaatgagtcaaacttgaacttgcaaatattcggcttgtaaatgcttgagagtttgtttgtttatgggtttgtgagtaagctcatgatatgcttgttttttttctaaaaaaaaaaaatagttctaaacatattattttaaactaaaattattggtcttgtaccttagttaagctgcacatgagttatttgagccttagttcgataaatttttttgttcatctaggctcgtttgctaaacaaatcacatttacgcttattgatattcagcttgagatcgaaatgagtcaaactcgagctgggttcgagcatgaaaaaatttgacaaaccgaacttcagctctttaaaggcttagtgtgcctcggtttgttaatacccctattgttaactagaatattggaattttacttcagttagtaaatctcatgagattaattttttgactcatggaacttgttccacttcactatgcatgccaaaatatcataatagagcataaacgagattccaggtttcttgttttaagtttcttaaagactttcttgtattgttgtatgttattattacatgtcagaaaagaaggtataagaagaagaggtagtaagcttgatgaggtggcattagaaagcgagaaaggaaacaagtagttagttgaagctgttatgttactctatagctacttaacagtagctgaattaattactagcaggttgtgaatctgctatgtaactcagagatcatctcttgtattggctttcctcatcatctcttgaatctgctatgtcttctctgcctattctttctaattctctctaatttcttctgtcattctactgttagtttctaatcctgacactatgatactgattttacattggaaagagctgatttctgaagcaaattgatcactccctgctatccacaccagaataaatggagttttccaaaaaaaactgctagtggaggaagacctcctagggatgagagacatagggctaaagagagacaaaaaaaggatggaatcattgggtagtaaaaaaaagcggaatactgtatgattaatctcaactagcatctttccaagtttctgactatatgccctcttgtgtttctacagtgcaaggctgacaagaatgaattccaagttcttcagtacttgaatttgttatttactgcaccatttttttttcttcgagtcagtaagcctttgtctgggaggaggttttttaaagtaattggaggtttttcaagatttaaaagccttgaacatgtgtttggtagagttcaaggttttttaaaaggtttttgcaggttttgaagacctacatttttaacccagaaattggtggattgaaaaggttctctttaaaacttctaaataccttaaaaactttccattcctctcaaacaacaaaaatttatgaaaatttaagaaccatgaaaatcttgcttcataaaatttcaccttctgtttcttttgtttttccttgctgactcttttatgggcatcctatgctcttctgcagcatacctacgcatttaaatatccatctttaatactctcctaaataatgaatttggggggaattatgacttcaaaggataatatctgctagtactacatttggagtttcatgagatttgttatgattacaaagccacttgacctttccaatgtataactcttatatgcagattttgaacggtgtactccattattgcaggtacttgaagagcaattgg

SEQ ID NO: 5679 - DNA, 2823 bp, Manihot esculenta
  Intron number 8 from transcript cassava4.1_007896m (locus cassava4.1_007896m.g) derived from phytozome v7.0 (chr-ID scaffold11297; pos 136401 to 139223)
agtttgaaagatttatcaacttcatcaggttttgcttttcctccagcatttatggttcctgtaatctgtttctttacaaaatttataaactgttgctgattgtttatacatttttgaagagttctgttaataaatttgccaaccaacaaaaggatgccttctcaggacagtcttggctaagcatcaatgttaatctattctgatataagctcaaccttatatgagaataagtttaacaaccattagatcaaatgtttgcttctagattcatatacttattaattctgcacaaatatcgataatctcatttaatctaatggttatacttgttcttatataaggctgatttatataaatgcagccatccgttttttcctaagaatgattccttccacagataagtgtgctttcctttctttggatccaataagaaaggaaaaagtaatagaatgtgcttggactaatctacctcttcttttatgaccggttgcctgattggagatttgtaaaattgaaaatttagggtatgcttatgatttggggaaactagggttgatattttagggccatatttgttgctgaaaatcgagatatatgttgcaggttttcaggaaacaggaattaatcattggatagaggattggattttggtggattaattgacggtaaagaagggtagaaaaactatagggagctaaggttttggatgctcacctttggggcttgatttatggatgaataaagcaagagaaggtaatatagaggctgcctggctgtggtgagctgtatctggagttggattgctgtttaatggaggaacaaataagtgcatgagataggtccttacagatgacttgactaaggaaaatttgtacaaaggaggtggtagttgttgatcacatagttctgataagtgaaactggagttggggggaaacctgagttaagggtacagattcacagaactaaaactgagtgtatttcttgctaatttgaaaacattagggtcagaggtggttctagattggaaagaatttaggtgagattccatgagattattttcttcgtttaggttcatggcaagacagatattaggagtctatgcccaacggaaaccgagcacgaaggtgagcttgtggaagaccatgtgattgtgaagttcttctttaaaactgtgattaggttatgatctacgaagtaacactaagcaacaatgaagtggcatgactatgaaatgaatgtgatggagataggaatattaatatggatatagaaacatgagagatgggaatgaatgagaagcgagtgcgtaaggggttgtaattgtcttccattgaagtagggtggtttaagttggcttggttgcgtttgaaggaaacttatgattgcagtgtggcaatgtgaacaactaggagacagagtgaaagcaatgtgtggctttgttaataggttagttagcaaaggagaagaaaagggggtagagtaaaaatgcaatatgttagggcacttgcaaaaggtaaagtggcacattttgatggtaggttaggtcatttgaaccctaaaaaggtttagcaatattctgtattgttttcaaagggttgcattgatatagaaagttgagtcattcaagttgtaggagagtagaatacgaaagagagagaaagagagggaaaccaaagtgatgtggtttgaagctggaagagtggtgtagtatcttaacaataactaattctgttagttagaggctaaaccattgttgagttagttgaaggagcaaagatgaaagtacatgaattaaaagaacagagagcaagagaacttggactggcatgtgtgcttccattatcaaatagaaagtagctataattatcatcaagggtcttagaaatgataatacaataatctgtgggctgatagtttggagggtgtctgagatggtctttctctccttcgggacaagtaggagcctgtattttccatgctgtttctggctagtccagccctggtttgagctcttgtagcgactctgctggaaatccttccctgttacctaaggcggtggatgacggtaagctggaggttttggtgggttgtttgaatttttctccagtgcaaagaggagaggtcctgccatcccttggtggctgatggttcgatggtgaagatgagagattggctgctgtttggaaactgggttgacccagttcaaccctagggattcctccctttggtctgggttttgggttgtgtttgtgtcagagttgtttttagtgggcctaggccttttactcttatttcatctaataaaatattgtttctgataaaagaaatatggggagctacagaggttctgcttttccttgtcttacatttttacactctaggtgtaggagaataattttaggagaataattgcctttttcttataaaaagagtttgtacgcaaagaaatgaataaaacactgaaaaatccttcaattttctatttttgggacattttgagtaatcattaactgaacaataaaaaatcagccttgttggagaaaattgctgaccttgcgcagcatgaaaaaagtattaggtaataattttacgcagaagtccacttacatgggctgcataaaataaggacctttttttgagtaaaataaaaagcattgtgtttcaaaatttaccagatgattctgctgccatgtagtagcatatatatctgcctctacattgtaatgtgtgctgttcaaggagaaatgttctccatgtctaatgatttgtgtgtttgtttttgtcagtgaggtatttgcaaattctccttttttcatttcag

SEQ ID NO: 5680 - DNA, 4673 bp, Manihot esculenta
  Intron number 4 from transcript cassava4.1_019336m (locus cassava4.1_019336m.g) derived from phytozome v7.0 (chr-ID scaffold03852; pos 330394 to 335066)
gttattgaaggtaatcacatctactcattttcattttattttttttatcgactctatgctttgtcaattctagtaggctattttattttatttttattgtttctatgctttgtcaattctagtaggctatgctcatatgaaatatctgattttagctcggatgcaaattctgttggatgagtcatggaatgtcctttacacagttaagtgtgacactggaattactttcagctgtcttacaggctggccctagggtaagagaaaataaagtcatggaaataaaaaaaaatggtagtaatttagcaagtttgccttagtaggctgctggggtattggtggagagcctctaggagattgttatgagcagaggaactctagtcagctttctctctttgtccaacctcctatgatcatcctgtagcaaatcattcaagtcaaggagtgatgggctccatttttgttgaacaaggtctctttcttctaattttgccaatgaaatcaggtagttgaacagaccaaggtcaaggtgtctaggtagtattctgttaagtggaagtgtgattcctttttctttaaatttgaactttggaaaagcctccaatcttgcatcccatactctcttagttaatggtggaaaaatgtaatgagcaccactccttgatgagataattatgtccaagtcttcaagtggacattctttgttgtcatttgtcaatatgttcttgcaggtttgggtcccatatccaatcactttttcttttaataatctctgttgagcttagtttttgaatattgatgggcaattgatttcaaatagagtacaatgatgtaaaagaatccatatagcagatccaaccattttgggattaggcttagttgttgtatgttgagcttacccaaaccaatatcttacccttatacaacttaatccgaaacttgaaaaatggaatcaaggaattgttgcaagtctagattgcttgttgttaagttctctcaaataagacctcgttataggtcgatgaacatggaaatcttcctccaaagaagcgaatttgtgctttttcttgaatatcctgttgtgaaaattggttgaggactcgttagagagagccctctaatctcatgaaactaatatagataaaactctgcttatattattcataataatcaattgccttaaatatgaaagggttacaacgtataagaaatagaactccaacatataaggatatcacattcttcctactaaaaaccatttaaatttgaattgaagattctgaactaatttttttcttgatttgtgaagtatccttaactaaattggaagcaaaggaccttgaatctttcaataagttagcaagatgatctactaaacaagctccaccatttgtcaaaagacaaagagcttgttccatagctcaacaagaaaataagataatcctccatatggcatcactgggagataaccccatgcgatacacttaaatttttcaagttttttagttgtcctccaattccactcataataatttttttacactgatagttgaaggaatatggctcatcacttcaatcatttatgccctactaggacatttgacaaatgaagttaaggtacttgttggttggttcgaacagttgtctggaatatggactgaaattgatgctcgtaatcttctatcaatccagcttgctttaggttcaccaactcccccaatggattgtcgcgtgaagaacggccaactcgcaagttgtagtcctccttgaacacctgctatgtcagtaaggtgtaaggcaactagaatgactttatttgcttcagtttttcattgattgtgaaagagttgttcataacgattaagccatccaagcgaattggagccattcaattttggtctggttcgcccctccctctcccctattgaaggtccaaaatagctaagaaagttgccgagctaagtcattgaaacatgtctttggattgttgcatgaaaaattcagtttttcttctaaatttgctagttacccatgacaacttgctttgacatcaagttgtcaagttccctcaaataagatgtcatcgtaggtcgatgaacatggaaatcttcctccaaaggaatgtatttgtctttgttcacattcttgctttttcttgaagaccccatgaaaaaattggttgaggacttgttggagagatttttctaatcttataaagttaatttggacaaagttttgcttcctttatttattataataagttgccttgaataagaaaggcttacaaaatctccaattcccatcccttttcctcactaaaagtactggagaggcatatgggctggtatttggttgaatgaccttatccttacaatctcatccaccaatttctctatctcaaccttttgaaagtgtggatacccatatgatctgatattaacaggggcagctgtaggtaccaaggcaattgagtgattatggcttctgaaagggggtggagctattggttctgtaaaaatgctctcatatttttccagtagagttagcaactcctcaagatagttgctagttgtcaacacatggagagtaggttcagcacagcaaagaacttgaatgtaaatcaaagggctcatgaaatctctacctcctctgtgcaacagctgctgagtttcatcacataatttttcaaaatcaaagagcacaggatcataacttcccatctcgaaaactccaaggttaaatttaaaagaatgttgctgcactttccaattaaatccaggacacaccttataactttccattttcctttcattgctactgtcacaaacatggcaaaaaccgttactatgagaaccttcaactccttagctacccttgcatccaagaagctgtgagtacttccactgtctaccaatatcagtagcttcctgttctgttgcttgccagtcagtctaattgtgtttgtaccttgaattccttccatagcatgtacagacagggtggctgcttctagcttttcagatacttctccttccaataaatcatgccaaacttcttcccttcctctcctaactgcccttcagtagcctgaacagtgctgtcttttttctctcttcacaaggccattaatgtttttatgattacattgatgacctggaaagtacttttttccacatttgaaacagggtctatgctgtctaatggcactttggttattacccgagatagtagggtttttattggagggttgctttactgaaatttggcttccaaggctatatgtaggcttatgtgcacttaggggtagtttctggttgaaatttacttcagagttaggaggttttggtggataaggataattttctgagtggtgtgtttgttttataggtgaagattggggctatagctttggaactgttggctaatggaaatttggaatagtactggtttttctgctagaattcagaaattgttcctgaaattttgcaatctggaaagcatgtgctagagtggtaggccttaacattctaataacaggcctaatgtcatcctttaatcctcccacaaatacagacagaaaatatgcctcatccaggctaggcctaagcctttctaccctaattctcacattctcaaatctgacttggtagtcttctatggttctctcttgcctaatcttcatcagctcctccaccccatcttctaaggtctcttccccaaacctcatacaaatatctctctcaaattcttcccaagagtgacccctagcccccttaacctaattgtggtacaatgcgtcagccctatccataaaaaatagactagccatggccactctttgtgctctaataactctattaatctcgaagtttttaatacattaccttaaccaagctctaagttcctttccatcgatggtcactaatttgattttgggcaaaaatttaggcacacctccattttcagctacagatccactgctgtggtgatccctcagtgtggcagtgcccctccaggtggacttggaagaattcccttaccttcgaggcccactgcatgattactcagtgttccgataggacctccaacacctttgctacttccttctgaggctcccttggcttaatcagggactccaaccctaaacagatggtgttttgggtttcaatagcattctatctgatttcttctctcagcttctctttatctttctttgcattttcctgcaaatttctgatgtgatcttccatctctacaattctcgtttcttgattcactgctctggatccagtcatctttcagctaaccacttcaaattcccacattcttgaaccggtctgatactaaatttgtaagaatctaggattaattttccttaatgtaactgagcaatataatggatgagaagagaagaagaactaaaaggtgagattgaggatgattagaaggaagagatgagaagagaattaagagcaagggagaaatagagtgtgttattgataattcttcaatgccatacagaaattgttgcctcttatttatacaagaatattaactgctctctaactaattctgttataaccatttttcccttcaaaactcgagctatcactgaactccctttttcttctttcttttaagatacgtaacaaggagatacaaggatctcaggaaga

SEQ ID NO: 5681 - DNA, 2305 bp, Manihot esculenta
  Intron number 3 from transcript cassava4.1_007284m (locus cassava4.1_007284m.g) derived from phytozome v7.0 (chr-ID scaffold09702; pos 366974 to 369278)
acgttaaggcttttgctttcaggaccaaggccgtacgtcattcaagtaaccgtcgcattccttacttgtcttttttctaatatatatatgtatatgcaatccaacggtagatttggtaaaagtctaccaccaaaatggcttactgattgctttatttatattattatattgcgtgagaagtcaagcgaaggaaacattccagattgtcttgtatttactcgatgctttgtaacaattaattgttattgcaaattgttgtttactgcccagctgtaatactctgatatcggttatctccagtcacatgctttgctatttctcacttgttgggatttacttgctggggaggatagtggagggaagatttatgctagaacctatgaggaaaacatgatcaattctcagcaaattctgccgctgttaatatattatgttgttgtgataggacttgtgttactttgtgagggaatttttgcttaatgtatgaaagtattccaaatgaatattctattctaatgaggtcccttccatttgagtttgacttattaccaaccacagaatattgaaatgcattcaaaatttattctggcaaggtggtttatattttaattatttttaagttttttaataaaggtcttagtttctatgataattcaggattttttctagcaagtatagagacgcatggctgaaaaattttatactatcattatccacactacctttttattaaaatttttgttttttttctgaagaggtttatttgcatctattgttacagtcctaatcataaagttgcttgggcatcttttggatgactttttgccatcattttgatgcttttcttaggtcagggaccactgggtttggacataagaaattagttagtttgattgcattattatgacattaaagctttggcttcttgtttaaaattaacaaccatccttcattaagaaataaagctgacttgaatgatttttaacacaaggttcacggaaaagttttagatagatgttatgttacatatttctatctgatcagaatctataacccaaaaaagaattgcatttgaccctggaaaatttaagtaaagctttagatgacatcataaaaagaaatcagaaacaaactttgtactttttcatttataactggatcccattgaatacaatacagtgtttgtagtttagagatttatggaattgaatcttattaaggtttcattgctataaattggaaaagcatttggtaaaattggaaaaagaaattcagttcaaaagctcttttgtctcttgaccaatattattagtaaaaaaccattttatttcgtatgcacacacaaacacatgttaaatattttaacatataaaaattccatgttagcaagaaaataaattaaaattttttaatgatgcatcaattgccatgtcagagacggaacatgtcattcatctgttagataaaattatacatatttagaatatacagaaaaaattggtaaaatcaaagaattagactgaattaaaaatctgctcaaagtttggtttttgagaacctagattctgaatagatggttgtcaaagttctatgaaatatttattcctaaggttatcaagcatcttttgcaatttgattagatttttcatctgatgattccatcacatttgacgtgaaaattactgattgactctctacacaactgtcttctcactgatagaagttgtgtccaatttcctcctctagtctttcattttacagaattctttgttgcttcatgttagatttgctaacatttcacaaaacccaatcaagatatttcacaattagcaaggggtaaatcaggcagagagaaatctggtgtctgacaaagccagcaacttctgcttattagtatgtctggattttccataacttagttgcttgagttcgtcttcattttgcaacaacattttagtcataactcaaatcacttgctttactggattgtgctaatgtggctcaatgattcggtctttcatgtcactttttatagttgctgtctgttaccctcatacatgcttactttggctccctactttgcattatagccttagctcttgactgttcttttctatgtatgtactatatcttaattagaacactggaccaggcaagtaatatcattggttaataacttatttttggatgttaaatataaatatgtattaaagcagaatttatccatcatggttatgtcatccattggtacatctcctaccagttgaaagatcttatttttgttcaaatattgcagctgtctaaa

SEQ ID NO: 5682 - DNA, 1720 bp, Manihot esculenta
  Intron number 4 from transcript cassava4.1_019191m (locus cassava4.1_019191m.g) derived from phytozome v7.0 (chr-ID scaffold07991; pos 74600 to 76319)
tctgggagaagctgaagttggcagctgaagagaaggtatagttctggctttaattacttctgcttatgagaatctgtttataggtggataagagttgaaaggcttttttttgtgtgtgttttgatgaaaacctctttaatggcataggaattatcaataattataataattttttctgaattcaccattgtgcaaatcgtgtatgccactaggttaccaaatcaatgatacaccttgatcatcaattgtgattgctggaattaggttgcttcaccacctaagaggagcatgttgaatccattctcaagtttttttttttttttttgccagaccactctcaagtgaaaacaaagaaaggaaaaggaaaagatgctttccttgtggagtttcttttatattttgaaaatattcatattgggtgtgtttgggaagtgtaaaaatgatagagttaattcaattgatgttggagagtttaaaattgctagaataagtccttttagtttagtaaaagaaatttcattttgaatgaaatgaattaatgccaaaagtggcttgattttataagaatttaattcatttatatgatgatttatattgaaagcccaaaacacccctacttaagttatatttatttacttataaacataaactaggcaaaacaagagaataaaaattatatatcatcgtaaaatttattcaaaacatgaattttctaaatcctttgaattggactctatcatgaaattcgtttgaaacagagtgattgagttgttgatagcaacccatctttgataaatatgaacaactgttatatagccattgctgtttgcttttagatattcatggactctttaacatgcttttgtttttggtggcaaggatttaattaagggaatgtggtaattggagcatgtttacatgccaaaatgtctggatgatgatgatgatgtaccttgaaatgattttttcgtagtaaataacactttacatgtaatgtcatgttcaagttgtgaaatagcactgatctagtaatatctatatggaatggagaccatgtgaatgtagatcaaacagttcaagtgaattgtattgattttggtcttaaagttcaggaattgcttaatttaagttcagcattaggttattctggaatggattattcagcttaggattgaagttctggtgactcttgataaatatgttattatgcaatttgcagcccaaagaattgaagttgtaattacttgtagcatttggataggttgttagtggtgttaccacgtctgccatgcaaaaggggaaatcttgggttcattttgcggaattgtaatcagatcaaagcaattgctgttgtgatgatgatttcttgaaggtttctcttgttatgatttggtatcatatctggaaattgaagcattacattggaggttgcttgtttcaaacttgacttaagttagttgttagggataagtccatttatattatgtggcaaaaggagttgctgttatagttagggggtcattgcagtcttacttgctcaggaccagtaaagaatgctttgaaaaattacctgggcaaaacctctttgtagaagcatctagaatgtcaaatctagctttttaaatatgggggacaaggaattgttttgtttcctattcaacaattgatatattgagaaatacttctacgaactaattttggtgtgcttgtgaatttatag

SEQ ID NO: 5683 - DNA, 4387 bp, Manihot esculenta
  Intron number 4 from transcript cassava4.1_015736m (locus cassava4.1_015736m.g) derived from phytozome v7.0 (chr-ID scaffold03648; pos 27261 to 31647)
tattgaagttgaaagagcgacctcggataggaaaggtaaactgataatacagcatttgccattaaattcttgagtttccataaagtttaatgcttcatgaagaatgttcttggattaataataactttttatagaaatcaaacatgaaagttccttgcaagagatcaaaaagaggaaagatgttccgattgtgcatggacatatacatattcgcagttgctttttcttgttgggtttatcttattgtttctatttaatttctgcaatgtgtttttgcttctaataaagtatatcaatcactaaacaagaaaacgactttttccattaagaccaacatcaaacaaaagtcaaattcttaatgtaaaactttgtcctaacctaaatgtttttctgaaggggaaaatttttggtggaattttgttatgtgccctcaaataagactcttgttaatgtttctggttttctttgagaaacctatcgaattgtttgagaagaattctctgatctcataaaattgatgaataattttctgaatattgtataaagagaataatgcctttttctaatgaaggctacattcagataaggattgcatgaaagacttgaattcaaaaaaatacttcctatcttttcctaaaatttaaaaataaaactaaaaatacaattaaaagttaaactaaagttaacaagctaagctttatttattgtaattactttgaccagaatttaccaagtagaagggtaatgcacatccattaagaacctccaaaggaaatttggcagtgcagggaagaagtgaagagggaaatgaggactaaacggaattcaataataggctacagaatgtgaaaaaaaatggagtttcatatgaatagtgtatgccagctaaaagggaaacaaagaagatgcatgaggtttcaaactcatgagtcacacaattacacattgaaagagagtaatggaagatgtgcacaattatctacgatgactagtttggttttctcctagaaagatcgattatggaggcagttttcctaataagaggattgatggataattttttagggaaaaagaggagagagagagagtataattcttgtaggcggttcgcattatttgattcaaacctgaaaaagctaatggacagcctaaatttggttctttgacttcaatttgttttgaaattcaattcagcttcagtttccataagcaaaaaactgaaataaactaaatctacctgaatatcttccaaattctttcgtctttcttgtgaaggaaaccaaggacaatatgacactcaacagactccctccctcactaatagcctcttcaacagcacgagttcccacaactaagtcttagcagtccatggcctcccttaggccccttgtttgaatttcctcccttcctcttcctagattaagatcatgaggatgttatttctttttatcaaagcgcaaaaatcagaacttaaaaaatgctttgattgctgggcagggtgatatcaagatctcctgggagatagttttgtgactttgtccactttcaaaagtactcctttgttatagccatggtctcttaaaccaaacattatgaggaccagaggatgtgattatatttttcagagcataaaaccagacattaagagatgctttggttgtttggcatggtgatataaagatttgcatggagaaagctttgcctgctttttgagagagctcctttgatgtggtctggtctttttttttctctttcaataaaaggtgaattaagcctggcttctccatttttctatttttaattttggtctcttttgtagacatttccaaaattgttcttttattgtttgtttctttagattagctagaaaaactctctcttgaggtggggtgtccaaaataatggtctatttagtaactttcgttttatctttttgttgtttgcctctcaagctttcgctccttgaagtgttcctaattgctattgataaaaatggaattttatggtgagagaacttgagaaattgggagattatccaacctagcaaacccaacaaatcagttcctccatgtacttaggtagtctctcttatgggctttttatcaaacagaggttggagaaaagaaattttgtcaaataagggtggcaagaaaaaattttgtcaaacaggggtgaatttgtccacctcagcaaaattcttaaacctgccgctggtctaatcggcggcagaagccctggtctatcaaaccggcggcagaagctctggtctatcaaaccagcggcagaatttaaaaaaaataataaaaataagtaaaaaaaaatattagcatgctgcttgttagacaaatgacaagctttttattttttttaaaaaaaattaaaattaatgtttgctgacagagaaattctatgccagcatatgggcaagtgcccttgccgtgtacgacaaaggcactcgccctttttatttttttaaatattaataatgtataataatattaaataattaaatatattttaaaataatatttataggatttataatgtttactcaaacccaagaaagatacttgtcgtaatcctctaaaaattgaacagccaataaaagaacaaaattataatcaaatatctttgtaacctgtacttatcctgcttactttgtaaaactgcattttctttttctctgtatagataataaaatatactttttaatttataagatttatataaaatattattattttttatataaaagtacaatattattattttgattctgttgagtaaatgcttgccggatatatctccaatttccaatctccgatacttattgttttatactgatttaaaaattgattcgaaaactaccaaactcaaatttatgaaagaagtttaccgtaattctctaaaaatccaccggccaatgaaaaggaataaaaatatagtcaaataagtttgcaggctacaactatcttacttattctgtaaaagttttttttttttcattgtacattttctaatttaatcaagtaataaatacaatattataaaatttattttttattattatacaaatatatttagtattatttatataatacaagatatccctgtttgacaaaattttttcttttccacttctatttgacaaaatttcttttctccaacacctgttttataagaaaaaaaaaaaaaacccttctcttcctacagaatttggttattttattttataattgtctaacgcaaccgactgatacactactctataaccatatgcattttcgctgctctagagataccttaaattatcatccagctgtgcaatgatggttttagaacaaaaaagagtattagttttgtaaaggtgttgaaagagatgaagtagcagtgactagcatttcgacaattaactgaatataatcacaattagattggtttcagttatcaatattgagaccttatcctttcccagttttcagtcggtaatggtttagttgataaagcataaagtatatccaagaggatacaccatagtgaatgatttttgtagttgacattcacatattggaaatagacaaatacaagaagttacaagagttatagaggaaaaccctagtctaaaattaagtgaaaagtaaaactaaacaaagtatgcaaagtagcaaacattatatcccaaaaaggctttcattttaggtatctagtctctattatacaaagacatggggcatgagtaggaacatcaaccatatatatgatttggagaatgatggataaagtggggaatggagctcgaaatcagatggatggggggaattgcctgccattttcagtttcttttatggactttgagttcatccctacaactacgtccatcaacatgtgtctaacataggtatgccagcataagataaaacgtcaaagcaagaaagctattatagcgaacacagatttcttacaacatttcttaggtgtacaaggagtatatctagatgtcaactttttataattacaacaaatggacctctccataaaaaaaaattggacttctgaggtcagcacattagtacaattgaaaataaaaataagagtgaagctcgtcaaaaatgatgtattgatgtgtaatggggttcacactcatagaggtatttctgccagcttggagaacactcatattgatattattttcttctatttgcagttgcatttttcttctatgatgataatttttttttgttcatgtgtgttaaataatgcatatttttatttgagttggatggtcaaggcaaatagcattgtttattagttaattatggctttttgtggaggtaaattacccctttcttattaccaattgttgcaggcagtgagcattttcatagac

SEQ ID NO: 5684 - DNA, 2706 bp, Manihot esculenta
  Intron number 4 from transcript cassava4.1_027510m (locus cassava4.1_027510m.g) derived from phytozome v7.0 (chr-ID scaffold03332; pos 487180 to 489885 reverse strand)
tggtcagcattttcattcattgattttccttcacgtatttcactaatgatgcatcctgaatacatggtttgtctgtgttgctagtttatggcaaaagcaaacatttgaatgatgtgcgaagtggattgtaatttatatccttaaatatgacatatatagttctttcttttcaataaagaaaagaatgattctgttcatttgaggcaagagctttccctgcttacttagattaagaaattatatttgattcattccctcaaatcatgaaacacacaattatgtgaaggtattgttaagaaggtactactccagattcaccatgttcaacaagcaaccccactattcaccttgttcaacaagatttcactagaatcatatattaagtaattataaactttatacctagtcaacagacagaagtgaatcaaatttacttaacaaacgctacatggtagttgtgctgatattttcagatttctactattagctgctttataatttgaagacttagtttcttgggagattcactaatttctaacttctttgacaggtttctgttggaaatgggtgggtacatttggttactttcagctttttgaagatatgaagggaaattaacttattcctccctatcttatccgtgaatcccaatttcttatctcatgtgatttgtatgtttgtctaacttttgaaagcaattcattttttgcttaaacagttatagagttttattcaaggtagtgaatatatgaagaaattatatggacattcaggtgtgaacaagacaatagttaaggaaatagaaggaagaagttgtatatttcatattcatttaacttgaatttgtgaaccattagctaaggtgactttagatgatgtagaaggtgaaacaagagtagagaaaagattgtgattactagaaatgttatcagaagcaccagagtctaggatgcatgaaccaagaggtgaagtcttagttagacaagtaaataaattaccggagtgagcaatgctagaagatggaggctgttgcttagctgcttggaactgcaggtattctttatagtcctctccaattaaagtaattgaatctaggtcctgaaatttattggtaggttgtagaagcataccttcttcattagattgggcaagatgagctgctgacttaccagtattatcaggttgattgggccgtggtggtcggccatgtagtgcccaacatgcatcccgtgtgtgacatttcttatcaagcaatgaaacttcttccctttacttttgtgattgcctccttgtccttgatttccttgcacagccaaaactaagaattccataactgtagcgtcactcttactaagggaatacgtaagagtctagctgacacatcttctaaagttggaatacctgaaccagtcaaaatttgatctttcacagagcaaatgtcatatcgcaattcaattaatgccaaatcataaaaaatttatctcgttgttcttcttgcgcatcaacatcatcactaaggggcataagagaattaaattcatttttaagagtttctacttgacccaaataactagccacatcctcatgattttgctgtaagtgaaccatatccgacacaaccttatagatgcgttgtatattattagtatataatgttttggccttaatccaaaccttacaacaagttttgcaagattgaaataaagcaagcaattttggatctaataaatgccataaaagacgacataattgagtatcaatcttaacccagttggatctatcaatggcagtgatatcagtggcattttttgttaaatgatcatcatacctctgtcctacaaaccataattctactgatacagtccaagacacataattattactcccttgcaacttcaccgtagtaattgaaaaaaagggtttaagagactcaaaacctgtattgagggtgttttgcttcttagacatgtcgggagagatcctgaaacaataagggaccgagtagggatttgaatatgcaaaaaaaaaaaagagctgaatctgccaagaaaaagggacccatgccatgaacagtaaatctgacgttactgttcacaaagggcatatgaaggcgtgctgaatcaggtggtcggacctattgggctggagttgctgtcgccggacgatgtaggaggaagaatcgccagcgtgaaacgatcgctagaaaagggtgcacgcgtcggtgcgtggggcgagatctataggcggtacttcaccggaaagtagatcggacgccagcgtggagaatgagctgggtggtgagattaactgatttctagaaagtcactaaagtaaggtggcagatctgccacgcacaggtgaaccaagtttcttggctttgataccatgaaaatttgggtcaggcctaactcaccccaaaagttagctcaagggggaggagtgcctatggccatggcccatatatgggccacattatcctttccacaactgatgtgggatttattagtcaatgcaagggactataggtatcatttgcaaggaagactagacatttccctcaattagctttccctagtgagataaatttgcctgcataatatttttttctactctctacttttctcctgcattattttgttaagggtggaatagtattaagcagagaatgtgactttaaatgaaacttgattttgaaacatctcttag

SEQ ID NO: 5685 - DNA, 1790 bp, Manihot esculenta
  Intron number 2 from transcript cassava4.1_017578m (locus cassava4.1_017579m.g) derived from phytozome v7.0 (chr-ID scaffold04681; pos 199284 to 201073 reverse strand)
ttaaggaatcatttccaattacgaataactttcaggttcgtgtacatatgtgcttgtttgtttgtatttccttttttggtatttacaaattttcgccttttatttaattttggcaccataaagagaatgatataaaaaaattagcgtcttctgtacattgtcagactgccctgatgggtgttgtattagtagagttgtcttttcgtggtgaccgatgattgtagttcaatatagattttagcttggttttttggtttggttatggattgggtgagatttgagaatgtatggttcagtatagattttggcttagttttgttactcgatttggttatgggttgggtgagatttaagaattggaataataattataaagttgagatttgagattttagctttgttaggtgagtgattgttgatgaatagcgtattacaccatttgattggtgttactcgtctggctactcagggcaattaagttggcaaagatgagtttgattacatatatagtgggtaggagaaataaacctacaaatgtggaaatttgttaatgttggcctggatctttctaaaaatgtagccctaaacagatggaaaggaagaaatggattcatatagcccattcaactagtttctatttggttttatttggactggaataattttgttgctccttggcatgcgttgtttgcttttgtttttctatggagtgaaatacttattcctgcttcacaagcaatgccatcctatttggcatacagctttcacatcaatctagtgtaaggagatgttaggaagtgggcttgtatcatattttgtcatgaaagctgctgtttcaaattccatcaaaattattagttgtttcaaatgcattgtataagcaattctgtgaaattcagtgtaagataatgtttgatatgcagagaaaccgaaaaaatgtaaagaaaaacataaacagaaaagagcaccattattatataaccaagctgctgtttatcttttctgaatctcttgtccaatcactgaattccaaatcttttgctgccactactagaaattagtcaagtggtcaggtaaacaagactacaaaataggctgaagctttatacttgtttttcttgactatactaggatattatcaacttgtgtcatgaatttcctttctttttggatttttataatgaatttaaggacatatggataaattttatcctttctcactgttttgtttcctcgcatgagtctcactgttttgagttatgtttcctattctcttttgagtactatacaacagcctctgtttatctcacaaaccaacctcactgaacagctttggaaattaaatccaacttcagtccaatcacaacctgtgagagatacaaaaattgtgctcatctaaaacctggagttttggcatgctttcatatgtttagaatttgtgtaaagatgcctcatttctgccaatggtattaaattatgcatactagacacttctgtttgtaggtgtttctgataattgtgttttgaatcgaaacttatatcttctcctgtcaatttttatttcatatttctggtaaatgtattttatggatgtggattagttattgcacattctctttaaggattgctaataagctacttgtgagggtagttacacatccgttaagaaatttgcaaggtttgtcttattagtatttggatgaggccttcagacattctctctggcatgtttgttttcgtatgtgcttgatattcattattctatggttttggtgcaggacaactaaaag

SEQ ID NO: 5686 - DNA, 1789 bp, Manihot esculenta
  Intron number 5 from transcript cassava4.1_020373m (locus cassava4.1_020377m.g) derived from phytozome v7.0 (chr-ID scaffold03150; pos 528351 to 530139)
gctgcattgatcgctgtgtttcaaaatattttctggtacgccattaaccccttttaactaatggttttaatttagaccagtgctgtgattgagccaagttgaatagataaaatgcaatggttgaacttagtttggaaactcaaaagcccaaaacacaacttgaacataattcaacttttttgacacttggacttgttgacttgatcatcattagaaattttaaatgaggatggtgttagcttgaattctaagtctatttaaaagtttgtttttagatgaaatagcaaacataatgatatagtatataaattttataatatgaatttgtttaaaatgtataaaaatagatactcttttatgctcatgagccttaagccaaatcaaatagttcaattggcttacacctgaattactctgaccaaggtagtcaaaagcaaaaggcacttcaagatgatgggtctttgcatctcctgaagtgtggagaactaaaaaagcattgaaatacaactacgctgatgttggcttttcccctgttctcaaaagaacactaatttgattatatgcatgagaatggtagttgatttgagaatatattcggtgcttgtcactaagggtgagcaaaattcaatttaaatcaaaataattgatcaaattgaattgattaaaaattgtgacatatttggttatttggtaattcagtttggttcaaatttagctttttgagatattagtttattcagtttggttcattttttaaaaaaagaaaaaggtaaaatcaaacagaatttatctatgttgtcttagggttacatatcctaatctttcactttctctttcttttctaatttctactgcctaacatctctgtcctctgcattctccccccacttctcttcgagcattgacaacacattctctcctgtctctccctcactctctattggacaaggaggcacaataggcccatcgttaagaccacaggcatgaagtcttcaatagtccaagaaggcaatattgagcattaacacgacctccacttgaacattgatgcatcggtgcagcttctatcgcatcactgactctaccctttcctgccaccattgtccgcctcagaaactcaccttcaaagcgcatcaccaacaatgcttctctttctttctttctcatgatttcttcctttgctttgtatttttttgtgagtttgcattgtgaaaattgagatcttttgcctaaagtcatgcgtccatctcctttgaattgcttttggatattattgtgaaattaatttcaagcagaattgaattgcaaaacctgatctatatagttgatcccaactagtttgggttcaaagtttagttgtgacttttgagatttcttttcctatctaatctctatctcgccaagagtgattttctttgcaatgcttcattggtacggaagatgaatggtaaatttgatgccatgcattgtctacataagacagaatttcatgtggttgggcaacaaaagtgttacatgttgagattgaaattctctttggatgttgtctacaatgacattagctaacaaattgaattgttgaattaaagaaaccaaattaatttggtttggtttcatttaaattggttttgtttcagttttatattttgtaaaattcagtcaatttggtttggttcttaatcaaactgattgattcctaaccactacttgcaagttgaattgctaatgcatgcagtaggcaattttcttatggtcttgtgatggaagttccctttggttttccaggtga

SEQ ID NO: 5687 - DNA, 2261 bp, Manihot esculenta
  Intron number 5 from transcript cassava4.1_025763m (locus cassava4.1_025763m.g) derived from phytozome v7.0 (chr-ID scaffold06914; pos 1390332 to 1392592 reverse strand)
gtttgaactttgggtccagtgcttcacatattctggtattatttttgctgcatcctttttttgtatctctccctttatgtttctatctggcttctggcagcagttagactttgatattttgttcttgtgaagcttaactttgatgtttgctgataatggtgataaaagataagttagttgagtatttagctatccagtaatttctttttatgtggtagtaatggcgagttttaagccaccaagtgctttctatcaatttgtttttagtgctttgaccccttcttttccaagcacttttaacattatcaaatgagcaaatcattgaatttaacataatcatctttctgttgctcctattgtaactatcatgttctataagtttttggaatttctctcttaagaagttctgctactggagaatgatatgatttgaaaatgatgggggtttggttttcccattttgtttttgtggataagaggagggttattgcctagtgatggagatgcatgttctctctctctctctctctctctcttcttcccatgatttgtagtttgtacatgagttaatgttgaccagtacaaatcttgctaattaggaaggtattagctactaaatgagcagattctttggattctaattaggcttgattgtagggatttattcactaccatgttgcaaatattcctaattaggttgattttttgtatataaatacccaaaacttgtaaagctcaatacaattgaaatttacaccgaaaatttgtcctaaaattgttcgtagtatcagaggttcagagcctgctcatctgttggacctcctttaattatttcacgctccattgaagttctaggtgtttcagggatgtgttgaatcctacatcagttcaggataaggataatggccctttaaagaggcccttcacctagcttttagagcgagttagacctaacctaaatttaacggttaacgaatagttatatcttttatgggaattggtcatagatcttacaatcacaatggaattcttcaatagatgtttataatagggtagcaacaacaataacaatgacgacaactaagccttaatcccaaaatttttagggttggctatatgggtcattttctcgccattcaactctattagataccatgttgcattgatattcaagacttgtaaatcctttgatacaactttcttccatgttagcttaggtctatccctttccattctcactatgtaccctgttaatttataagtaacaagataaaccaaacaaaaaattctcatattactggggatagaattaacagggtcaattttgactttcttattatcagggaacagagagttgactccttccaagtgattgagactagtaaaggagttaaaatgattgggaatttctagcagtattgcttgtaggtttaggttatatatatatatatatatatatattatgaagaaaaaaaataacagggacataacaggattagagatcaggtctttggcacatgatatgcctctacaataattgatgttaggacttgaaattttaaatagaaaaattcctaagtaactccagaaggcaaaattacagtcaagtaaatagggactaaccacctaaaagtcataagctttgaacattttttttctaaaaaaaatttgagacaattttaatgtaaaaatagcaaattcttgtttgatcttttgattatgagttgcaattgtggccaaaagggtgcatccttgaatatccatttgatcacaattgcaaactcttattaagtttgggctacattggaattggctgctactgtgattcaggccataattgctaattggcataaaatattaagattttaggttaaaaatgaaaaacaaatatgattcttcttaattccattaaaattcattttttattacatggtagaacagctatgctttaatgtgaaattcagaactactactgatctaacctggtgacttaacttataaagcaacaaaagcctgactgaagtttagatgccgatcccataggacaaaatctttaagttgctaaaattggtaagcacttgaaaattgaaatttccatttaaatccttctgtgtctaatacatttgcatagaatatcaggcattttttattctgttaagttcctttttttttccatgtggcacttatatctaatgctcataattagctaatagcttgttgctttaggtatttgatcggagaacaaaaagactagtggagga

SEQ ID NO: 5688 - DNA, 2649 bp, Manihot esculenta
  Intron number 4 from transcript cassava4.1_017643m (locus cassava4.1_015942m.g) derived from phytozome v7.0 (chr-ID scaffold08265; pos 3400260 to 3402908)
cttatctatcttccaaattttgcgcccaataccaggtgagagttggggagttttggtatttgatgcttcctacattcaatctgtgctgtgtatatctgcttcaaattgccatccatttgattagggtaattcactttggctactaataaaagtaaccaataatataagggaaactcatattgctctatttggattttctttgtcattctacaatagcaaatttataactgactgatcaaagcactttgatttgctgtttcctatgtgagaatggtttaattctttagatagtttcaaagtttccatgtctttgcccttcaaatttatggctgtacgcattattcatcaagggggaatccttggtcatggatgacaaagtccttccaagctggccacaatatgtctatttctgttgtttactttcacctggaatgtgaaagaaacacagtcaagcactttgccttcgtcaaaatgctctctaccatactcctttcaggcatgttttttaggatgtggaatgatatatgcgagttgggcccagaactggcccagtcaaactctagatcaggattgatcaatggttcttgagcttgactcaaaccattactgctctggggtcattcctcccccttgaaccatgaaccaccagactggctcggcctcaccatttttggttctgacctgcctaatttatttaaaaataaataaatagataaagagaaacaccccaaagtcaacagtcacttgatcatttaaaagttcatcttatttgctacttttccatttagccatttttcttgcttttttttttttaaaaaaagaaatgtatatgaaatggaatggcaattttacctttgtaaaaccatgtataattagttttaggggaattttggaaagatgaaaaatttagaatttcttataaatatccacccaaaccatttttttttggaccaacattgtctaattctcctaatctctcaattttcatggtctcaattagtttctcttatcctttcaattattttcaactttcattttttttttgtcaaaatctataattttcctaattagttaccctgttcactcaatatttcatccgatttttactctatcatagtcaggcttctctatgtattttctttttcctaatccaagcatttatacaacattttaagtgaaggttcttcaaaacatccaaaaagtgacaagaataaggaaatcattgaggaaactcattttttctttaatctgaattttaatcaatagataccaacaaagtccatgacatgctgcaaaatcaatgaccattcgtccagcctagtcaatttcctacataggagagtcaatatgctgacttggatgaaaatgaaactccaacacaaatggagtgaggaaatgctaaaactcgacatattcaaagtgcatttcctaaatttcatttaggaaatgaaagtaaagtatagtatggtcgattatgcaaattcaaatgaagtggtgggtatggaacatttaaatgtacttgcaaaacaagaggagatgtatgcatctcaattattaaaaagattaagatcaagcctcattattttccctaaaattgtcttatatatatatatatattcatttccctttttttttatcataaccttaattcatcattttttttaaactattgtaacccaacacattttatttaagttaatgcacattctttttctatcaattatttttgtcaccctccattttgtttgtacattaaaaattttaatttgtccaaaaaaacaatgatttggttgattgacaattagaatcaaaagcgaactggccttaattcatgtccgcattggaatcaaacctgaacaatgaggaatgggtccctatggtcctgttcaggtccccccaccccgcatccccccccccccccaaaaaaaaaaaaaaacgactactggaagtggcttgtggctgaccctagtattctctatacttaagactgaggaactatcatttatattgctattgcatcactagatattagttagaaacttattaaatgactggtaggatgggtagctacttaaaatagttaataactgaaatatttactaaaattttgtattaaaatttagaaagagtcagatatttgtgttttaatttggaaaggaaagtttgggtcaatgatatttatgtttttgattccttctgttggaacttggaagggatgttccaaataaaaatttctcaaagtagatagatttatgccaaccttgtgctgttgagaagcgatcagtttatgatctatcttctgaaagctagttttaaggttatgcatcacttaactagctgcagaaagatattaagaatttttttaagataactgtgagaacaaatggatagaagttattcttatgtgtttggacaattgagatggtctctagacttgcatttgtacttgaatattgatcaaggacatgggcctctcactctctctcacacacaagtgtctggttttttgcttattatcttaggtagataagtttgtaaaattttccttggtgcatgaaacacccccaagaagatggttttcctttttctttttccccttttattagctttcacttgtggttattttatttcagagattttgatccttgg

SEQ ID NO: 5689 - DNA, 1011 bp, Manihot esculenta
  Intron number 7 from transcript cassava4.1_003058m (locus cassava4.1_003058m.g) derived from phytozome v7.0 (chr-ID scaffold06918; pos 64872 to 65882)
tggaggtatatgactactttgtttgctccaagaatcaatagaatgttttcttatgatctatgtgtgataatttttttttttcagattaattgaaatgtagaagttattgcttccctgaattctttgatttggtacctagtgtactggattatgctagattcttgagcataataacctatgtattagcctggtttaataagattgaaattatttgctatgttttcttttggattagaatttttttaagcactgtaaaagagtgtacagtgtgatttcaggtttatttgaccaaatacatactgcatgtgacacctctgctttgtaaggtttgaagtgtgccctgtttctctttgtggctatgcatgcattacttcctcccttgttctttctttatctctcctctcgtttcagtggctattcctgatgaaccattggtgtttgaaaaataggcatcatacatatatcttgtgtgtacatttgattcgtatgatttttggagacattatcctcggttataaattctgatgagcaggcctgttggaggtattataattaatacaagttaacacattgatggctaagatctgaagcagatggtcatgtagtgtttgtagatgcatacaagacaagtataagtggtgctttgttttaagagaagtggagcattggggaacaaaaacttgttcttctggttgtagaatgtaactcaacatgactaagtttgttagatgtcttgatgttgattaatgatgcaatctttagcttgatccaccacattgagtcttttttttttttctttttttttcccggggcttgtcctacaaaaggatttgctgtttgagaaaaagtatgcaatatagttagctgtattttttttcaactgtctataatgtctgcatcagatctgtcgtttactacatcacgatgataattattattgaacaccgtatctcatttctcaaagttgttgggttttattctaaactgaatttcaataatatcttccaggtt

SEQ ID NO: 5690 - DNA, 1261 bp, Manihot esculenta
  Intron number 3 from transcript cassava4.1_001924m (locus cassava4.1_001924m.g) derived from phytozome v7.0 (chr-ID scaffold03317; pos 81665 to 82925)
agcaacaaagaggtgtttcttagggagcttatcaggcatgttctaatctttattgctttttgccatttgtgaaacagcttccacatcttcttttctatcctctacctattcgtgaaacaccggtagaggttgatgttgattggacatatattgttaacgtcattggtgatgattggcaaataagattttaaaattttatatttgtttcaatggaatacaccatagaaaaaacaactagttgaactgaggttaattaatttcaagactatagatgaatctcatcctaatattctgaagaggtctaatatttatatgctcaagatatgttatttcttatagaatttctctaccatggagagtacaggataatggatagaaacaatgcaaacaacattattaatattctttatgttgtcttttgaagtttatatatttttatttcatactgatgtattaggctagtgctgtatttatgttttctgctgttttggatggtatgttatttgaggcaatgttgattttatgcatttgcttgttttggttgtgttataatattttttgaattatgttccaattgattctgtctcacagtgtgtttatgtaattgttgaactgttgattctgtgcatttttctcatttctttttgtgactgttgattttgtttatttgctttatgattctctaaaaatagatatgccatttgtgcatttcatttgtgttgattttggccattttgtgcatttgtaagttaaaactgttggccattgctgttgaaatattagtatgttggccactttctgtagtcccaaattgggctcaaatccagctgaaaccaacaaaccatactcaaattttcagtttaattcaattcagctcatgcttcagtttggttcattattaaaataaggagtttggttcattattagaatcaaaccaaccaattgcacagcccctagccccaggggactctggaaattcttaccttttgtatcaatgctaaacaaaatgtctacatgaaatctgagctcatgtttacctccttgacctggtccatatattctttttgcacgactccattactatctctttacatgatatgacccattatgtccatttggttttagtagacaatgatgtagtgtttgtttgcttcattattgaacttaaagctgcgcgataaaagattagtgatttcaattgctcttgctttgctgtcctttagcatctgattttttagtgcatatatttatatccacagca

SEQ ID NO: 5691 - DNA, 5173 bp, Manihot esculenta
  Intron number 1 from transcript cassava4.1_010932m (locus cassava4.1_010932m.g) derived from phytozome v7.0 (chr-ID scaffold03802; pos 679247 to 684419)
aaactgggtaatcaagggctagaggtgacacccatctcactgagattatagctttcttattcaattagaaatggtcgaagattatagcttatactctttttcattaacattcaggtctccaaattaggctttggatgcatggggctttctggtggctacaacgtccctgtccctgaagaagttggcatatcaatcatcaaggaagcattcaacagaggaattacatttttcgatactgctgatatttatgggtttaacgctaatgaaatattgatcggcaaggttagagttcttcagtcataccaataaaacaggataagcaaataagaaacttatgttcaataggcaagctagcaaagcaagcgattagaagctcatgaaatgtaatttcttttattgtttatgttcaaatacttgggcttgcaggcattgaagcaattgcctagagagaagatccaattggctacaaaatttggaattatgttcaagaacaatgattttaaaactgcctcatttaacggtaaacctgaatatgttcgtgcatgctgtgaggctagcttaaaacgtcttgatgtggattatatagatctttactatcaacgtcggatcgacccttcaatcccaatagaggaaactgtaagtcctttttcctttccaggcttgctctgtcgctaaacagatattatatacacatgattttttattaagcagatgagagaacttaaaaagttagtgcaagaagggaaaattaagtatattggactttctgagccaagccctgacaccataaaaagagcacacgcagttcatcccatcacagcactgcgaatggaatggtcactttggactcacgacctcgaggaagaaatagtccctctatgcaggtacccatttaacattcttatttagtcttcctagttaggttgtttttggttcgtttaataataaggacatacagggaacttggaattggaatagttccatatagccctctcggccggggtttttttgctggcaaaaaaaatatggaaagtgtcccttcagacactcggatggtactaaacatgtaatttagttgcagtctaattctttaatgtttcatttgatgcttttcgaaactaattttattgcttacttggcatcaaccttgccttttacttcagagattattgccaaggttttcaggagaaaacttagaacagaataagatactatatagtcgagtagaaaatttggctaaaaaatatggatgccttcctgctcagcttgcccttgcttgggttctcaatcaaggagatgatgtggttcccatccctggtgggtttgcttgtcttctctattcatgctctcagttatctaatatgaactgcatacgtttagatcagctcgtcaaaatctggtttgcaatgttttcttgggctttctttaggcacaaccaagcttaaaaatctggaggacaacattggagcattgagacttaagctgacaaaagatgagtttaaggaagtctctgatgctgttccagctgaccaagttgctggtttacgaactctgaatgtgcagtatactggcaatactccacccagagatggccaagtctgaattctcaacctgagatgtctatcctagcaattacaagctgtgcgtttaccagtgaattttccgtcaatgaatttgtagggggtagtatatcagaaattattagcacacaattcctcagcagagagctgtattctttcggtgtgcttggagaaagagaataatttaccttgtctgatgtatccagagtattcctttatgaaaaaaaaaaaattcaaattatttcagcaaaatattgtcaattaatttttgtttgttcatattttttaaattatatttagaattatatcatatataacaaaatatatagtaaagttgttaccatttccgacaatcttaaatctatttaaactctaatacccgtaacaattcagttcctgcgtaggaacgagggagcctcttctgtccagctggccacgaagttttgcaggcaacaaggatagagcacattagaaggaaaactaaaactagataaaatcgaaaggagattttttaaacggtgggtacttagattacacaaacgggttgaattatttcattaaacaattgaaatataatttctcccccatgcctcgctactaaacgacctatgtcaacatcattatcatttatccgaccgagggacctgacattatctacaagtactcagatgttattcatggttcctttagtaattgaaccaaactcatcatcaccacttccatagcaaatagcaggaagggaaggagaaggtgaaggaggcagagaaaactaattggatggctgaggagcaaagacttgtaattattccaagggtgaagctgggtaatcaaggactagaggtcaaacccataatctcacttccttctttattctatggttttcaattattaatgatcagagattataccctttttctttaactttcaggtctccaaattaggatttggatgtatggagctttctggtggctacaatgctcctcttcctgaagaagttggcatatcaatcatcaaggaagcattcaatagaggaattacatttttcgatactgctgatatttatgggtctaacgctaatgaagttttgattggcaaggtttagagttcctgtcatatacaacttcttttcttaaaacaagataagcaaataagaatatttcttttttctcttttcagtcgagctagcgaggcaagcaattagagttcatgaaaatgtaagttcttttgattgtgtacctcgacaaatacttgtgcttgcaggcattgaagcaattgcctagagagaagatccaattggctacaaaattcggggttattttcaaaaaaaattatgattataggactgcctcatttaatggcaaacctgaatatgttcgtgcatgctgtgaggctagcttaaagcgtcttgatgtggactatattgacctttactatcaacatcgcatcgacccgtcagtcccaatagaggaaaccgtaagttcttattttcatttactggttttctctgtgaatttctgaatgaatttttcatcaagtagatgggagaacttaagaagttagtggaagaagggaaaattaagtacataggactttctgagccaagtcccgataccatcaagagagcacacgcagttcaccccatcactgcactgcaaatagaatggtcactttggtctcgcgacctcgaggaacaaataatccctctttgcaggtacacatgtaatattcatatttagtgtttcttactacgttttctttgattaatctaataataatatgtctgaggggattgtcctctgaaacaaacatgcagggaacttggaattggaatagttccatatagccctctgggtcagggcttttttgctggcaaagcagtagtggaaagcgtgccttcagacactctgctggtactaaatttgcatttagttacaatctaattctttaatttgatgcttatttggcatctaccttgcttttactgcagaaattcttcccaagattcacagaagaaaatttaaaacagaataaggtattatataggagagtagaaaatttagctaaaaaatatggatgcagtcctgctcagcttgcccttgcttgggttctcaatcaaggagatgatgtggttcccatccctggtgggtctgcttctctttgattcatgctctcagttatctaatgtgtttagatcagcttaccaaatacttgtggtttgcaatgtcttgttgggctttctttaggcacaacaaagattaagaatctgcatgacaacattggagcattgagagttaagctgacaaaagatgagtttaaggaagtctctgatgctgttccagccgaccaagttgctggattgagattttttgacatcaggtatacatggaagtttggcaacaccccacacagaaatggctaattcccgacctgagtcgtctatcttagcaagctgtgcacttactgaaattttgatcttaccattaatgtcagaattataagatctcgaattggagtctcagtagaaattaattataataaataaattaattagcaagctttacccctgtcgttttgtcggtttcccctgctcgaactctacagatggataatttgttacagtgggtctgtctaatatggagggccaccatcattatgaactatgaagtatttaattcaaaagaatgcaagtcatcttctcttcaaaattaatgttctaatatcttggctgacccatttgatggaaatggagaagttattatttataaaaggaaaataaaaaataatataaatggagaagttattatttcattaataaaaatcgaacaaacactcatccctagttatattgaatttcttaatagttgaatatattaaaaatataacatcaaggtttttttttccctaacctgcaaaacattgctttctaaagttgctcatgcaacaactgaattttataataaagggtcaagtttatataatctataagatggtaaaggttagcactgtataagcataagcataattgcttatctgtcatgaaacatgacagaaattaacttgcttaatggaaatcataaattgacaaatgaaatttttcagagatgaatccaaggggtcccatgcccagatttttttttttgtttgtttcttatcttgattttcagtattaaaaagaaaatttggtccccaattgatcaaaacttaatggttgtcaaataaaatctttcattgacacaagctcatgcgtcactgctcacaatccatgtcaacgtcaggagtgcctatccgacacagggacctgaaattatctataaatatagatattatttatggttccttcagcacttgaattaactaaactcatcacttccatagcagataggaggaagggaaggagaaggttgaaggaggcacatagaaaactaagagatggctgagaagcaaagacttgtaattccaatggtgaagctgggtaatcaagggctagaggtgacgctcatctcaattgtttattattccatgtttttcaattagaaatgatgaaaaattttacccttttgctttaactttcaggtctccaaattaggatttgg

SEQ ID NO: 5692 - DNA, 1878 bp, Manihot esculenta
  Intron number 5 from transcript cassava4.1_003143m (locus cassava4.1_003143m.g) derived from phytozome v7.0 (chr-ID scaffold03604; pos 104158 to 106035)
agtggcagcttgtctttgatagattacctgataaggtattgccataatcctccttcgaatattgtagttgatccatggccttttgttttcatgcatcatgtactgaaattcatattttttactcgtacttcttttgtgtcgaagtggatattctgtgtcaacttgggtgttaagtaaggttgtgaaaatatatgttctgcaaataagtagtcttcaatcctcgttgatatttccatggaattgaaaaaaggagtttattgagcctgtttccttttctaaaaaacttatagataattattgtgtccacatgagcttaggggtgagcattcggttggttcggtttaaaaccgaaccgaataaattgaaaaccgaaattttggtatttatgaaaatcgaacagaatcgattttaataagaaatcgaatcgaaccgatttgattcgatttgattcgtttcaatttgatcgatttgaatttttaataaatttttatttttttacactttattttttaatattttaaaatttaattggaatgttttaatcttaacatgatctctctatattattgaaaataatatattattatcactcatcggttttttttaaattgtttctgataaaaatcgaaccgaaatgaataaaaaatcaaactaaaatttcaaattaattcggttcgatcagttttttcggtttgaactgaatactcctcaccatacatgagctggttacaatttctcgagtcagataattaagagttgatatattatgtataattttcaaaatcagactgaatgggctagtccttgtttaaaatggctttctccttctccttcatttgaagggaaaaaagaacaactctcttgttttcagtggtgttgaatccatgatctcatatgaacaaaggtaagtgcttttccacttaaccaacttatgcattcactattaaaattctgaatattttattatataattattaacttgaattacttaattatttttctatttattgtcttttatatcataaaaggcatttttttttatctatttgttgtactataaaattttaatctatcaatttttttaaaatataaaatttaatattaagaaattctgtttcaatttttttcttttattatgaattattatttaaaattaaaattctaattttaaattttaagttatgcattattttttaataaaagagtttacatattataatttcattagctatattttaaaaataatttataaaatatatcaaactactaattatattatttattattttgtaagatattgttaattttataatatagttttatttatttaacatacattggctaatcctggtttaatattaaattctcaatttttcgtttttactggttcaatgagtgtgtgcggagtttgaaaactctggtaaatttcgttttcacctagtttattattgaaaaatttattatgtagttcttgaattctattactaataataatttggtccctgtattttgaaaaattaaagtatttatcccttgattttacttccataacacatcttaggtcattgcatccatctttccgttaattttaaaattaaattactattaaatccttaaatattgtaattatttacaattatgtcccttaattttgaaattagttacaatttcattccttatattccgttaattttgaaaattagttacgattttcattgatgaactgtaacatgggaatgatttcagtaatgtgttctttataactgacctgtttgttctaatgtttcaatgtggggaacttaatactattatttctttcgttttgataatgtgaattctttgttcagatagcgtcagaggccattaaaagccttttgg

SEQ ID NO: 5693 - DNA, 1090 bp, Manihot esculenta
  Intron number 4 from transcript cassava4.1_022166m (locus cassava4.1_022166m.g) derived from phytozome v7.0 (chr-ID scaffold06914; pos 1396023 to 1397112 reverse strand)
ttgctaggatctcagtatttgaggtaagccattggctaattggattatatgttgttccataatagcttcataaaattgatttgattaagagataatgttatgttatgattgtgggtccaatgttaatttcacataagtgagtgttaatggatgaagaggcctagtatttttgccctttttagtgctttctggaacaggcatgattacttttggcgacggagggcatctattttggaatcatttaatagaaccttttgatgatgaaatgtttcatttagaaaactacaaaaataaagtattggatttgatgcaaatttgcaactactccttggtgccaaactgcttcaacattgtaatgaatgtttcaaaatatgggagattccactccatggttttaaatatcaactgtttcatactgattcaaccaataccattacactgtttctgattccagtatttataactgaatcagctaaaagttttttaaactaatttcacagaattggcagctgatttagtctgatttctgtacattatttccagttatgttatttaaaaccatgttcaagcaagtactaaaaagccatgcactataaatcatccataaaataacatatgcagtaggatatgatttgccagtttttaatttaatctcatttgattttacttctttagtcataggtcttatgcttatgaaacccgttaattacaaaatcctcccctatcaccaaataccaagttcttcactgtttaactttggaaaatatttgctgttcttaaaaggcgaaaaatttactacatgtctatatatttgcataatgaaaaactatgcaatggacaccactcaacagaatattgtagaagtgtactgtaaattaaatttcctacgttaacttaaatacttaaatatcaataccatctcattctgtagaattaattgcataattgatctttgatttaaattattcccgttggtttctgagttgctctcatagaaatgtggtgatgtagaatttcttgattattgtttacttcatcaaagttcccatgtgcagactaataggatatcaaagaacaatctcataggcta

SEQ ID NO: 5694 - DNA, 1509 bp, Manihot esculenta; identical to SEQ ID NO: 5555
  Intron number 1 from transcript cassava4.1_017587m (locus cassava4.1_017568m.g) derived from phytozome v7.0 (chr-ID scaffold11960; pos 110158 to 111666)

SEQ ID NO: 5695 - DNA, 2867 bp, Manihot esculenta
  Intron number 11 from transcript cassava4.1_009714m (locus cassava4.1_007161m.g) derived from phytozome v7.0 (chr-ID scaffold04251; pos 367096 to 369962 reverse strand)
ctctgggttttgaagtcaagaaaaataatttcaaggtttcgttatgttctctttggaacctttctaatgaggatttagatggattttttaaggcatgagtctagtttttaccttggaactttattcttttaacaatggagtccctaaataatagtgacatacttaaacaatgaaattattgacaattcatacatgttcctcacatgagctttgatgttgattgttcaaggatgtgctctggtaaaaagaattgctgacatgacatgcaagttttggcactgaagaatcctttagtagtggatcccggttaatgtggtctaaagaaattctttttaataatatattattatcttatcttatcatattttctattattttatcctagatctaatggttgattgtattaaacttaaaaggagtttattttattcaatagaaataaatagatttattttaaaaattgtaagattgagactcactctttgttatggtcccgggttacggatcgcgtcatagggagctcttaactccccaatactcaaaaaggagagtctcaatctcaaaattcttaaaataaatcctctagtttttattgaataaagtaaactctttttatagtgtaggttttagaacttttgatcaaagtagaagtctaaatcaaaatacacataaccattagatctaggatacgaaaatagaaaatatgataagataagataatggaaatctactactagataaataaaatttgtttgtaatggatttaagttatccattatctataacatcattctgctcctaacagggtttgtcctcaagcttaaatataggatatgcagtatgaaaataaatgatagacttccatgtagtttcaaactcaagataacattgccaattacctactacttttcaaactcgggtctttagattaaagataatttcacttgaaactaaatcaagttcttttaaaactaaatcaagttcttttaaaatataatccactacactcactcttgtagatccggaagtataggataataatgttatttgtgccattgcatggaaagtcgagattatcattttgggcaccataaatgcctcattcctctcattcgcttgttaacgatttaatctatcttagttttggttcaacctcctattaaaagttcgaattagttcaaaaatgtgctgagttaagtcattcaaatgtgcatcaaattgttgcatgaaagagttcaacttctcttttggatttgttgaaacacctatgacgacaggctctgataacaagttattatggtcacggatagcgtcatgagatgattgataggaaatgagctcattagaaggagcttttaacacctcaaggctcaaaagggagagtctcaatctcaaaatttttagaataaatctgattgtttttattgaataaaatagcttcttttattgtggaggttttagaatttctaatcaaagtagaagtttaaatcaaaatacgaacaagataatagaaaatatgataagataagataatgggaatttgaaaggaaactactaaatgaataaaatctgtttgtatccattatccatataacactgcttttgagttttgaggtgttactccttccctgtcaattatcctgtgacgcgatccgcaacctaggactataacaacttagtatcagagtctgtcttcataggtctagaagaaaagttgaactcttttgtataacaatctgatgtacagataacttagcttaataaatttctaaactagtcccaattttcaatagggggttgaatcaaaatcagataatcaagtcgcagccagtaaaattttagtcaacaaacaaatgagaagatagaggtatctatggtgtcccaaaattacaaattcgactttccatcgtgcgatggcactaatgatatattatcatcctatattgcagatctacaagagtgggggtagcaaatcatgttttaaaagaacttgaattagttttaagtgagattatctttggtccagacacccaggtttggaaaggaatatatagctggcaatgttgtcctaaatctgaaactgcatgaaaatctatcatttattttcatgctgaatatcctatatttgaactaaaggacaagcttcgattttaggaggaaagtgatgttttggataattgagagtctaaatccataacaaacagattttatttatctagtagtttcttttcagattttattttatcatattttctattttcttatcctaaatctaatagttgcttatattaaatttctactttgattagtagttctagaatctccactgcaaaaggagctttttttattcaataaaaacaaacagatttattttaaaaattatcagattgagattctccctttttagtcttgaggtgttaagagctcctctaatgagtttcttccctatcaatcattccatgatgcagatccgggactatagcataaacatttggactaatgccgattatctgtctcttttacctatacttcctacatcctattccgtcctgtgtatactgcctaattggatttgtgaaagatgacatggatattatcaactatttttagatatctttgcatgtataatcattttgccttccaaatacatgagctgttattttgctgttgctggtcaaacctggtctgtttaatgtaagtgctttaaccattagttgcatggtgcttgttagtggtgtacagtaagatcaaattgagaacacattggtcatgtcaagtaattgaaaatgttcagaaatttggctgttttcttatagctcaactgttcgtatgttaattatgagccattcttctttttctaatctcag

SEQ ID NO: 5696 - DNA, 3856 bp, Manihot esculenta
  Intron number 12 from transcript cassava4.1_005217m (locus cassava4.1_005217m.g) derived from phytozome v7.0 (chr-ID scaffold02855; pos 213841 to 217696)
ctgtgagtgtccccccctctttctctatgtagtacataatgtgcatgtagtctaataattttaacataaagaattatcttgatctcaccgatgctcaatctgtgtggctgaaatagcctgaggttggttgtcttttttagttagttgagagaagaataaggattttctctagtgcattatcaattaacaacatattcaaagtatatgagagaaagcattatgtttccttttttttttggactagtaaagttgctgaatctgttttcactgctgttatatatttgataatttcttggtacaaatgtatatgatttactttgaagtttgaacttaatataatgaaggaaaatgatccaaataaccaagttaatataatgaaggaaaatgatccaaataaccaagtaaccaacccaattagtttgcactaaggttgaattgaattttataatatgctgtttttaacttaacataactttcttaacaatcacatgaactaaagttactaaacgctcataaacagatcaccgagatcagtgtcatattgttgaaatttgttcagtagaagagtcatgctgattcagttgaaaaaaaaaaattatttgagcaatgaatttaatagagttttgttagcgacccttgccaatatacaagagattcttacatagaaaaagaaaaatattgaaatgcaagaccaagtcaaaatcactgatttagttgagaaaaactagctctgtatgttattactatccatgatatcctacttgttagtagtgttgtcttctttgtgttaacggtgatgttaatagtactattagtggttaatagtgttgttagtggttaatggtgttgttagtagtgttgttagtggttaacagtattgttagtagtgctgttagtgttttgctatgttttttggagggtgattatagaaagagatcatcttttcactttaaatttaagtttggttaagataatgataaagacatggttaatttgtcaaaaattgtcgagtactcagctcaagagattttcaagttctctcttaacgaacttgtacaacttttatcataggtcaaaaaagaaacaaccactttttttttcattcattaatccattaatttcttaaccttattccataactcgatcaattttttaaggatcctaacaagttttctccttttagttaattttaattaattatataaaaatgtagaaaacatattatacattctttaattttaattatttttaattgtacgaaacatagaaacacagttttccattttcaattttagtttttcaattttgtttagttatatgacaaatcaaagataccggttttcatatttttgaagtcatgttgagtattagcatacctaaaagcaaattcttttgcaaagttacaatttttttaattatttcttagaacttgcagcatgcaacacaacagtaagattgtcagcttatgcatgaattatctctgcgtgaatgccttttattctggtttgtgaaatattttcacaaaccccatgatttgagatttattttttttcttttatggttttaccatgattggcaaaaagccttatcctacttcctgcaatttttgtttgaacactatgttcttggctcacaagtcacaagaacactcaaaaaggaaaagaataaaactctaatttctactaattctcaattgtcaataataacggctgaagctaaatacataaattgcataggtattaataggctaacatcaggagcatcaaactcagatgatactgaactaatactaactaacaaatattctaaacctaatggaaccttttaaatagtcctaaataatagaaacctaaacttcctaattgtactagaaaatttgaattaaaggttttagtttcacaattaaaattctaatcaaaataattattaaactaattttatttgattatgccattctccctctgttggagaaaactcagtcttgaatttttgtaatgctgaaaaatcaggacttagtttggaggacaagcaactctattttcttggataattgtaagagtgaaatgatgaatttgattctttgattttcatcctcaaaagaatcaaaacatataaaatcaatcacaagaatgtcgaaagggttctgcatttcactgagcagcagaattagatgaatgtgcaatttccattgccttctctctgtcttgttcgtctttccttagaatagattcctcaaattttcttgctcattttcattggcttctttctctagaataggttcctcaacatttccaactcaatcttatcctttaaatttcaacgtgtgaagcgtgtgaagtctcatcaataaaaaattcagattcttcaaattgcacttatttcttcgttatgaagttcttggcttgccggtttgctccacccgtctgaccttgatatggcctatatatatatagatggacaaaatatttccttttacttgtatacaaatgtggagatatgcttgtcattcttctttcctcaaatttctaactattgttattcaaagtttagtacatatctaaaatttaataatgataaattaaaaaacgtaatttttaataatttataaaataataataaaaacaagaaacaagaagaaatggaatacacacctcaatcacttttttccccacattgtagcaaattcacttgctccattttcattccttaaaaacaaatgcatgtgtcattttgaaagtttcatagtaatttaaaatgagtcatgttttcattcaaaaaattcatgaatttggtttaaatttatcaaagcacaatatcagttaaatagatgaagaggtgaattgccctggaatgacaattggacttccagaactaaaaatagagacagaatgaattttcaatatatattgaacctaggaaatatactatactaaattaattgaaagtccttataattcatttttcttagtaggttgcattttggttctgaaaatatcattccctggcagttagtattgttgtctctacttaacttaattaatgcactttggattctgagcttttatgtttggagctaaaaaacagagaatttattctatatcaagaaaaccaaagtaaaataggttgaatttaccaatgagttcaacgaaacttaacaaatttgtaggaaaatgtctccacatctcctccccctctctctctctgtctctctcgctcactttcattccctcttgcttccatttttctatccatcccatattcatctctctctccaacatctcccttatcctttctgtctatcttactccctcctcagtccttatcctacaacattcttcttactcttgccttttttcttctaacatttatttcccgctaaatattattctctcattttttcaccctttgtgatatatgtttctttttgcatattttgctctactctaatattttatttcttgatattcgtttttcttctaatttttttctttatttgtctaaacatttctctcctaaattattttttttccttttttgtttagaaacatatttctttctaaatatagcgtttacataaaggttattgaggaaataatcgcaattgattatttgtttcaattcatttgttcctaattgagcacaagcatttatcttcatccctgaccacattatctatgtgcttcatacttcaacgaggcttgtatactttctgtaaatttttttcccaaagcacttgtgtagttgactctgttgtctattaaattctaatcaaagtttgtgttttctatgaatatctaatcagaattcgtggttcctgacaggtccacggtgcatttgctggatatagcggaattac

SEQ ID NO: 5697 - DNA, 2295 bp, Manihot esculenta
  Intron number 5 from transcript cassava4.1_004372m (locus cassava4.1_004372m.g) derived from phytozome v7.0 (chr-ID scaffold03332; pos 327990 to 330284)
gggcagaaagtggtgagaggcaatcctaatccaaggtgtgttttgttgttttcactattgatgataagagttaaatgattatagattctcatgctgttctgcctctttcttttatccttgtcgttcaatagttttgcaaactttagggaagtttaccttttcttgtcatgatatgggcaatggatccagtagtggaatgagctaatacaatttctcatgcatatgatcagtagatttctgcttaggattctggtgctgtgaatgaccatgatttataacatactttattgattccatataataaggtaaactttagatgttaaatggtacaagaaagaatacttaatgaagtgtgagctgatcgtcataaacaacacactctggttaatttattgttttcgcatctttgagggtgatgtgatttgtttgctcacctcgtgcatgtaatctatatatttttattaagcttgagtccgcaaggaaaaagtttaactaggaaaattgaatttcgcttaagaattctagtcttctcatataaattgaatttaatactcgaattgtgaatcccgtgtgcaagttgagaccgtttgtttggacacaaaataagggtggagacctttgtgaagtttacctttcttaaggactacagaatgtgaagaattatgtaggatgggaaggaaaggaacattgctacaaggcaataacctgtcagtcaaatgctttaatatgctgtttgaatctgaaaaggctggaaacaggctttttattaactgtgtatttaatggtcaactattataagccatctgactatgattttgtatttccatactccctgcaagaatcttcatttactggtatgaacctaaagaaccttcctcgctccaaaaggccctattagttgtcagaatcctacctttgaagattaaaatagctttaggctttaaatctttgaatggtaaaaaaactatggtttaaccttgaccatgaaatggttaaagggagagaaaattggtgtcttaaatttttttcttaaaaaggaaaaatattacatgagaaaatcaactatgttgaactactattttcaacatagcaattactggtgctacagaaataactcccttgacactatgtattctcttaatctctcaaatttctgtttttatatttttgccttttgggcatcttcaatctgccttgttaaataaagaagttaacaacctaaaatttgtgaatgttgacaagtagaaaatgttgaagttaagtttgaggaacacaaatattaatttagtacttctgaaatttgcctgttatttcttatagcatttgcaagattaaaagggtagagtagtattaaaggatataaagcactaccttttatgaagcatcatgttatctaggtttttttttctttttctgaaaaaagaatagctaaagagctactgaagaataattaacattaaaatagaagaattttctcatagatttcttgaagaaatgccttgcttcaaaagcatttgaatggaaccaaatattgattcctcaagtccaaaagtacactagtcaatgcaatcttaagaaatttattttcttttgaccaaatctggggctctatgctgcattcacttgccaatcattttatttttctctggattcaattgcggtcacttcattgttctccacttcatttggctcagtattaacaagatgttgaatgttcaatttgcttttattaatggtaactctggttttcagagggttgacatataactatgcaatgctaagttgcaactaaatgtataagcattttgttattgctgtttttgtatgcatctctgttgcaagatgtctaatgcagtaatgcacacatttctcttcttgttgtttgttttgtgctcttgcggcacaagaagtacgcaccgaaaattggttcattagttgataatgatttttctattgcattctatgctatttatgattttagacctacttgaagataaatggaaactacttgtagaattaagcactggagcagacacaagtcaattttagacattttattcgctcatattccctgataattctagctatcttttctgtagacctatgaattattatgactattccagaagatcagaaactatttatgttgtcaacaatatagcaatagttgaaatctgcacgtggcaactatttatgtgactaatgctcatatagttatccttgttgttttccctttccatattgagatgttcacattctcattattcctttttcattctgcaggagttactataa

SEQ ID NO: 5698 - DNA, 4974 bp, Manihot esculenta
  Intron number 1 from transcript cassava4.1_000789m (locus cassava4.1_000789m.g) derived from phytozome v7.0 (chr-ID scaffold08122; pos 275276 to 280249)
atatacttcttgaaccagctgttgcccgtaagtgatgccctggaaatcatggtattattgcgctctttgggattatatatatgcatgtagaaaggtaatctttttttatctatttcaatagagattacaacataaacatatttatacatgagagaccgtatctagaaaggaaaggaaatcaagcctatgatcatgcaatccctaagattaagcaactaacacatctataacatttattttctatattaacatatttacttcctataacctataacattctcccgcaagttggagcatagatgttaatcatgcccaacttgttacatatataatcaacttgagtaccatttagagccttagtgaagatatctcctaatcgttctccagttcggatatgtcctattgagattatcttttgttggaccttctcacgaacaaagtgacagtcaatctcgatgtgtttagtcctctcatgaaatactggatcgaagtcaatgtgaatagctgcttgattatcacactgcaacttagtagacagcgaatttgtgaatccaacctcttacaatagttgacgcacctacaagacttcacatacggcttgtgccatggcttgatattcagattcagcactagaacgaggcaccactttttgcttcttacaaccttccacaaaaacacaatatccagtagttgaccttctatcaaagcattcaatatttgagtgcccatggttatcatagaagaggcctcgtcctggggcctttcaagtagcaaagaatctgttccagagcattccactgagcaacagtaggagaggacataaaccgacttaccacactcactgaatatgcaatatcaggacaagtcaccgtcaattaattcagtttgccaactaatcttctatacatttcaggatatgcaaatgactcattgttttctgtggtaagttgaaggttaggggggtcattggagcactacaaggcttagcacccaattttcctgtttttgccaacaaattaagaacatattttctttgagataagaagatgcctttcttacactgcataacttcgatacccaaaaaaatatttcaaggagcccaaatcctttatatgaaactgtgttttaagaaattcttttagggatgtaaaatatgtaatgctagcaacatcacttcctgtgataatgatattatccacatatactacaatcataattactccactattagaatttctataaaacactgagtcattacacttactcatcttcattcaaaactgttggatcatcttactaaaccagccaaaccatgcttgagggctttgttttaagccatagagggattttcgaagtctacaaatcttgcctaactccccctgagcaacaaaaccaggtggttgctcaatataaatcttctcctgaagatcaccatggagaaaagcatttttaatatctagttgatacaaaggccaatcatgtgtagctgccaaggaaataaatagtcgaacagatgtgagcttggcaattggagagaatgtattagaatagtcaactccataagtttgagcataacctttagccactaaacgggccttgaggcgagcaatagatccatcagggtttattttcactgcaaacacccatttacacccaatagcccgctttcttgggggcaaggacatcaactccttagtaccattagcatctgggccatcgtttcatcttctattgcaacatgccaattgggatgggataaaacctcaataacagttttggggactgaaataaaatctaaagcagtggcaaaacaacgagaagaagaggataattgaccataagagacaaaagacaaaatagaatgagtgcaagtacgtttacctttgcaaatagcaatgggcaaatccaaatcatacggtaaaggattagtgggagcaggatctgtcgacaaagaagcgggtagcggagcgaagtcaaagtcctctaagcgtctagaataaacatgaaagatgggagggcgacttggcacatgagcggaaggtgcaggaatagtctgaggagacagagagcgaatagtgtataacaagaggtcatcttcctccccctgggtgtcataaacagattggtggcgaaaaaatggagtggactcaaaaaatgttatatcagcagacacaaggtatcgattaagatcaggagaaaaatgataccctttttgacattgagagtagctaagaaagacacatttgagtgatttgggatccaatttagtaacctgtggacgaacatcacgaacaaaacaagtgcaactaaagatacgtggctcaataggaaacaaagatttagtgggaaacaatatgttataaggaatatcaccacgaaggatggaggagggcatgcgattgataaaaatacaatcagtggatgcaacatcagcccaaaagcatttaggtacattcattcgaaataagagagctttggctacttcaaaaagatgtcgattttttctttcggtaactccattctgtgaaggagtgtcaacacaggaagactgatgaagaattcctttttgtaacaaataagattggaattctccagaaatatactctttagcattatcactttgcaatattcgaatgaaaatattgaattgaatttggatttcagcgtaaaaggcacaaaagatagagaataattctgaacgactcttcattaaaaataactaagtagtgcgagagaaatcatcaacaaaagtaacaaagtacttaaagccagatttagacacaataggacagagaccccaaacatcaaaatgtactaactcaaagggggacgaagcccgtttattgactcgagacactgtaggtaaacggtgatgtttggcaaattgacaagattcacaatttaaaacagacaaagagtgaaattgtggatataacttattcaaatccgagagagaaggatgccccaaacgacaataaatatcaaaaggcgttaaacgcgtggaacatacaagggatctaggtagttgctgatccaagacataaagaccctctgactcacgccctctaccaataattttcttcgtcgaaagatcctgaaaaatacaataatcaggaaagaatgatacacaacaattcagcgcacgagtgagtttactaacggaaagcaaattaaaggcgaacttaggaagacagaacacagagtatacagaaagggaaggggttaagttgacatgtccagaacccatgacagaagatttagtgccatcagcaagagtaacataaaaagacgatgcatgagacttaagattgaacaaaagggtagaattacctgacatatgatcggtagtaccagaatcaataacccatttggaggatgaagacacaagacatgcagtagagttacctgactcggcaattgcagtgatagaggagttaaaggattttaaagatgcctggtattgagtgaattgtgtatacttatctgcagatatcaaaattcccttattagaagaggtttcagctgccatatgcaccatttgttagcactgattcttattctgaagtttctggcatgtcttctttgtatgtctaggttcatggcagtaataacaaatgattccaccggagtcagaagtgggaattgcttccccagaacgctgagatcctttatcccaccattaaaacctctcctgtgcccacctcagttatgttgtctgccactatcattgcgactaataagagcactaggggtgtgtgaagggagacctgcaacgttgatatttcaaaatcagacaacaccctaataaacacatcatgtaacgctgatatttcaaaatcagaaaggatctgtgattagctgtctcaaattctggagggagacctgcaagaaagctcataacagccatttgctctcgttgagcttgttgagttttcacatttgtactaaaaggtatcaagacattaagtttctcctacactcttttaaaatccataaaataggaggtcagatttctatcatttttctcagctcgatgaaacaccttacacacatcataaatacgagaaatattccctttgtcagaatataaaaatttcaaagactccattaattctttaacaaattcacagtgattaatatgattgattaccttactatgaatagaatttcagatctgcaaaaataatcgagcatcatccctcatccaatctctcctaatttcatcaattgcaggatccttggtaagatgataatccattccgatgcttcgtaaataaatacggatagtcttactccaatccaaaaaattagattcatttaatttgtgttcctgtaattttagttatcacaggaatcacattagcaacagtggttttaacttcagccatgagaacaactaacccaaaacgatagcaacaaaagaaacacagaataagaaaatagtacctggcgtgagcagtatcggtgtgaacagtactcgcgtgaacagtaccaaaaacgcctctatccaacactcaaacggcaaataaccacagatctgacaagggggctgtaaggcgactccggcgtcctccttaggtgggcggtgagagataaatattatcctagataggtaacccaacagaacaggggccttaagtctaccaaaaaaaaaaaattaaaattcgacgggagaaaaaaaaatctctatggaaatggctctgttactatgtaaaaaggtaatattattttatctattgtaataaagattacaacatatttatacatgagagaccgtatctagaaaggaaaggaaatcaaacctatgatcatgcaatccctaagattaaagcaattaacacatctattaatatttacttgctatattaacatatttacttcctataaactgtaacaatgcacaaggtgtgggtttaattgacattaagttttttagcagctagggctgctgggaagtttcaaccaagggctaag

SEQ ID NO: 5699 - DNA, 1134 bp, Manihot esculenta
  Intron number 2 from transcript cassava4.1_025255m (locus cassava4.1_025255m.g) derived from phytozome v7.0 (chr-ID scaffold08265; pos 4478586 to 4479719)
aggctattcccaaagctaaggtacttcgaagtaggacttcgctttattgcttgcaagttggtgagtttaatccttcattactagggatttcaaaaaatttggggatttaaaatgtccaatcaaactaaacctcattgggcttttaagatttagttttatttggatcctttttgtttgaaattgtacatttttttggttgcttagaaaattcagagaacggatacaaattttaggtttgcgtttcttatttgactgcttagcaaaattcttatttttcatggtttctttctggagaatgtttggaacaaaatactcatgagcactgacatttgcatgtatgttactagagaaattgtatatccatttcatctctataaactagaaccgtcattttccatttagctattttacaaaatgaaggaaaattattaattttaattcccatggtagagcatataaaataaaaatattctttaattgaccctaaccctttgtttggatggagagaaatggagataaaatagaaaagaaaagaaataaaaattatgagatttctcttgtttggccagaaaataaggagaagaattagaagaaatgagaggaaatgaaggaaatcatattttcccaatcagatgcgaaaggcccccattttatttcccttcaaaatggtggggaaaataaaattctacagaagaaatgtggggtatctttgttatttctcctcatttatttaagagaaaaactttgatttctctcctgaatcattaagcactccaaacaatagaagagaaatcaaatttcatttcatttcttttctccttatttcttccctttaatttctccctaattcccttgaactacttattatccaaaacaaagggtaagcgattctacggaattcttgaactgagtatatcattatgctactcttgtagtttgaaattcaaacacagagaaggggggtggggaaatttggcagataattctgtttaaggcatgttaaaaccgaaggcgtaaacttctggcatcggctccaattcaaccactgtttctttgaattgcttatttcttatcgggttttgttggttaattttgaccgagttatgtgtcttgcttcattgcagagactcatca

SEQ ID NO: 5700 - DNA, 3321 bp, Manihot esculenta
  Intron number 6 from transcript cassava4.1_002411m (locus cassava4.1_002411m.g) derived from phytozome v7.0 (chr-ID scaffold08265; pos 4214760 to 4218080)
ggcaattggagttaattgagacccatcaacaggaggtacttcaataagtactttattctgcatgctttcagtcacaaaattttcttcactttatatttagatcaggtaaagtgattacattatcatatgctattgtcgttagcgattttggtttgtgtataaagattgagcatggttgctattctatgagaaaataccctctgccatttctcttctccaaagactaaactgccatatttcaactctggttgttagggacttgattggctgtggtgggtgaggaaacacattgattattttatttgttattttgttagttttcccacatgactgccattttatctaaattttggaaataggtaacttcatgtaatcctaaaatttaatgatagatttgctattcagtccctgactattgccatagtctctcaattttaagaaacttaataaaacattcttattttttttctttgtcaacgaaatagtccttccatctaatttcatcattttctgccattaaaaatatagtaaaggaggagtcttcttctcgtttggaggagaggaggagaattatttcattgacggagagaaaaggtaaggacgtttatgaaaattcagagactgatttgttaataatagcaatacttaaggattaaatagtaaatcttccaaatttaatttgcctattatcactgcgagctttcttttttaattgccactaactagaatgaggatctggctagttgtgctattatgctgtaaaagattttctatagtttccccaagtgtaatggtcagaccgtacggaggatgcaagtgcattgttttgccaccagctattatcctctttaatggttcatcaacgtctcttttggtcaatgctgatgaaaatattcttttcatggctctcattttagattattggcatgggggaaggggcattttgcaacataaatctgtcacttcgtcccttgctaatgatgacatttactgtgtttgcttgaaagtaaatccttccaaagagatccatactagagcattatttgcacaaacaggacttagaaaaaaaaaatataagtgaatattgtaggattgcaaatgaatggatatttcttttgtttcggtatcaggtggaatttagaattatattttttgctgaatgcgtaaattgaaacctgcaatttatgccaaacttttggtggcaccttaaacttttattttgacccatcaaaaacctcaattttttgttttaataactagcaaaaagccgtgtggcatttttatactcagcattatccatttgacttgtgactaaaacacttatgtggaagctaatggcagtggcacccatctccccatggagagcacttgaacaagtagatcaaagggtaaaaggaaagatgttgtcaattatattgtaggatatactgtgtaatggagttaggaacgagttaaatcagatttgaagtgaaattgtggtggagattgtataatttgtatttgtagaaagaggaaatttcagattcaacaatacaatgaggacatgctactcaacataaaacaaaaaaagaaatgtttgacaggcagccccatggaactaattctcgtgctagcctaacaagctagccccagcccaatgctgaaattgaagaaaatcactacctgcttcccttcctctcggtgatgcttattttatgtaaagaatgcttcttttcccttgtgacttgagtcccaagattctctctaaggactccttgtctgctaaccaattccagaattttctttgactgctactgtagagactgcccctttgttttcttcctccattggtgtctgtaacatactctcaatagctttgagcctcgatccacacctcctaggcttttgttattatgttttattatcaaataaataatacatatagctggtctatgttggtaaattccatgccaaaggcctaagcaacagtttctcaatgtagaacaataggtaaactaaaactattaggtaagcaactagtttccaaaatttatgtttaagtggcctggatgacaactgcaacactaatagaatcactatttaaatcaaataatttctttcagtgttgggaaaatatgtgagagtatgttagcaacaatccaatgtataggctgtatagcaaactcaaaatccaatgtcagcaaaataaaaatgtgagacagttaaatctacattcaaccttaggtagctcccccaaggcatcgttttacttgtgaaagctgcattccttgctcttcgaagtgagaggatgttatggactattttctagtatttgatttattttaagattagattgctaagtacttgatttattttaggattagattgctaagtatttgatttaatttaggattagattgttttatcttttatttgaggattagattgttttattttatcttttaattttttttattctttagggctgctatcttagtgaattgtgttaaacagtgacactatttcctatatatattgctgaaaaatcagaaatgaaataagcagatttatttcatctaaattgagatttgaactctttctcatcgagtttaaaaggttagagctctctttattgagctcataacaacaacaattgggcggggaaagaatcaaggaaaaccaatggcttcggctttgtctactgtaagtagacttgtgacgcaatccataacttgagaccttaacagagggattttacgtggatttgaaggagaagaaaggagaaaaggggggggggggaagttgatgataacatttttttctgaagaaacaaaggtgagagaaaggaaggagggaatcattgggtgaccaatggcttcggccttgtctactgtaagtagacttgtgacgctatccataattcgggaccttaacagagggattttgcgtggatttgaaggagaagaaaagaggaaggggggggggtgggaattgatgataacattttttttctgaaggaacaaaggtgagaggaatgaaggaggggaatcattgggtggctatgtttctttgtgtacaaacttcaatggatacaaaataaaagatctgatgggtcaaactaaaagttcggtatgctgcagtgcttttgttccaatttatgtattcagcccttatccttttagttaatcttttttccttgttcccatattctgaatttcttttaatcactgatatgcatctaaataagggagcgttagtcacaaaaccttatatgagcttctgttaagtattctttttaattaaatctatttatgtttttaggttgataaggctttgcagagt

SEQ ID NO: 5701 - DNA, 706 bp, Manihot esculenta
  Intron number 2 from transcript cassava4.1_010962m (locus cassava4.1_009099m.g) derived from phytozome v7.0 (chr-ID scaffold10045; pos 234655 to 235360 reverse strand)
agaagacgattcaatatttgattgggtccggagtaatttctttgctaattatttatttaaagcttctcgtagactttttgcaatgaggataaatgcgcttgcatgctacttttttacaaggatttatttagatttggtagcaaatgaataatgctgcatgttcaattgacccttcatgcatagtggtgagcatcggtcaatctggttcgaagttgaacaatgctaaaagactcgtattcttggaaatggaactgatcaagactaaaataattatacaccaaatcaaactgaaatgatctggttcatttgttgattcagttcagttattttggtttgttgattcagttcagttattttggtttgttgattctgtcagttattttggttttcttccatggaatccaaactgaaacgcccaaaaacatcccaacctcgttcatgcacaaaagaaaatttatggacaccaaatcaagatgcacttcattaatatgctagtttgcctttgttttgataaacaactcttgaagaattaatgatgcagattcattaagtgggcacccgttgttttgttttttgcttttcgctatatttgatcccaatgcttggttattctctctccgcctttctttttccccaaatataatgacatttttatttatattacttcgcaggatccacgaacagaaaacagtccataccttgggtt

SEQ ID NO: 5702 - DNA, 4332 bp, Manihot esculenta
  Intron number 2 from transcript cassava4.1_005025m (locus cassava4.1_005025m.g) derived from phytozome v7.0 (chr-ID scaffold04443; pos 129651 to 133982)
aggtattgttcggatgtccatgtttgatagttacatatttgtgaaaatttatcagttatatgctccttttaattaaatctcagtccaaattgagttagtttttcagccatatgaatcatttccttttcatcaatgggctttagctcattggtacttgagtcgtcttcaaggctataggtctcgtgcttgagtaaattgtactaaaataataatttccttttcatactcattttagagttatattcttggaaatgtctatatatgttaatctttcttggtttgtggcaagattttgccaaattgtgtaaaaagacaattttgtccaactatgggttttaggtgttctttttatgtttaaataggtgaattaatgtaaaagaaggatatgtaggaaccaaaaatcttgtataagatgaattgctacaaagaagttgaatgattcacataacaggactcgaggttgatgagaattcagcagcatgttggccaagttatgcaatacatgttggcctatctatagataattgcttctccacagaaataaaagtaaaaggatactaattaagaaaattaagctaacataactctagaatttatctaacttaattagaaagggagacaaatttcctttactaaaataggtgctagccaaaatctcccgagattggaagatcttccaagattgagttgtagttgacttctccatttgactagtttggtttaaaccgttaattgaacataggctaggtttgtttttgttaaatttggatcagggctaactcacccaaaaattagctcaagcaagggcacattactcctatcctatctcaaatcaatgtgcaattcaacacacccttcatgcccaaaacttcactggagcgtgaaatattaagggaggcccaacaacggtggggaggctctaataccatgttaaatttagatcaggcctaattcactctaaaggctagttcaaggggaggagtgcctaaagttcttataagggacacattagctatcccaaggttggagaacaattaggcaatatctttgcaaaatctttgaatggagctcaaggttgactacatttataataagttaggcatgattgacatatgtgcttaacttgagagggagtgttatagaaagtcaaatgtatggtatgtaaatatttttttcctaagcataatatagggatatgttcctatttagaatttacagtcatagagactattgtatataaatatttgtacctcttttagaataatatagtagataaaaaagagtacacatatgagaatcgaatcaatagagtaggaacttatcaaggtgggtttaacctagatgttgcaaagttcctaaacagctcttatttcagatgtttagactattgtataagggctttagatattactacccttgagcgagcttatggggtgagttagagctggttcaaatttaacaagtacaaagagtcaaggaagtctgatgactatgaactctagagttaaagcacgatgaatggattggcaaaatatgacaagcatcttatctaatcataaaatgccagttaagttgaaggaaaattttactggacaggtattagattattgtgtattatttgtatattgtagaaagtattgggtggtgaagaataacatgcacacaaggatagtttggcaaaagtgaagatgctaagatggttatgtgaaaatagaagtatggattgaacaacaaattaatattggtaggaaggtggatgtgacatctattgatggtttgtctagagaagggagatttgggattgttcgggcatgtgaattatggattagcaaatgctccaatttaaaggtttgagcacttcgatgctgcgggagatgtgaaaggaagatgcaggcatgaaatcacattaaggcccaacaactatagatctttctaaattgattttctagtccaagtataatggaggaattgggcccatatgggaaaaggtaacaagtttggacttgaggcttagttgagttgagtaaaagagttgatttgcagatgtaattctttgcttctcgaatgcatcattgttgtcgtaaattctctcaagaacttagttttaccctcactttttcccttttatcatacgttatagctaattttaaatttttcataaacattcccattctagcatctaggtagattactataatgttccccttttggccttgattaattatcacctatagcttttttttcttagtggttttactcatccatgactttcccctaccaaccttttttaaatccttgtatttattctatcagcgtgatattcactctatgtgaaattagtttgtttatgtatatatacccttttctaggaagaaaactggggaaaataaggggttaatcgttgttctctagttctgtaatgtgcttttgttcctcgagagtaattatattgatggttgaagaatttttggagaaattttcagattctattctaattaatttgatctttacaagttttaggtatttatacacaaaaaatcacatctaattagaaatatttacaataaaggcaaagaataaaatctctacaaatccagtaggatttctatatacactttctcttctaagtctctatagagaaatgcattttttatatcaaattgctataggtctaaattaaagttggcattacaagatagcaatactctgattgagtttattttagtaatataggcaaatatctcttgctaatttactctataggtttgagtgtatctcttggcaactagtctagcattgaatcttttaattaacccatctactttgtgtttcatattaaacatctatttgcagccaattgttttttttttttcaaggtggaagagatacaaactcccaagtctttttagtaaaggctttcattgtttcaaccattgctctttctatttagaatctttgagagcttcttttcaattcgataggatagacagagaggaaatagataaaacaaagactttataggatagagacaaagaatcataagggagagttagaaatagggtgtttagtgcaatgcctaatttcttttctttgagcagttggtttatttagatcatcactaggctcaatgattagagagaactctctagatggaggagaggaagattcttaatactgaatagactgcgcaatagttttttctatttctatttgatctcttcttgagtatctccttaaattcagtttgtccaaacgctcaattagttctccttgatcaacaatagtctcctctcaattaaaattctcttgggtcatagaactaagaattatctcttatctctcgttgctctccccttgaagaggtaatattggagtgaggttcagtttctgtggatgtaacatccatgttgacaaaatattttctggatagggatgtaacacttgtaagccttttgtgtgggagagtacccaacaacacatttaagagccttcggatctagtttcccagctgtcctataatgaacaaaactcgtgcatccaaatacttggtgaaataatgtaagtatttttcttttgtagcacttctaaagggcttttaaaggcaagagctttcagaggcattctattatgagataagttgcggctaagactgcatcttcctaataggttttgggaagattcacagtgaaaataagagatctgactacttctaacaggtgcctattctttttttttcagcaataccattttggatattagtgtgaatgacaactagttcgatgcagtatcccattagattatagatagttagaaaaactgctattcgtagactctgtgccattatcagttctcaaaactgttatgttggcatcaaattgagtataattcatcttgtgaaatgattaaaacaagaaatcgcttcactctttgattttgtcaaataaatccaagtcatgtgagtgcaacaatcaataaataaaagtaacaaactagtgattattagatagtgagacagtttggataggtctctaaatatcagaataggtagtcacaaaagggatcatattgctattgtgtttatttcattcacaatgagtagtattatatataagctatgagagttttcctaatcaaataaaatacaaattctaaaatagaattctaaaatagacttctaaaacaatactaatactaaatagactcctaacttatagtgataacagtcaacaatggtacaaaatgacgaaagtgatacactgttatatagcacattataattatgtttctaaatctgcagggcaaaactgttcctccagattacctcagcgagag

SEQ ID NO: 5703 - DNA, 3422 bp, Manihot esculenta
  Intron number 1 from transcript cassava4.1_032689m (locus cassava4.1_032689m.g) derived from phytozome v7.0 (chr-ID scaffold01407; pos 173761 to 177182)
taaaccgtgtgtctacactaatcgactcactagcggtataaaatgagcaagtgctctcacttatatttttatttattttatttcctttgtgatgttttttcttttttaatagggcacaattctgagcggcgtgacattgatcacccacaacacacttgtgtatattgcagagctttgttttggaaggctgaatgcttaaagaataatttaaaaaatacagaattagtttatcctctttattgcaagaaagaaagaattatgttaccattgcttgcagatcctcctttatatttggcttaccttatgaacccacaatcaagcccaataaatggaaagtttaaggagaacattcatctatataattcgttgtttgcttttacctctatgggtggaagaataaatcatgatattaataaatcatgctattgggcctttactgcctgttgaagagcaaaatatgagatttgctcagttatatgtatacggtaccgaaaatgagttgcaaaatagattattattattttcaggtgattctcctctagactaagacatagttcaaaaccttattggtatattcaattctagcaatgcaatagccaaatcatttagaatttcaagggatagattttcagagagtaatgtattgtatattaggttgaagttaattggtagacggcctggggacaacttgtagtatgcaaaaccaactgcttttgaaattgcatgattatttgttggagactttggtgtgcacaataagaatcgggacatcttagttgaacacatggatgaaaaattaaagagaataagcatattacaccctagcttgatgtctatgcaatatcctattctattttcgtatggagaagatggatacatagtggacatggaatatgttagtgacggttctacaaaatcaacaaagcgctcatatataactatgcaatagtattatccttatcgattgcagcagaggtcattagaggcaactacattattgaatgtaggccgattatttcaacaatttattgttgatgcatttgcatgtgtggaagaagaatgcctagattttatttgacgtaatcaacaacaattttgatctgaaatttactttgaaattaaggaggcattccttagaggaaaccatgatgggaataatattggtaagtctatcattttgccatcaacttacattggagatcctagatatatgttagaatattgccatgatgcgatggctatatgtaagttttatgggcatccaaatttattcattacttttacatgtaatcctacttagatcgaaataaagcgcatgctaagtaagatttctggccaacgtctagaagatagacttgatatagttgctcgagtcttcaaggctaggcttgactatttagtagctgatataaaaaaaaaaacaccacttttttggccatgttgtggctattttgtatataattgaattttaaaaaaggggtttaccacatgtgtattgtttagtttggctagaaaaagatgacaagattaaaacgccttcagagattgactctgttatatctgctgaattaccttacaaaaaatataatcctattggttttcatataatttctaacttcatgatacatggaccatgcaatgaaatgaaccaagactctccgagtatgtataaaggtcgatgttccaagttttataaaaaaaaagcacttgatttgacaattgataagaatggatttgcaatatatagatgaagaaatgatggatcgtttgtagagaaaaaaggtcatacaatagataataggtttgttgttccacataatagagatttagtagttaaatatgaagcacatataaatgttgaattttgttgtgctactacattaattaaatatttatttaaatatattaacaaaggacctgatagaacaagggcaattatacaaactaatagtgaagatgctgctaataaatcttctgctcaagctacagatgaaattaaaaattatttagattgccgatacatttcgccttgcgaagctgcttggagattatttgaattttcaattcaccatagagagcccgctattgaacatttatctattcatttacctcttaaaaatacgattttttatagacaaaatcaaaacttagaatctgttgttaacagacctgatcttagaaaaactatgttgacataatggatgtaaacttatatccaatttccattgcaatgggtatggaatggaaaaaacaaaatatggactaggcgaaaataggggtgttgtataggaagaatgccttacgttcatatccacatgcaggtgagctttattatttgagaatgttattgaatgttattaaagaggcaacaaattttgatgaaataaaaaaaatgaatgatattgttcatccaacatattagtttgcatgtttcgctcgaggtttattaggcgatgataaaaaatgaatagatgcattacaagaggctatactttgggccacttcgtctcaattgagaaatttattcacgactataattatttttagtgaagtttctcgatcaactgaattgctcgaaaactttttggacatttttttatgatgacattaagtatagtatacaaaatttgttaggcgttcctaaaagcatgatttcatgtaaacatttgaaaaataatgtcctatttgaattagaaaatttttttaataaaaactcaacttcgttatcagattataacttaccactactagacccttctttatttcctaatattaataatagacttttacttgaaaaactaaattatgatacagaaaaattgaaaattaatcatgatcgaatgattactaatcttaatttagaacaaagcacaatctataatgaggttttgacatcggtaaataataatgatgagcgccttttttttgtctacggtcatggagggactgaaaaaacatacttatatgaaacaattctttcacgccttagatcagaatggcttattattttagtagttgcttcttcaggtatttgctctttgctcttatctggtggtcgtatagtgcactcgagatttaaaatttctatagaaatagataaaaattcaacatgtgatatcaaaaaaggcacccaattggctgcccttaaaagagaaactttccttataatatgggatgaaacacctatgaaccatagacattgttttgaagctgttgatagaacgttgagagatatcttagaaaataattcgattgaaaatgacaaattctttggagaaaaactgtattatttagtagagattttagacaaatattgtcggtggttgtaaatacaactaaagaagacattttacaggaaaattttgctgtgaatgtaaatggttgtatacaaaatttagctgattagattttatttattggag

SEQ ID NO: 5704 - DNA, 886 bp, Manihot esculenta
  Intron number 2 from transcript cassava4.1_014688m (locus cassava4.1_014688m.g) derived from phytozome v7.0 (chr-ID scaffold02559; pos 379528 to 380413 reverse strand)
accagaaactgtatggatctctttctctgatttgttattgttattatgatttgcacttgtagatggtgaaacatttatatataatgtatctgagaagggaatggggttaaatttgttggatgtagatatggcatcagtttgaattcaggaaaacggatagctttgtttaattctaagtccttgcattgattagtctaattgcatgaaccgattgaatttagtagaatttgtataaatggaattgttggttcctgaatttagcaacgccatctggttattgtagtcataacatggttactgggatattattagaacttcaacctttggtatatgctgcagctcttgttaccaaaagttatcagttggactttctttttattcctttgtacacttagaagaaacaaagaaatcttaaagcttgtcaattattaggaaattagttaatgtaatgtgtaaagcgtggtctctgacctaaagtaacatagcagatgatttcttcctttcggtgttcaagtcctaatgtaaatttgagctagcttaataactaataaaacatttaagacatatccttttggtgcttgaaatatttcatttctctttctattctaaaattgggaaaaactaacatgtcatttccctcaatactatgaaatacttcaatcttgaagtgctttatgatttattttgtatcccgacttgactaatcttagccagcagcaaacaataacaaaatggttttaactgatataacatattgtttctagcaactttttgtgaacttgaagccatggtattcataaatcttagcatcttagttcaatgtaacttatgtataaggtttattgtggcagccgtgcattttttgacaaacgtatctcacaagaag

SEQ ID NO: 5705 - DNA, 2433 bp, Manihot esculenta
  Intron number 10 from transcript cassava4.1_000301m (locus cassava4.1_000298m.g) derived from phytozome v7.0 (chr-ID scaffold01301; pos 10880 to 13312)
ggagtaaattctttagatcctatcatcacatgtgttttcatgttttgagatctataatgtttggtatcgaagtttctgtttttcttttaatgtgcatttttctgttactgtcattttaaaactatcctgtctctgcatggtggtaatgatagactcgcaactttgcatggaatagacactacattccaaatatatgtattcttcaacatgtcctagtgatgacttcattttctcgtgtcctataaaataagaaactggataacattataattttctgtgaagggtgactgttccaccttgcatgaaatcaattagacattccatttctagttcacttggttctcattctctatgatgttttagatgtgatagttaaaacatgaaattggaacttttagaactgtttctacagaaatacaccctgatgggctgattagtatagaataactgggagcagtaatgtggccaagtcttgactgtttagccataattgtgaagtgaaaccttatgtgaaaatcgagtttacttgtcaagcttgtatatgtagttataaatgtaataattcaatagaatatcttttcttttgcaatgtttggagtttacttttttgcctggctcatttttttttattccttctcaacctggtagtcctttagtgaaacagcttatttcttgctactccttggttttttgacaacgaattatcttctaatattaagtattctgggtgctttccttccaagtcactttatgatggccgtttcatctccttattggctgcactatgattcttgctacctgttgtgatactttctgtaaataggttagattatgttatatgattgggatatgattagactataattaggggattgatttattttatttcctattatatattcttgtaagtagtatatatatcccaattggcttgaggaaatcatcaagtatcttgctctcaaatttcttgtatctctctcctttttcattattgtttcatggtatcagagtcaagaaacttggtctaactgtgagtggtagatctgtcactttcgtttggagactttctgaaaattagttggtctcgccacctagctcaccagtctcgctgtcttccgattggctaccctatgaagcgttgccaccaaaatcggtggcgcgtgaacattatttcgacgactttttcatgccggcgattcttcctccagcatcgccaaagactggctactccagcccattcggttcggttgcctgcacaactcttctttacacgtacattgtgaacagtagctttggatctactattcacaatcacatattatcttttctgcagatttagttcctatagcgcaatcaaatagagtagggccacattctaaaccatattcaatcaatctaaatgaagcagagtacagagaatatctatagttctgagctactcagcaacattcttcttcaaatattgctcatgctagtaattattttgtttatctaaccaagtctttacccattgcttcgtggatcctcgactctagtgctttttgatcatatctctggtaatcccaatattttctctactcttgtttcaccttctacaccatcgaaaaccattttaactaatggttcataaactcaagttgaagggataggtaacatgtatctccttccttctatctccttgattaatattttatgcactcctgaatgttcatacaacctaatatttgttagcaaattgactaaagatcttcactgtttagttatttttagtgctaaatctgtggatatgcagaatcagagtactgggaagatgattgaagcaggatatgagtgataaggattgtactagttttccacttctaacccttcaactgcttttgtgtctaccacttccgctgaattcattcatagtcgttggggacatccaagtctaaataagttataaacactggtttctagtttctcttccttgcctttttttagaatgtgagtcttgtcaatttgggaagcaaactctagcttcttttcccaagcgagttaataatagtttgaaccaagtaaccgcactgggcattattctagtaactattccattctattacagcataaccaactaccataaatagaaatttcaaaatgcagtatagtaatggttgcatgatgactttgattatacttgccaaacatgcactagggtgccaagatctaagggtttttttttcataatgcatgttacgggtaactgaatgatgtttttgggaatatgcatctttttttagaagtggccaaagttataaactggctgtgctaattattattcgtaagaaatacttggatttgggtgcttttcttgtatatattatctttgcttttgtacaagatgatggttgttaattttatgagattttgtgttcctcaggtgcaaaataattt

SEQ ID NO: 5706 - DNA, 3224 bp, Manihot esculenta
  Intron number 12 from transcript cassava4.1_000121m (locus cassava4.1_000121m.g) derived from phytozome v7.0 (chr-ID scaffold02040; pos 32120 to 35343 reverse strand)
aaagtcacattgctgtgcagctactaattattcaggttttttctcacgcacgctcaaaaaattctctctacactatgacattgaggaattgaataaagatagggcatgttcacatttggagcactgacatagtcttttttttttttgagaagttctttaagaaaacaagaaaaaaagagttttacattcacatcatcacatgtgccagtttttcacatggagcattggaaaactaattattaaggttttcaaaatttaactaagattttaaaaacttaaagagtgtgtttacttatggaaaataattttttgttctccattttccattttctaagaaaaatctagttttcatttctatggaaacaagagaaaacatggaaaatgcgttcaactgtcaatttaaaaataatttcctaattccaaataataaaagataatcataaattttataagtaaataaatcaactattaaaaaataatttttaagaactttattgttttactattaattttttttatcatggtactattctattattataataatgtaattattttttataaattataagtcaatattttttaaaataattatttagtttttggttatgaatatattataatacaattttttttatagaagtctttgatttccatttggaaaatagttggaaaacaaaaattttattataaaggatatcaacagtgaagaacaacttaaagttacttttccaaatcttagttaaaaagttctaaaattagtcttcttgttctccatttggaaaactagcacatgtaatgcaaaactttgttttccatttaattgaaaacttttccaaaaaaacttgaatagttttctataagtaaacaagtactaagttgttcacatctattttccttttacagggaaagtcgtgttttccgactgttatccatattgaaaacgatggctcttttatgacaacaattacattctaaaattttcatagctatttaggaaaaacaattatttacaataataaaaaaataaatccagttgtcctaaaagtaaaagaataatatatattataaagttaaagtaaaataggtttataaatatattttataatgatatctttaatttgaaatatattaatatatatttttaaaattttttgaattaaaaaacaattttctattatttacaagtgaatgggttttctatgttttccctagtatttcatggaaaatgaaaacttaggagttctcttagaaaatagaaaatgaaaaacagatagtgttttccacaagtaaacatgcctataatgtcccccttatttaagtactattcacaaacatttttgctttctatttgcattgaaggactattttaactaatatcactataattatgttcacatagttttcaacgcctgcataacaatttttttgtatgacaataaatatttatttattaatatctttataggcctagatggaagcatattgtatgttttcttttataataaagttttactcaagaagaaagaaataactgttgatttgccttaatgtaaagggccatgtagatatcaaatggatataactatctgctgaacttggccaatggccagtttagaactggaatcagaacctacaaaacctggagatcaaactggctttgaactggactggattggcgggtttgttctaggccaaatctagattttttctattgttttccttttcttaaaaaaatacttggaaaaaaattcaaccattgtatttgatggaaccagaaccgtgtggactggttcctgattccagttcgcttgaaacgaaaccagcagtccggatcaggttctggtcagattcaccctgttggccacccctactatgccatgcaggctccatgtgaattttattttcatggcaccagccaaggatggtacttggtaacatgtgcaaatcataagaattagactgacaagggaaaaagttctaaattgaaatgatatattgggtgtgtgtctaaccttaataggtctttgcaataatgttttcagtaattccatgttaacctaaatgcaactgtaatttaaccatgattgggttgttaatgaagttgcatccaaccaaactaagcctgagggattaggctctttttttttcttttctttttttaaagtttttgttttaggcttcactagttgaaatgaaatgcaagtccaactatttgaaattgttgaaaatgcaagcaaaggacagtttttcctgtactatcattcagctacaatttcaatatgatcctgtaaactctgattttgtaaatttgttaatttgaattatttgaagagaagtaatttgttgctaacatatacaatggagtatattgttgctttcattgcctaaatttatctcaggatttatgactgaactttaaatttcatgaaatattgtagaacttcttggtattttctggagctgtgaatgatttaagacgagcttacttctggtatgctgaggcttgggtccaaaaacagacaacgagcaacattgttcaaatcttactcatttaacatacgtaaagctttctcaacatggttaacaatgaaactattcacaaatttattctgaaaattgaaatattttcttaaaaaacttgactatattctgtcttgtttgttatttctaatattagtatgaatcaataacttttgtgggttgcatacacccaaaaaatcaagaaattatagcttttcttgtttatcttttgataaaagatggtttaaacaagaacttttgatgcatttcacatcaaatatatgtaaagcttgaagtcaaaatgaaaccattattagcttcatatatgagctgataggcaatcttggtttaacaaatgacttcaagtgaacctttatcatgttgattcttcaagtaggtcgtgggttgccagactcatttgcgaccccatttcctgagatattctttttccttaaacctggttttagggattccttatagctgctgttggaaacttacctgtatgcaagtggtgatagggtgcagtagtggaaacttttgatattggtagtgtttctgctttgatagcaagtgctatatcaaattaccatggcaacaaattaaactaataggtttatgtgtgaaatgtgttgttacttttcatgtgcttcaagattgatgttttcttatatttttgtttgtaatatcaggttgtgactgat

SEQ ID NO: 5707 - DNA, 3816 bp, Manihot esculenta
  Intron number 1 from transcript cassava4.1_019635m (locus cassava4.1_019635m.g) derived from phytozome v7.0 (chr-ID scaffold12686; pos 78855 to 82670 reverse strand)
cgacatctccacaaaaattgactgaggtaaaacttctgttttttatcttattaggccttttattatctgcattgtatgcaatgctacataaaagttagtagtactgtgttagatgccacacatgacactggagaaatgttaagagatttttattcctagtcaaatgaaattttatctttgcaattttctctagagtctaatgtaagcagtttatttttcatttataattgctataatgaaacaatgaccaagtataaaaatgatcgcgtagcttcatatattttaagaaaaattactatttcgtccttatagaaaaactcatgaatttgtcattcagttttgaaaattacattaaaatgttcttgaattttttaaaaaatctactgattagtccttccattaattttagccgttaagtgtttcaaaaaagtctaaaatgtcttcaatatggaagactaattagtagatatttttacaaaactaagagatcaactaatgagttttttcatattacaagaattaaattgtataacacttaatggctttaacggctataaccaacaaaatgactaattagtagaacttttaagacctcaagcatattttaatgtattttgcaaagtatgggaactaacttatgagttccccataccacaagtctaaattgtaaatttccctaattttttttggcaagtggtatagtgatgcttagacacttgaaggaactaggttttcccaaacgtgtaagcttgcaaagtttatttgctgaatgtgattgtaatttaattttttatatgcaattttctgataattttataaaatgattttaccattctatattgatttttaataggttaaatatgataattgattgctatgataaattacgatagctatattttacccctagttaaagttggtttactttatgttttatttcttttaaaaccataatctttgatttcaaatttcgatgtagccaattaaattagcctttcatttttatagtagaaaattacgtggggttttttcccatctcattattttctcccttcccaattttatatattgtagctgtaagtattagatattaaattaatattaataaaataaattttaaaaaataataaataaacacaattgcagtgatagtgttatatgtatttaattcataatcacaatttcatcctaatttaaaagtctaaaacaactaaaaaattaattattatttaatatattccaggaaattaagaaattttaaaatttcaatatgtaagaggtttacctaaatctataggagaggatgttttagcaatatatgtatataaataaatttaaattaagagaatttatcagtaaataggattctactggtttgtatttttaaatttttatatgttcaataagttaatttgtattttatcatcttattatctaaagttataaatttaaaatcaaaatttatttcaatttgtatagaaaatatatatattaataacttaacatttctctttagcatttaaaaagaagattatatatgattgaaatatataatttctgatttttaaaatttattattttttatattcattatctataagtttataacattaaaactaaaggaagaatttaattaattatgacaaatttaaatcttaaataattaagcatttaaataataatttattctaaaattgatttgttgcttgtgagtaggatatttttatatgttattttattttcttgctttcgtggaaactcttgtttgtagaattaatgtgactttctaatcttgatagttgttttactagtgaaagactttttttccccagagaatgaggctaaacaaattaaatacgaagtatttcaaattcttaaataaacaaaactcaacgaatttttttagcagaagaattttattatgaagttggaaaagtgagattgtgctcagtggaaactcttatttatatattcaatgggacttttacctttctaaggcagtaattcctgtaacaatggaagacttcttgtgaaagagaatgaggctaggcaaattaaataggatttattatgacttcttaaataaacaacaattaacgaatttttactgaagaatttttatatgaagttggaaaagtgagattgcactgcgaaaaaaaggtatatttattctaaaaactttatagttaaaaagttcagtttatttaaattttacaatatcaaatcttttgtgtatacccttttgtcccacaaagataggtttacttctaattccatatggcctaagaaaatacaattaatatagataaagctataaattttattcggtatttcctaatataccccctctcatatttctctattgaaaattaaattatttatgttactatgttattttttgaattgataaatttacccttttaatgcatattagtaagccaatgaataaactatcatcttaaaaaggaaagtggcttattacttaggatggataagagaaagaaagtaagcctatctttctaggatggagggattataatttattaggatccctaaatcttatttggatttttattaattaaatttattatagtgattaaatttagtttagtagccaattaaaataagataaaattagtattttgttgttatattactaaaattaacatggtccattattccccatgctttccacttttatatttttcgtagaaaattcatttggcgagtcatttttatacaatgagaagtaagttatcatcagtttggtgtcgtctattattactttgttttatacacactttatttatgctttatatgtttcaccattggattaaattttaatcattaatctaatggtagtttgtaactaagtatgatttactttgtgacatgcaaagttatcatataatcttccatcagtttggtatcatgttaggatgactctgataccatgttaatactctacacccaactctgaattgtgaagaagaagagcagaagaagagacctagagatttagatggctctgataccatgttaagttcttattagaaaaaaagaggaggaagggaggagaaggaaaaactataaaggctacatctttcctcaatttctatatatctttattatatcgctttacataatacatgttgcatatttatataaagaactacgagatttaaatccttaaatcaaggaagacatattccttgaattaagagacaactaattcctaaattaaagagtaatattctccttaatttaagcagaatctcatcaatttcaacaggaacatttggttccatgatattagtcaaaatggtaatatggtgataacagaagaactgtaatgtgtaaaagatgacacaataattactttgtctcataagtctcaaagtgctatactgctacatcgtgagtcgcaatatagaaattttattggaaccattttaaaaaattaaatgcagaatatattgagtaatgttttggcataggatatcaagcacctcctagattttgttgtttttagattgaaattggattggcataaatttctggctttagcgatggcaagaacagtagttcaatttatgacttttgtttgacattagagttatgacagttttctgcaagaacagaaatatatccaatgttgttgattgatccagtgaaggaatattattttggttcagttctcactcactgtctgtgcaattccagggtggtaaatatttttaaaattgtagatagattttattgagatctcatgccttggaagttgtaagtttattgaacacgaatttgtttatgcag

SEQ ID NO: 5708 - DNA, 2451 bp, Manihot esculenta
  Intron number 1 from transcript cassava4.1_001870m (locus cassava4.1_001870m.g) derived from phytozome v7.0 (chr-ID scaffold08316; pos 122770 to 125220 reverse strand)
aaaagaaagcaaagcttctatatttgcaggaggaggttggttacatctgcttgatttcttctttaggcaccactatatttgcttccttttactagtaatttcatgataattttctttccttttttggttttacccctttgctttcatgttgaaagaaatattattatattgttaaaatattgatgcttgtttgttggagcctctctggcataagtactttattaagaaattctgcttaaagatcatttgctactttgaattttgacttggtgtactttgcaattcttgcatgcaatgtacaataggtattttggtgtatcaaacaccaagttttgcttgaccgtctacacattcttcttcttcttttttttttttttggataaaacccacatacatgaacttagaatcacatgccactaaaacacacatacatgaacaaaccgctctcccaacctaggcgtttgcattccaagtgaaaaaacctaagaaacctcaagtcagccggatagtgtcttcggtccatcatggaccagctacataatgcccggtagattatatgatgttacatgttcaatgctcaattttacattgaaacttaagtgattttgtaaataatttgagatggaagataaagcatgaatatgaacctaaaattttagtatctgaataggtttcataaaaaggaaagaatggttttaagattggggaacagtgtcaatgaagcacaagagagaggaagggaatagggaaatccaggctagggaacatctaagtctgtgaaatatcgcattgtcgtgtcatgttctgttgtgaattaataagcactgataatatatcaaaatcaaataattgtgataagaagttgatcataaggttatgtttaacagcaaatctgcttttattctattggattttcatctctttgccatttgtggatgccaatgactttgtactctatcatctgttttagggtgagatttctagcatagtacatcaaagttgttgcatgggatgcttatggattactggtcctacctttgtcatcatgtaggcagcattttatgaaagtcttatttctctttttggctcttaactttcgtcttttcatctcttaagcctttctaagtaggtctgatctcaggattagtagctatgttttagttcattgtctatgagtgactggctagctaaataattaattgtttgaaagttaattgatgttcaatatttcagtcacataatgaaaccatgatttcgcctatagctacccggggtgagcctcaggtgtaattgagagaatatagtaattttcttcttcttccatttttgctcttccaaggaactgttgctaatgacttgataatacactgtttgaaatattctatgatgtatattttgctggaaaattttatccattgatgaggctccttatattctcttgtgggtgtttcagtctccacatgggatctttatagtaatgcatggaagagtcatttctaatttgtttaagttataaattagattaaaaaaaaatgcacatttctgttttaagattatgttttcttcttggccttagctgatctgaaattggattagaaaatttacatggttaacacatgcctaatcctgtggtttcatttatctaatttcgtgtagttcaattttgagattatcttgtttatctcaatcctgatggtattttcttaaaagggtttccatgcttaatcacctagaacacaattactgctatagcacagcggaggaaaaaaaatggagcagtggcagggaatacggtgaattcaagtcctttaatactcctacgtgatactaaaatttccaagaatattaaacattctttaggttgaaggttgcaagaatagttttgtgtctgttatattttgataaaaggaaaggatgtactactgtggtagaaaaggtttcaagattcctgcttgtaaatagttgcaatgatgaaatggttaagattataattcaagggaacaagaacaggacattgatgtccccactttcccatttaagattaagtgaagctggacttgttcatgtgaatgcaatcatttatggatataaacagtcatgaggtcccctcaccaatgttagaagtcttgttaattacatgacatatttaacagtacactccactttcaaattccaaaaagttgctgtccctataatgacaccattattgctgtgaaaaaaaaataggctgtttatcttagcttgcttagtaaaattgctgtctaccactcatttctatctaaagattttcttattttattgtcattatcattacaagataccatctttctaggattaaattgttcccccatgatggtgtatgctcatgggattgtctagaatctgtatgcttttaatgttgctgtagattttcaagattggtgactttgtagctctatgttgttgacaggt

SEQ ID NO: 5709 - DNA, 1178 bp, Manihot esculenta
  Intron number 1 from transcript cassava4.1_004167m (locus cassava4.1_004167m.g) derived from phytozome v7.0 (chr-ID scaffold06914; pos 902020 to 903197 reverse strand)
gctcagattagtggtcttgttgctgctaaggtgctaactacagtaccttattctttgctttttgatctctacttggataactctatttctttgcattggatttactcttgctcttgttttagtttagtgatatttttcttctttgacatcagtttggggcctggtggctcttttagaaaatttagccttgattgtttgcattcatatgcaagtatctattttgtaatctgctagaccgaacactcctgtgcttcttaacgtcaaacagggtgtatgaccccaaagatttgggttgaatcttatcttgacaataaaatgaaggaacacaactgggttatttggaatcagccactttgctctttgttttgccattcctatatatttcaagcagtggataagaaaaaggtttgttgacagggaggaatttgagttggtagatgcatcttagaaaaattggagccatttaatagattagaattctgaggcaagtgttgcaatccttaatctgcaaaatgaaaatccttttatagataatgtaattgcagctattgtcctaaattcaaaaatatcggtgcataaacgtgcagtcattttgaagtatgtcaaggaattctttatgagggtggtttcttagggatggacaaggttcatttatgaatgtactatgcagagggtgttaggagtcatatgtagttattcctgtgtgaggtgaacccccagatattcttatatacttgagaagagggcgcttgcttttaagcgggaaaatctgatttagggagtagggatgggatcagttgaaatttgagcagattgcacgttagcatgttggagcaatgtacttgtgcagcttggcttagattagtaggttttattgtattatgagttatatggttttttatttgatcacggaatgatattttcctcacttcattttcgctgtcttttatattcacctgaaatttgttttgttttaattattctatcagactgcatattaatattctggtttgcactggtgcatgagtagaccattttgtttgatagcttattgcgataaaagactgcaaagcttgttaaattttaaatatgaggttaccgcatatatccaattgacttgtctgttgattaaagggaaaaacaaagctatctcctattgacattgcttttttccagga

SEQ ID NO: 5710 - DNA, 653 bp, Manihot esculenta
  Intron number 2 from transcript cassava4.1_002898m (locus cassava4.1_002898m.g) derived from phytozome v7.0 (chr-ID scaffold05865; pos 30127 to 30779 reverse strand)
cttctcattcaacatttggtttgaagaaacttaaggtaatgagctttctcaattgttagcttaatattaggctcaggattccgaaatcattgttattatcaactacagcttaggttttgaaaaccatgactccatgagtaggatgtggggaaaattttatgcaaagaagttgttatactgttagtcttttgctgaaaattggagagagttgttccatttttttctccaaaatagtacaaaatattttgggggtttgattgctttcagaaacatatctatatgctttatgcatttgggagctcttgaacttgcatggtgagttgtgatagcatcaacttctggaagttgtacactaaccatcttcaactcaaagattctgaatatttaattagtaggtggtgtcacatcagtttctataattttatgctttgtaacttccaaattctttccaactttatggatacggtcatatggttgatgagacgtctggctagaaactattgtggcaaaatgataagttggaatgtattatagtatattatgttacataaaagctagcttgtgtttatcagttcatgcttctggttctgatttagtaatctccccacccttttacagtatcccgtgtgtactttacttgtttttgactcatc

SEQ ID NO: 5711 - DNA, 1328 bp, Manihot esculenta
  Intron number 8 from transcript cassava4.1_007641m (locus cassava4.1_007641m.g) derived from phytozome v7.0 (chr-ID scaffold09507; pos 4956 to 6283 reverse strand)
ttactaagcattttagtttcccttggccagtgaatgtgagcatcccttctgtattctatggctttgtaggttctaagcttgttcatagggatacttgaagttgagtgtcgtgtatttatatggtgtctagtcattattgccatccacgtcgaaaataactatcacagaacaaatgaacaatataaccattcaagaaattctattggagtgaatatcctgataaatgtgaggatgtcaattttgtgattttttgacagcattctgtttaaagactgacgttgaaaaaggttagaatctaacctcaaaacatctttggatccacaaggagagtaaactctggagtgcgctggagtactatctcatgaaacaatacatgcctatttataaaaatgcaaaccctagttttacttgggcaagtctacttaaataagtacgctagaactgtggaaatacttttcgagtacgaggaaataaagctgaaactaacaagaagaattaatatgcatgaatgctattaaaatcaattctatgtgaaatacaaagacctctccactttgatgaaagcttatactcaagtttatagattaaaattgtaaatcctttcaatgtctttgtgcctttaatttgctcccagagtaacttaccatccatgcttcttcgttgaacttttatctggttgttaatggagctattaatgtagaagtagtggatttgacataattaacccaataagttcaatatactgaactcactgaattaacttttccaatttattaaactgcaataatttgtcttttttagcttttaattcttgatcactgttgtaaagttcattgaatttaatttattcaacaaatttaacttgacttgtacttgcaccttccctgaatttttatttgtccaactttgttatattcagactagaaagttattgcaattttcggaggccatatttttcttcagttctgtcatttagaaattagaatgaaatgtcctgtccacaaatttgaaaaaatccttgataaattttcatagtatcaccatttttagtaaaataaaaaattatctttgtaataattataataaaattcaactgcatatacttttgaagtcattatgcgactggattgaacttggggctgacccttcatatgtgggtttggtagagctgagctgagctgactgcttttatattaaatttatgtgatttaatgatgtgggcacatactgcttatcatattttgattaacaaacaagcatgttctctaatttggatttaatatgtcatttttttcatctctgtttgcagcacacctcactgagtcctg

SEQ ID NO: 5712 - DNA, 765 bp, Manihot esculenta
  Intron number 2 from transcript cassava4.1_025054m (locus cassava4.1_025054m.g) derived from phytozome v7.0 (chr-ID scaffold01508; pos 373833 to 374597)
gagaatacgcaactgttgaccctgcacttgtagatgtatgctctcttttttttttggtgtattattcatttctttatgaaaatgcttatgaaggtggggacatttgagatttgtctagatcagtaatgtatctagttctccttttgcaatttttcatgttttatcttggggtatcacttaagcttaatttgttgtttatcttccatcgtctcattttgttttcattaatagaagttaatcccttttctaagtgtttgtatgctattatgtggtattacaacactcaggcctatggaagtgattttcatgcttaatgaacacttctcttagttaatgtgtagtcaggaaagtgaccgagctgaactcttttattctttttttgggagggcagggatggggtaggcatatgtagctgttgatggaaatttttggttgttgatgaagtatatgtagttgcctttggaaaaggtaaccctcggtgaatttgcttgtgtgaaagcagttcatcacagtatctttgtattctaatttttaggagctcagttttagttattagctagcgttggttcttttatatatcatgttgcaagatcctttataaaatcaaaagcaaaatatcatattaccaaatccttttaacacctgagttttggacctctctgttttctttagtctcttgtaattaagtttaattggtattctttgatacacagaatatgttttcacttccatttctcactcttgttttatagtttgttggcaccg

SEQ ID NO: 5713 - DNA, 485 bp, Manihot esculenta
  Intron number 3 from transcript cassava4.1_018436m (locus cassava4.1_018436m.g) derived from phytozome v7.0 (chr-ID scaffold08265; pos 3832611 to 3833095)
caattgacattggaaggcaagttgttttttcttctcctctgtttatttattagctacctaactgatatgtggatttctctgtgcttgtgatttgcggattattatactcgtgaaatttgtagatagatcaatttaccttgtgttgttgggttttctagttccagtgttttcatctgttcgtctattcttaactgttgatggatttgtcattgtgatgccattgtttctttgtttggatgccaagaattcatttgaccgttttctgtagtcaattgtagaacttgtcaagtagcctcttttttttttcttcctcaagtcaaatgcgaaattcctgttattctgtatttatgatcctttgaagttctgccaaaaaacttgttaaagaaataattttcttaccaagttgatgcaagacaattttcctattagttgcttgtattctttctaacgtatctgatttgagaaattacttgacatctgcagaa

SEQ ID NO: 5714 - DNA, 986 bp, Manihot esculenta
  Intron number 5 from transcript cassava4.1_009013m (locus cassava4.1_009013m.g) derived from phytozome v7.0 (chr-ID scaffold07035; pos 886116 to 887101 reverse strand)
ctgcgggcgctgtgcttgtacaggtatggtctatattttgatgactttttatgtttttttattttttgagttgtacatctgcattagtaattatctttgccatatgctattttatgatttaattttcttgctatggttggtagaatttttttcttggggttaatgacccaagaagtccatagctttggtccaatttgcaattgtagccaattcctttaatactacatacaacctttcatatttttattaattgtaggcttggagccaaacttgaaagaacgaatgctaaagctatcaaactattaacatgacatatattttattgagaaaaaaaaaaaagagttcctcatattagcatacgatatggtatattcagtgtaagacctgtaaaaaaaatgcattaatatattttaaatattattaattattaatgctcaaaatttagaaaaataggaaagaaaaatctggatcatttcattgcatcttttctttctatttctcactcattagctatttcataataaaatgtatgttttgtccatacttttgaaatttagggacatactctaaagcaatgttttattatgttttgtgaaaggattggttgtagttgcaaattgggcgagaagtattaaaaagattgcttataattgcaaaccggatcaaagtatggactttttagtcactatcccctattcttttgatcacaacctcttcatgtgaggctgcatgtgagattgtcagttagatgtatttcctcaataataaaccttcaacgacacccaggcagtgggaagtatctttatttcatcttcagtatattgcacttttttttttgtagtggggggggcgtttagagctctcacaaacttagttcttccctgtcttgactctcctccctctttgttttgtgtatatttgtaaacgatcaatttgtagctgcttagttgtgagacatataattgtgcaggcctgtgacagtgaag

SEQ ID NO: 5715 - DNA, 3903 bp, Manihot esculenta
  Intron number 1 from transcript cassava4.1_010001m (locus cassava4.1_010001m.g) derived from phytozome v7.0 (chr-ID scaffold09501; pos 699340 to 703242)
ttattctcgttccgatcgatactctgacgatcctggttcgtcacttattttttttcttcatctggatctgttttttttttccgcgtctttcaatattttaattgctacatctaaatttgaagcatatgttaatcttttgcatttaatatttggatgagtatttgaaaccctaaccgaggttgtagccttcttttagaatcaataattttttaattcagttgtttttttctactaatttgtttggaatgacttaaaaaattttaaaaaatttgaaatcatgcgtgattttgtaattttgttttttgcaaaatgaataatttcaaatgaaatgaaaggataaagagttttaggtggcatatataatcgatacatctaaatttgtaacaaatgttaatttattttgcgtttatattgagtatttgaaaccctaaaccgaaggtgtagcacatatatatataaatatatatacacacacacaccccacgcgcgcgctctcgcgttgtcttttttattcctggttaaggttcttaggggacgtgcagggtattgttttctatgctcatgtagcttaactcatgatatgcagtttttgaggttgcatgggcaatttcttacgtgattagtagttttatatgaaacatgattttttaattgatgtgagaaaagaatcttttccatccttgtgttgatggtatgtaaagtcttaaggtttcaatattggacgatgatgcaatgggttattgcagtttatttctattgttaaatatgcaatttgctttgtagtcttttgatgttgatattgcagctaatgcttagctcttttatatgcgcaagtgaggaattgcattgtattgaaatttcccattgctgttatttaattatgttagaattaggaactattgagaatagaaatgagagactcaattgtaactgtattggtatttatccaaattggaggtttaatgaattatagtacaatgtccttgtctactcagaatatctgaaaactagtaatatattaattacaatgcttaaaaggaataacagaaaaaggaaagataactccaagatttccagagaagaattcctggcccagaaaatctgacgttacaaagaaataatcaaaagtgtgcgccttcctcctttccctcttaactgtctgccgttcaagaagcttctgccatctatcttgaaacttcgaccagctcccctttcttgcagtcccacaaactccatttcctttgaacctcccgttggtgtgcacattcaaagctctatgccctctgtcattccagtccatccttcttgcttgatccataagaccataacaaattatgtattctcaatattgtcaatcgtgttatttactaagtttttgaggaagatagtggagttttggattcataattctattttagcctttattaatcctgttctgaacaatttattttttttcagtctgaaaattggtgtgggaaaatataggatgcagtgcattataatttttggcaatcttcaaggattccgcctgttaagtttatggaactttgaaataaaatggagatgttaaacatttgcaaacatgggtgtgcatgatccagtttgacatgattgaaatttcggtttgatatattttttcccaccatactgaactgtttaaataggatgaattgagacggtattttgtaagtacgtgattatcttgaatatattaactttgcataagaatcaagtcaaagctagttgaaatattactgcttgtttattttctaatatgatttaatgttgacttcaatctttcatagtcttttataattttagggtagaaaaaatggttcttacggcacttagtgtttaatattttctatcttctatgtttttataacaattttgagaatgttttgttattcctttttcttttccatttattttttccagtttcgtatctttatttattcagtcctataatcatattaagtaggattatggctgatgtcatattgtcaatgcatttgttcttaattacaacatgtaggtaatgttgccttttcttttggttgtatccattgtgctgcatgtcaagcatctggatctacctaaacttatgagtgttggtttgcaaataaaatttgctgttgtctgttacagctttgaatgttgcctacaagaacttgggtcttgaggaaggcatgttggtgtgagtgcaatcttggatcatgatctctgggttttctatcatattatggttattatggttttgggtaatgtcatctatcaatattatgaatggtgtacaggcataggcatcctttgttgtgaagccgttgccatttgttttggtttggaatggtgtgggctaactgaatatggcaccagcttcagcaatatgtgggttttaaatttcaaagtgactaaattgcatttttacgaggtatttgcctttaaggatactgagttaatggtaatgacaaatggtttgagggatgtctgcttgtcaaccataattatgtgaggttggaatgtcggttgtaagtaacactatgacaatgaggctgctacatgttgggttcaatggctttgtttagtggtgctgcaggcttatcatttcttgttcctggcattctgtcatgggataaaaagtttgtggatggaagtgcatgatattgaacttcctggtaacagataaattctagctgctacttggatttgtggaatggaattatccttgtgggaatcagggacttgactgggtttttgttttttagttttctttttgtcatttcaatggtttgagatgatttgattgtttattgggtgttaagtgcataaagaccgggacttcttttcgcatgttgcttgtctacattctgttagactctttaggtttgttttttgcttgtgtaatgggtggcaaatttagtttgggttgatacaggtcacttagactctgatgattgtttccatggggcaatcccctttacttttgtgggtgtaaacttctgggcaagcataaccaacggcagtttggaaactgacagataacaccgcgggaaatcgggcatgccaatacaacttcaggcccccatggtttttatggattgtggttttgggtggaaattataggatcatgttcttttgagatgtctggttgaacctttttaaaattgcagagatggtttttgagaataagtggacaaattggtagctggttgattttcaaatttttggctactgttaaactgtggtgggctgctgttggtggtttgtcctggatatggtttctgctgttagttttatggatctctttcaaaaggggtgttttgactaaagttcttggaacaaactcgtgcttgggttagagatcttctttgtggatgtctgtaagctaggattatatcaatctgttgtatctccaggctggagatactgactatgttcgagcctgttgctgccaacgttcttagaatgaagttttggctgccccagattcattaattttggaattggtagatcggtagataggttaaaaaggtataattaagcatttaatggtcaactcattaatgtaggaatgttggacttgtttgttctcatatatgatgagttcaagtaattgtggtatagctggctccagtgtatttattgataatgtggaaaatcaatcttgaaaggtaagcaataatggaagttctgatgtgaacagcatactgatattctctttctatggaatctcttatgaggagatattctgcgatatgattaatatcctggtcatttcacagttcttggctctaaagttatggatagggttactaatttgtactaaaaaaattttctcccttgtcttattggggtttgcttatctttagatttttcacttgtttttattttccaggatataga

SEQ ID NO: 5716 - DNA, 1248 bp, Manihot esculenta
  Intron number 9 from transcript cassava4.1_005215m (locus cassava4.1_005215m.g) derived from phytozome v7.0 (chr-ID scaffold11897; pos 277325 to 278572)
gtcagtgcaataacaacatacatcgattctttcaggtattatttttcccaaatggttcactcagttctttcagatctgtgtgctgcagtgccaacttgttagatgataggcctatcaatcagaatgcagatacttttatttttatgttaatgctcaagctttaaaactttggtaattaagtgcatgaaactaatgccatttttataatcaagtgcttttatccagttaatattgtgagaaagctgacttggataattgggctcgcttttctttgaaattcatgctgatatgggaatgggaactgggaagatcaatcacgttcatggggattcatgtcttttaaaactgtttgtatcctattgcttcgatggatttgtcatttggttcaattaattctttctgcatgaccaaatggaattatttttcagcataagtttcagagaaaaattagggggcttgatgtctcacattattattccagttgctatgctagaataagctagtaggcatcacattgtacaacctcacttctttatgtcatccaattatatttttaccaaacacacttccttgcagcgtactttaaaaaaaaaacccctcaatttattggaatataaaattattcataagctggaaatggtggtggagcaagccaattattcatatgaacctcccttgcaacactgtcatgacatgtggcaaaagttgcttttgcttggctttttatgatttgtagtttgtttttacaagccatttcataaatgacatgacaagcactgttcagtgctgataactcaatatgtttggttaatgtttgttaagaatggaaaaacaaattacataccccatgtatttggaataaaaaaatttatagtaattcaattctattgtttttctttttggtcaattttcatgtttgaaatgaaagaatttaattctttttaactaaaaaaattatttcaacagaaatagaaatcatttttaattgtaaaagaattcatttgaattttttttcttgcaaaaattggagcatcataaataagactctgtgtattgcgaaatagtgagttgttaggttgaggtttaattttgaattacctgccatcttaatacctcatgaatgctaagaattccttagtaacatgagctcatgggctatgcattctgtctattttcttcttcaatgttttcaggtatatatattcaggaataacagaaatgataaaaatggtcggtgtatttgcaggt

SEQ ID NO: 5717 - DNA, 657 bp, Manihot esculenta
  Intron number 15 from transcript cassava4.1_000114m (locus cassava4.1_000114m.g) derived from phytozome v7.0 (chr-ID scaffold08473; pos 70951 to 71607)
ggaactcctttacagaacagtgtggaagaactttggtattaatttctctctctatgattattgctggtcttgcaaaattcagaaggaattttgtgttgaatttgctcccttcccttgcatgatggccgactggattctgaaaaatttaacaatttcattttcttctctcatctccttttgttaatttcttatataaatgtggtttctttttttctcttttgatttccttggcattgtgatcattttgttacttgcaaacagagtagtttctttttattgattttgatgtatttgttgttaaattttattttttccctttttactgtaatatttattctaattaaaagtggattgtgtgctcttcattctcaaggttaagggtataacaaaaaatctgtctggcttgtttttgacttgctggtcacaagtttcatgattcttactgctttggaacttgaggactatctggattatgttttttaattgcaagaaaatacaaatattattttaatgttttttctttttgtaaacagttttggtgatctgttatcctttcccgtagctacaaatcatgcttgtatcctcagcttgtatgattttctctgtttgctgactataacagggctctgcttcacttccttgattctgacaagttca

SEQ ID NO: 5718 - DNA, 2377 bp, Manihot esculenta
  Intron number 3 from transcript cassava4.1_003266m (locus cassava4.1_003266m.g) derived from phytozome v7.0 (chr-ID scaffold07195; pos 200698 to 203074)
aagaaagtggtaagtgaaagcaggaaaaaggatttttcgagttgcttttgttctagcaattgtttaaagagatattggcaatgtagtatgttctctctaatttaacctggaagtttataatgttcacagttcacctcataattgaaatattgcacctcaggtataagggaactaagcagtataatgtattcaccatttcatttctacctatttcttaggtaatctacagcagactttctttttgaattaaaaaaagaaaatttgtgcctcactaatttgttcatggtcaaatttgagagtttaggcctgtaaagctctgactcttgtagcttgagaaggttccttcaattgctttacgcaggagtaggtttggtgtttagctcataaaatatgtttctataatcaatactttattttttgtctttttttctctcctccttcttgatctatcaagataatgtctgtatttaagtcttttttttttttgaaattaagggttatttaagtcgagtattattgcaatatttttcttctgggcactaagagttcgcttgatattattgttgtaaattgtaatgctggatgttgaaattaatatattctgttaagtgttatcttgttaagtaccaagaggtgcaccctaatttgttctattcttatagaataggtgctttgagaattagtgaacatgctagttttaaattcgtagattctagtggcacaaggtgcaaagttatccagcaccctaggctgcaaagtgagagaggtaaagtgcaaaagaaaaaaaaaaaaagaagacaactatcctatataagataaataacttagaattctggcactaatgtttttgaattccccaaatagaaataaaatagaaataaaattgatgatgtaaaaaggttttaaaccattatattcctactaaatagcaataatccctaaaacaaacaaccagaagacaactactcttaatcaagcttaacatagtcttcttcatcttgacaaaaaaaaagaagtatgctatccgtctgacctctttattttctgtaatcacctattgctgatggtaaattttcaaatttagcaggaaactatattaatggcagatgaacttcaataaaaatggaagcaaaaggaaacaggagcattaaagaaaaaaaaaaggcaaatcatccaaaaaatggatactattcgaatgttatccggaaaggaagaaaaaaagtgacaaagaaagaaaaaagggtggaaggagcttatgaaattgaataagatataaaaagaggaaaaagtaatctcatggcgatcggatctcaagaattactcaatctcattccaaaatatgagcagtttcaccctcatgttgacaaatataagcttaacctatttctttttattgaactataatcttgtgtatgttccttacatatgtatggcttttttttaatgaaattacatatgtataactttatatgtttgtaattgtgaatagaatcttctctgagaaatagaaatagaatgtaccatcatatatgtattgagtgaggagagtagaataggtttcagaaaaataaaggaccaacacaaagaaaattgggatcgaaaagaaggatgatggttatgagagagagctggttgcaagctgtagaaaaatctaaacagtagtattttcttccctttgtgtaggcaggttgtttatttccaaccgatgttggcttctttctttctttttgttgttttagtttgatttggtctatttgaaaatggtaaagtcacttgtttttttcaaagctagagaaaaatatgtagaagaggtgtgcctcactaaggtaacctgcctgtcagggattgaggtgctaggggctttgaaaactgtgttaaacttcaaactatatgttggacctagaatttaattagctagtaaaaaaatgtaggcacctaagaattggatttaaattacatgcacacggcaaagccctaaagaatgagatatgtcaatgaggagttgacatgtaatcattctctagttgattggtttttccccgtcactcagtttccatattgttaattatccattccaatttcttgaatataacagttagttctacttatgtaaaaatacttatgcactgtgcagaacattgtagtgaaggtgactaatattatgcacaatgacatgcacatttgtgttgttttggtagagggattaatgattggattttccttttattcggggcagggtgagttgatggcttgcacccatctcattgtttcgtttgagagcaaccatattagcacaataatattattgatatgatttacaagactatatttgaattgctattattgttgactattatctgcaggtggagttttgttg

SEQ ID NO: 5719 - DNA, 2858 bp, Manihot esculenta
  Intron number 6 from transcript cassava4.1_001923m (locus cassava4.1_001923m.g) derived from phytozome v7.0 (chr-ID scaffold07520; pos 600108 to 602965)
gaaatttaggcatattttccgaggtaggtattgggtgtttgtcaatcagtggtgttctttcatagtcttctttgttttttgttctttttgtttttttatttcttttatagattgtgttaatatgtaactgttgttaaaatgtcaatacagtgatcacatcattgttactgtttggctccaagtagaaatttctattattatttggttgctttaaagtggtactgcaattggcagtgtaaagaccatgtatatttggccaaaatgataatgttttacaatgccagtctttgtcatatctcttatttggcatgagaaattgtgatttgattgttgaactacccaaccaaatttctttgtccttttacaactgtgaaattgtgtttgttaattgtgcaagtcagtttggatcatctcttcaattgaaagaccgcatctttcttgtaagttcctgtttgtgtacgggtatattttggtggggctaatccattccccctctctgtctcaatatggaatctaaatttccttcatggaattatttttacagaatccgttggtatggtagatgcataagctttatagccattttttttggcaaagggggtgggggttgcataagcctttatgtttttgtgtattgatcagtgcgcattgttgcagattgcattaggcgaaagtattaggtgaaaaatcagtgaagcttttattctcattttgagattggactttaggtagaatgttgcataagttttttggttctgggtcaccttgttttttcacctgaactcaaattcttgccaattgattgtcaaaagtcaagggtgattttgaagagttggatttggttgggtgcaccttagcgacttggattttggcctctgatattttatctatcaaacaagaagagctaaatatagtttctaatgccgaaatctaaacataaattattaggagaatcagtttctacttcctttgacaaattgaacgtgccaactgaattctacaaaactgaaaactaggggtgtgtttacttatggaaattttttttctgtttttcattttctattttctaagcaaattatagttttcattttctgtggaaaatatgtaaaaataaggaaaatgtgtttatctgtcaataataaaaaatcattttcaaattcaaaataataaaaatactcaactttcataattaattaaatttatttaaaacttaattagttttccttttaaaatcatttaccatgtactaataatttattttgtaataatataattaattgtaaatgtttttaaaatgattatttaattttagttataaaaatattgtaatgtgcttttttgttataaaagggtatgttttccatttggaaaacagttagaaaacttattgcttttcatttggagaacagttagaaaacataattttgttatcaaggaaaacagtggaaaacatcacatcttaaagttgttttccccagtgttagtgaaatgttggaaaactgaaaaactatttttttctagttgtccatttgaaaactgacacatgtgagcacaaaactctgttttccagtttttttagaaaaaaaattctagaaagctgctacaattttctgacaggccctagaatttttaagatctaggaaatataagagctattgggacagttattcacagtatttctggaaagctattagaaggaaaagaggtaaaatctgccaaaaaaggctttttgcagatggtggctagatgatcatttactggaagtactaagttacgttattgtgttgctttgtatttgtgtttcaatgaaatgatagaggattattttgtggaaccttaaatagtttatgtggatgataactccaacattggaaaattaatttttttttttttttttagtcatcccctgaatacttaaccctgaaataatcttgagtctatagtgatggcaatatggtttcatcctgcgagctgcagtagtcaacttgtgaaaattgatatctttcttgaccttggattatacccatgtgcctcaaatatttctggatcttactagtgaccgaatggggccatgagaccccaagtgctatctgctatggtacatgtgtaattaatattgcatgttcaagtcaatatttaagctaatgatatgaggtgcagtaagatggctcagtattacaatactgtcactggctcagtcgtgggagagggaagatgggtcaaaaataacctaatggactgctgaaagggagtttaacgggtttctgttagaaggtgctcctcatattattgattctttgtattgacagttgtagatgctgccacatgagctttgtatttcctttgaggattgacttgctttgtcagagggtgttacatataagaggaagaggtttagggaaaggtagtcgattttggagggaagttggctgcaggaagtttactttgttaagagacagttattctgctgagagagtataaaagtagctcaggaaagtctgtaaagcattccagagttatggagcaataataccgtctcttttccctcccagtttctctctaattctcttctacttctctctcttacttctccctaatctccattcttctctcatctctctctattctccagttagggattcaatcctaacagatggatggcagaaaatatgacctcctcagctttttctactttcatttgatgactcatttgaattgatcctggttatatattgcatcatacatgtgccaaggcagttttcttaaattttttctagcaattatattgttggaagctgacatcttctattccctgctcatactgcaggacagcccaaacggcatctgcttactacggg

SEQ ID NO: 5720 - DNA, 1288 bp, Manihot esculenta
  Intron number 5 from transcript cassava4.1_000515m (locus cassava4.1_000515m.g) derived from phytozome v7.0 (chr-ID scaffold06028; pos 73866 to 75153)
aggctgtgcgccagctacgtaatcttgtttcacaggtatatcttgtatcttggtttcaaagacatccttttgtcatatccttttccacacttcttgtaacggtcagctgcctgctttcgctgcggtaaccgtctcatgtcgggagattatagaaaatcgaaattgtatataatagttagcacgaaattactaaataacttggattaataattttggaccaagtggaaagtgggtcaaaaaattatttgggtcagattgggccgaactgtttcaattggtatcagagccaccctggattagacaaattgtgcggagctagtgggtctgcgaggaaagggctactcgtgagagacaaggtggagccgttcgaggtactagcgaaccacaatattcgagggtccgatcctgattagcaattgtattcgattcagttgcgatgagaatattgcaaatttagtgggaccggatatacggtcagctgcctgcttccgctgcggaagccgtcctacatcgggagattatagaaaatcgaaattgtatataataacttgtacaaaactactaaagaacttaggttaatcattttgggtcaagtggaaagtgagtctaaaagttatttgggtcagtttggacctcgctgtttcacttctgtttgcaacgccatttcatttttcatcagtggcattctttattgtttttctacttgtttaattaagaggatttccaactattaagttccattctgatagttaaacaataaattgtagcgtggtaggagatttttagaagtacctttatactaggtatttacatgatttaggagggactgagtgccgaggacaacttcattattgtttcatgctgaaatattcttaaagatcccaactttttcttagcatactggggatgttttcttaaatgtccgtgatattctattagttgtttgtcagtctccatgatttgtactgttaaggtcacagaatcttattttaacaactttttctatgtactctctgacaactctgtttctcaaatatcacccgagcaacatagttaatttaacaaatgatcttaaatgtcagaaagatttatttattttttgttgtttacagctttccatggttttgcttgaaatggtaatctagttttgggtttttaaggggacggagcctactggtgaaaacttgggatgtaatattatggtttcctgtgtacttccacttattagatttgctgattcttacacttgataggacccagtactctgcagtgtgacagtgggagtgtc

SEQ ID NO: 5721 - DNA, 1978 bp, Manihot esculenta
  Intron number 1 from transcript cassava4.1_021299m (locus cassava4.1_021299m.g) derived from phytozome v7.0 (chr-ID scaffold10563; pos 745958 to 747935)
accacgaccaacttcttcaatttcactgctttctggtatcatttatcttggccatctttttatagctctatcaatatttcctctgcaatgttttcagctgcttcgtaattcagttgtgctgcattaactacggatcattaggatcgaagtttgaactcttaaacttaaaagctaatactatattaaaaaagaaattgattctagcaatctgcagcacaatctaggcttcgaggtttcagtaaccattctggtatgatttaagatgcataattattgccatgattatgttttataccgtaagataaagtagaattaacttcatctcgaagcacttttgatatttgttatgaaaaaattatgaatcaactgttaacttgaaattttggcagggactctgacttaaatcttttatggcagcaaccaaatgatttactgtttatcttgtctacccctgtttgcaatgaagaatttcccaagacaattcaattaatttcttttttaacaattctctcgtttggaatggaagaattattcttcttttaacttaaaaaaaatttcaatttgaaagaagataaaatcttgtacaattttgtaagaattcatttaaattcttttcttgtaaaatgaataatgttaaataaagaattagggttgtacagttacaacatgaatgaattggttagcacttatcactctgtgtttctaatagccttgcaaattggagattttagattccaatggtttgtgtgtgtgtttagacgcttggtagatcttgttgaagttgatgttctgcttccaaattctttgacattctacttgggactgtttccattttgtatatggatatgccattgtttaacaaagctcatattgattttatgggtgtgcaggtgccatctggtgtatatttgaccttgttggttcaaattctttttgggtagaacaaactagtgtcaacattcgtccatgttgtttcataatctgcttagtgaaataaggaaaattttatcatgaaatttctacagtctagagtgggacaaagttcatcatgagtcgggtattttgagtttcagtagtactttctgttaacttttagcatactgaagccttgaaataaacatgcctgcactgtaccagcattcttatgtcttgaacctaattgtaatgattcactaagttcagaagaaagcaaagaggatgccaaaaactctaggccaaagtagcaaataatgtggaatacagctgctgcttttgatcatttaaatgcatgtccagtttgcttttatgacaattagttgtgttttcaacacattgaatgattagccaacactgtttctcctaatcacataccattagcagctctcatcacaaatttaattgagtgcacgcaaactaaatggtttaacacaagaatttttatacttaacaatatcagctccatacagttgaagttctgttggatatgcacttagtgtctgcatgtttccttgttgattcttatttgatgctttctgacttctcatgggattttaaaaggaccttcttttcctcttcagttatgctgttatgtccttataatcctttgaaactttggcgtggtctttgtttctgtgccatcctatctttaatgcattgaattttactttgtgctggtgatcttcatcttattttgttaactgtttgtggtgctcttaggcataacttaccaattgctgaatcatattgacagtgagaaaaattggctttaaaactgtatctttaaaatcactgcaccaatgagcatctattgcaagaaaagttttaaaagtatataacattatcagattaactgaatcagtactctggctccactgaacttattaccagttatacccgtccttttttttttctccgcaagacctgtaataactcgtagaatacaaatccaaagccctaatgtaggatttcttttttttttgacagctacctcatagcttca

SEQ ID NO: 5722 - DNA, 2955 bp, Manihot esculenta
  Intron number 3 from transcript cassava4.1_009646m (locus cassava4.1_008084m.g) derived from phytozome v7.0 (chr-ID scaffold04116; pos 236186 to 239140)
ctacctctaccagtacctaggtatgtgattgtctaaacttagatggaaatgacctatattttgctaatgaaactcacatgttaaagattttgttttgataacacattagctctcagcagtgtgttcttatttttttaatgtgaaagatgttgaattctgaactttcttggatagacatttcttaattattactgccaaattggttataaaccacaattcaaacatcatacaaaaagcagcacaagcactgcatttattgaatgttatatgcaactcaactgaactaatttgcaatcctaaattagttgtgatctgttatatacatccagttttttctgttccacttgaaggccatatatctgtagaaagatataatgctaaatcctttctaactacttcttcccatgtcattcaaggcctgcctctgacttcttatatcctacaacttcaatattcttcactttctaaactggtgtatctactgttctacaatggatgtgtcaaaaatctcaatttttttttcttccaactttctttcagtcagtggcgccaccaccttcctatgatttgttctggtgcctgtatttacacgctttcgtagctccagttctttgttaataccaaattgagtttgctctgctaagactgtcattcgtgaatgtgatgcagatgaggaatatcaagaaaattgacattcagatactcaagaggctgaggattatggttcagttttcatagagcttattagggaaatcatagtgtgttttcgagttcttttagatttttagttaatgttttaaaatattagctgctggtcctttatttgctataaagatattttgcagttactaaattgttggaattttatcctgatttctggagtctttaatttagagtccttgttggttgagggttgctttttgggagtccaaattctttaaaatctaggtctactttttggaatctacaaatacctatgttttgtaatgttgtttcacagtttctgatcaatgacaaattttagcaataatgtgttccagtgtttgaatttgtgatgcttatgaaaccttggatgtgaatcctataccttttatttgactgttcacaacccataatcctttttgttattcacttcataattccattcttcaatatggtatacaccctaattccccacctaaattcttgcttgtcctcgccttttgttaaactggtagagattaggaacttgcatcaaatcaatagaaaaataagactgaaatgaagaattcaatggaatagtttttcttcattcagattactcgatgagtcatcaaatgacgttatagcaactaaatggttaagctttgcctcaaggaggttctacttggcctagctgtgtctaatcctatgaagagggcaatgggcaatatagaatctagagaagcacgcagaccagcctttttgaagagacccagaattccagagaatcacatgatgtactcatgtgattccacacgcaagtgtaattcagcctctgcctgttgctccattggactacatggcctagctgttttgtcgaacacaggccgtgttgattttgcacttcagatttggatttttattgattttcatttgttgttcaagtttcctattttgcttagaataccttcttgaaccaatagatagagatgtattcctatttaatttaggatttgtaattttattcccattaaaaccatataaaacccatgtattttatagtttatggaattttatctttcagctttcattcaataaggttatgttatacaacatgcttgaccttgcttatccttcttagagcttccttgatttatgatgtattattcttcaagtgtaattaaagattcagcttcctttgatatattgtttacatggttagattaaattcaaaggagatatattcctgtgcacccagtaatgggcataatagtcattatgagaataatttttcctttgcctttaaataacgggtgccattgtaatggaaggcccaaaaacctataactaatggctgttattttatctaaaaccatgatttaaagttctaaaagatattattgaacatactagagacaaaaaatatatttgttcttttttccttgatcagattgtccttggcatattattctttgaacaaatcactcgctacgtcaagctgtaaaaaatcactttgaagaatttgtcatagttattttaggggaattctctgatatactctttaggaaacaagatgaaattctaactattgtttgttgcaaaaaatatagataggcattaccattgtgatatattattagttgagtacttcctatcccaaccatggttacactatgcttctagggactggtagtttttcatcttttaatgttctagatgtggcataattggtgcttgttgctgatgatgagttgaaataaaatttactaacttgcttcctccgtggtgaagtttgagggaatttgcattttaggagtttatttcttttcttattgtggtacaaatccctcaacttgaggtcgctttctcttcactttactagattctgttttgtaaagtaattcttttgtcatatcatgtcattgtcgaaatgagcagcatttatcaaccactttgtggaaggaaaatggagagcaatttccttgatgtattgttactgttgtgtcttggccactgtcataagttgttgctaccctgtttatgaatgaagcttttgttggtttatttcttaaacgattaaatttgcctttatggagagttgataaaaaggcatggaagggaagtttcctaatagtggttgcttattttacactgaacttacttaatgttattggacttccattgccctccctaaatatcttaactaaattagttcttgcctcctgatttcaccaattgttgttcatgaagttcttaatatgattattttcaggt

SEQ ID NO: 5723 - DNA, 4535 bp, Manihot esculenta
  Intron number 3 from transcript cassava4.1_008155m (locus cassava4.1_008155m.g) derived from phytozome v7.0 (chr-ID scaffold07478; pos 230719 to 235253 reverse strand)
aaggagcgtgccaacagcgtataagctgtttacaggtaagagaaagaactgatatattaatgtcactgatgtccatgtaaccaaagcacaattctaaccatttagcaattaagcacacaaggatgaatgatagtcccttgcttatcgtcctattttaatgatgtaggggttatttatgaatttgatttcatcttttgcagcctatttggtatttcttactaaagatttgttgtggtttgaactaaggggattcatgcgtaccagggaactctctttgttttccattttcttggtatcatattggtacagttcttaataccttaacagttatgcttcaggtcgagaagaagaacaggaaaagagacagggatacgatagtgggaataggattggtaatagagagaaggagattctagttttcttattatttttcacatacccatcccagtccttaatgactgaatttatacacgtactgtagctaaaataactgttcttgccaattgtttgctcttcttttctcatttctgttacagcactgttcttcctctaacacccctaaccgcttcttaactacctctagctaccaatagacctcttatatgtaagaattcccttccatgagtgcattcttatcctcaagaatgaataaatctggaactcagcctgaatgaaggttttgtcttcccaagtggcaacttcaggtggcaggttggtctattaaataagaccttgtagaacttgctggtgatgagtagttgcagtaattctagaccaaaagagatcaatacataccccctcggcatctttgctgcatcttcgcagcatcttcgagatgtatttggaagacaacagctgcagcaagggcttccagaatggggtgatactgtactcagaacattcgcaatgcaagaaccctttattgaaaaaaattgcattttcttccaatatctcctccaaatttcaaattcattctctgtgtattatattgatctcaactcaaaatatactgccaccaggatagtctcatggaagaatagtctccttagcattggaatgtcgtctcccccctcaacccttcaattggtaattccaactcactgccactactctcagaattctctgattcacggaggttggtttttaaagcttgaatcgacttctgcaccttacctgtttcctgttgaaccaacctgtcaaatctttccaatttctgatttaatttttttctcttcaattttcgtcccattgattgcttatattttctaacttttttattgatagttttttctcttcaattttttgttcccaactttgcacctccatgacctgctctgtttgggaaagaacgaaagaaagaaagaaatggatggaagggaaataagactggaagagagatttaggagaatagagagaaaatatttaggattttgtaaccctaatatagaaattatgagaattaggaagttgagaagaatgaaaagcaataagaaagaacttgaaagaaagtagggaaattatttcttgaaaaaaattttggaatttgtcggtggaaactttaaatagtgcttttactgtcgagaaagaagaaacaaagaagaaaaggaagagaaaatagctgaagggctaggacagaatgagtaagaaagaaatagagacaattaacagaagccagagtggaatttcttttaagaacagggttttatcctcgagaaataaccaagaaaagagtatagaaagaagaattttaagaaagaaacgaggacaataggaagaagagcagaagaaatctggattccaagaagaaaggaagaagaagaagaagaagaatagtgaaaataacagaaggaataaacctggaatttggggaagctgtgaatttagtgttcttgatcttgaatagttatgcttcaggttgagaagaggaacatgaaaagaaatagggaaaatatggtgagaataggatcggaaatagagagagagattttattgttcatattttttctcaacacactcatgtcagtccttatgactgaatttatacaggtattatagctaaaataaccatttccgagaatcactcttctcatttctgttacagctctattcttcctcttacgctcttaactacctcttaggcactagagctcttgtatataagaaatgcctgaccagtgatattctgtaggcgcaacttgttggagagatatcaagagaaaaacaacaaacacctcaatctgtttaagtttcttattttagagattcagagcattacactcacatctcagctccagctattagaagaatatatacctggtaatctagattaaagtattgttgaattgtatggaatccttctcattaagaggtttgaatttgaatcagaatcatagaggaggtgttacggagtaatctagtaggcttaaaatcatgcctcagttcatttttatagtagataagatgtgtaggaacatattacattctgtcagggtccttcgagttataggtccgttgttagaattttttcggacaaaatattctttttgcaatctatgattgcaatggaacatgctccttagggagaacctgaaaatttattgagctgaagtactaaaaaactttgaaaaattttctcattcttcttttattgaattgttgcacttaaatataagagggagacataatcatctcctaaaagtagggaaccttaaacaatatggaggatcacccttctaccattaaggaaaagcaaaaactaactgtgtacatcatgtttcatgagttaatcactaagaatatggtttgactactaagaacatggctaaaccactaactacacggcgcttgaaaataagataactaacttgcaaaaaactaacttgcattatttgttaacatttctcccttcttcactgtgtgcttgtccttaagcacaaactcaggaaaattttgggaactattcagccaacagttagtacgttgtgacatctctcgggtcatcatatgctaaatctaaccataataatttcttgcaataatgtcctcgaacaaaaggttcatcgcagtgaaagtaaagtctttttcgtcatcgttcctccatctcatcacaattcaagtgcttaattgttcggtatcttttgctttgttgagatgaatgattggttgaaggacttgcggcacatgtggaccaatttttccgttcatagagtcttgacatgctcatggcggtctgttgtttggtgaagttccacttccacagcgatatattcttgcaaccgttcctttttgttttaattttgctagctctcctaatttgttactattaattggtggtccaaaacggagattgcattggtgttgaactcttcccaagtcaagttaagaaaatattgcattaactgcaagaactagaattaagttgtaccttccaaatgaaaagaagccatactgaatttttcttctttagaggtctattggtgttaaaacaagtgctcacacctgcttagctattctaatgaatcttcttgaccattgaaacgagagaaatctaatttgataaattttggaacaattgtaccgggttaactactaagaatatggcttaaccagtaaaaacatgactaaaccactaactacacaactcttgaaaataggataattaacttacaaaaaaactaacttgcattatttgctaacacattcttcttggtgcaagcttgtattgtgttgcaaaagctcagtttgatgtgttagaatctgttgctggagacttcctactacaggttttttgttataaaatatgaacgcattgcagcatctgaattatacaaaatgctggatgaggcacagaagctccgctgtgatgtgctccttcaaatcatttacttggaaagggtagagttctttgccatattaagcaacttagtaaccagagaatggatatcataattgcttagtaggaaataagttgtcaggatctactcgtcttactgtaacagaaacaaatttaaaattggatactgagttcagctatcttctatggaaatagtgattttaatactattctttttcattgtcggaatttttagtgttactgagttttgctgcatcgtacttcaaaaaaatcctagctcaagatgaataataatctctaaccaaatggataatgatatgaagcagaaattctcgataagtcaagtcccgttctaggatttttagtgtggttatagaaggagaaaacaccattttactatcttctttttctgcaaagggatactttaatggaggaattttcttttggaaagttttttttgcccacttctttcttctaatggcagagcattgatcttatcaacattttttatcagttttttttccccttatattgttctttgaattttttgcttggtcaagttctcctgtcttgacacccgaccatatttccgacactaacaaataaattaaacataggattgttcctatactcttgagtttaactatgtatctgatgatgaatttcctcaggttctgcttgg

SEQ ID NO: 5724 - DNA, 1206 bp, Manihot esculenta
  Intron number 9 from transcript cassava4.1_033468m (locus cassava4.1_033468m.g) derived from phytozome v7.0 (chr-ID scaffold01098; pos 53089 to 54294 reverse strand)
gctaaaacaagtcgaggagaagatacttggttggggtaagttatcttgaacttaaaatgctctgatgaatctgtgatgtctatgatgttttattgggcactgatattgattttttgatttgtgatgtcattgcatcatttgctacatttgaagaacggaatgtaatttggtaaatgttgctgataagagtttctagtttaagttacttacctttgtccctttctttcctgagatcacagaatttggtctttttgttgtttctccatatttgtggtatagaattattgccattatcaaaatttaatttgacaaagtaatccctgctgttgctgcctaaaagctgttcatatttcactttttggactcatttctgagaatgagttggtattcttgacttcaatttaccctcttgttggggggatttattaattagtgaaaattactatttaatccccatggtatgatgaaactcattagtaaggctatcggtttttaaaaatacattacaacgtctataaggttttaaaagacctataattagtccctccgttagttttagctgttaatttatgctatttatttattttctatggtatagtgaaacttattagtagttggtcccttggttttaaaaaaatacattaaaatcgtcccttagattttaaaaaattatattaattagtctctagacttttctctaacacttaacggctaaaattaacagagagactaattagtaggctttttaaaatcccaaaacattttaatgtattttcaaaattgagggaccatttaatgagatggcatttttaacatttgcatgcattgtttgtcgtgtttttgcatttcttgtaaatgtttcagtttattatgcatgctaaatctgattctgcattgttaagacttacgaggacatgtccaatcgttatgtttctgaatgtgcatagtaagttgcagttgtttcttctttaattttagagttacacatggcagattaaattgcaaccggtagactattgaattggggatagaggcttgaaatttatgttccgagccttgtttgattttcaaaatatatctttcaatattgtcccttgagagttggatgtatgtagctttcttgaagctttgattttgagttgcattttagttgctttttgtggattgctgaaaccatgtgttccttatattgtgcaggtggccttg

SEQ ID NO: 5725 - DNA, 1261 bp, Manihot esculenta
  Intron number 1 from transcript cassava4.1_018207m (locus cassava4.1_018207m.g) derived from phytozome v7.0 (chr-ID scaffold01755; pos 168165 to 169425 reverse strand)
aaggatctctgttttccacagaggattttcttctggtacatgatatttctattctcttcacagtttactttctttctttttatatttcttcttcgtttttttgccttgtgtctctgtatgcaaatgggtttatgcatgtgtgatcagtgggttgttcatgtagagttggatcttattctcttttagtaaaaagatttggtttttgcatttgggttttgtttggcttgagagtattattcaagttttattctttgttttttaggtgatcccttgtgattttgcctttactgatgctgatctactcagattaattactgttgcaaagcactggctgatctatcatttttattgattcattttttgaaagagtttgaaaccttaagtttcttagttgtttaagttggagaattgcttattttgctgttcttcctcttctattgatttgatcttgatatgctacattagcttcaagcataaaagaggaaattgagcatagtgaaatcatggttttggaattgtttagctataagtacttatcttccacatgttgctaagagttgataactgacttgttgataagaaaattctatttgatctggtttctctttcttcttctctcttgttctcgatatctatttccttctgtattctctgttcttatcagatctttcaaactttattatggcagactgttaaaacagcattgaataactcataagcagtacttgtttgtaagattgtatattttcataaaatctaaattcataagcagtatatatataatctttattacctgtgttttgtgaatcaatgtcttattctatcctttcatggttcaaaagatcatttgggaaaaaaaaataattgtcactagagctacattatgtctaaatcctaaaggtttagcctggaacataggaaaagagattttttttaaaggtgttaccgattatggtcacaacaaagtaagctgcttgaatggcatgtttgctagtttttcacttttttatgtaatccgtgactgctctaagacttcaaacatcaataaattttttggaaatttataccttttccattgacctaagcaaagattctgactatactccattgatctcacattcatttgtgttttttcttactgcattttctgataatgaattgtgtggattaggaggttcattgtttgatttcttacagcttaagattttcttaattttgcttatacttttgaattcctttgcagtcataaaggatctgaagt

SEQ ID NO: 5726 - DNA, 728 bp, Manihot esculenta
  Intron number 6 from transcript cassava4.1_004602m (locus cassava4.1_004602m.g) derived from phytozome v7.0 (chr-ID scaffold06598; pos 387443 to 388170 reverse strand)
caaggtgattagtgaattctagtataactttctgtatgtcatgtataaaagtttgtattacacttaaatcattttattggactctgctttttcttgttagggaaaattttgtttcaaatataatcatgttattggattgaaatcttttacatgaagttggattgaaactgttaaagtgaagcagtctcttgtagtatttttattgaattttgttttgccaatatgaaggccccagtacttgtcattctaattgatttaatatctttaatcattgatagacttcagttacattcattgtcatttttgctttttatcccaactcagtttttgtttctgcattgttatctgtctctatccttggacaagctactaagatgcagaatgcagacaattctagactcttccatcttacaaacaattttgtcatcatcttttttttcctttaaaaaatgtttctcttaaatcatttcctggtctgagatgaatttgttgtcatattattacttgaatgcattccgtttaatggttttttacctgtgataatctatattcctctagtagattgacattatcccttttctggtggttgttattcttctgggaaatttttattctttggattaggttacagccacacaattgtacaatgtctgatctataagtgcgacctatatatagatgttgcaaaataatcataatatatttggtacatgcagatatattcagaa

SEQ ID NO: 5727 - DNA, 1270 bp, Manihot esculenta
  Intron number 16 from transcript cassava4.1_001106m (locus cassava4.1_001106m.g) derived from phytozome v7.0 (chr-ID scaffold06916; pos 884543 to 885812)
ggtcccctccccatattgttgctagatcagttagttcttccctttctgtttccattttccccttttcttcctgtgctcacagcattgttaaacttttctactacagaatcagaacagggttagggtaaggagggaagagtaaggaaatagataaggctacattgtaaggaggagaattaagatgcaaaaaagaagaaatccagaaggagaaagatctaaatgtcaattaaaatctcagtttaatttatcctaaactcacctcaatgaaacatttagtatggaaatatctaaatatgtttgcttttgtttagtaggttcttttgaatgttttgaaaaaatggtaaatttttaatctgtgtataagaagtggtcttttagttggaagaaacccactgagaaactggaaactagtaaatcttgatgaacaccaaatgtttgactgcatgcaaaatattgtaattaatattaaacatcttgattaggaaaaaaaaatcctgaatgtcaaaacttaaactaaattggaaactaataatgttgacattttagtccctcaccttctaatctttagggtagaaaagttgttccattttcaaaaataggaactaaagtgttagtcaaaggaaaaaactcaggcactaaactatatgatatattaatggaaggcctaactgtaagaaatgaaaaaaaaagaggcccattgtattcacttttttcaaaaaaatttcaagaattttgccaatgtgaaggatttttgtttttcataatttatcctattatcttgttgagtactgagtagaagaatggctgttattgaagaaatgctgccatttggtattcacatggaagtaattagcgaaaaaagttccaatctttttgcaggagcttgcactgtttggcatcctatactagttatacttgttgatcaattagataatattttggttttatttctctaaacatgatgtgggaaactgccacttatcctgccttctatgctgggcttatgttctgttctttagctcttgtttctcccattctttttggtctacatgatggagatgtctgcttttatgtagttgccacacgtcaagtttggagtaagtgtgcacctcttcactgttttagttcctgtattggatgccataaaaaccaactagttcaacatgatgcatttgtagctgaaatttactgttacttaatttatcatttataattatatttataatcatctgcaggtgcccttgaaggtctatcgtggatctgtggttga

SEQ ID NO: 5728 - DNA, 830 bp, Manihot esculenta
  Intron number 1 from transcript cassava4.1_012243m (locus cassava4.1_012243m.g) derived from phytozome v7.0 (chr-ID scaffold11179; pos 140604 to 141433 reverse strand)
gagttttggggtaatcttctctccctctcgcacttctcatttctcttcgatctcttaaatatgctaaattttgtaagtcgaatttgcaaattctgtgcatgtgattttttcgttttatatatatattttttaacctatgtctcgagaaaactgcatgagaataggaaattctattgaagctgcttgctagagttgagcggagttgataatttttttatgtattattggttttgtatcattttctatgtattatgccataatttggttttttttagtgtcacttacggtggtagtgcagtgatcggtcattttggtggtttaggaatttgataagagttctttgcctctggtgagtattttagtgcgatttacgtctgtaggcacattaccatgttcttgtcaatggattagtagggttgattgttcattagcattattataaaatttatcatgctgtagttaaatttttgccgaggagctggatgtattttaatttattgtataaactctttttgtttttgaattgttctattgatttgcatttctagtcttgaattgttcatcttgccttctaattcttatgaatatagccactacagtttgtgtggaagcttaaattatccatgattcaagtctttttcaaatatataggaatgacttttcttttatggttcttgtagttgtatatggttttattctcactttttggttatttaagaataacataagttgctttacaatgcaactcaaaaattttatgtttatttgataatgctaacgtgcttgaatattcaggtactgaggtcaaaagtggggagcctctagtggtt

SEQ ID NO: 5729 - DNA, 960 bp, Manihot esculenta
  Intron number 1 from transcript cassava4.1_005134m (locus cassava4.1_005134m.g) derived from phytozome v7.0 (chr-ID scaffold05806; pos 55693 to 56652 reverse strand)
gctggtttgtgcactttctcatttctaaacctattaaaaaaaaaaaaattctatcttatttttcaattaacattctttggatttagatagaataatttgataatcaaagaacatgtattaattttttttttcttttaaaccaaaaatcaatttggatctttttggcgtttttttattattaaggaaattccagaatatatttggtagtatttttgtcagttgtaaatgagaaagatttaccattaaataagaaagataatgattaaatacatattttcacctttattcagaattaatgcgttaaatatttaaattaaaatacttgcctagtatttaatattatgggtttttttttttaaaaaaaaagatttttttttgtccttaattctgatgcatatccaaaagaaaacatcaggtcagacattctacagaatcacttgtaatcatcaatatgtttgcttctgagtgttttgttagccccactgattctgatgctttttttttttaatttattttttaagatgcataattattaattaaataaaataaattttacttttttcttttagatttattcacatgcactgcttaatttgtttgtgaacataaaacacagacttataatctggggatagatatgcatgcatattttctgtgccctgtaattttcaagttttatcttgtgctgtaatttaaaaaaaaattattaattacttttttataaaaccaaaaaatattattattatttgtatttttttttaaaaactcatgcatgaatccatttatatttttctaatacttctgaacttaaacaaaatattcagtttgagtatgggattctaattttctacaattttttagataattaaaaataaataaatgtcaattaatctttgacttgattggcaaaaattaacacatgcagaaagggacgtaccttagaaacggacctggactctg

SEQ ID NO: 5730 - DNA, 945 bp, Manihot esculenta
  Intron number 9 from transcript cassava4.1_000059m (locus cassava4.1_000059m.g) derived from phytozome v7.0 (chr-ID scaffold06556; pos 154375 to 155319 reverse strand)
ctttgaaagtggtgagtgatcggtaatggcacttctttccctaggacttcaaaattgatgcgtgcttgacatttagtttattttctacttccctttcttactttcatatatttggggcgagaccaggcatttgttttatgctagtttctgtcttccaagataaacttatacagtcaatgaactaagatatgctttctcagcttctaaaaccctggattggtttctctcccttcattcttgttaagttgggaccattttgtcttcaagggatggcttgaagaggctgctgtattgtcataaaggggcataattctctgatgaaagtgtttgatttgagcttatgtgcctcttctatggaactttaacatgtttaacaacttatatcttgccttttcattaacagaattacttcatgctacctgagtttgatatccttttttgtttttcttttattttgtcactctttgctatttgcaggttcaattggattctgttgtatcaaagtttcacacattgcagcattttttctttatacttcggaaacttattacagaaggggatttattttctgaaaattcatcagataattcagtattgaagtactcttcccaaggtggatttctgacacagccagtttttgattctttgcctgcaaatgttggagggcatccatcaattgataacttaaaatcacaggagagtttctgttacttattgtcagaaattgcatggccatcaattcggaagtgcttgatagaagggaaagcattcgttgattacagtctttgccaggtaatttagtgactcactaataaattactctttttagctctctatcccttaggttgtgcatctgctacaatatgcatactgctttcttaaagatagttatggaattttaattttagtttagtaggtcttatcatattattcttcttttctcag

SEQ ID NO: 5731 - DNA, 2579 bp, Manihot esculenta
  Intron number 1 from transcript cassava4.1_020661m (locus cassava4.1_020661m.g) derived from phytozome v7.0 (chr-ID scaffold05280; pos 580709 to 583287)
gtttggtttcattaaagaagctgttagttcttttgatcaatgtgattatggtgatgtgaaaactacatggtctcattgggaattttatttgcatccatgtttcctttaggttgcatttgaatagaggaactttgagatggaaagttagggacttagtttttcagttcaatagtcaaaatgcataaaatttcttttattgatgagctcatgaatatttatgaaaacttgcttgatggatataggtgtaatttcaaatataattagtaacttttatttttgtactaagatgctttacggaatcaattacccccactttcctttgacacttgaaactataagccatacttacaaacatgattctaaagtcttataaaataaactggttttgactttctgtctcatgggaggaatgaagttcagtaagttttactttcatgaccatcaatgcaacaatggattaatctatgtcatgctttacgaaaaatatatcttttaaaatagcagaatttccttgttgatgaggatggaacgtctcttgtccaaaccgtggtattttgggaacactaatgtgtgcaaggttatacgttatgagaaaacactttgggtagtttatctgtccttctaatgataaacaggctgtgtatataaatgcacatcacaaagtagttcattgccatctaattccaataattttggatgtttacaatcttctctgcttaagttttttatcaattccaacatgttgtttgtgggaaagaaacaggctttttaatcagattaaagttaatgtctttttgaaggtcttagctttacatacattggggatgaggtattctcatggcatgcaggccaggcacatgccagttgatgtcctggcttgtagaatcttctgacaaactctccgtttggcattattcattttgcaagaaaagaattcaaatgaattttaacaaaatcatgcatgatttcatttgctttaaaaataaaaattttctaagttaaaaaagaaatgaattcttttatttcaaataagaaatttggtagaaaagaattgaattgagttgaatacttgtggaatctttgattccaatcaaggggacaaaattcagtgtatcaaccccctatttgaggaaatagaacaatgcctatcctgtatgtcattattttgaaaattatatttcgtttgtgctttatcttgtgtctttatcttgtgtctgtctctatggtctactcattgtccctttagttttgtgagcaatactatttaaagtataagatatactctatttgatagcgtagctgtagttgattttgtagaaatatcttttctaatgctttgactaaggctatgttttggacagagagtttttgctggatttttccaaatctaagggattagaaacttgaaaatgtgaaatccaacaaattgaaattttcccatgtttgatacatggttcaaatccttggagttgaagggcagttttgaaattgaaaatatatagaaccagtgacctcattgaatgagatgtctgataaaaagatacctaaaaaatttcagtaaattgcagattaaacctaggaggtcttggatgcttcaactttcttgctccaatcccttgtaacgactaacaagagcaattaaaggttggttttaggtacaccacataacggaattacatattctacaaactgattattggttttttagttcttagtttcgtttactgtggggtgagctatctctacagcgtgaagctaggttcctacaaatttgtatcattgcatttgggattcaccgacacaataatgggttatacctgtttcctgtgcatggactggaagtagagtctcctgtattaatttctgtaaaaaattatattgcttatgtgtgtcttctcatgcatatctatgtagcgtggccactgtcctcggtgtttttagagaagtacaagtagggtcatcctgtatatcttcttccatatattacattccttatgttgtttttatacatgcttatctcaatggagtatccactgtcctgtgtgtttttagagcagtactgcttcaaatataatagaactgtttgattatgtacatagaccatttatccacagcagtatgaatggtatagtgtaaaggcgagtggccaaatttgaagctgcctcagaaatccaacttcttaaagttatttgtgaatgtagtattctaagatgttaagcaatatatcaacttttattcatgggataaccgtttattgaggtgaggtcacttgcagatattagattactgagttgtataaagtgttggtttgatgtatgcatgtctagtgtctaggtgacagcatggaataaatgatatatgacaaaagtattttccatctctctctctctctctcttttcatattcatcatatttcaaactctcatttcatgtgtcagcataaagtttcacattattcagaatattctggaacctgggaaactataaatgaaatcttctctaaacaattcattttatctccttatctctcgtcaagcttatcgtaatagaatctgtttgctctatttcaggtaagactc

SEQ ID NO: 5732 - DNA, 3891 bp, Manihot esculenta
  Intron number 4 from transcript cassava4.1_009381m (locus cassava4.1_007701m.g) derived from phytozome v7.0 (chr-ID scaffold03874; pos 65847 to 69737)
agaaaataggtgaattaaacttgaaactagagaaagtaagctatttgttctttggaattttagaaaattcctaatttttttgattgtctttctttttcttctttttttttttttctgttgaatttggtaaactttccttcttcagttgctaaaattttgcaggaatttctttatactttcaatattgaagatggatagacattcaagaatcaggaaaacctatttgttacaaaattggtgtgacataagaaatgtattcaatttaaacacttccttacacaagaaaattaggggccaaataagttgatagattttctctttaaattcctactacacttaacaacggcatgccacctataaaatatggtatacactgggcatggtgcagatgaatgaggctaataaattataacacaaacttaactcaactaagcttagatcttaaattatatacagtaggagttggccatgaggatgttatgtattataggggaaagaagagaaatgtaaaggagaaaaatatctaattagatttaagggtaaattgggtatagattcataaaatagttagacagctgaaaggttgttatccaactgggtttatgttagaaaaacagtatatatttgtgcagctttttctagagaggctatcgaaacacattaatacagtatgctattctctttgcctctctaatttctctctcatctatttcttttccttctctactcagaattcttcttctttctctcccttaattcctttttcagtactgtttagcaaattgctacaatacaattggtattagagttgtgtttcaaagtggatagtgtgtcaattgggtcgcaaaatgactagatctgtagtgatgggtgctgattctgttaaattggataggttggaggaacaaattagaattatgcaagaaaagtctaggaaaaatatggaattgctgagagaggaaatcaagcaaaatgctgtagtgactaaaaattttattatggaggaatttcaatctcttcgttctggaattataaatgttaagggaaaaggggtagtcaataaagaaagtgtgattaatgggactactgtgagtgttgggggaaggggaattttacccatacccaaagaaattgtgaaccaacagcaaggatttagttctagaagtggaaattttgctggaggagtgtttgggtctttaattgattctgaaggtaaaaatatatctcattgaattaataatttttgatggtaaggagcctagagtgtgggtgagaaaatgtattaagtattttgaagtatataaggttccaaatgaggagaaggtaggaattgctagcttattttttattaaccgagctgattttggtatcacaattggattaagggtagaggtcctcattcttggaaggattttgagaggaagttgtgtgtgaggtttgggaatcaagtgtttaaaaaatattgtagaggaatttatgaagatgagacaagagggaagtgtagaagagtatcaaaataagtttgaagatataagactttagaatgaagagggtgatgcctcatttaggggaagactattttccttgtggatttatcggaggaatgaaggatgaaattagaccaatggttagaatgctaaaacctataggccttgcccatgtcattaagattgctaaatttcaagaacaactcttgggttatgctaagaaaatcaattatttttctaaaatcactcatccttgttccaagccaaacacctccattcaaaacccatattcatacaaattcaaccaaccaaatcaggtctttccttatccaccaaatccacctgatttggaagcaacaattaattccaaaataacccttgcagccatcaaaacccagccaaacagtagccaaatatcagtaaatcaaacactaaacaagacaactctgaacccaaatccaggaggagtgaggcaatcaaaacctagctatagatgtggagaaatgtattttctggggcactaatgtaaatagaagaccctaatgtccttgaaggtgaggaaggggatatagtaaaaggggatgaagagcgacatgatgtgttaggagatgaagagaaaaatctagtagaggttttgtctttaaaaccatagaaggcaatgaaggataagcaaccataaaggtgctagggcagtacaggaatagccagcttttaatattggtagatagtggcagcacctatagctttatggatgcaaaagtggccgctgaattgaaattgctaaggtacctaaaatgactgtgaaagtagcatatggaaggaaaatgaccagtatgcatgtgtgcctagtctttacatggtgggtccagcatcacaagttcacctttgatttcaggattttggagatgagaagttttgacattattttgggagtgaactggatgcaagtgtttaataatgttttatttgacttccacaacaccaaggtgactatcatgcagcaaggtatgcaagtggttttatagggtataagggctattgcttctaattctaagttgctatcttgcaacatctccaaggatctcatgcataaaaggggaagggactttcaatctccagctgctttcacgttcttgcctattgctgagacatcaatgccttttgtttttgagttttttcaaaagagaacatatattgcagtcacttgaagaaaatttgcaggttgctcagcaagcagacaagaagcggattgagagtgcatttgaagttaggtgttcctttctagccatacaaacagactttcttggctatgagaaagtccttcaaactcctagccaagttctatgggtcatctaaattgtttcaaagattggttaggttgcttatatgctacagttgccccctaattctatttcatgtctccttgttgaagaagaagattgggatgatattactcctagcaagacctgcataccatgtccttgattttaaaccttcttggggacaagaaggttactcatgaagagggtattgttacgtattataggagaaagaagagaaatgtaaaggaggaaaatttgggttgaggtaaattgggtatagattcataaagtagttagacaactggaaggttgttatccagctaggtttctgttagaacagtatatatgtgtgcagcttattgtagagaggctatctaaacatattaatacagaatgctattctcttggcctctttaatttcttcttttcacctattttttctccttctctactcataattcttcttctttctcttgcctaatttttcagtattgtttggcaaactgctacgttacaaaggatcctttagtcaaaattagctttttcattgattttttttagtaataattatcttttattttttattaaattttgagcgaaaattggcttggtgttgagataaaagatgggcttatttattcatttcaatttaagttccatagttaaattgaattttcaaaaattttatgccatgttaagcaatttataatttgataacattttgaaataattattatttcctaaattaacattttttggctttgcaataaaaaattcatatcttttccctttgttttgagagaaagctggtttcttacattcttatttctgcatgcacacttgtacctttcaacctggcacatgcccatatttgtgtggcattcgctgctgaatttaattttagttatgcaattgagctattgcatctctgtttttgcccattcccttttatttgggtcatactatatcactttgaggctttagatgtatttatgatttgagatttgctttatatttcatattttgggatgagatgaaagaaacgaacgtcattctcatcttacagctacaggaggttagtg

SEQ ID NO: 5733 - DNA, 3097 bp, Manihot esculenta
  Intron number 1 from transcript cassava4.1_016725m (locus cassava4.1_016725m.g) derived from phytozome v7.0 (chr-ID scaffold08542; pos 696038 to 699134 reverse strand)
aaaactgaggagattctcagagagtgccttggagagtgagatgtctatttttctctggattattggtgttctattggaattttatttttagctctctgtgttgatttctgaagtatgaattcggattatattaggattttttttggttatttgatcttcgtttttggaattccaggtttattcctgattttaacacgcacacatttactagttatttttatttaattacgttttatctttggctaagtatatttgcttcaattgagcatttagacttctctaggtgttctagggagggaatgaatttatctttattaacatgaggaagagaaagaatctatattgggtagcaccggacattttggaaacgatatttgataaataaataagatgactggctaaatcagaagcagaaagaattttctgatagatatatattcaactttttggataggctagggataaccataaaaggtatgttgctgatctatgacgaaaatttgctcatcagtcatggcatgtaacggaacatcttgcataagggctttgcatattcagattataaagattaagttgttagtaggtagcccaggttagttctaataagcaatcaatcaaaattgagagagcatcttggtttggaacaaatgaaatgatttgtgcgagtgtcaataaaagcatttgggcaggaatggttgagaggttggtttttctattttggagttgtatggtttgctatggttttttgataactttgatgagaatcagtcattatcttattgtttacatcaatctgctacaattagtgccacctgcatttaggaactccagagctgtattggatcactcaagtggttagatagcgtttaccgtttaggcatttgtttatttgatgtttgctttttctgttttcatttgatgacttaaggggtatttagtttgtgtttttctccttcatgaggatatctaccatttagccatgtccatcaattttgtcagttacaaacttcttagatatctaatcttggatccatgtttatccttttatttcttctttcttgctctttgtttagtgcatgcatgactgcctcccaggtacttgggttttagatttactatcttcatttagctcagttgcaatgtgacactttcatttcatatgaggtcaaatggtagaccatttgacaggcaatattcttctttgcgtctgtctctcagtttctcagagagaactagagaagtagaggatcaaagaactagttgctgaagctgcaagattttgcccttttttgttttggctggttctgcaatgcatggattggaagtgctttatttggataattgaaagtccaacacatcttacataatgtctttgaggtcaaggaagttatatctatagaagggcagtgcagcattttgaatagtgaaaaggatgatttagactcgggatgcatttatgcaactggcataacactgtcatttaattgaaattatagtgagtaatattcagattttgaaggtagtacaaacaaaattgttttgggctaggtgaataaatgcatcatttactgaaatatggaacaaattattatgattggcaaaaatgacactaggcttcaaatcatggatttaaattgtgatcatggtcctaggtgacagaaacaaacctgcaatggctgtagtataattgtaacagtctattgctatgcaaattaaaaaaaaaagtgcaaaattcttgaaatgaagagatatttaaagctatgaatataattaagataccctatcaaatattatgtgttaatacatcaaataacaatagttaatttatagctctataataatatagataatatagatggtaagaaataattcttcataatctaaatttgacaaaaagaatttggcatccaatattattttctttaacaaatgagtaaaaaaaggcaaaaaataaagacaaattactcaaattttttaaagtataaatgtgtagaactagaaagatagtggatgattttagctgaagagaaaagaagtgagacatttataggtagatatttaacttttgatggaaatttgaggaaagtaagatgcaacatcataaaacttcccaatctgtaggaaaaaaaatgagttcttgcccccatatggcctaaaaaaaattaggcaacagtccgttaccgttaacaataaataacagcccttaatgttatatagcggtcaaacggctgttatagaaagaaaattttctcaccttttagtaatggtttaacagtagcgagaaggtcaaaaacctatatataacggccatcatgtatcataacagcctttatttaaaaccatacttcgaatggttggggtttttctcttttgaattaatgtgaaggtacagtttgtcaaatatggagtgtacttgaaatttgaacagactgactagagtgagtttcttttgaatttttttttttaagtgataaattacaactcttcccaaatgagatgaaactgttatattttagaatttgataactgacctttattttgtctttgattatagtttgaagtgtgttgttgcagcaagaatttctgcatctttgtatcaccattttcagtcagccttattactccagtgaagttttgcgtagttgtcttattggcccactctccagatcatttccatatcgtgtaatagcttaattttggcaaggggattctgaaatcatcattgcttgttataatactatcacatgcattattgggaaaattgtaaaactgggtctagaattatcagagttcttataagagttgattcatgaatcatgaccctattcggtgccccagttaattcatttctctttgtcgaactgatacatatgcatatgagtagcaaacaatagagatcttactagcaaatttatctttcttaaaacccttaattgaaagcttacttcttctttttttccctgttttttcacaaagtttcaattttctcaaaatacgagtgtgcaagagctcaccccctttcccacttagtttgattcttatttattgtctgcttcaattaggcctgtcgaggtgctgaagtccaacaaggagtaca

SEQ ID NO: 5734 - DNA, 4758 bp, Manihot esculenta
  Intron number 5 from transcript cassava4.1_015646m (locus cassava4.1_015646m.g) derived from phytozome v7.0 (chr-ID scaffold00924; pos 11010 to 15767 reverse strand)
cgattggtgcagttggtaatttctagatctgaagagtacctagtttacaggcaatttgttttcacactttcatttcttagagcctttttccaaaaaggtgcaagtagcaaaaactttctgcaaaagtgttggagtttggccatgctggaccagttgagggccaagtcgtccttcaaatacatgacttcgagaagggtcaaaattttcatcctagtcacaattaaattacccaatttcgctgaaaatgttagagattctctgccataagttgacaagtaaaaattatagctcacgacttgagctagtagctgccttgaaaagacaaggcaatgcaagtcatgaatataaagggtcactattaggcaggatatagatataaatggcgactaagtaaacatatttatcaaagcagagctgtggtttgaaaccacaatggagcaaaaaggcacctgaaatcacaattaatgtccctacctagtggatatagtttatatttgtatgccttgtatttagcaagtcttgtccttgcagtttagtggatatagtttatatttatacaccttatttgtagcaagtcttgtccatgtagtttatatttgaatggttttaaaattacattctaaaagtttgaataatttatatttgtactaaaaattaggtcgagatagattatgaaaaaatgtgggtaaaaattatttaaattattatcatgtagtataaaaaatttgttgaaaaatttatcaagttgaaatgatatttttgtatttctctatgtttattgatgtgtagtaaaaatgatttacatttgaaattatcaatagttgatatttgaggtaattaatcttcattaaaaaaattttccttttaaattaattattaatagtttatatttctgatgaaatagacatgtagatatatacgtaaaaaaaatataaaatgagttggtataaatttagtttcatcaattaaggttatggcaaagttaaaatgttgagttctgtggtcaaagatcttgttacgggttgatgaactgttgaatcttcagctgcagcggccttttccttattcctatttcttctttactttgttgaacctataattgctatgatggagctcgttggagggagcctcattacctcaagacttgttaaagagagagcctctaatctcgatttatatcttagaatatgcttgctttattaataaaatttcatctctataaatagggattacaaatagagtcgtactgcaaatagtcctaagtaatttagaaattctatttaaaataaaatagcaaattccctattagcataaaatagcactataataaaaacacgtaaagagataagataataatagcatattcttagtctaataaaacttattcttatctgaaactagtcttttctaaaaaggaagaataagtcaagatctacttggtgctgtcgatgataagtattgccgaaaaaagtgtctataacatcaatctctcccttgaaaaacagcttgtccgcaagctgatactctggataagcctgctcaactttttggtttgtcaccgacaaaacatctcaggtgcatttcaaggatacgattcaccattttggtttgtccattcgattgagggtggtaagccaaagaaaaggccaatttggttcccaccaaacgacaattgactcgaacacaccatgtagtttaacaatattgaaaaagaaaatatgaacaactgtcacccttatatataagggtttgtaagtagtaggaaatatgcatatttagagaagcggtctactacaaccaacaaaacagtcttacccttcattttcggcaaaccttcaataaaatccatagatatatcggaccatatctgagatggaagtgcaaggggctgaagtaaccccgcaggatgcatatttgatattttattcttttgacaaatagaacaagaagcaacaaattccctaattgttgacttcacacctgtccagaagaaatcactgcgaatacgatgaagcgttttctgaacaccttcgtgggtaccatcgtggacaacatttattatcgtaaggatgaatggtgaatccggaagaaggtagatcctattatgatagagatgcaacccatcgcatattgtctatgcagcatccatttgcctatttgaaatttgttgttgcaattgagataattttgtggaatttgcaacctcctgtcgaatgtcatcaaatatcataatggtgggagatgaaactgccatcaattgtcctctctatttataacggcgagaaagtgcatttgccaatacattatgcttgctcattttgtattctacccactacattatagctcagtatatttttaactcaaaactataaatttaatctataaaaataaaaaaaaacaaacaaaaaatacagcagctgagagtaaatatacaaaaatattaactcacattttaaaataaattagcttgaaatgaagtaattaatggtagatctaagagaaatctttagggaagtttgagatatttgagagaaaaggaagagaaagttagaaaatttagtttgaaatgagttgctgaacttgctgtgctgcttgccggagaagaaagaaaaaaatggtcaatgaatagctggctccagcagaaaaagtgaaaaatctggtaagattctttgaatttcgggttaaagtaacggccagttaccgttacgtaatggctgttacggccgcaactcaaggggggccgctgttacggccgcaactcaaggggggccgttgggtaacgacctaacgggtaatggccttccttgatactgttacataacggtcgttactcaaggggggcactgctaccactttcggaaatagctgtggagcttgcatccatccccgacagtaccttgctggtggaaggagcttgcacatgcttctgattcagccaagatatttttttggtacattcctacccatatgttgttttctttcaaaggatagagcaagattcatagttgtcaccaaattgggaggattttgcattttgacatccaatcttatactttcacttaacccaacagtgaaaagatcaacttgctagtgcccgaacagtattagctcatactaagaggcattggaattgattatgatattcttctacacttcctgtctatttaaggttgaccaactctcccaaaggatttccttggagggggtggtccaaatctcaggttgcaataacccttagaagttgcccaagacatcttaagttcctccttattcaatttgtagaaccatagttgagcttatcctaacagatggaatgctgccaaccccaccttgttctcctctagtatccattgattagcaaaaaattgttcgcacctgtgcaaccagttcaaaggattgtcagaaccaccaaacacaagaaaatctagcttggaatatcttggcataattccagcaacaggacgaccttccgttggctcggaatggcttttcgagtgattgttgttactactgacaatctctatctcaagttccttgcctcgatttgggttcgagtttcctggcagctcctgtatttgccacgacagagcctgaatttgtgcttccaggtgagattctgatagcgctactcgagcttcattttaggcctgaatttcgtagagtaatgctcgcagatcatcccttgattccccataacactagtatctgataccaaattattgagttttttggtcaaggatcttgtcattgaatcttcagttgcagtagcttttcccttattcctgtctcttcctcgcttttctgaacttatgattgctgtgatgaagctcgttggagggaatctcgttacctcaagacttgttaaagagagagcctctaatctcgatttgtatctcaaaatatgcttgttgtattaataaaaattcatctctataaatagaaattacaaataaagttagaagtcctattcaaaataaaatagcaaattccctatcagaataaaatagcactacaacaaaaacacttaaagagctaagataaggacagcatattcttagtataataaaactcatgcttatctgaaactagtcttttcaagaaaggatgattaagtgtttgagccgagatctaattgctactgtcgatgataagtcttgccgataaaagcgtctataacataaaaatatattaatttttataatgccaggaatgtaaatgcaggttatattagatggtatgttctgtaatgtgttaatttaagataagtttatccgtagataaattagaactacagatgggtagcgacctaagggcttaaaagttgcaaaattgaatgctacttgtggtggagttttcaggcatgtaagttagtcgtggtttgtatccacagcttattttgctcttgtagtcagctcacaactgtgggcttgattatgactggctcgagttgtgatttaaactcccaactgagaatccatgctattttaagtaagagttgggtttttcaattgtgacttgagataaaattttgtccccttctctataacctgaatttgaagggtgacttggcccttgattggtacagcatggctaaacgcatcccaattggagaagttttggatcatccctcttgtggaaataatttttctatacacaccttcaaaaagagttccatttcttacgtgatcaaactgcttctgtgcattcacataaatttgacgtcattgttcaaccttgtgcaatttcaggtattgctcg

SEQ ID NO: 5735 - DNA, 809 bp, Manihot esculenta
  Intron number 5 from transcript cassava4.1_013176m (locus cassava4.1_013176m.g) derived from phytozome v7.0 (chr-ID scaffold02978; pos 22124 to 22932)
ataatcctccacgaatttttgaagcattctggaaggtgagttcttccttttactgcattctggttttgaaaatgaatattagaaatccttgggcttgaaattgtgctcataatcagtccatgtatcctagcctgtgaaagcctgtacatgcagcatatgtaagcttctcatagtgatgagtattttatgtaacagattaggcgacgttgttctttgggcatgataactttataaaatgtgatgttaagtagtataaaactagcttctttttttttttttttttaaaattggtggtataaacttgatgggatttcagactcttagtgatatttcaagcagtttaaatctaagatgcttccttgtttttgtttcgtaaaagctaaaaggcagcataacctcttgtattgttctattctgtggctttctgatttcagtagttttttgctaatatgtttctctccactgatattgtgataattacgggcattctaatatctagtttaatttattattaccagaaaattgaaaatgatatggaataaaccaaacactatatggatcaatatggcctgtgaaaattctttagttatcaccaaaaacagaaactaagcatcttaccaactcttcctcccatcttactgccgttttttatttttttggcaaggacggggcaggtaacactttttttaatgtttaatcatttaaatctgttgtttttagaaaaataggtgaccttacaatattgacaaatgagttatgtcttgatgcatacagattgttaaatatttcttggatccgaaaacattcca

SEQ ID NO: 5736 - DNA, 3418 bp, Manihot esculenta
  Intron number 6 from transcript cassava4.1_000514m (locus cassava4.1_000514m.g) derived from phytozome v7.0 (chr-ID scaffold09980; pos 42959 to 46376)
ggcttccttcggtaaatctctataatttgttgaaatatgttctccatttaatcaaattaagtgccaaaatttggtgacagtaatgagggtgcatttctactagtgtctgttatctcattttgctctaattttgtgaggcatctttcatgtataatattcttctttatgttcattttttgggcccgtaatgaaacattcactagaattaataacaaaactttgttttgtaaaaatgtttcttcaaggatacaagatttgattttcaatgtgttttcttaacaaagaatatctctgttgaaaaggttaataggaacttatataagaataagaaggatctatgttatttattgatctagaaaagacatgtcatagagtactgaagggaagttatatggtgggttctaaagaagaaagaagccatctcatatatataaatgtcttcaaaagatgtgagagtttggtcaccaacgggaggggtcacagacaaatttcccataacaatgggtttacattagggatcagcattgagattcaattaacagtcatattaattatgatgttctgtggtgcatgttatatgcaaatgaggttgtcttagcagatgaaattagtgaatgagttaaacaatagttgtttttggagaatgacttctgagattacaggtttcgatctagccagcagaactcaaattgatgaggaagatgaagcaagctatggttactgagaaccctggattgcaaaatctagtggaacagatgcagttgcagaaacctgaaaatccaagatttaagtttgggttatataagattgaagaaatgataagttagatgatgagggtatcacagggaaaaaggtagagtctgcaattaacttgaagaaagagcttgtgattaatttggtgcctgaaattcagtctaatggccctgagtacagggccaatgggaatgaatctaaaaccaatgtgattgaaacaagaagtatattgcctctatttggggtgagagaagttggagaatccagtaatgggttccaagaacaaaagaattctggtgttgatctcttgaaactgaagttggaattggctctataccaggtttatgatagaaattttcttgattcttttgttgttaagattcttttaggtatttttgataaaagggaaaaaagagaaaattatgtcaattgtgaggactgtacaaaagttgtcatgaatgttactgtacagaacaataacattcatgattccatatggatggttgtctacttcattctacgctagcttctaattgtcattcttgaggacttgaatgatttcaaaggaaatggtaatgttgtgactaatgaagatttttcctctagcttcatcaaatgggtccccaacatgcaatcttggaatgagaacctgcaaaatagagaaaaaggagtaagaggtctaacagggatgcccccaatgaagaccgtctcttgctcaaatcatatctggaaattttggtggaaagtttatctcataaaaaagttacagagatgaaaggagaagaagaggaagaagaaagagagaagagagaatgagttaaataaaagtctcctctttaccttacctagtactcttttttattttcttttttttttctgtgggggtgtgtgtgaatattttttagtgtattttttggtggagtccattatttaacttaaataatttatgtgtaatcaaatgcctccactctctagttctatcaagttagtcatgcgactaaacgcagattggactaaattttgacaaagatttttcctctagcttcgtcaaacaggtctcacaacatgccatattgaaatgtggacctacaaaatagagaaaagggatcagaggtcaattgagaatgtgaagactttccgactctcaaatcagatttgaaaattttggtggaaagttagtctcataaaaaagcagagaaggaggagaagaggaagaaggaagagacaggagggaatgagctggagaaaagtctcctctttaccttatctagtactctttttatggggtgtgtgtgaatgttccttagcatatcctttggtggggccctttttttacttaaatagtttatgtgttatcagtgacatatgaaggtagcaaatagtgttatagggttaatagtcgctagttgtaacagaatctcatagttgttataaaaggatcaaatatttgtgattgaggttatcaatcaaataatggaagaatttctctcctcctttcctcctcctctttcttctcccctttcttctgttttcgtctcctctttcctctatcttctgtttagttgttggtttgctataaccaattcttatagaaggattggaggggagattcaattggatgaagtttggtttcaaaatactagttcaagtatataatttctgtcatttagaagaactgagtaatagatgatgatgtgactcgtaggatcagaacaagatgggtgaaatttagagcgatgcgtgttctatgcaaccataggaatagatacttaggaaagttgaagataaattctctagaactataattaagccagttatattatataggattgaatgctgagtatgtaaggtatatatcatacccaaaaaatgagtggcaaaaatggggattttaagatgaatgtctagtgaaaaatgagatggaggtgagtggtgtggaatttatgacaaagttgaatgaacagagaaaaatgatccatataactgacctcaactagtttgggagtacttaattattgttgtcatgttgttctttctggtattgcaacttacttagaaagtgtctagcaaattatggccagctgcttggtgatttactttatagaaatggcagttcatattgaatgctttgatatgtatttctttcttttttcctttactaattcttaggttgaagaactcaagcttgaagtgttctcccgtttatgtttgaacaatcgaactccaaatcatgttggagttgaattccagatgacaactataatccattactagactaattaggaggactcaaggcataaatggatttaatttaaggctggttcaactccaaaatacctcacagttgtagatcagcatctcatttacttgaatagatatcaatacagtaagaggactagaaaactattcaatgatgtcttacatctccatttgggatttacactaaaaaagggtgatctagtgcatgaaacatcccacatttgaatgtacagaaattcaaaatgagtttttttaatcaagtcttccgctcagagtctttgttttgatttgtgtctgttgatttttgtggcatcaggatatcatattaaatttgatttgttagtgcttgcagtatcatgatatcatactaacttatgttgtttaatcctgcagcatttacaatcta

SEQ ID NO: 5737 - DNA, 646 bp, Manihot esculenta
  Intron number 2 from transcript cassava4.1_004905m (locus cassava4.1_004905m.g) derived from phytozome v7.0 (chr-ID scaffold04495; pos 352381 to 353026 reverse strand)
gattacattggttagagatcttcatttcccctatttctcttcacctttttcatgcaattttttgtttggggttcaggactagacatctttattgcattattattaagttagtttcacctaactttgttggctatgcatctctttaaattgtcaatatatattaatttggttttggaatatttgttatttagaacttagaaatgattgtgacttagtttcaatgtcatagaatgctcaaatgtaccttaagaagataaacaaatcttctctaatataaataggatgtttccatgtgctgaacagaaatggaaatttttctattgtcagtgtttcaaaactatttttggcctaaagggtggaaaataaactacaagttgtacttccttcttgatttgcgttaaattcctttataatttgcctaactcttggtccccatctcaacattttctaccaatttttttcttttctttttccccttcttttgaagtgttaattctcttgtttctaggtctaatttattacttgtgtcttgcagttttatagttgtttctcccttctgcaacagacttttatttttctatttttgttttttttcctgctgttgttctaacatttacaattctctttccagtgtctatattctgca

SEQ ID NO: 5738 - DNA, 3202 bp, Manihot esculenta
  Intron number 1 from transcript cassava4.1_016540m (locus cassava4.1_016540m.g) derived from phytozome v7.0 (chr-ID scaffold09837; pos 52394 to 55595)
ggtcgcctcttttgctgccatgtgagtgtctcagtctgtttcctttttatcttgatattatgatcttctcctttgctgtgttgattatcactttagaatttgttgcggaaagtgttgttttgattgacagcctttcaatttttattttcttcgctttcactttaaattgaaattgggtatttcaaattttgctttagtgggatttgttatgtttattgttgttaaaaggggaagaaagggaagaaagcatgcccgtgtatctttctcttttctggtgtattttacattcttacagttgcagacgtgtattccttcaggatacgattgtgctcgacgccgatcattttctttccctgagaaaattatgttgacaagatttaattttggataagagtttgtttcacttctggctatttgcaatttctaggttaattttcagtcgttgaactgctgtccctcaactttaatttatttacatttaaatagttatatccaacagtcattggaggagtttctggtcaatttttcgataaagcatatacagtagtattttctaagtaatttaaaaaattttaaaattaaattattttgccacgtaagagacttttaagtctcttgctaaaaattttgtattttcttcttgtttttcaatcatcgagttcaactgctacaattcgggcctcctccgaatcctctaggaaactagaaccggggtgcttccaggattgatgcatcacttaagcaatcggctacactggagttcgattcgttgatggtagtaaggatggtattagtgatggtgttggtgttggtattggtggtggtgaggggtgtttcaactctgcggagggtaggcatggcggtctgtggtcaccatttaggctagaggtcgatatttgaaatttgagatttgggatttgcgaatatcgtgcagaagtttaaagcgtttgatgcaaaataatataatttcaaaatgttttaagccacatatagaatacgctacttatgtgtttgatatgtgtttcgataaaaaattaattgaaaattcatttgagttattattttatataactatttcagttttgataatttttttaaaataaattgaagttcagtaactgtctgaagtagtattttaaatttaagttagagattgtgcatgaaaattatcaataatttttcaacttaaaataaaataaaaaaaatttactatttatatgatgaaactcaatatattatttttcaattttaagaaatatattaaaatatatttaagattctaaaaaatataataattaattttttttgttaattttaagtattttattatttaatttttgcaaaaatttacttgttatttcttgttttatagaaaatttattaatgagtcttttctgtattggggcagtttattttttttttatttttaactttttaatttaactattaaaattaataaaaaaaattaatcaagtaactttttaaaattttaaaaatattttaatttattttttaaaattgagaggtcaaattaatatggaccaaatagtaattttatttaaaacagtaataataataagaagaagaaatcctatgggcagattgctggatggtttatcctttcacaagcaggacttttggccttgataaatattttgtttatttctcaaataagatgtgataaggttctccatacgttgcattctttgtaggaattaatttgtttatttttttaccattcagcaaaattcctccatgttgtattggaagagaccaaaacctaaccaatgagctttatttcggtttttaataatattaaagaagtatttaccaatgtagtgtcaatttaaaactatttattttcactgaaaaagtgcatgagattttatataaattgtgaatagatgcgtgtgtaaatttatatatcattaaataagtcttaacaaaaattataatggtttatttgcagtttgtgtatattttaattttaattaaaaaaaaaaaagcttaacaccgaggagtgagttgttgtactactaatctaacaaatatttttgaaaacactggttcaactggcattttcatagcagttgaaaacgccaattgagatggcggttttagttcatttcaactctataaaaaatcagtcagtgaaactaaaattgaatccatcgatttcctttatgagaattcttcttttcttcacttattttttttttgtgcatttttagtagttatttaaatttttattatttataagcatagttcaattaatatggaacttttttcctgctattgaaggatattatccaagtttatattattttttactagtaaatttatacggtatgttattataggtggttgaagctttatataattatggatgtaaatacgtgttaaaaagaattagaagcagcagatgtaatgcatataattatataaaacttaaaactgttataataataccttggataatattcttaatagatggagaatgttctacacaaatgagtgaatcacttttcctttctaacttaaggaatcaaaacatcagaatcatcattccccattttcatataatttatattgtatcatttacttcttttttttttttattaacaaatgtaatttttaaatctatcaataaaactaatgaaatgtatcatttaattaattttttattttgaaataaaataaataaaataatttgtttaatgaaacttcaccattccaatttcgatttcactccactctggttacaatattgatgctcattcaaatgtgaagtaaacctgtcccaactatatcaagctatgcatatttctattagttcctttccatttgatatgatcgattttcccctttctagaatatgaaagtttgcaaatttcaatctaattattattattatttttttttgtatcaattcttaccttcagaaacatgataagtgaaggaattcatttttattttaacttgaaaaaatgactcattttaacagaatacaaatcatataaaaaaatagcgtggttgtatgaaaattcaatttatttattttcttgtatgtaaattattgctaatgaagcattgaattttgttgaatatgaggttatgtgcttttagtagtgaatcaaatggatgaccatttttaattttcaatgcagatatttgctgatattggaccgaacaaactggagaa

SEQ ID NO: 5739 - DNA, 1898 bp, Manihot esculenta
  Intron number 3 from transcript cassava4.1_011535m (locus cassava4.1_011535m.g) derived from phytozome v7.0 (chr-ID scaffold02264; pos 779580 to 781477)
gctctggtaaagttattacactgtgcagtttcctaatgggtttccattggtgtttaacttgcactattttagtaaccttggaaatgtgtcttggcattcaattcattgcattaaaacagctagccttagcttcaatggtggagagtagtacatctttttgccactgtgcatgttaaaaagaaagtatttttctaatgttttgatttgaaaagagttgggattccccttgagtaactgttcatcaccttatcttttatttgccaattgatttttcttttattacaatatggttaatttgaatttgagatatgatcttgttagggccccattttatgatccgacgtacaaagcccgtgatttgagataaatattttatgaggtttatgatgataatggattgtgagttgtaggataaatctatcggaattatggtttggtgaattcagaaaaatattgtaacttgttttttcattatagtgaaaattttcaatgtgttcgtcaagccatgtaaaccttgtattgttttaattgtctatgtttgttgtctcctttgctttgtttataccaaggttggaatgttcatgttgatgaaacgtttatgcaagcacacatttaacttgctaattaaatttcttctagtaaatgctatggcatgcttgatttgatttgcttcctttccttgaacagtctcttcttacttgatcgtacaattgcattatgataactgtggaacatatctactaagaaatcaaagtctagactgtgaatgaatttctgtctgccacttgattctttgcttaatttttagtagttgcaatattcctttacaggatgatgaggattagacataatgcactaacaactttgtatgctatctttcttgactgttcatgccttgtagtagatatgatcttatttggggccaaattattatccgacccgaaaagcatatggtacgattggaaagtggatatttttgtgatatttgtgatagcagagggaccaagctgagccttttgctgtagagtgtgaattcaaagctaaacctactgtgtcttaggatttggagagttagaaagtgagattgtaaattgttcttttcatatgtaagttttcgcttgtgtcttgcccatggatataaacttgggtgtctctaatataaagcttgaagattcttgttaagaataattgatactttaggattagattggaaatatatttccctttttttttgttcttgtgatcaaatgcctatccaccgtgtaattctttgcaattgctcttgtaagtatactaaatagcatccaattttcatcctagagattgagtctctagtgctaattttatgttctgatggagcttttatagtaataatttggagaagtcccaagtaaacaatacaaagttctacctcattagagagcattgaaattggtccaagtactatgcaaaaatagatgttgtgcatatacttcaacttagatgttacctggttatcttacatcttaaaccgtaattcacagggtctgctaatatgcgttgtgatgataacatctccttgagatgaagatgaacagaatttggcaaatttagtaatgtctctaggtaatgaactaaggaaagatgaccttgtgtattgcagaaactttggaaatttggaatgcttgttttcttgtatatagtttcaaatccctggcaagttatatgttggtttttccttttcttgcatgaattgagtggttttgttatcatctcctgatgtgtgtactgagctcccaaccacataatttgtgcattgatggtgggcggagaaattcttgattagactaagggttgatactcgaaccaaacaatgttaccacctaatccttttgttcatttcttttgtttgcctgcag

SEQ ID NO: 5740 - DNA, 1351 bp, Manihot esculenta
  Intron number 2 from transcript cassava4.1_005658m (locus cassava4.1_005658m.g) derived from phytozome v7.0 (chr-ID scaffold07961; pos 58667 to 60017)
tgctagagccagtcttatctgtcatctccttattggtcagtattttgctttttagttatccacactttcacttttctttcttcttggattaattgtttgactagagacaaggtataattttacaagtttcagctggcagccattacccatgccatgtttgtagcttaagccttaaacttagcaaggaagtgtcttcttcacaacgttttgttccaatagagcatcgggtatccgtaacctgtagaaaatctttgaaaatataatgtagagccatacaggtttgtctaactatagagaatgcaaggaaactgtgagaatttaagattgaaaaataacggaagatgccaaatctaacgaacttggttgcgttgtaggaaattcgatcgaagaaatgttgggtactttctttttagtttcctttttttatttaagtgtagtttgatgtggtgtgtatgatatcgcggaaggtacttggatactcaaatcaacattagagatttctggctgaattaacttcaaagaaggaaaaaggctgcagaataagttaatagtgaagcgtgcctaatttgagtttcctgttgtccttgcacctcagctgtgcttttaacagctctggtttcatttgatacaagtgattggatttaagcctctaaaattatgaataaccatgattcatgtttcatggtggtcaaactcagtaaccccctgtttggaattaataaatttgcaagaatttaattcaagtttttttgggttaattctcatatttgaaatgtgacaattaattttttttaacttcaaaaatcattttgtatgaaatataatattgatttatttggttaattatcatatttgataacgtaggattagttcttttcaatttaaaaaatttcattttaaaaaaaatagaatatcatacataattgtataaaaatccaattgaattttttttggtaaatgatttattccaaatagagggtaaaagttattgcatgtcaaaattgtatttttcaactaaagctcacatgaaaggaaggaaaaagtgatatatacgacctttgtttgatactattaaataatttgagttaatcatttagatccaatgaaaaaggattcaaatcagttgggcctgggcttgcatattacctgtttccaagttatcatgctggtgaggacctcaagcaggtgatgtcacggaaaatggtgtaatatttttttatattttctaaatgctccagtttgatacttccatgtttgtcatgtagattagtctttttgaacaacggagagttcatatattctttcccttgtctcagaattctgaagaagaatttattttgcgagaaatcct

SEQ ID NO: 5741 - DNA, 4843 bp, Manihot esculenta
  Intron number 15 from transcript cassava4.1_004836m (locus cassava4.1_004836m.g) derived from phytozome v7.0 (chr-ID scaffold06446; pos 310547 to 315389 reverse strand)
acataaatccatttgcagcattttcaaagaaggtagctattgtcatgcttgttgagtgaactcgttatttcgtcactgatcacatgcttagatatttgatcgtttttggttccttgaggtcatttgatgacctcttataaaatttttattctggctattcatttctatatttgtgtaattttgaagaagggtgttagggcaatagctctaataggttgaaataaggcagaatagagagaaatagagaagaatagaggagaagagaccatttggatagagaagaaggttttagagggaagtaggtaagctgtacttgtattgatgaaaaaattggaatgctcttacatatgtactgttgctgagatatatactatttcttggtaactaacttgatagttgtacactcgtagctataacaacgtcactactagctataacaacctagaacagcctataatagctgtaatatttcctgctatacatttaaatccctcttatttctatatttcttcctagaatatgcgacaatatctcttggttgagaactttcttaacccaaaggcaatgagtaggaaactgagtttcaatgaaagttttgtcttccttagttgcatcttcaagagaaagattgacctatttaattaatccttggaccacataatcagtgcctctgagaacagttatggtctgtaacactttctctgaagccactatgaaagtatcattttgaaggacaggcagtgctgtagagatgatcaccaacttccccagcttctttttgagcaaggagacatgaaaaacagggtgaattgaagattttgagggtaactccaatttgtaggctaccttccccactttaactaggattgatagggctcataatatttagcacacaagttaaaagactgtttgagtgctaaggaaatctgtctgtagggttgaagctttaaataaacccaatcacccacagcaaattctctttcagtcctcttggagtcggcctattactacattctatgttgagctaactctaagttttccttttaagagctgcctaaccttttgaaattgatccatattgccaacaacaatatcagtaggtagttccataagaaaactgggaggaagatagccatataatacttggaaaggagacattttttagggcactgtgggggtagagttgtaccaccattcagccatagggagccattgaatccaagcctatggcttcaaatgaaccatacatcgaaggtaagtttcaaggcactgattgaacctttcagtttgcccatcagattgaggataaatggctgaagtaaaggagagtttaacacccaaactcttaaacaattcttgccagaacaaactggtaaagattttgtctcgatcagaatcgatgactttaggaagaccatgtaacttgtagatatgatctatgaacaaatgagctactgtagtggctgagaaagggtgagtaagaggcaagaaatgagccaattttgtcaatctgtaaaccactactaagatagtatccatcctttttgacttaggaaggcccttaatgaaatccatggatatttgttaccaagcctaagtaggtattggtagaggctgcaacaatcctggataagcatagtattcatgtttgcattttgcacaagtatcacactgcttaatcctctccataactttccttaacattccaggccagtaaaagtaccttttaagctttaaataagtgtcttgcacttcagaatgtccacccattgctgaattgtgacaagcatccactaattgttgtctgagatttgtaattgctcccacatacattctcgttttataaaataggactcatttttcacttggtaaggagtggtggtaggagaagcaattgagagttgttgaattaattcagtagccctagaatctgcttcataactgttcttcaaatgctgcttccaagagggaataactattgactgcaagttgtataattaatggttgtctaaggaagaagatctcttagaaagtgcattagccatattttctaccccttttctatataatatcttataatcaattatcagtagtttagaaatgcccctctgctgaagattagcatgcaatctctgttcaagaaggtatttaatgctttcatggtctgttttaataaaaaaactgcccttgctctagatagtgcttctatttattcaccgtgtagaaagataatatttgttattgtatttcacaatagagattacaatctatttatacatgagagacggtatctaaacatgaagaaaaatcaagtctatgattatacaatcctaagattaagcaattaatccatctatcaatatttacttcctatattaacatatttatttcctataatctataacacaccgcaaaaataatagccaattactccctttcataaattgataaagcttgattctggggaccaaaagccttagatatataggctgtgggatgtccctgttgttgcaaaacaactcctattccccaattgcttgcatcagtctctacaatgaatggcataaaaaaatcctgtagggataatacaggagcctcaatcattttctgcttaagttgatcaaatgctaatcgaccttcttcacaccatttaaaagcatctttcttcaaaaggttggtcaagggtctgcaaatgatcccataatataactttctggtagtaccctatcagtcccagtaagcttctgaggtttttaagagactgtggtgctggccaatggaccatagcctcaattttcacaggatctgtactcgccccttgttcaaaaatgatatgccctaaatactcaatccgattctataaaaaaaaagacttagataacttggcaaacagttgctggtctagtaacactttaaacactgcttctaaatgctgaatatgctttgccatgctgttatcatagatcaagatatcatcaaaaaataccaatacaaatttcttgaggaagggctgaaatagatggtccattagggcttggaatgtggtaggggcattggtcaagccaaaagacataactctgaattcaaagtgaccatggtgtgttttgaaggttgttttaggaatgtcttcctcattcattctgatttgatgatatccagctttttaatctattttagagaataccttatctcctttcagttcatttaaaaggtcattaataatgggtataggaaatttgtctttaacagttacctcgtattatttcctgttgttaaatttgggctaggcctaactcaccccgaaatctaactcaaaggggaggattgcctatgactcatataagaggcacattaccccctttccacaatcgacgtgggattcaacacaccccctcacgcccataattttgctggtgcgtgacatatttatgggaggcccaacatcggatagaaaggctctgataccataaagaattttgggaaaatttagagaattcttgtatttcactcttaatctttacaattagtttctatgactatttatacacaaagaattatatctaaacaggaagcaaataatcaaataataattatagagataattaaggattttaatcaaatcaaatcatatctctagaatcagttaggatcaacaaataagtcaacattctccttctccagtacatgcttaatcatcaaagattgcaactcatccaggatcgcgttagtatcccgagagttcttttgcacctcctttttaaattcattcagtttgttgttgttcttttgggtgttttcttggagtattctaagttgttcttctaactctgtgatccttaccatctcatgacttactatggctgatcgagtcatggctccaaccctcaggaacaatcacccaatgtttcgctggctctaatatcaaatgttagggcaacaactctaataggttgaaataaggcagaatagagagaaatagagaagaagaatagagaagaaaagactgtttggatagagaagaaggttttagaaggaagcaggtaagttgtacttgtattgatgaaaaaatggaatgcccttacatgtgtgctgtgctgagaaatatctcagtaactaacttggtagttgtacactcatagctataacaacctcactattagctataacaacccataacaacctataatagctgtaatattctctactatacatttaaatccctcttatttttatatttcttcctagaatatgtgacaaagggacaccaaatttcatacacatcctcccacatttaccagattaaaggttgctgtcgacttgtcgtacttgtttaagcataacgattcagctttagagatgcatttttacaggagttgataatgtttttcactgaaggtgggagtttaatttgtcgcatagaataccattagaattatgtctgtccagataattgatggaaaagaagaacttgaaatttttgttcaagggatttgtactagagtactgccaaatggatgatattgacaaagtagttagaaatgactggataccagtttccaaaatctattccatgtgttcattatgaaaatttataggcactagccagcttcacagtttgcattcatgatatcattacggtgggtaatgtaatcaaatattgattgaaatcttatggaatatttcgtcacattatccattatgtcttaataagccttagtttcttacaggaactggatatcctgttttcaattctttggttgtaatatttatgttccatgtactaacttaacttcattactgcatattaggaaagagatcaaagatacaaggagttaggtttcag

SEQ ID NO: 5742 - DNA, 1555 bp, Manihot esculenta
  Intron number 3 from transcript cassava4.1_005324m (locus cassava4.1_005324m.g) derived from phytozome v7.0 (chr-ID scaffold03542; pos 389368 to 390922)
attcaaagtattacgaactgttcaacagcttccaggtacaaaaaaaaatgtactgctgcttagattggtcacttcaatttaaatgtttcaatttttgaatatcaaaaattttcttttatatcatcttgtcctaaacagatcatgtgagtcaattatcgttgtcaaaaccttaggttctccaatatgccagtattcaagtttctgattcatctttgaaatatcttttgttttggacttgtattgaggtcaggaaacatgtgatattagaaaacttactatttgatgcagcatattctttttgaggaaatctggagataccattccaaatcagtaaatggaaataagaacatgaagcaaattccagctgcttttgtgtaagcaaccctttatacctggttgtttgagatatcagggttgtttataacagagttaaacaataaaaaaatgattcatatagcaaccttaactagttttgtattaaggtttagtagttgttgctgctgcagtgatttatttagtcttgcttttatttccttgtatttaaggatacacatagagttttcaggattagtcaaatgctttaaagataattagattttctagtcttataattaggctttccaagtaattttatgttctctgcatctgttttagtagcagttattcaaggatattaatcgttgttgaattttgaagaatgtgcatttgtaatcatctgagcagcagctcattcaaataaatcaaatgaaaacttgaacgcaaaccaaatgtgatggtttcttcactcttttcattccgggaaatcccacgggagtggttctactactttcttgatgtttattctttatttatttatttatttattttcttttgaaacttaaattctcttactccaaatattcaaaccaaggcctagtgttaattttccgctgattcttctccttgttatcaatatttaatgtaccaattatgaaaatggaaaagagcagaatctgagagtaatttcagttagtacttagttgtgttacacttgatacgttcattatcaagagctccagaaattcaatgacattatttttttgctctttttagactagtaacaatgtctaacctgcggtctgcatttgtttagcattattgttgcagctactgttgattcttgagaaaagcacatccttaaatatattaattagagggaactgaaattgatttaaagttaaatttgatatgtctagttataagaacatcaaacaattgagcatctttattcaacatcacctaaaatggtacatttcaaaaaataatttttttacctcaaccacactcccaaacagagacagagtacaaaagcctgctgttccttttattatattctgctgtgctgtcaacacaaaattgaactctgctacagcttttagttatttgaaaataagttttcttgctccaaagctgacttatagtagttaatctgaccaattgatgtgaattggtagtttgagaaagatgagtttatttgtcaaattgataatgtttagcaatttgtgcagcaatttgc

SEQ ID NO: 5743 - DNA, 2897 bp, Manihot esculenta
  Intron number 1 from transcript cassava4.1_013760m (locus cassava4.1_013760m.g) derived from phytozome v7.0 (chr-ID scaffold03221; pos 192265 to 195161 reverse strand)
gttccctcaaaggttatctaccaccatattagctttctctttattttcagattgttgaaaaatattttatttgatcattatgttttgaaatatcatcggggtttaggataactgtattggttgcggtgccatggtatcatatcgtattagactatatgaatatttagaaataagaaaaatgacttaaattcacaattgccacatgcacacaaacatgtatatattgcaatggcaatgattaaaattgaaattaagcttcaaatatggaataacataaattagaactttaagaaattaatgtaaatatttggtgcacatcattattttctgtaaatggctagacgtcccttttctatgataagaaataaatataattaaaataaaaaagtgacaaataaggattaagggttcgaataaaaggttaaagggaataagctttcgaataatttaatgtttaatgtaaggctgttattatgtaaattaatggatatcagtgatatgccaaataaaaatttaaaagagcactaggtacttggagcatgtttggttcacttttgaaacaaaattaatgtctatttttattttagtcataactaaatagaataaatatatttttatgctagaagaaactaaatagaatataattgtgaacttaaaaattgtacttgagatgcaatttctgcctaaattcaagctatttaattaaaattattataaaaatttggcccttacactaagctagaatctggaatcatgtccaaagaattgcattttattgatatttatatggccagaagtgcaaacacactaagtgtttgccacctcttcttccccaatccactctttccagtccctttttttgttgcatatcaggccatacaggatgcaacatcctgtcatttgaaccctggatatctgaagcatttatattgagttttcattttgtcgagaagcaagttgcgaaaaaggactattggtgggggaaaaaatgatgcctttgaagttgaaaactactgaactatctataaagcggctaaagctagacatattgttgctgaaccatttgtagtttgactgatatctcacaaggatctttgtttttgtttggtttcttgctgaaaacaaactgtcaaatgttctcactaaaatctagcagatttttattgtagttttctcagaatcctttttattaaaaaaattgttccttcctggcaaggatgctgaaatttttgatatctgaattggctgttcttaaggctttgcttttttttttttaatattatttttaaagaaaatatttttgtgctggaaggagataaggaaactgacttggatgatgggctccaagactcttatcttttatctgtcttagtgttatcacttttgcttggttttagaaggtatgaaacaagttttggttaaagaaaaagggagcacaactgggttcataattataacaactgaaaagaacaggaaaacaaaatggttgagtgatggttcactgaagtctatgggggtgatattgatcaatcaatttatctgaagagcttgaggaaactaggttgtctgaggaagaagagttttgtttatcattattgccaagttggtacttcaccagttaaaggaaaggattgcaagcccttttttcttttcagctgaaataaagagtgcacaaacaaaaagtttgtgcttcagtcatctgtaggtaacaaaaaaggttccaatgtgaatattggtagtcttggcccactccatctcttctcaaaggaaatgaggtgtccctaaaatttgctctcaattgaaatacaataaaacttgctagcatggggtgggaaggaattggaatacaagactctgacggtttgaccacaaatttaattgattgttatttctgccatgcaactgctttctttcacaaccatttcattctccatctctcaaccatttccaatggttgctatttgcaattgatacaaatgcactctttttacttcgtttcccatggtcttatcttatatttctgcatattggtctaggcatccttatttctgcggggcttattttgtatgtctttttccatcaccatccaatactattgtacaatataaatttctgaagcttttggagaatttcagaatgtatatttgtatttctctcttaaatctttataaataacttacatgtctgtttatatacaaagaattgcacccaagcaaggaagaatataattacaagataaatatccacaattaagcccctaatttatgcaaacaaatcagccttaaatcagcaactaaataagccaacaaattcaatcttgtaaaacttggccttcaactttgccaaagactttgtaatagtctcaattacagtgatcttgcattaatcatattattaacacattttttgtcctcacaagtaaaattaaactccaaatggaaatttgaaattatgagtttatcttttagaaatggtaagcaacatgtgagacacctaactagcaaccttaaaagagcaagtagataaagtcaaaaaatgttaattgtgcatggatgcagccaaatctatgctccagtaatagttgaaacactgagtttttagttcgctagctgtggttaatatgtcagttcttgtaaataccattatttttcttaatgttaagaaatcccttttggcacaatttgtttctgcacttgctgaagctttattatttattaattttaatgttttggattttgcttgagttttattttccagtgctcacattttttttttgctgttattgcatttccgcatgataatttacatgatctgtaattcttatttttattttttaaaaatattctcattattaaagtgaagttaaaagttttggctctcaaataatacaggagcac

SEQ ID NO: 5744 - DNA, 2954 bp, Manihot esculenta
  Intron number 2 from transcript cassava4.1_016414m (locus cassava4.1_016414m.g) derived from phytozome v7.0 (chr-ID scaffold04177; pos 48698 to 51651 reverse strand)
ttggatttacagatttgactattggtacaggagaggtaaatatcttattcttcaaatggatttttcctgcagtttacatgagctctccaatgcattgacagggtttaatggccaaatgcatctataggccctgcactgtactgaaagtgcaactgggccgctcttgttttattttgttcaatggggtacacaacttctatttttggtcaaattgacatatttaagataaaaaaaacatataaattgctgacaagggggaaaaatttgtttctgatttgagggtttcttttggtttttcaaatggagtgctttttgttttattttggtaaaaacattaggaagaaaagcaaatttttctgcttgctggtttctcaacctccttttgcttctttgagattcaatgtgggagagagagagggagatagaacaatgctggggatgacaaaggtggattcaagttttccttttataaaaaacttagtacaatattgatataatatagaaggattaataattgaaaatctaaaaataatgcaataatgttatttttggacatgttaataggtcccacatttttgcttctttgagattcagtgtgggagagagagagagagatagaacaatgctggggatgacaaaggtggattcaagttttcctttataaaagaacttactacaatattgatataatatagaaggattaataaatgaaaatctaaaaataatactataatagtatttttggacatgttaaataggttccacaatttttattaatgaagggctacaaaaatagaagttttatatcattgtaatttgtgaacaaaataaaacaaggagggctcaattgcacatttctaagtagtataggaacttgtcggttcaatatgtacatatatatatacatgcaatgtatagaaggttatagatactgctggctattttcatcatgacccatttacaagacacgtagttaagccggtggttttgacataaacagcttcaggtcataaacagatcacacactaaagtttaagtctaattaagttaacccaattattatatgcaacgacctgtacaactaaaaggtcaacaggttaatctgttctgttttgagtcttttggcccatttaaattgattatgaccatttatttaattgggttaatagattaagctatttaattttaaaatatttaaactcattttgtcttatttaatttgtaattcaattttatatgagctaatcatatttttaatatgaataaactttttaatttaaaataaataaataaaatttacaaaaacgttttacaaattcaaaactaatattttattaaatctttctctaattattctctttctttcttttagtgtatcattaatatttttatatatctactattatactctttttcaaataatattattttctctaaaacaaatcaaaattgtattagaccacagtaatcaatctaattaggttttattgtatacccctagctattaacaggttaaacatgttaaatgtgctgtgtctgatgtattatgtcgtgtgatatgttagggtagcgatttttatgttatacatataggttgacacaacccataaatgacctgtgaacgctaattgccagctctagttaaagatgcattttggcggggtggtggctgatcctataatgatgtaatgctgagaatattactttttttttctttttctttgtgttgctactcagttagtttaacagtaactcatcctgtgcccataaaaactaaccaagctactgcttatgcaaacttgttggagacctgaccttttcactttttcacttccccatttccaacttccagacaccaggttataaattcagagttatttcctttggtatcatttgtatttcctttcctcttttattaatattttgggtagtttacttagttttctttgttgcttaaatttgtgtagtttacttggtttcttggatgcttaaattgtggggtggttactagttaccatgttagtttgaacatgtgatatttttcagcaaggttgagtttccttaaaactcagagatcgaatggtactctttcaacaaattctttcttgtaataggttataagggcaggaaaaatcttgaggataccctgttgcaatcttatttccatgttagtttggcccataaccagattatatttcctgtaccatcacacaccatatgccttatctgtcttgtatcctttcactttaaacaaatgtcatagtttgaagacaataaacagtgatgtgcaagtcatctaagccgttcagcttgccttcttcatacttttatgcatttttgatatcaacaggtgtttctaatttctgatttttttcccatacagaaattaaactcgatcttctacatgttttcttcttttttttttttctagaaaaaaagtctcagtcagtttctgttaacaggaatttataagttctctgtgattatactatattgtcattgtataccaagagtttagtaggaagttttaccaagtgttgattgctgctgggacttctcagaatctcatattatctgcaactgctgtttccgttgcattacaaaatgttggaagctcataaattcacttatttaatctagttcaagttccatgttctaggataccttctttatcttcccaaattatcattgagagtgcaaatggtgtttgtagcttggggaaatataacgttgattatcctacttcctgttggatgctgggattttgcctgtccttggtccagttatttggtcttccttccaaaacttgcctgcatccagtgcctgcttaaacaaattgttctaattgagcagttttctgcaattaatatcttccatttttcttgtgaataatttttaaagatccaatgatattttcaggttgatctaggatctctccaagacacagtaccgac

SEQ ID NO: 5745 - DNA, 4058 bp, Manihot esculenta
  Intron number 1 from transcript cassava4.1_000834m (locus cassava4.1_000834m.g) derived from phytozome v7.0 (chr-ID scaffold05859; pos 99503 to 103560)
aaaaggtttgggttttttccccccttttcctgtcaattaggtgttcacaaatgtgcttatcttttcttgtgattttgatctcaagcactatgaaagtggctttattgctccgtatttggttttggatcattgaggatatgtattttaatttcgaattcatggtcagtgaaacggagtttttctcactcaagtaagctcatgcaaataagaaacttgaggtctttttgttttggggggggtgggggtgggtggggtggggtacaattgttgccttttaatgcagtcagctgagggtcctgtaaatgaaaacagtttacattagctaagcttgttcaactgaatgtcatataaattaaccttggaacctgaagtatttcaattcttttcttggtgaaaagattggctttctctgtttatttattattatcttttatataagttttcctcagccttgattactaggcatgactattcagtgtgtttcagttcagtatcagtttcttgtaagtttgaaatggattcattattgggacacattagtccattcaagcgactagatttttatttgtaggtcttgtataacttggaaggtttacaagggccttagttttctcgccaggccagaaggaattttggaatggatttgggttattattagaacaacacctatagcccttgagcttgtgtcttattaaaatcgcaaacattggttgtgtgataaccctgcttacattgtatagttattaaaggctcaagccacactaagacacaaaggagtcctggcgcttaggtgcaagcgtgtgcgtgtatgaagtgagattcaaagaataaattttagtaaaaaacaattttagataactaagaaatatagaacctgaataaaggacctaaataacattttaatttttcttttctttaattatatatggtatataatcaataaatatattacataaatagcgtgttaatgtcttttttgaaaaaaaataaagaagtaatattgcaataatactataataaattactcagttagcattgtccatggtgttaaaagggataatttaaaataaattaaaaataaaaggggtgtaaaagcagtaaagacaagaaagatacataatattgacaataatgtgtgagaaagagagattaacagcaactagttatccctgctcattagtgatactaagtccggaaactttttagtcatcaatattagattctagtggataggcaaatttaaagtcaaggagtatctttttgtaattgaagtacttgctgatggcctgatagtggaaataaaggtccgccatcctagagccttgtactaggaataaggtgcacacctagacacttaaggtactaggtttggagcctagtgagccttgagcctgaggcacaacctttaatagctatggacctatgaggttcttttatgttatggtgccctggtgagtcttgaatcatgatattttatctggaaacttaagacctggtttaggagttcagatttgtcaagaaattggtgtggctactgcacttgaattgaagtttttcttttcctttccagtctaagacatcttgtgccttagcccttagtcaatcccatcctgatgtttattcttagtatttgcctggccatttttatgtgatttcataataaagtttgatagggtctctgtgaaaggcacctctattaaaataaattggcaaactacatgaaaataagatggaggagctgaagatgtggaagtgctccttgctcttctttattttttttgtactgggctacggtgatgatattattagatttattctctccacttaactcttgttattcttgtatgcttttggaattcctttcataaattttgaaacaattgtaaggaactacagtatttaatgggtggactaaaatgtttcattcatttttcaatatagagaaaaaagatttagaaaactaaggaactcagaatttgatgggctaagatattggatatcatgcagtaaatacaatgagattgacatggtttccatactgtgaagattgttttttaggattttggtcttgttcatgctgaaatataactgtgcattcatgtgtgctcatcaataacttaactctatgcatatttttttgactgtataccttcaattctaagtgagggaaaaaaaggaagtctttatttttgaaacacaagcattgccatagcttgagttgcaaagaggagacagaagagagttgaatagagagaaagagggggggagggggaggtgcatatgtgtgccttaaatttcttcaatttgaatctcttgtttcaattaaatcaccattttcagttcatatagtggccgccttatgggctttctacactggctcttctgtatctctgatcatgtttatgtgataaattcatttatattatgttgaaaccaggcatttttagttagtttgaaccaattgctggaaacaagtagttccccgctcttagcagcaatatgccatcaagcagttctagtccttccttgcctacctttaccacttcaattgatttaccaattttaacaattctaccattttaacaagaaagtacacaacaattttaaagttttgatttagtcatgatttggagttcatttcattcttgggatcataaactagtacagtttttatgagctgaacctcggtttaatgacattggatgcaagtttagtggttaaggagggaaagtttttgtagaactttcgtctttgagaagtttcttcttgtgatattaatcccacatggaacttagtttttccatatttgttctgaactttatggaatttgaggtttagcaaattatttccatcccttttggcctctttgatgcccttggctttgggctttattttcttaatggatctattattcataaaaaggtatcatgtaaaaaggatgtcatatgtataaatagataatctatggcagttttgcactgaaaacatccttgcaggttactggttgaatttttatcagacttaagatgggtgaaaagatgtgccttaaggccttaacacattccctactttgactataaggcagcaccaaataccattgatttaaattttggggtgaacattaacttgttacttacctaccgcattctcccaaatcctacatagaggatggaccctttatgtacatatataactgaaatctttcttaacatgaataagtgaaattaaattctattctgaattgggttccaaaatgcaattattggtgaccccattagtgtactttctcttgattactgatttagattggtaaaatgttagtttcaaaaggctagcataaggtttaaagggcttagcatataatatgtacacaatacaaataatgtttttttctcccttttttctaagtgaatgccatatgtttttgtatttgcaaccaaatgatcatgaatcaattattctcttctccttcttttttggggtttctgctgaatatttttgtacttctggtttttagttttatttatttatttttttaatttaaatttccccatgttctccttgcatctgttaaactgtataggctgattcactacatcagcactcaattctcaattttgccttaattgtctctataactaggaatgtagatttatttgtgtaagtataagcgtataagctcgaatttatatgagaatgagcttaacaacctttggactaaatattcacatatagattcatgcgcacattatgcacactttaattgattcagcacacatctcgatacaaatgtttaacttaatggttattaagcttaaccttgtatgaggtggagatatatgttagatgcaccctagtgtttattatctttagtttgtatttttgctattaaagccccctaataagttacaaattatattttagacattgttcattaatctctctctctcccttctctggatccctatgtaaatatctgcaaatttcattaaactgcaacttcctagagcagttatttatggaggtgttttgttttcttaaacagggtttgtctcctt

SEQ ID NO: 5746 - DNA, 1071 bp, Manihot esculenta
  Intron number 8 from transcript cassava4.1_007454m (locus cassava4.1_007246m.g) derived from phytozome v7.0 (chr-ID scaffold06825; pos 629809 to 630879 reverse strand)
aagaccaaacagtggcattgcttctcgaggaggaagtatgttcataaatttgtttccgtatttattattgtgtctttgccttatgatataattcgtgtgtgttttcaatccttgtgcattcacatatattcctttgttttctggtactttgagatgcacaatttttcacaaattctttggttttgtttattgctgattctagttttgcactcattccttttgctagttttgctctcatggcttttgttagtcttgctttatcagttttaccatcctccttgtggatgaaaaacagagttcttaaatgatatatgtagctgcagagcttatacatggacataggtttcatgcaaaaattctcttgatttgcccattattgatattgacatggatacatggaattggatctagtaatcattgattgtagtaatcatgtgtgctaaacttattcattgacccaaaagtcttcatgagtacacttgatgaaaaaaaagggcacatgtttcaactattttttatgtgctattttacctgttacttaccattggggcacttctcttgagtttatgctattatagcatttaaggtcataaacagttgggagttgaatgacctaaaaaataatattttgaaggctacaaaaaatagagaaggcaattaaatttagatgccagtcaaccagtgatgtcattctgataggagtgagctgtaatagagtgctggagttaatactttttatagctgtatgataacctccattaggtggtggtggtgatggtattagttgttctgcagaaactgagttacatcttaggtttttagttcagttgccagtttgcttccactatgagtattgggctttccatttatacgttgcatctgaaaggcattgtttgttttatcacttcccacatcccttgcatggtatgcttaaatacttgtttagatatggtaaggtcaaaataaatgtgcaaaaaatagtttgcttattttatgctttgttgagactgagctttgatttgaattctgtaagcaggaaggggaagaggcagaggcagttaccaaactgat

SEQ ID NO: 5747 - DNA, 1439 bp, Manihot esculenta
  Intron number 2 from transcript cassava4.1_002199m (locus cassava4.1_002199m.g) derived from phytozome v7.0 (chr-ID scaffold05161; pos 343238 to 344676 reverse strand)
gctgcttgcagtatttaacacctgagtacagtgaggtaagatatattcatctatgtatttacaattacctgtgcatttgtatccttttctaaaatttctcagataatttattctttattttctcttaagccctcaaaattattgaaatgaaggagcaaggttagatatggtctatttgaatctggtttagcgaaaacattggggtgaaacaggtattacagagagaagtgcagggaggggagggtgggttgcaggaaaaagtagcattggttcatgctcctccaatgaaagagatatattcttttagattgtatctcattattatgctcctagcagaactttttgtttttgcttttggttatattattttttttttcttagatttctggctttatttcacaatcaggacgtgctgaacttttgcacagcccattatgtaatctattctttggaagtacttcctttgaactccccagactaattgttctaatttgattatcttttctatttgaagagatcaaataggagtcaagactcatgacctccccttctgtattctgcattatgccaaacctaaaaataattaggaaaatttactttttagttctatggtataggaaaactcattagttggtctctcggttttgaaaaatatactaaaacatctctaacgttttaaaaaatccattaattagtctgtccgttaattttaattttagctattaaatattgcaaaaaaatctaaattgctcttggtgctgagggactaattagtagattttttacaaaattgagagaccaactaataagttttttcaaatcataaaaactaaatagtaaaacatttaacggctaaaattaacggaaagattaactagtagactttctaaaatgtcaaagacattttaatgtatctttcaaaactgagaaatcaactaacgagtttattcgtaccataggaataaagtagtaatttttttcaaataattatatttgtctatcaaagtatgatttgccagcagaatgagtctacataatgtttacatcatattgggtattttctaatttgttttcagaggtcatgattcacttttgataatgaagtgaacattgatccttttaagaaagggggaaaaagtcaaattgcacaaatgtaatttagcatgatgaaatcttatttgtttatttggtttctcccttgagtgccatgaaacagaaagtggaatatttttggatttagtagctttgagaaaatgcctgactgaaattgttcttcactaattactaagctatttgccatgcaagttttgtcaatgatatttcatttagaataatcttattgaatatggtgtaaagaaagcatatgaggacctgatgcaacactgttaatgatttgttgtgcagttccttttcgaagctgcaactgctaactgtgttga

SEQ ID NO: 5748 - DNA, 1464 bp, Manihot esculenta
  Intron number 3 from transcript cassava4.1_005691m (locus cassava4.1_005691m.g) derived from phytozome v7.0 (chr-ID scaffold10878; pos 115013 to 116476)
ggaactttcaaaattggttctgttcttaaggtatgttgatgattcccatatttgttttcatcatgattctttagatgaccacagcttgtcgagtaactgcagcttaaacttttctagttttttaaagatttaatagttctttaagagttgaatcctctgaaaattcagaagttgtgtatttcgggaacctaccaacttattatccatattcagaatttctagaaaccaagcagttcaaaaaaaaaaaaaaatcatacatgtgtagatgcagtaatatcctttgttgtgaatccacattcgggtaccattattgaatcagcaaaactctactgtatgacatgtcaaacttaaaatggctgtgaaaaatctgatgtgagttgggtatttgatgtactttgtgatgtgattagggtatttgagaaaattattaaatcacaacaattacaaaaaaaaaaaggctaagctctttacttgcaaattgtctccgtgaccatattgtttcctatttgacatccttattgttttggtaacttgcatatgatatcttcaacatcccatttgccatgcagccaatggattcagataggtcacgtcatcaatcactgttagaactgatcaacttagcatcttgttgataatgtcatgatatacttttgggatttatcaatggcaatgatcgaattcgttcaacagaactattttgttaaatgcaaaacatgaaacaggttaccattagcttcaggccatctgagaagtggaatggcttttgcttgttccagaacaatagttaatactcaagtcaagtgtccaattacacttaatattactttccttctgccctccagttcaatgatttgatgatttgtccattatttcccctgaaggcttttcactggtctttgtgaaaatctgtgtgcatcattgcttgtgcttagtccagctctgattgttgtcagtattattcaattgtcaaattagtgatttatacttcgtgattgcatttgacatgcatgatattgtgacttacatcactataatgtctttgtagttcgacaacatttcttgctgatagcttttgcaagtactcgtatgctttggaggagccctacaaagacaatgaaattttattaggatgaagccctaaccacgtaaaattgaagctgtaaaatctcagacaaatggagttatcaactagatctaggcaaactgattattctttgtttattttccttaactattaggtcttcgtctttcttttggagaggaaacagtgtgttctaagttggaaactataacttttatcttatcatattatgttttgcagttcctagtttcttattaggtagatgatcatccatttaactctccttggttttgctcccaatagtttgcctgccttgctgcacagttcatgttttctatctaattcttgcgcatcacttcaacatctttttctctatgtag

SEQ ID NO: 5749 - DNA, 2165 bp, Manihot esculenta
  Intron number 3 from transcript cassava4.1_010812m (locus cassava4.1_010812m.g) derived from phytozome v7.0 (chr-ID scaffold03802; pos 361389 to 363553 reverse strand)
aggtaagtgcattcaccttttgattttgaagcccgtaaacttgaaattaggcatggtattgtgaaaccagagaagaaatatcatcataaaaggatccataatgaatcagttttgtcgaactcatggacatatgctgcttatatggtctctggttatctttgttaatgtcacgattaattgcttgactagaagtatgcttgcttgtagactgtaacatggaacaatatacttgggtaatttacatagacggtacaccaacttggaggtttataacagtaaggtatccaaacttcatttatcacttaaaatccattcagctgtgatttatataacgcaaaaccccttttaacctacaatagcaagtttccatgtatttttgctaacgtggcacttattagttaaaaagatatatttgatctctccttaaaaaattaattaattaaacgaattattttttataatcactctctctccagtccccttcccgatctctcccttcttgttcacatgaaatccctcttccggagccacaattcattctctggatcttttcctccttatattttgttgcttcataggcttaatattcttgatctttcttacaataatctcatcggtcacatcttgaagtcttgtgcgatcttgtggaccaggcccttgaaggggagttctcatatcaggactctgttccttttggtacttccagagctcatgaagagcaacaagtcagaacctgtgcggttccttgactccaactgtaacctgtgaaaccagacttgtaaggtgagctctgcaatactttacaagtcttggtttttgtaggtgatttcatctgcataggaattgtaagcatttgtagcttgcatgcaaaggcataactcaacgttggatccaccatgggcatccatagattagtgtgaggtttctagacattgaagtgtaaccatagagacaagtacctggctacaagtccaatctcacaaatttcatggaactttgttgatttattttcaatctcaggaaacattgtctgccaatcatgacaaatgggtattgtttacatagacaaatgggtattggaggaggagatatgtaaatggagaggaagaaagtcaaaggagagatagagttgattaaaaatatttttttaattggttaaataattttaattaatgccacattagtcaagtgttataattttaatttaatgggtgtcacatcaacaaaggcaacctgaaaatctgctataggttaaaaggagttttatgttaaatagagattgagggggtttacatgataaaataaagtttaggtaccttattgttacagacccctaagttgatgtactgtttgtgtaaattatctcaatatattcattctggtattaaagagagaaaaaggggtggagggtggggagaaatagaaactaactgcaaaagataggagtctaacgaaagttgggtcatgagttctgacaaacaaatctgaaatcttgtttgtattcatcttagaattattatgtgttactatccaaaaagttgaattattcttggaaagtataatgttaaatatgctaaggtccacggttactaatcctgaaatctaaacatttgggaatttcatctcatttgatttttgttgtttcagaaataaaaaattaatgacttttaagaaacaagtgaagctgatgattttaagatctaatgaccagttgagtgactgtatggggaacaagtttgctcttggggtcagacctgcttggtgcaagtgtagttacattgctcagtggatgatatgccattgccatgcaagattatgttaccgtagattgagagattcaaaagaaaattaatttgatatattactcaaattggcatacgagattgctttgtagatggagtgttgaaatttaccctttttgtgttctgaccaaagataccctctcttaatgcatccttgtcaaaaataagtaccagttttctatttgcataaaggattgtgcatttacctagtagattgttttgtttgctctgaaacaaattgaagcatggtttaaagtccttgacacgagataatttatgtactttactactttcagaattaattgttttccacttactcttacatcagggtcggtttgagatcatttcaatttctggatcata

SEQ ID NO: 5750 - DNA, 2408 bp, Manihot esculenta
  Intron number 1 from transcript cassava4.1_011660m (locus cassava4.1_011660m.g) derived from phytozome v7.0 (chr-ID scaffold00206; pos 213711 to 216118)
actatccttctgtcgctctcaatttctcgctcaaggtaaatctcttagtttagttttgttttttatgcatgtaagttgattgataaaatgtcaatgcgaaaggaatatgtgattgtcaaattcttcggtctccaatttggatatagatataggaatattgcataataatttgcaaatcttagttcttcatttttggtatatattttttatgcaacaaattgcaagtcttagttctttatttttggtagatatttattattcattaggaagcaggtttgtttgtgaaagctatgaagagagcaaggaagttttcatggagatgttcaaatatttaatcatataatataccaaattgaaagaaaaaaagttacttttgaaatttcattgaaaaatatatttcctggataattgtttgaagaaaagtgcatcaatctgttcatatggagtaaaaggactatttcggagtatcctataacaatttggagaaattttaacaatttaatgcaaaatatggtctgagagagggtaaaattgtttcaagaggagctctgctgcttaaatggtagtagaattaagggttctgtgaatgatcacacaaaaatatggttacaaaacttggtaactatatgagcagttgaggttggagaaagttctcagagatttgattgaggaagagtctacagacaatgaaaagctttgattgaggaagagtctacagacaatgaaaagctaaatagaataaaatgcttactttctgattctgatacaaattaataaataaacattttataaaaagtctttcaatttgtgagttgttagtccttatcaaatttttagttgtagcgaaagctatggtaaattctgatccagcgtgatggctttctgagcatatcaccatttgtgttttagctaggaatgaagtctgagaacaatccagtgaggtagagatagtgaacttaattacttattgtgcaatcggtccagtcaaggaaaaagaagattttttttttattttttatttaatttttcattgtaaacttatgaagtttaggtttctattttttagaaagttttaagaattctgttactctctctgtctcgtaatttttatccactttatttttctacatatagtaagaaagactagttttttttttattaatttttcaattataccatcctaaagatattaaattttattaaatataagagatgttttgggaggtttcttcggataaaataaaattaaatagggttacaataatcaatttatatattactataatgtaaaaaaggtaagtaaacaataattaattttgggacaaccagaaaatgaaaatagacaaaaattatggggcggagggaatattatttactaactaataatttattttatttaggaagttggtttgatattcctaactactactgattactatttcttattcaggattccgaatcctatcactagtaggattaacaattagatctatgttctcttggtattttggtagatcttttctgtgatttattttttgattatttatttaagaatttatttctctttcccttcgttgtattgcttctacatcagtattatttattaaataaagataaaataattacctaggaatatgcatcactttttatgaaggaaggggacgaaaggagatccaatgatatataattaaactaatggattttattctctgatattgaatgtcctaaagaatctataaaaccttccgcctatttcaagttggttgtttactttgtatttcaacaagttaaactttaaatgctcagtgatgtttttgtcaagtcagggacacgagattgtgcaaaaactatcgtaggctatttcagttggtcgctatatttgactagggaccagtttggtctgattgctttaagcttaaattttgaggagatggaatttgtcttgtaacactatgatgatgatgatgatgatattctcactaaagaatataatgttttttgcacccacatatgccttaagggaagctgacaccattattggagctgaagcttatgatcttccacaaacagtgttatatgaaagtgatgcactcaccaatcctaggtcacaataaagtagcgtgggaattaatagctcttgaaagtgctcctaaagcttattactaaaccaacccattgttggtgtcttgcaggagtgggttagtagatggcattagcaaatctaagaaatctgattaaagataatggcaaaaatgtgatactacaagtacggcctgtaaactacttaaagctctgttgattaaaaaattcgaactaaaccagtaacatctctatttttctggtttatgttatgcggtggtcttatgtactacttttgctgcaggatctctatagaaacatactaagga

SEQ ID NO: 5751 - DNA, 1445 bp, Manihot esculenta
  Intron number 10 from transcript cassava4.1_008719m (locus cassava4.1_008719m.g) derived from phytozome v7.0 (chr-ID scaffold03255; pos 162088 to 163532 reverse strand)
ctcgagatactgttcaatcgcagatttggttacaggttaatctttgtccatgaattgatgtttcaaactgttggaatttctttttctcgtcattcttttacacaaactattgagaatcttatactcaacagaccagcgttgtgcattgtgctgataacagtaagtcggtaacaactattgtggatgatatctttaatgttttttttaaaaaaaaaggaaaaagaaatatgctttggtagattagggtttctgaagctcttctggtgcatgagaattaatacttgtggcagggattaattaatctttgcaactgcttttcatgcactggtccacttaaatactgttcttaatttgcttcttggtcatactctgaattgctgatagtccactcagtgttttaagattccaacttccaactccctgcaagattggttttgtcatctttttgtatctagatttcaagttctatcatattaattgatagttgaaagaattccctcatgaaacaattcagattttgccatctgcagaattttagtgtttctatggtttctaggctctgtatgctgtttttaaggatgcattaaactaaaagggtattgtgtcagacatagttgcattttccactgaaaatgaactaataagattttatggtttagaaacctgataagtgaagagagatttggtgaaaaaaagataaaataatctttccgttgcagcttcaacttcacaaatttctgtttacatttgaaatttcatctgccacactataataatatgtattatgagaatggtaaagatgtgcggtatgtttgtgcttgcaataaggtgagagtagattttggttcaaccgaaaaaaacgtaactaaactgttctaatttggatttctaatatattggtttgatttcagtaatcttttttttttaaaaaaaaacttttcctatttggttaattcagtgaaaaaactgaattaactaaatctaactgaagttttattagtgttctatgttgttctgcatccctatctataaaggctacatatgtttgctctcatcattttgactttcatgtgggcatacacaaccccggccttccttagttctcctcaatctcacttctccctcattctaggtctgctgttctgcttcacctcctactccttgaccatcttctcttcatctccctctcaagaccttgcagcttcatttgggacctgttgcagtctcaatcagcgtctctgtacgttgcacctactgccatgagcactgcacgtggtcccatctcacacctttcttcatgttgcatctccctcaacctcaaggctctactctttagtctacactccctgcttagttgcctatcacagaggaaagaggttgtattcaattataatgatcatatagtctcttatgtttttacatatttttatttatttactgatagg

SEQ ID NO: 5752 - DNA, 2574 bp, Manihot esculenta
  Intron number 3 from transcript cassava4.1_034340m (locus cassava4.1_034340m.g) derived from phytozome v7.0 (chr-ID scaffold11202; pos 76568 to 79141 reverse strand)
ggcttaaacttgttgtagaggtattgtctctttcttacatttcgctgcttgaaaattgtctagactttattgtcacctatttttatggtggaaatgatatgttcttaattattgttggaatgtgccttgtgggaagaagctgcacatcaacagtttacaagaaaattaaaaagcatgttagtgttggcaaaaccagaattttgatgatgggtatccaattcagttgtagctctacctagttgatgatccacattctcgggccattgattttaacattgtattggagcattgagccctaacaattattgatttgggacttgaaagcattatcaattgggacccaatgagcagacccatgagttgagctaattgagccagagttagatcgatccatgggctagcttaatgagctagaccttgagggcagatccaaaaggagctagacccaaggtagattgttcactccatgtaatactaagtgacaattgggcatgtgaagctgttatgaacttaggtcacggatcggattgtgggaagattgatggggaaggagctcatctaagagagctcttaacacatgagactcattaatgagagagtcttaaatctcaaatatgattgaaattaatatgcttgctttattgaataaaaaaaaggttccttatatagtaaagtagaagcctaatacaagcaaccattaaacaaaaaactactagaataagaaaatagaaatctaataagaaacttttaagataaatataatttgtttttttatggatttggtctatctgttatccataacatcattcccctcttagagaaaaaaacttatcctcaggctcaaaggtaggatatccagcctagaaatgattgatagattcccacgtggcttcgggatcaggacaaccttgctaattgtctaatacttgccaagcccatatacttggttcaaagtctacatctctgtgaccttatcatagtactttttcatttgtgcctatgcttgctataagtgtatttggatttcactcaaaactaaatcatgttattttgaagcatgacatactacctccactcttatagattccataatgtatgataataatgggtcatttatgccatcaaatgattgtaagtcaagtttggcatagtgggacactacacgtccttttgtcctctcattagcgtgttgatcaatatttggctagttgctacttgttctatcttgtttctggttcactcctctattgaagattcgaactagcttagaaatttgccgagctaagtcattgagacatgcatcgaattgttgcatgagagaactgttgattggtgagtggtagcttctagaagattggtagttatgagcaagttgttgattatgttaggagcaattattcttgttgtaaagagtataataaggatcaagaaagcctgtagaactattctgaaaagtcaatgaataatatcttcaaatcttgtttctggttcactcttctccttcctattcttcaaatctcttctctctctctctctctctctaattcttcattctctctctatattctttctcttctctaaattatctgtttcttcgggtataaccacaatccaaatcgcctaagtcattttggtgaagcagatttagtttcaagctcagttcagtgtgtagctctgccatcttgatgttccacgctcttaagcctgtaattgttggcaatacatgaagaatatagattttcctcactttttagtttattagtaagttgataggttaactagaaatttgattactttcttcttcttttaccctttgggttaaagtgaggagtgggagcttattttggaggaagaagagatgtggtccctactggattaaagtatcaggagtagaagcttatttggaagaggaagagatgggattgatggcattagaaaaaggaggaaatgatggctgcttgcttggcaatttgttcctgatccaactatgcatccaattctaatattgtggataacaatttttgtaattttaatagtgttgaaatttaaaataatagaaaagatggggagaaaataacaagagaaggatttatgtagttcaactattgagagtccacgtccttggactcatgacctcaaagagttacatttcattcacttgtgttgtttacactttacagaatacataagagtaaatattataatggaatatatggcatgatatcaataaaccgtaactcactcctaagccattgtttgtgctaaccaaatacatgattttttgttcttaatcatgagatctataatatgagaatatcctcaaggggaaatctcattagtttccacaaatagacatattaattccaacaaatggtcatggtgtttttcaattttagcatatatttattattacccagccaaagaagaatgaaggagttttcaacgagtacatgcatagataccaaaaataagagaattttgcatgtaataagttcagagacaaacttttgcagttttgagtattacttttgacttgtgaacttttacagggtgcttcaatacctcagtgtgcaa

SEQ ID NO: 5753 - DNA, 1582 bp, Manihot esculenta
  Intron number 2 from transcript cassava4.1_020175m (locus cassava4.1_020175m.g) derived from phytozome v7.0 (chr-ID scaffold07595; pos 130952 to 132533 reverse strand)
caccattcaaaccacggaaactgatatcaaatctggtagttctccttatttatttattccttttaatattacgtacatacatgtatacagaatgatgcatttctatgaaaattccaattgttttttttagtgtaggttcctagttattttcgctgttacatctgatttttggcaatgtgtttagggatggcaaaggatggggtatttttgggtatccgatccgaccgaatcctaatggaacgaagtcataatcgggtttggtatgggtttgggttttaaaaataatatacattgtgggcgggttcggatcggattcggttcactaccgaacccgtttatataaataattaatttaatataaaaaatatattttatttataaatttttttatatatttttattaaaaatttaaatttaaatattctttagaaatattagattttttaaatgaaaattattaatgaaaaatattttttatataaattattaattaaaatatataagattaaacgggttcgagttttattcagataataataatcggggtttgggacggattcggatagtttaaattaatttttaatcgggttcggaatggttcagatattactaatataaatcgggttcgagtatagtttaattttcacgagtaactacccgtttatatccctaaatgtgttacttcttcgcaccttttttgcgcgctaaaattagtcgattggagatatatagatctgatgtatagattttctttagctggatagagttacaatagaatggtttttaaatattgataagacatattttgaggatgaatttgaaatatctattaaaaagtatgatttcaaatataatttcatatgcttggttgaaatgtgtatttctttttctcttgtccttcactactccaaatctttggacttcaaatattttgtgcaatttcaagcttatatttattattggtattcttgtttactattttttaatatcaaaatttatatttgcaaaacttaggccttatttcttatattgagaattttaagttcaatatggatgactaatttaagaagaaagaatacgaacactgactgtgatttgtagtaataaataataattgtggcctttactgtagaagttgatgaaccagaaataatattctgctctgcattttaatttatcatcagacatcacatgaataaagaattttttttctgttttggaactgtaaaaaatattgatgcatactttaagttcaagataaatctatttttggaatgtttaaatcttagccgttgtaaaggacataaagattgatgccaaataagttttctgatattcgtcaatcatcacagaaatgctcaattacctagaatgcacaaagctaataaaaattgcttgcatgtgtaggtgctcggtttatgattgcaatttaacaatagtgagatggaatgaaatgcttaaggcccaacattcaggaattaacggacaacattcataatgagatatgattgctaaatttccatgaaccttttccattatttttgcagcaaaatcagagacaaagaaacttaaagaagaaatt

SEQ ID NO: 5754 - DNA, 2599 bp, Manihot esculenta
  Intron number 5 from transcript cassava4.1_016177m (locus cassava4.1_016177m.g) derived from phytozome v7.0 (chr-ID scaffold00847; pos 2066990 to 2069588 reverse strand)
ctcatttctcttggtattaattttaactccatattgcatctgttctcataaactttttggttttttcatcacattattgtcattttaatgcttttaaaacatatatggaaaatgttcactttgtatttctgatagcaagactcttgattacataactcctgattttactgtgaacctatatttattagtttcgacaatgtgattaactctcttgtttttatgtgcaactcatgaacacattgctttgtggttttgtaaaagtgtctaaattaagcagttgctagttatgcatgtgatgttgtgaaagagaatgtggagcaaaagttgttgctttatgtggatgtcttgtatcaaattttaccactagttttagatctaaaagtgtttctatttttgttggcttattgatgcggtgcatttggattaatgaaacaacactgctttttgtttcagagaaaagaaagaaatgccgcgcaccgtttcattaagttttcatttggtagttgataggcgggaaagtttgtttttcttttgtcttctttcacgcatgtttctcatttactccagctgtatatataccactcaatgtgatcaatgaagccatcttgcttcctgcttattttctgttttgcataagctgtcatttgcacatgggatcaaatcaattaaattttcaatcaagctgagaggttgtccacagtgtgaatcaccctggtacctgaatgaaaacaataacgtgaaatgtccttgtttagaaatttggtataggtttctttttagattgcctagtctgattgaaataaattatccatattggaaatgtaatggaatgtagaaaaaatagtatatattgaattagaatagataaacacaacattttctactatagtaaaattaataaatagatccaatatgatcttttcaataagaaaatactatgttaactgcttcattatcataaaaaatattaaaaataccaaaatttatggcatagtaattgtaattacttaaaacattatttgatatttgtatgattgagatcgtttcgttctctacttatagaatgctaatttagatttgtttagttatagaaaacattttctattttcattttaattttcctttccataacctatttttccgattttctttttttttttttttttccaaatggaaaactaagaaaaatacatatttatgattagttgtcttcctttaagctatttaatattttattaagattttgtattaaatgagtactattaaatttaaaaattagctatttaaagttaaattttaaactcagagacgatcatgtccattataaaatttaatttgatagaatactcaaaattgaaacaaattatatattagtaagaatcattatgaagtgttaaatttgggtcagacctaactcaccccaaaaactagctcaagggggaggattatctatggctcatataaggggcacgttactctttccacaatcgatgtaggattcaacacaccccctcacgcccagaattttactgatgcgtaacatattcatgggaggcccaacatcagataagaggctctgatgccatgttaaatttgggttagacctaactcaccccaaaagctagctcaaaggggaggattacctatggctcatataaggggcacataacccttttccaaaatcgatgtgggattcatcatgaagaatacaaagactaagaaagtaagaatagcatttagagatgtgttgtctaagccttttatttgaacaaaaataattaatctaaattcaaaaacttatagtaacatatacagaataagaatgtatgctgtttttggaaccccagcagccattttttttaggaaatgaaaaaaaacatcccaagtttattgatacctaaactaaatgtgatcattgcagcatatacagaataagaatactttgtcaaaaaaaatgccttgaatgttgttgctgggatttgatcctattattatcattcggcaaaggcccaaaatagagcaaaagtagaaaactgttttccgttttgagaaatagaccatttttttagtggaaatcaatgtaaagtagtattctagagtttagttttaagttacataatttgtctaattcatttggagaatttctattactaaaccctaatttccattttctagtttcctggaaaataagccttgttttccacaactaaacaaggccttattattccaaatcactaactttctggcatatggaaattgcaatccagaatacaaattactaaggatgcaactttttttgaaaacattggtcaattcttttacctttgagaagctatactaggttgtactagttagacatctgaaagacccttaagtatgtttgtatttcagtctcctcatcaagttttgttgctgagaatatttagtttttgacattttcatgtgaacttgaacgtaactatcctgttgtaacatagctatggattttatatttgacgaattaaatggaatataacttcttttttgacatctttttcattttctgccacttttaaggactgcagatattgtatctgattgtgtctggcatctgcttgag

SEQ ID NO: 5755 - DNA, 4961 bp, Manihot esculenta
  Intron number 6 from transcript cassava4.1_000606m (locus cassava4.1_000606m.g) derived from phytozome v7.0 (chr-ID scaffold03741; pos 406404 to 411364)
cacttggtaattatcaatcttctttatatggttgtatcggatgaagactgttaattgttttgaaaatttaaggtttatattgtataattgtgaaagtgaatttgctgaaaaaaattcatgatgggttttgtataaattactttctgatcttaccaaagcatgcaaggcatctacatatgtggtggattggaaatggagttggtaaactatttctgaaagtaatttacaagataaagtttagcgaaccgaaagaggctagactagattgattagttgaattttatttctcatgcctactttctctaagaaagaaaaaagagaaaaaagattgtccagtgcaaaaactttaatacgaagacaaatagaggcttttttttccccaaaaaaggaaaaggaaattgctacactagtggggagagagatagtgagcttgtaaaatcaggaattgatttatttctgatgctagtacattagttaaggtgagtggcactaccttcacattgagctgggatcagtagatcagagatgtctctagaacctgtacttcttttgccctctccaaatgtctattattttattatacatgtaaagtacgaaatcaaggtgctttttgggattttgaagcatagctatcataggaactgctttttggatgaaggcaaaaatgctggagaaacaaaacttctcggaatcaatcatatttttgaatatttactaatagaaattgtttacatgacctactttgcagaagcaagaaattaggttgctgaatttaaaaattcctggatgctcattggtcatgctgtcattccctaatgctgtttgatctttagaagatgatcgaatagtttggtaattataatttaaaatatagtgcacatggcagaataaaacccggattttaagttgaacattagtttctctaacaaattagatttgtaagaaatagttgttttctctattcaacaagggtgtttatatatgtagattataagaccttattaagataagaaatcattctactaaaagtcctctatccctctatctatcaattagtatcaattagccctatgattttgcaatctattctaattatgtacagattatgttcacgccgtaacacttccctttcaagctggagcatggatgtttattttgctcaatttgttgcaaagatattctattctaggcttatttaatgccttggtgaataaatcacccagttgctctcttgtcttaacataactggtggaaattattgttttttgaatttttttacgaataaaatggcaatcaacttcaatatgcttagtaatgtgaagagtagcctgattatcacatcaaagtttcacgggtaacgtaacatccacactgacttctttcaacaaatgatttatccacagaatctcacaaatggattgagccacgatcctgtattcttattcgacattgaatctggatactacattctgttttttattttttcaatatactagtttcctccaataaatacatagtagcctaccgtggatcttttattacttttagattctgtccaatcagcatctaaaaagtactcaactgtaatatgtccatgatcactgtagagtatatcgagtccaggagtccctttaagataacatagaatttatattagaatggcccaatgttttactgtaggtgcaaatatgaattggcttacaatacttattgcaaaagcaatatctagcagagtcatcatcgtaaggtagttcagccttccaatcaacctcttgtatctctatggatcattataaaggtctctatcatcctttgtgaggcatatattaagaactattggtgtgttaaagggtttagctctcaatttttcagtttctgcaagtaagtcaaggacatacttcctttgaaataagaaaattcccttttttactcaaaacttttactttcaagacatacttaagctgattcaagtttttggtatgaaaactcgatcattccttttaatgacaatattatcaacatacataataaggagaataataccaacatttgaatgtctatagaagacacttactcttttttaacccaaatacttgaacatcactgaacttgccaaaccaagccctgttaaaccaagcacggggctgcttcaaactatacaaagattttttcaaatgacagacttttccatactcactatacacttcttcttggaggtcaccatgcacaaagaaaaagtataagaataatctcctctgtaggtttgtgcatatcctttagcaacaagacgggccttaagtcttgccacaaaacaatctggattagctttgatggcagaaatccatttacaattcacaaccttcttcccttgggtaaatcaactagtttccaagtatgattatcatttagagtcttgatctcctcaagtattacaccacaccatccagaataaaataggacctctttaattgtcttaagtaaggaaatggaatctagagaggcaatgaaggaactagaagaggaagacatgtgataataagagagaaaattagcaataaaataaataaatttatactattatttatcttttcaaggattactggggagattaagaatgcttagtggtagatccaatggcgatggcaaagaagatttttgtccaggatatgtatcatagattacttgtcttctagaataaacttgaactactggtggtttagtagactattgaatactaggaggaacacattcaacaaattgtgccgaagaagacacactagtggagatcacactaggagatcttactatcggatgtgatcttatagatgagttactcatcttcctctccatcaccggtagaggtctgtgctgctggaaaaaaatggaattttctcgaaaaaagctatatcagatgagactaaatacctgtggagtagccattctaaatacgagaatatctcatgaaaatacactttaaagatttaggatcaagtttaatcacacgaggtctaacatccgaacatagtgagtattgccaaaaatccgtgattccaaagaaaacaatgacttattatgtaagagaatactatatggagtattactattaagtatcgtagacgacatgcaattaatgaaaaaacatgcggcagagagagcgtcagcccaaaattgcttaggaacttgcattcggaataacagagctcgagcagtttcaacggaaatatctattcttctttttagccaccctattttgagcaggagtatcaagatttggtgaagaatcctatattgacataaaagtctgagatgagcttgacatgtattcttcggcattatcacttgttcaatatatgcatagaaacattaaattgatttttaatttcaatacaaaaggcaaaaaagtgagaaagcaactcacaacgattcttcataaagtaaatccaggtcatctgagaaaaatcatccacaaaagtaagaaaataccttaatcgagttgtagacccaataggatagggtctccaattgtctgaatgaactaattcaaaagcagattcagcctatttattgattccgggactaagtagtatatgatggtttgcaaaatgataagactcatattatagtgaaggtatatcatgaaactaggggcaaaaactttttcaaaagtggtagagaaaaatatcctgattagcaatgtgcttcaaatggagagatatcctaactagcaatgtgcatcaaatggagagatgtcctaactagcaatgtgcttcaaatggagaggttacactagaacaaacaactgactgaagcacctatgcatccaaaatataaagaccattagatacatgtcttttactaattactaattcttcttcatcataaggtcctggaaaagataatgattacggaaaaaagtggcacaatagtttaggtctatggtaagtttatttacatagattaaattaaaggcaagattggttaaacttaacacgaatgataaaatgatgaaaggaataagcttaacagtcatagattcctcaacgttatgttgcgacccatcagctatgattacatgagaatgtactttatgtgattggaaactagagaatgtatggggattacctgtcatatgatccgtgacaccaaaatcaatgatccatttatttgaggaggaaatatggcatgttttacctgtcttaacgatgatagtagtgactgaagtggactttttgagtaggttcttatactaagtagtagtattttcacctcgataattattttcctatcctcctttggcaatcgtagttttattatcgatggctatttttaaatttctaaaatgccgaaaatcagattggaacgagatccaatccaacaaagtcacaaatcccatagaatacaccattgcaaagcaccgctatgaaagaggtgccaaaaaaacaaaacaatgcatagggctgaaactgcaagatagaggcaacagaaaaaccgggcgcaacttctggacatctttaatagtgcacgtgcaatatccatgaatagtactgatgaacagtacctaaaaaataaacctcaacaaattgaaggccctgataccatgtaacaagagtatttatatacagattacacaccttattaaggtaacaaatcattcttctaaaagtcctttatctattgattagtatcaattagcgctatgattttacaatctattctaattatgtacagatcatgttcacattataacagtttcaaacaattataatgtgactaatttgaacattattgctagcagagctctttgttatcttgcatagattagaaaaagttctattcgtcgatgatagaagttttcttgaatatcatgttatttacatgtttatttcattgacaattacaacttccaaagcaaaatgattgttgttttattaatttcattgcacttgcaggttctcaagcat

SEQ ID NO: 5756 - DNA, 3444 bp, Manihot esculenta
  Intron number 1 from transcript cassava4.1_005475m (locus cassava4.1_005475m.g) derived from phytozome v7.0 (chr-ID scaffold06512; pos 802342 to 805785)
gggtaacgtgggcaccaggtgttaatctttgtcaggtatagctgtgatattcttcgatcgaagtttggttgttggttacttgtttttctcttcaagcttttgatttttattcgatatacttttttctatgaaacgagggccttaattattagttgattagaatctaatattgagattattgcgtgctttcctcagatagatactgactctggttttagattcttttcgcgatattagcagattagggtaattgattactcgtcgatgagcgcattgataatctagattgatggtatagttaccgtcattagaattcctcccttttttttctcctttttaagtatttgtcagagaaaatcattataagcttatatgcagatttgttaaactgggtaaaagattcaaagctcagcaccaattttccaccgtttaatttagagatccaagtgaattgaacggcgagaatggtgctatagaattctatctgcttagttgtgtgaatcaatatgcgagttgtggtgtctttttgacacattcgcagttcgcaccatgacacacggcgggaaatttctttcaagtttctcaaatgtttgtccaactctcaaatccaaaatttcactgaagaatctatgaaagttttggtcttaaaaatcagaagattgttactgatacaatatcgagcatatggatgaagtatgataactaaaaaacttaaaagctttatggaaagccattaattgataagaaataacattcttcttccatttatccattaaaaataattaaattttgctataccagaaatcctagcaatactttctcttgcactgaaagaatttctctattatggtgtaaatattattccatgtaattggaaagttattccacttgtttttttttaaaaaaatctttttcttaattagatcgtgaggattgataaaataaaaatgattgattaataaaagttgcatcaaatagtaaaccttaaaatttagtaagaatttaaattattaaatgttataaatgaattgataattaaaaaaaaactttatgtaatctgtcaaataggttcaaagctacatgtgacaagatttgaactaataataaaggaagtgtattgctagcatcctctttactttaatgttaagattgaggaaaccttagaacagtctgtctcctcttaacaggaaatcaatgtgcaattaattcaaatgagaattatttctttaattgtttgtcaaatagtgactttaaaaatttactagcttcatcatatgtgataccatcgttcgaggcataggtagaatggattcgcaagtatccaactattgtaggctagtatgcacaagcttctgaagacaaaaggggaaagggaaaatgaacaaaacaataataatgacaataataaattaaatgaggcggagctgaagaagagtatgggtttaggtgattattggacaggtcatggctgtataaatatcttaaatcatcacagaggatttttaaattttaatgcagatcttgtaatttctactgtaaagagcacaagttaaagatcttgtccaattgaaaacatggtgtgaagaataattggatgaatattctgtgcaggacaatataaacataatgaaattataaggtgtgctgtggaaagcctaatcttcagcaattattttaccaatcataggctagtgttccttggtttaaatgcggttcttggaaatttgtgcatctaaacaaccaagatttatgtgaacctccctgatactatggttcatcagcttgtaaggatgttgaaactatatctaatgtgttcattctttgtttagtgactgacctcttctctagcatttatctgggtcccagcttgtcatgtttttgaagatttatttattcccttacctgttgatttggttggcatttaaaatgaatttgatttagctcatcaaatgaattaatttcatttgtctggtcatatctggggttggagaatactaattgaactgaaaaaagagttgtgacttcaacaaaattaataaaacaggaaagttttattgtagataactataatggtttttaggcagggagaaacggagtcaggtttccatgacattttctcattatatataatcatttttctaattctatatataatatagaaagttgtgaactacagcaagtgatctttagagacaattattgcatgtggaagaatatcagggttcttttatgtattttctcatccaatgcaaagttttctgggcattatttatagtcttctaattaaagtttgttgttagtcattgaactattaagctcattttctggtctgagtttgaattatcttttgtatcaacttgattgttgcttattgtaacaagctgaagttaatatgagatttatgacattagcatgatggaggggcaagcatagaaacttgaaagtcattggttcataataggaagtgtaaatggttgagatttaagggtatcttgctttatgcatattggcatatatgtggtgacttcatcttagatatacaatcatctgaaaataagcaacttagttgttgcttattataacaagctgaaagaagtttatatgagatttatgacattagcttgatggaggggcaagcatagaaacttgaaagtcattgaagtgtgaatggttgagatttaagggtatcttgctttatgcatataggcatatatgtggtgacttcctcttagatatctatacaatgatctgaaaataaacgtgtgaactttcctttaggttgggtaaagtgcatagtgtgtatccacgtgtattcataatgcattgtagttcattattatggagttacaaatgcacatcatattaacgataaggtttgttgttctacagatatgggacattctttgttggttatgtggggttgttaggatttatttcttcttttgaaacccttgagttgtgattgaggtatttacttaatgttgcaattgcttttgtttgtgctgtcatatgtgagtattgcctggatgttgaaatttagaggtttcaaagaggtattgcctgggagctctctacaaacatcaaagatgcaaaatcatttttgggtattaagactactaaagggctgcaatattgtgtgaactcatatttttcatgccattttgttctcattgtttctggggcatggatgtgaggagtggactaggtctctagtgaaatatttagtgtgaattttgtgtttgttgattgaagttctaatttacggtcccatcactaatttatgagggagttccacatctctccagatttttttatcatgtctggaaagtattctgtgcagatatttggtcatttgatttttctacttgtactagatgctaactagtgggtttttctgatttgcatataggtaaaactatttctaactgaggactgtccttctaa

SEQ ID NO: 5757 - DNA, 1850 bp, Manihot esculenta
  Intron number 7 from transcript cassava4.1_030101m (locus cassava4.1_030101m.g) derived from phytozome v7.0 (chr-ID scaffold06656; pos 927377 to 929226)
ataaagctttggttagaattgacacaagtactgatttccaccacactgtgccaacttatgcccaaccaagtaagataccaattactgcattttttaaattgatttagggtagttttctatcataaaattgaagctggcaatatttcatattcaattttctgaactagggatccccgaaggcggtctacaaccattatgctgatgaaaattgctggagtcattgatagtgttacatcactcatgctcttagtcattttattttattaaatatattgctactcatcaatcttcacgtatttgttcttgtgagatatttacatgtcccaagtgttaaatttatgtctaaaaaacatatctgtcaagattttaggttggatatttaccccacatagtattaaatttagtctctgttgacctgtttgctgcagtattattttttgttgttgtcgtcaagtgcattttgttaatgttgttacttgttatgtctggtggtgttaccgtagttgtcaaatagagtttggaattgagaatcaaattttcattttacaaagagaaaatcaatcaaatcttaagattcaataaaaattaattaaaaataatatatgactattgtgataaatatagaattatcatttatctaaatagaactattctttgtaatagaataaaatgtatttgttgttatgttatataattttatgttatgaatcatgaactctgaaattgtatacaatagttattattatacatatgctgatattctcatttattgatcaaatagttagtagaaaaagatagcaagttataatattattaatatagttagccaagtaaattaactgaaaaaaaaaaagaaaaaagaagagggagaggaaaaacaatggatggtggaagaaaaatagctaagtttttatatattctttttcattgcaaaaatgaatgagatcctaaattttgaaaatacaaggtctgaaagatcttttataaataattcggatgaagactcagagatttgtattgatttacctgattcactatattctttcgacttagtcataatttgggtacatttgcaatttaccctatagatttgacacttatatgtacgcctttaataaagatgtacaggttaggaatttcactcatattttctctctgttgctgttgtttttctgcatttttgtttctttaattgcaaaaggatgtttgtctttaactgcagtgagaagtaatgataaaaatcagacccatcttaggatttccaaattcaattacggtcaatgcataattacttagaataataaactagtgatggaaagaattacataacaaaactagcaaacatgcatctttcttttccatattttactcagccattctgatgatcagtccagtgaaatgcttttctagtggcaccattaatgatcaaaattttttttgaaaaccttccgatcgctggtataaccaactctaataatctgtttttaccagctaaaaacttaggcattggtatattactctgatggttctggcactcggtggatgtgggtcacaagtttggttttatcaatataaactaagagcagtgattttatggaaagtcgattttgtttaattgtaattattatctacctaacttatctaacataatcaaagagatactttccttttttagattgcataattatgggttctcttttgtttatatttttatccatttcattatttgatatacacagaaaattcattcataagtggtaatcatggcatgatgtgtatatatatgaaaaagaatgtgaattttttcccaaagaattagtgctttgttcacaggtgtagagaatttgcaa

SEQ ID NO: 5758 - DNA, 858 bp, Manihot esculenta
  Intron number 4 from transcript cassava4.1_021016m (locus cassava4.1_021016m.g) derived from phytozome v7.0 (chr-ID scaffold11297; pos 129437 to 130294 reverse strand)
atcatacagtcaggtattactcttcctattgtttcatctcaatacctatctttgaacttctgcaagtgtgcactatcttgaaatctacattgcagcaaatgcatttgtgttgcaccaatactctttaatgagagagtcttaaatctcacaattttatgaataaattatacttgttttattgaaaaattaaactgaggttcatacgattataatacttctaattagagtaaaagtgtaacacaagcaactactaaataaagaactcctaagataagatagcataaatctaataacaaacgaataagataagatagtagaaataagaaactaatagataaacataatctatttgttatggatttagtctatccattatccataacagttggggtgatgttacattagtcagaatttttctggcacaattgattttggtctgtcactgatttgtatgttgtgaagatcaacttgtaagggtgtaaaacctttaaagaaagtatctctaattcccatgaatattgttaaaaactctccttttgaaaccatacggttccttaaattacaggcagatccattatgcaatgaggttatgacagtaagatttcctaatgtttcgaaagcttgtaagaactttctatttgatggttgcttattttaagttctctctaacatttatgtatttattcattcttgagaaatcatgaccagtaatgttaagttcttttaacaatatatcattcatattagatagtattcaaaattgacatttgtcagtggtactgtttagttgagtaatatctaagttttctactgctaaactgtttttacagtgctaaaagaggagcacatcaccctata

SEQ ID NO: 5759 - DNA, 2170 bp, Manihot esculenta
  Intron number 5 from transcript cassava4.1_002710m (locus cassava4.1_002710m.g) derived from phytozome v7.0 (chr-ID scaffold10173; pos 393960 to 396129 reverse strand)
agtttgtaggtaaatactttggtttaggttttttccccttatccagtggacaaaaatcattagttttggtttctcctttagatggattctgcagatttctttttcattcatgaaatatcattcttaaaaaatttcttgcaactgggaactatgaattgcctatgctattatgatgtaatgcaagtatattcagcatttatttcttattgctgcccctgcttcacaaaactaaattgctgtaagaaaattggacctcccgcaattattatgattgcattttgatacttttccttttagggacttaaatgcttcaaatttagatgattttagtatttgaaattgcatgcaactcactgcttctgcagcaagagtttttgatgccagaagcgctatttgatattgaggtcatttcttttctccgaggcactttatagatttttcagatccctgtatttgtataggagccttgtggctaccattactaatgattctggagcttcaaattctcctggatttcttttttttttttggcatgattcagttgatggagacaggacacaacttctctttatcttctggtgtccaaatacaacatttgattagataagaccaggaatggatctagaaattttttagtgggggcattatatatacatgtaattagaaacattttgtagatcaattaatcatgaaataagacataagacatatagtatggtctgtgtattttgcatgtgaattgcacgtatttttatttttgatatttcataattcgaatctaaacaaaatataactatatatttatacccttcctcatttggtatgtttagtgtatttatgtgtgtatatgtgttggataatttgacataagatttttggatttgatattaatataatctattttaataaaatgttttatcatatatgaaattatactttataaataaattttgatccataaattcatttgataactcatttaaaatgatttaagcaacttatttataaaacatatcaaatttactttcactaaattttccctaaactttttatttagattacgtttgcttactaggagatattttctgcattttctagtgttcatggcattcaggagaagtctatcaccaaaaaatattttcccagtcaaagggaaaattaagtcatttttaaggaaatcgagttaatctttcaaaagaggaagctattttatggaatttgagaatattattaacaccactagattttttatacatgaatttattaatattttttattttttaatattacaaccaaacaatggaataagatatttttttggaaaacaattttcttagaaaatatttttcatatacaagtttttttttatttgtgaaacaaacaaagccatataaatatatacatatatatatacacacacacacgtatacatatgtataatttcatggctcttcaataaaatcggagttattatgattttaagtttaatatttcaataattttattttatttttaagtggataatattaactagaatacatattttatttgaaggtaaaatatatattcttaaaaaatgggcaaacataaattattacataaataatttaaatattttgtaaagaaaattgtgggagcagtgggggcaagtgccccatttgccccctctctctatccgtccatggatgagacattagagtttctggtccatcaatgttgtggttatcatcttttgagatccacagaaaaaataattttttctttaaaacaaatctgataattcttgggagagagaatttgattagtttgttgatagtcgcaaagtatgtgcgaagatagtgtaggttaaatgagatttaactgaatctgcttaaataatttggttgggttgatgattcttgcttttctcttgcacttaatctacagtagcattttggcccctggaaaacatcctcttaatctataaaaaatgttctccatgtcaataacttaaaatacttctggtattaatggtgatgttaatttaatatgcttctgatagctattagccggataatttcttttttctctttactgaaacattggattttagtcttttttaacaaatttatgagaggtttgattttctcatgcacttcaggagacagtgaactcgcttctatagtcatta

SEQ ID NO: 5760 - DNA, 2184 bp, Manihot esculenta
  Intron number 1 from transcript cassava4.1_003036m (locus cassava4.1_003036m.g) derived from phytozome v7.0 (chr-ID scaffold04360; pos 148444 to 150627 reverse strand)
ggtgctgctcctcgccgtgtcctctgtcactgcaggtttggatgggtttcttgaaattatggtttcagatgtgtgcttgtgagatctattgatgtgctttctaaaatttgtgataaattttaagagttagtgaaggttttatttgtgagttttattggacattcttcttaataaagattatcgtgaaggttgtatttagtaggttgtatttagtgggattattgaacaattgttgaaataaacattacttccattcagagttgattttgtgagattgatattgtttcttaattatgttgaagtatgagattttgtgtgaatttcttatttttttggtattatgatttaatcagagtgattttgtgagattgaggttgtttcttaattttattgaaatgggtgattttgtatggatttctctttttttttttggtattatgagttaatcgggttctggcattgtcgggtggtgaatgagtaaagttaaatagatttgtgaaatttaattttagaacgagtttgggacagtttcatatagtgtataaacgggtttcaatttgggtacttagaattcttggtataccctaccttaccatccctagcgccacaacaggtttggttaatctgcttgagctttctaataatctcattttcagggagcataatggactaatgagatgataaaagagcttagagttagaactaactgagcttggtctaggcttgttaatgtgataaactcttatgaagagctgagctcaaactcaataaatttgatggagtcgggctcaagcctgccttcttttgtttgagctgaccctgaagctctggttggctcggctcaattccacccctttatgcaggcgagcaataattatattatatatgcatgtatgtatgtatgtatggaacaattataagatgaaagtttttatgcttatggaaattcactaaattatgtaataagtaataaatcgaaacagctggcccatcttgtagaccaaaacaaaccgttttgttctaaaataattattgacaaagaaattctatttctattttcaatatttgaagttgatgcttatattggatagaccatctcttgtaaattctctctcatttcttttgttaatcgacatttctttttatttttttgggtcctcaatgaaaatgaaaatgaacatgaaaatgaacaaagggctagaccatttagaatggtaacttctgtgttattttgcttttgccactcattttttattatcacatcttcctaaaaatccaatcctcctgacttcttatttctcttttgctgcaatatgccaatatttgtgttttgggttgacattttgagatcttcaactttgtatttttgttgcagctgcagtatttgtgttttattgccatatggcctgaagatttttatgttattctgtattttttctgatggatttgatagatatatggtcaaatcaaatctatggttaaattaatctgaaataaaatgaaggtagtttccaaataagaagtccatttaagccaaaatgactgagctgaactgaaacactgtggtttggttctgttgggttgggttcctttagaagtttggttcggtttgttctatagaaatagaagttttggttaatttggtttcaattgaaccaatccaacagttagccctaggttcaagtactgtagactctatcttcattaaatcttcaatgaaaagtatataagataattgggtttgggtaggttcagttagtgtacggtagtaatggtcgggttgggaataggtatggtaagcaaagggttaatctaatctggttcgagtagtatatttataataggatttggattttggtatcctcaatttccgggtatcctacctgctgccatccctacgctgaactgctgaatgctatcattctaaaatctagtagctgctgatacaaataaaactgatttttggaatgagattttgacaattttatattccaaaatgctcctgattctggggattttttattttttatataaaaaaattctgctgggtattttttttcattgtttcccctttgttatctctttctaaatccatttgttagtatagttctattcttgtagttgagaattttatacacatggtttggtttccattgcagctggcatttcttggcttgttaagca

SEQ ID NO: 5761 - DNA, 4027 bp, Manihot esculenta
  Intron number 1 from transcript cassava4.1_005919m (locus cassava4.1_005919m.g) derived from phytozome v7.0 (chr-ID scaffold10365; pos 90900 to 94926 reverse strand)
tgtggcgtgtggcaggtttgctacatttattgttttttcattcttccctattattttgcgtactggtcactgcatattactgtaaccagcaactcttttcatgcctcatagtgtatggttacagcatggcagtgtgtgaatttactttgcagtttgtttgctctatttacaggacatgcctggtatacatgtgtttaattataactacaaagtagctatactattactacttcaggaaatgaagattccttttgatagttctcaatgctggttttctgtcgagaagctttctaatgggtgtaggttatcctgtcttttgattgggtgatttgatgaaagttattgcctttgcaaatgagatcgaggataactagctatggctgttgcttctcctctttcttctttacttatttcttctagatgacctgcaacttagatatataaattgccaaccttgcaaaacagaatggtggttgttcattggctaacaatggatgatcaatgcaattttagtatgtcttattcatggcagaataaaactagtttgcatgtctagtgtttcagtgatctagaaagctagttgaagctttctaatgggtgtaggttatcttctctttcgatttggtgatctaatgaaagttattgccgttgtaattgagtttctgataactagcaatagctgctgtttcccgtcattcttctttatctattttttgtggatgataaaacttatataccaaattcataaactctctctctctctgtgtgtgtgtgtgtatagggagagacagacagagagagtgcaaggattgtttgttggcttaccctggatgctcaagcaattttaatttgttatttatgtagaaatgcataataaaactggtatctgtatctagtgtttcagtgatctacaaagtcggttgaagccagttccctaagtaatattcttcaggatattagtttaccagttgtatgtactaatgtgcatgtgacaacagtgtacacagtgttgaacaatctcttgcagccctctctcaagaaacaaggaggtggccgtggattcattaaattgtcgtgtggtacactttagggcttgttctgataggtcattgttatcctgtctttttgaattagattcttcccatttatttataaattccatataatcttgatttaacatgtctattagctggtgcctgtatgattaaaaatgatgctgtttcgttatgcatcagcttaattgatgtattattaaataaaagcaaccatatttggctagttatatagtgggctgaagtcggtgttcaaattactagctatatcattattatctgggagaatcagctttgaagttctaattgattctcttaattgggagttttgctttcatctcaagctgccaggtcctctctggccctccccctcctcctttctctctctttcaaataaattgagttgagatatgtaggcagtagcactgtaggtcccttctctatatgtttatgagattatccctgtccaatattattaaggcaagaggcgaccctaaggccacaagtggatactgtggccttaggtgagaggctagtagggtacatatttttagcataaaaatttcatacttttacctagtttaataagtaaaacacatattgagagaaaaaaagcaacaagcactgcccatctaacaaataaacaatcaacaaagaaaaaaaaagaaaaaagaaaatgaaatccaacaaaaaaaagaaataaaaaagaagcaaaagaataaagagatgttgctagcttgaggagagaatatagaataagagaaggagagaagacaaatgataataataataagaagatggctgaatctgctggctatgccaatcctggtgagaggaaaggagagaggagaggagagaggaaagaaggagaagatgagagagaagggaagagatcaatttaggttgtgtaaagaacttcttagctgctggcttgcaaaagaaaaggctatagttcaaggatttctgtttaaaacacaataaaaaagccactatttgacagcggtgttgcctccagcaccttcagccatgtaggcaaggtgagggtgccttgtctagcaccttggtcggtgccttgtctagcaccttgttcggtgcctttgataacattctccctgtcttttgattttgacatagcctagttatattctttaatagagggtaacttcttgtggtctatttcttaattgaggtctaaaagctgtccttttactgatgttgtttcctttttctttaatgaacttttacctttaggataacttcaatagtatctggtttaacatgttgctgtttgattgagcagtgttttgatgctgcatttataatcttaattgtgacttggctatagcaagatagttatagtttaatactgtcttgcaagagtttggtaagtgtaggattctttcttctgttgatctgttcacttttggatttgaatctttattaatagttttttttcttaattgcactaactaatagcttgtaggaggcatccctgcttgcatcatcctttaggtttaagtccttatgctgtaatatagtgttttaaggatgttctgagaaataatgtgacatatttgagtaaaaatgtcacatactttaagttgcattttttagttcaattttggacttttaattgttttaatttcttctctttggaaagttgatttccactttacttgttaattgggtacaatgctatctttgttgtgatatgattgatatggtaggttgacatgataggcagaaagtgtatgcattgcattgcctagctgatatgtgctaactgctaagccaacattcaaccaacataggacttctataataattgggggtagaaacgaaacaattcacagcggtgtattgtcatgggcttgttggggaagtactgtgctgtggatatattttggtatattgacctattatctacaaggaaaagtagatagagctgtaaatgatcttggctttacattatttggaaaagtgtttcatccttgtgccatttgaaaccatctgttgtcatgaagtgggaagaatttgttgttatggtggtgaccatgggttggagtgagatacaaaagaatatgggccatgataataaaatggaatgaagaatcatgttagcagagagcaggcttgtcttatgcttatttgcataaagtttggtttttaggaaatctcccttcgcatagtttaccattaactgtgaagtgattaactacaacattccattagtgatatgtgcgcttttagtctgtcttaatctgtgatatcctcctagcaacctggcttcgtggttatgccaattagacttttgtctgtgccctgtcgttgatgttatacttgtttttgtgaacgttgattaattatgtctatttttggtaatatcattgtctacttcccttctccatgatgttaaagcagtacattctgtgttcctttggttttgattcatgagtgactgttgtctttgtaagtgttgtgctcaatccagatactctgtttcatgtcaaccatgtctcgggattacagaaagttgtgctgtttgtttaggaggaactgggatgtgaaattaactgattgtttattactttaattttcaggttccatgtgacttgagttttgttatttctgtatgtcacttagagagttcagtccccttcaagtgataaaaaaagtggaacaccaccttaattgatttgctttattgaaagggtagagttacttgattcaaagttgatgtgctatccaagtaaattagcctccaatttattgaatattataaggaataaatgatttatttcctatctgtttgtgcctcttattcattctaaagctgctgaatgttctgcctcttaacttctattgtccttttagtttcacattgtgaactccctgaaatatttgagagaagacctgaattattattcttaaacccttgacatgaaaattacaggtcttcaaaagacttcccagat

SEQ ID NO: 5762 - DNA, 536 bp, Manihot esculenta
  Intron number 1 from transcript cassava4.1_016888m (locus cassava4.1_016888m.g) derived from phytozome v7.0 (chr-ID scaffold03049; pos 724185 to 724720 reverse strand)
ctgctagggtttctctcttctgcaatcttcctcccgtacagatctccctttctagtttctatcctcttttcatgtctttgtttgtattgtatacatttcagatttgttgatgcgattttcttatataggttaactgcattatggaaccatgtaaagtaacttcctagaataagatttgcatatttcctcgatcttttttagtggaaacagggagagcgttctattctatgtgatttattccctttaagatgttttcttcgattttattgatggttgttttattgatttcttttggcttgttaaagtgatgtgattagttgcagaagcagctgtgttatattttcatgataattttttttgaatgtttggtcaattttatgtgatgggctgtagaaagtttatctacaaaatcagtttatatgcaactatctaatatttggagaaatgcatttatgggtcaatgaaatcaaagcttatttactaatcctttctccatcgctctctctgaaatttatttggcagctatctttgacaac

SEQ ID NO: 5763 - DNA, 3574 bp, Manihot esculenta
  Intron number 1 from transcript cassava4.1_010640m (locus cassava4.1_010640m.g) derived from phytozome v7.0 (chr-ID scaffold03614; pos 2622520 to 2626093 reverse strand)
ttcctcaaggaagtcccaacagttgtttgctcttggtgggccttgctctttctgcttttgtacttttatcttcttactttggtggtgttttgtttgtttgggaattcacttcatttttttttcttgggtttttccttgcaaatctctatctatctttgtaattatagctagcacttcttttagctatgtttgtagttcattttgtgcacatcattggttaagccaaaaagttttgatttttatggtttagtgtgaatataggttacatttggtagactgtaatggtatttgattgcattacatcctaccaaacgtggcctaattgataataacatttgtttgcaaattttggtaatgtcaaggtcagaagttctatctatcttagtaattttggctgtaacgatattgggctattcacgaaatgttctggcagctacttgtggaaaggttctggttttcactttcaactccagaattcaatatgctgattgttatttagtttatgtttggcattgattttggagttgaaaaaagtgctttttagaaaaagcaacattttatatgcttttgaaaaagtagtttgggaaatgttgatttgttattttaatgttcctatactaaattatgtcaaaataattgtaaattatttttaaatattttctaaatagcatatttaaaatattgtttttctcaactacggctctaacaataacgccaaagaggctcttactgaaatttttgtttcatttagttgctggattttggtgcagttttgtaacagtttcccttgctttttgctctgcatggcgagctttttatttgcattagaggtcttttattcctggtagtccctttccatgaaaaaaaaaggccatgttctgcgttaatacttgtgaatgtcttgagggtttagaagcaaaattcttaagcttagtgaagattcaattttatgtttaagttcacattgttattgtctagtggtgattaattaagtttcatgagcccttatttttcttctattgtattttattcattgagtttagaattttatagcaaattgcatatttttatggtttttttttattccatttgaacctttcttttttaatttctgtttggacttcccaacatgtatccgggtgtatttcactgcatgtgtgcatttatctatgtattactgtatgctttcttcttttggcggagggagtgggggagggagggtgtaattttggaagaattccgaactggttgatcttgggggttttattgtggtgctattctgttgaatttagttaaatttggagttctttcatcacaaatttgtggtgcttggaagagtttggaacgtcatgccattacatttctttctggttgtggtactgtggttgctgatattttttcttggattttttatgccttttatggtgagtgtctccgtagaaaatcattttaaatacctgattctgaatctttttttaaatgatgtcttgaatgtatgctagtgattgtgatttcttataatctgatgcttgttgcaaatatttggtatttactgggagtttttgatgcattgtgtatgatataattaccacgttacttgtttgtgtcaagtagttaatgtttatgtgaaaagtatgattgcttggactaatgaaattcgagagattatcttgtaacttctttggtaatgtgaggtctttttgcatcctagtaagctgcttccttttttggcagctgcaatggcaatttcatcccttcgtaattgtgttttgagggatttactgctgcatgtcagtatggccattgtgcataattcaattcttcccttgttttgtgtttatttaggtatatataatttcatgaccagtaaatttgtttccttctatacaattcaaagcgtctcatactcactgaacttttttaccagatattgttgagtgctccatgcttgtttgctttttgaaaagggttttcagagtttgtataacttgttttattgaaatttgatgaaaaagaagttagttgcaataccacacagaatagaatgctctctgactattatttagtgatatacatgatagcacagtaggtggcaaatccaacattttgcagctgatgaattttgtatgcattaagaatctggtgttgaattgagacctcaaaaaacataaattaggaattgatttggtggaaggcctcattgttgttagaaccttatggattcagtttgattcctcaccttaataatttggatctatgttatgaactattaatgtacttgaattatatgattgtcgattccatttcccatcatagccattctcaaatttatgggtaaattgcgattgtacctgaatcaggagtaaattgaaagaataaatagtgaatcaagtgaagctatatgaatcaactgatttttcatccaagtcagtgtattctttttttgaaaggattgttagacctaatagcttcaaattttaataacacttcatttttgctatgcaaagtgcacacaaaaccttgtcttagctattttcatctatcaactattattttctctctccctctttctttttcttttccccaatcatagttgtcaagttatgatattttatgttagtatattatatattataaccttataacctattatccttttttttattattttatttgatcaaatttaaatgagagttctttcagtacatgcaaaatgataaccattctttacaattcaaaagttcatgaaatgtaatatagaactgtattacataatatgaatgtattgttctatttataaagtattactaaacgataattatgtatctattatgtctttgcaatatattatttttgagatttttgtcgaaacttattattcgatttgattcttgagtcacagattaagattttgattctcgttccaaatctcaacttgacaactgtggaaggcctgaagtctgaataggccattaagctaaatgtattgctcttcagtttacttatacatttgagaatgatgtgctttatatagtccaaggtttaaatgaaaatacatgtcaattttaccagtcctatctgagtagtttgctaatgtgtaatgtgaggtcttttggtatagctatgatactttttttttgttgaaagctgagttaatgctaaagttaattatgaagttcaagctaaacttagttatgatttacatagagtattccctgctactgtgttttccatatgtatatgttttcaggaggagaatctacattattgcttcagcaaatataactcaactattttttccatttaattaggttttggtatttttgtagttatagaagggaaatcttatggcattatcttttgttaagagccttgtattagcagtgcctctatatattcttagttggttaggtactttgtgtttcatgacctggttttaacaatccagtttggggagtatatattcacaaaagtattacctgtattcattttttgtgacttttcatgatcctcccttttacagtataaattagactgcttatgttttcctgcttctaattgattgttgcaggca

SEQ ID NO: 5764 - DNA, 1343 bp, Manihot esculenta
  Intron number 3 from transcript cassava4.1_016334m (locus cassava4.1_016330m.g) derived from phytozome v7.0 (chr-ID scaffold04175; pos 187632 to 188974)
cattcgctggggggtaaactctatatctttcgttaaagacgccatcaattttcatttctgatttatttacatgcattacctgccacaatattatgaaactgatttgggaactcctgagttgatgccacaggcctataaactattttggtttctttctcattacatcttactggttggcgcattaactttttgaatcattatctcccccccacccccccccccccacccaaaaaaaaagattttttttttagatttgccattattcgccggccatcctcaattgatgccaactctttctcctttttcatctttttattttttttggtttttattagaatggctacggtcccacctttatttgggctgggagatagtgtacattgggatatacaatctgttaatcaagatgattctcgggaactctctctctaagccatggcagtgtaaggttcagcttcactgcttcagcgagtcccagcaggagggagctggtgcagattgttttcgcgaaaaccgccataccgtacagagttttggcaatctctttctagctggcgaaacattctttatatttaaacaagcggttcttgccatacaaattacagagtacaaaccaaaaacatcggtgtctgaaagaaatcttgatccatcaatttggtggtttgaaaaatcgaagtttttgtagattgtaaaaaaaatttcaaaaatattacttcaaaattttcatcatctcccgtaaataagattttttttttggtgtttggtcttacgctcgttttgtctcccaatctcgagagaggtacccccttatgcgtatgggtctcctgctggggtcgggtatccgatgatctcctttcaagaagtgctattggaggtacctcaaacaacacttcaaccttggtgttgatagttgatgagctggcttgatttatagaggtatatgaagagttacaggggagtactgattagaggccttggaatattctttcctcctctccgtgtataggcttattgaactatttttatttttatttgttcgttttttttttttgtgttttacatttttcatctattatctatattttgattaaatgaagcgattttgtttaattatttatctatatatatatatatatatatataggcgaaaagcaaatgccaaaaattggaagaatcatgatattatatcccatgatttgtctagcacattcaaacttatactaataatttttcctcttttatttgtgatagatagttatggccttatgggcatcatttaattgtgatgagtggctttcttttcaccagatactatcaagtattaatccctgggctaggaaggt

SEQ ID NO: 5765 - DNA, 2513 bp, Manihot esculenta
  Intron number 4 from transcript cassava4.1_005388m (locus cassava4.1_004108m.g) derived from phytozome v7.0 (chr-ID scaffold01624; pos 30809 to 33321)
tcaagtgggatagaacagcttcacagctatctcaggttgttttcctcacagtggtcccattaatttcacattttattttaatttcctcccgtttccaccccatcctgcatgtccttatcatacattacatatggacttatttactttctttagtctcataggttggaagaaagcatgtaggattaagtgaataattttctgtttaaactcttttttgctttctacagttgatagaacctttgataaagaatctctattcctttgtgaaatgggattcaaataatctcatagccagtaggtggttgctttgtcttggaaatcattgattaatatgatttacatacgttggctaagcatatatggaatgttgcatactgatcagtattttcatgaaactatatgatgtgatgatatttattccacatgatttgggcagtcatattggtatttctttggatgaaaatatttaaggtaattcaagatgagatcaaataattgaaaatgtggattcaggaaataaaaaggaattgaaatgatcactggaaattaaaggacaagagataccctttagtctctttctttttgtgctaatttttcataatatatgttggttttggctttctggggtctttatagaattggcccggccaatgcatggttttggatggagaggttctctaagtagatttgaagtcaggttttcagaataaagaagcttttgtgttttgttttgttttttaaaaaattgctgttgaagaactatatgtgtgactaattcaagcaaatatagagtaagaattgggtcatgtgatgaactagatgcaactcgattaatgaactaggagacttagtgaaggcatggtaatgcaaatttattagtgtatagataggaaggatcaagaaaaggcaccagaaggaatatatagagagagacaacatcgctgaggaatggcaggaggtttgctgtagctagagtggatagcgcagaagcttgaagacactgcatagttgctcaagttcatttttgaaattgaggaaccatatggaatatatttttcattttaaattttgcaagtgatctatgacggctcttccttactctgttgccctctttcagataatacaaaattttcaagtggatgtgtaatgatatagtgcacattttccagtactctcattttctcttctgaaggggaaggtatgaaaaaacagttacatgagttgattctctgtttggcgcaaccaccgaaacatgtgctgtgcttttgtcttatatgattatttattttattctataagatttctatctgagttcaatgctaatcctggcatgagcccatgacccttttccagcttgtccaaggcccagggactttctgaagtatagttacacattagctggtagaagatttgaaggtgcagaataaagcttttataaaaaagatgtataaaaagagtgaaattatttaatagttgctgatgtgtgataatggtaaacactgcatttgataggaggtcgagagcatatatctgtgcattgtccaagggagagggagagtaccgaagaggtctatgatatttatagaacatttgagaaacaaatgctgtgggtttgagccatgaaaacaacatctctaccttcatttggaaacaacactatgaactgccaatactgcgttggatttgtatattcattttgagtgagccatgtttactgtattgttaagatttcaagagtagaaccagttcttggcatcatctatggaagtcaaatgtatcttcgtccttgttgaagttctatttgtagctttcttttagccatatatgtaatggattgaaatgcttttgttaattgattttcttgagagtgaataatctatatctaagctgatacaacgtgaggagaatgacacttcaccaaacttctaaatatcataatgttggttctgcattttcttctttttcctaagctgctgaaactgacatttacacatgttctgtaaacttctactcaatgttgataatatacctatacgtgttagccagaaaataaacttgatgtttggtatgagagcattaaacttcaattatattattcgaagtattacctcttcataaatagaatttttgtttttaagttgctttgattgatttatttgtttagctttattttattggggacttaatactgccatgtaataaaatctgttgtcatctactctggttagggtgtctggagtccacctagttttcctgagttcaaattctggcaatgggaaaaaatttctgacctgaataataaattttgccttttctactaaggtctttgaatctggcttatgtcaacgaaatttcaatctgggttcaccttcagtattattttttcctggtctatctcctatgagatttcggggcaaattctatgttgttttgggcctggttttatttctgctaatggtcatagcttgtcccaaacagaggtgggccatcattcgtaagaggcggcttggcaa

SEQ ID NO: 5766 - DNA, 4570 bp, Manihot esculenta
  Intron number 2 from transcript cassava4.1_012983m (locus cassava4.1_012983m.g) derived from phytozome v7.0 (chr-ID scaffold06089; pos 295665 to 300234)
tcgagaacctcgaggatcagttagagttcttccatgtaagtccaattgcttcgctatttatttatttctgatgcgtgtattttggttggattctgtttagacgttggcaaactttaggagaaggaacgaaactggaagataatatcgttttatggttacagataatgtgctagtgaagtattttgttaatttttttttttttaaaagatcgggaattgaaatgttttgattatgcaattggttaggtagacttagaaatcgctgaggcccttttgaattcggtgaaaaaacaaacatttgccctccatttggaaaaggatttcacagacattcaattcaattgatttatttattcttacatgattttgtaaggattaatttaaattcttttcttgcaaaatgaatcataccaaacggatgctttaggaaatgaactgggcactgtgcatatactaaaggaatccaggttatgatacacacaaaagagaaatatggaaacagaaaatagaaagagaaaccacacgaagtagccgaacagagaggaatccccctctggaattctgtattgagtatattcgatatgttcagatatcaccgactctactatatatagctctcacatacataacagaaacatgcgtgcccctgttccataccaaaagcgtagatatcccaatctgctacctctcttttgctttatttcttatattagataaaacgcatcatatcaactaccttccccttaacaagtttcttgacctcaaggaacaaaagtgggatagcgagcttgaatttcatctgcaaattcccatgtagcttcttcaggtgtcagccccgcccattgtataagccatttagtcacagcttgataccttttcttcaccatctttctgtctagagcagcttgtgggaaatgcagggctgaggaagcatcttctgctaaacttcctatagcctctactggtgtgtgagcatatttaagcagtgaaacatgaaaaacatcatggagttgagctcctttaggtcactgcaatctgtaagctaccattcccaccttctcaattactggaaagggtccataataccttctgcttaacttgtgacttaaatgaggtaatgattgttggatgaatggcttcagctttaagtataccatatctcctacttggaatgatcactcagttctcttcctatcagtcaattgtttcattctgttagcagccctagtgagattttgtttaagtatatcaatagcagtctcccgatcccttaaaaatatgtcaacagtagctacttcagaataatttggaatgtaagggatatgtatgggaggagttatgccatacagtgcctcaaaaggagtcattctaatagtagactgataagaggtattgtaccaaaactctgctagcgacaaccattgtacacaagcatgtggtatatatccatacatgcatcttagatagttctccaaacatctgttcacaacctcaaactggtcatcggtctatgggtgataagctctagataaattcagcgagactccttgaagcttgaagaattcctgcaaatccatgcagcttataaacatgatctaagaaggactgtgccacattctttgctgtgtaaggatgtgaaaagaccaataaaatgggcatatttggttagtcgatctaccaccaccattgtcacagtttttccttgagattttggcagaccctccaatgtccattgtgatatctataaacagacccttaggttgaggcaatggttgaagggtccctagtagtgctacagtttcatatttgttctgttgacaagttatacagtttcgtacatactctctaaccattatccacatgcccttccagtaaacaatagaagcaagtcttctaccagttacagaaactcttgagtgtcctccaaccccactatcatgataaagctccaacaacttactcctcaattctttggaattgtcaattaccaactttccttttcggctaagctgattttgcccccatgtatactttgaatgactgctagtaccagtttgctatctgcaattagtttggctaaagattcatttgtttgccatgtactcctgatagctaccatcaactgatctagtaaaatctatgtggtaatagccattattgtccctaaagagcctagacaaggcatctacagctctgttctcaaaatcctgtttgtattggatctcataatcaaaaggttgcagttttgctaaccatgcttgttgagctattgtacttatacttttctcaaggagaaacttaagactttttttatcagttcttatcaagaagtgtctaggtagcaaataatgttcctattgcttaatcgcaaatagcacagccagcaattctctctcttgtgtggacaagcatctattttgggagaaaggactttactaatgtatgcaatagggtgaccatcctgcattagtactactcctgttccttcccctgaagcatctgtttccaccatgaatgtttttgagtaatatggcagagccaaaatttgagcagcgatcattgcttccttgagcttctgaaatgccaactcggcaacttcattccaagaatattttcccttcttcaacaattcattgagaggcttagctatttgtccatagcttttcacaaatctcctatagtatctagtgaggctcaagaaacttctgagttgcttaatggtttgtggagctggccaagcttgcactgcatgtatcttcttttatcagttctgactcctccaggcgttatcacatgtcccagatattccactgaggctactgcaaagtgacatttgcgagatttggcatacagttgatgaatcctcattacttccaaaacagactgcaaatgctgcaaattctccaatttacttttgctaaacacaagtatatcatcaaaaaataccatcacatgctttcttaggtaaggcttgaagatggcattcatgagggactaaaaagttgatggagtattagtaaggacaaaaggcattattaggaactcataatggcttcatgagttctgaatgcagtcttgtgaacatcctcgggattcattctcacctgctagtagccagatctaagatctaactttgaaaaaatcttccccctcccccaaattcttccaacagttcctctattaagggtattgggaatttatctttaatggtgatggcatttagacctctgtagtctacacacattctccaagtattgtctttcttcttcaccaagacaacgggagtggcataagaactgtggctatgttgaatactcccagcttttaacatctcgttgattatctgctctatgacagacttttgttctgctgcatacctgtagggcctagcattcacaagatgtgaacgttctttgataggaatcttatgatcataaactctttgaggtggcaaccttttaggatcttgaaaaatgtctgaataattttgcagcaacttttgtaactcaatccattcatgttgagtctcttgtgctaaattcagcaagtatggaccagaatctctaatcttctccaagtgatactgcccaaggccttcttcatatttaacactaagcacactcaatccatgcttcttaactggaatatactctccttgaaggaaataacgtttagtgttcaaggaaaactccacagtgagagcttcaaagtccattcaattttacccagtgccttgagccattggatttccagaataataagatcataactgcctagtggcaacagataaacatcagccttaaactcttgatcctgcatcttccatacaaaatctttgcatagtgaattacacttcatttcttgcccattggctatttcaacccagattccattcacctcttgcacagggcagcccttagtctgcctgcagcttgggcccagaagattatctcaagttctagactttgtatggtcaaattggagaccagattgtggtagagttatggagaaattcaaccttttaggattgaattttggtattggttctaggaagactggggtttaggaaaggagccatgtgtgtgcttcaagcttaaactttcatttctaaatggttaggatttaggaataaatgtactgaaaattaatttctgtcataaatgttgtgaggatggattggattttgctgatttgatattaatatgattgatctaactttagaagttgcataagttgattgaatgaagaaagttgatcatggtggaaacaacatttgcatttttttgcaatatttaggtgctctatttgattaacagaagttctggtcctagaatgaaaagaataatacctgattatttttcggaactagatctgaatggttgtggggatttttttgtgttgttctaggtgcctgtactgatgaaacattgtgtattgtagtcactgctttggatgctgcagtttatgaatctctttatttcagatttaaatgagatcagagatctatcaggagacattgattcatttgttatgtttgcagactgtacaaattcaacagcaggctgagagag

SEQ ID NO: 5767 - DNA, 797 bp, Manihot esculenta
  Intron number 19 from transcript cassava4.1_001805m (locus cassava4.1_001805m.g) derived from phytozome v7.0 (chr-ID scaffold10963; pos 818601 to 819397 reverse strand)
gagtgtatctgacctcaataaccgattaagcctgagtgcgctctcttctactctattaacataacaagcaaatatttccaattagcattagtaatagtatttttcatgattaaataaactgtggttatcatggcttttgtttggagacaaaaacatgtttttttcttgctggaggaaaactaacagtaagagtgacagtggaacagtgcattaatcagatttgtgatgcataaatggttgacaatttaagttgcaagcgatcataattatgcaattaccaaattctgagcatttctagttcaaagcattaaagcttgacatgaaaatttgtgcattgtctaatttgaatcagcatgtttttggagagttaattttaaacggggggtggaatgatggaaaaggataaatatatctaacttcaactagtttagaattaagatttaatcaagttgtatacttgcatgctgaagcatttgacttgaattatctcttcgctttcatagatgatggtggctcattcgatgcaattctactttagattatacagtaacaatactatatagaaatgagaacccaaaacaacagagtttcttgtagttctgaactgaaaaatgtgtgtgaaagttctagatatgttttacccgcttgcacaattgctttataagatgaatgatctttcttttgtagccaccatttgtggtgtgaaattttggtagttttaacttttgggaatttgttagctctttttcatccttggattgtggaacatacaaaaaaatcatcattattgattgcag

SEQ ID NO: 5768 - DNA, 2227 bp, Manihot esculenta
  Intron number 1 from transcript cassava4.1_005725m (locus cassava4.1_005725m.g) derived from phytozome v7.0 (chr-ID scaffold11297; pos 417870 to 420096)
tcagggagatctggatcttgatcccaggtttaaaggtaattttaaaagaaatttattagattgggtgttttaattttggatttgtagatatcaacattctatggcagggatagatctagatttctttcttttctactatttcccttttttttttttaattttaggtggtgatggttgttaagcagtatttagttgatgagaaaaacggcatggagtataccaaattgcttttcttttctttcaattttactttttccagagattgtctattttagggttacatgggttgttgcgatctgttattgggtatttgggctggtgagaaaatgtagggaaggaaatgtaaattaaagattttaaaattccgttttattttcttttggttcattctccagagatcagaggaaaattaacctaattagattgggcttttttttaatgggtccagtttctatatctttttggataattaagaagtacaaatgggataattagtatcaaattacggtgcttctatattgagctggtggccttttgcatttctattttaagtaaacctgtggatttgcgaggatatatagctaatgtttagggatatgaattacttacaaaatatgggtgttttactcttgaaaatttgatattatgggatatcttattttgatttgagctagtttgtgctagtctcttttaccattaatgtaatattcttcccctatactcgttaatacgagtgagatgaagtttattcttggaaagccaaaataatactatcttaaccatgcggattaagtttctattctctctctctctctccggcttttcattttctccactcacgcatctggaaaagatgtgaagaaaccactaccactaaatactcattcatgatagaagtgaagtgatgcagaagtggtttgcctttttttcgttgtcatgtaggagcatcactatgcatcttggagatggagtacctttaccttgtgagatcaattatttatatgctgcatataacttatttgactctagatatgcaatcattatcactgtataatggtgctagagattctgtaaagacttctcagcagtcatcacagggattttgcacatccttatattctcttatagccgctttagtgctatttccatgccatgctaaatgaagtggctttaaggcttgtaattcagtcaatgtataaccttctctctaaacatctcaataagttatttgttgtgcatctcaatgatgcgagtcaaagtcctactaaacagaagatgatgaaaacaagattagcgttttttaagggatgtgaatgttactgcatgttagagaaatggaagtctaggttgttctgagagatgaaattggtgaattgcaagttttcccatttcaggaggttttcctccccttttattagagctctttatctaatggtggtttttgttggtttcttaactctgcacttagattcagtggccttgattgcagctcagatcctctctgcttggccaaattgaatgcgtttaatctttcccagatgtttttaatcaaattaggtttctttaattggttttgttattcttgtcactggaatctgggagtcatgcaccttcattgctctgatctggcatctaaagcctgaaggcatgtatccaccctgggcctgtgcttggagataattggtagctatacaagggatcctaatgcatgaggctctatgccatgtaagggtaagcgaagattgtctattgtaaacagtcttccccctactttttgcctgggggatgtttctaccgctcaaacatgtgactggaaccttaccttttggaccaacctaaatagcaccattattattgtatttataatatatttaaatattacatgtatatcaattgcctttaatgattccaaagacggcttcaaagattgagtggatctaatctagggttaaggtaaatgaattatccctttcatactattgcgatcatggcaaagcatcggtattcaacttttgctacatttaccaagtttcttttgatgcctgagcatcatattgtatgtgtatgttcccttgaagtattccaattttcactggttcaagtcacaacattttgtaactactcatagaggattaaccttgctgatgtgaacttgtgttctagtttgtcagaaaaatttcagtttttgtgacattggtatgactggtgatgtttatgtgtacagatc

SEQ ID NO: 5769 - DNA, 1346 bp, Manihot esculenta
  Intron number 7 from transcript cassava4.1_000056m (locus cassava4.1_000056m.g) derived from phytozome v7.0 (chr-ID scaffold02892; pos 766395 to 767740)
gggacattgacttgcatttgcttgcactcctgaaggtatacaagtctgttattttgttctttggaagatgtaggatatgcgctgtctctttggcatagctttctttttggcttttatcttccatttgaagtaaatactggtttttctgattctttcaatttataagtcaaatatattttatgtaacatgctttcagaggagaaaattttcatgtgtgactctgcaatttcatttgtagcaatgatatgtaccttttgcattgtgagtagccgcgaattctattagtcagataattattagaagttatgcatggcaggctttggctaacaaactacacaaatgtgcttgtgttttgtgttgcataattggttataatgtttaaataatcttaaatagctgcaaggagaagtctaaagatacacctaagttgcatttatgtgtgtgctagctgatattattttgttattagtgcctaaggctacataagttggttactccattaaaaacttttttgcattttgtgatgatgccaaatggcgaatcacacatttgctcaagtgttttatcattaaccagaatccatttatctttgtctagtgcatggtgatttgactatttgagtcattagtttctgtgtttgcgtaaatggcgaatcactttgatatgagattatgcttcgtattcaaatagactagggccgagggagaaatactgatttgaagggggaggttgacttgaagattttggcttttttaaattttattttatgtgataaatatagaaggaagcatagggattgatgaaaaaccttgaatattttctctttcatagtagagaaacacaggtgcttcttggatgtaggctcattgttgaaccacacaaatttttttgttggcttttctacacttgctattgcaatatgtaaatgtgcaatttcaaagaactgcactttatgaccatagccttaaatgattatatagaaccatgatgggtaatttatcatatttctttaagtgattaaagtcatcaaacagacaaaatgaggctatattgtttttttttatggacataaacacagtagtattattttcttagtttatacatgaccgtgggatgacctatggttggaaagtgtaaaatagttagattattatattttcttgtaaattctgtttggtattatttttttaatttctatcttgatacgagatttgcttttatttgcatattttgttcatatggtaattaagaaaggttggtaggtgggattcttggctttattttagtattgaattattttcttggaagcaggaaaggggctttctccctttatcagctgcactctt

SEQ ID NO: 5770 - DNA, 1735 bp, Manihot esculenta
  Intron number 6 from transcript cassava4.1_003990m (locus cassava4.1_003990m.g) derived from phytozome v7.0 (chr-ID scaffold04797; pos 109311 to 111045)
gaccgtgttatacgacctcaggtaatttgtatattttttgaataaaaatcatagttgatgataagctatgcactttttgtatggtcacagtgtagtcctggccatggactggttcctgtcgagtttcagcttgaaccattggtttggtaggcttcatgaatcaaaccagtttctgttcaaaatggttttggtttaaacatggttatggttccaagcgatttttgttcaattagtttcagttggcttcaattcaaaatatataaaactacgacgactttagtattatacattacaatacataaatttataagatctagatttataatacatcatttatttagtttctataataataataataataaaattaaagtgaaccaattttttttttttctgaaaaagagattttttaattaggctattttgattaggaactggcagtttgaactggccaattctgggacggttcttatcctggttcaagaaggggaggcctgtaactagccatctaataaacagtcccaatccaattcatgatggaaccatttgaccggttcacagtttaactggatcatggctagggtttttgcagtttgtcgatgtgtaatattgtttcattgatttactgtcttgagtttgtaattctccaaaactattttgatacatagatccatatgataatctggaaaaaagaacaaaaacattacattcaatttgttataagtggtcatcttaaaactttattgtggcaattttgatctttagtttcttttatttttattttggctaagtacatacttatattcttgtactatgtagaattaacttataagacacttgaactaaaattaaaatctattgcacatttgaacttgaaaaagaaaaacataataattaaacacaagttagccatgttttgtagaaattttgccatatatctgtgattccaggtaagcgatatggaatggtaacccaataaaatttaaacaatgatgcagaaagtataccctaaagtaggaaaagtcacccttaaaatatcaagcagttttctttttttaattactaaatttatctatttgtcaagtttttagttgtttatcattcagaatatggaataaccgatccaccatataatttatccgtgtcttgtaaaaaagtaggaatgaactcacttattctttattatactctaattctgcggactatattctaaatttattaaatgtgttctaaattttcataaagtgacaaagttactttcatttgtataagggtagctttgtcattttatagaacttttatgtacaattagtgaaatttagagtattataagcaataagtaggattattctttatttttcctgacaaaacatagttaattcatgtttaatgattatgattcttaaaagttcaggtattcaatgcgttaagattttagttcaagtgtttgacagcttaatcccatatagtaacatgggcgtcatcaagtatttagccttttatttttcatttcgcgtttacttttagatgcatggtaagctataagttcttttgattggtgacagtgattctttaatctcaatgcttaatcttttccttatccacttttaccattgcattaactgtagatgtagtcttgcatttgaaatcaaatgtgttgtcagacctcaatgtctagaaacagattactggagcctcatattgagcataatgcaggggtatattatcataagag

SEQ ID NO: 5771 - DNA, 1659 bp, Manihot esculenta
  Intron number 4 from transcript cassava4.1_006170m (locus cassava4.1_006170m.g) derived from phytozome v7.0 (chr-ID scaffold03252; pos 105609 to 107267 reverse strand)
ctgttatatccttgatatcatattctctcaattctgtaagaaagttgcatgcttagttttgttatgattccttgtaattgcattatcattctgcgtcccaaatggtgcattttattctgcagatttattgtggaatctttattcatgagaaagtgatacagttttgcatgcagtagtttcttattgcatggttatatgttgcaactgtattattgtagtttcaacatagttttcatacttgaaatgcactggcttgactgattcaacctgaaatttagagaaccagagcattggctagtatagttgaaacccattttaaaagaagactgttaaattgtccaattctgtcaggttgaattcaagaatgttggctgttgtatgcatatgttgaaatggttgctttataagtagtgggtgggcgttatttgatttaaacccaaaaaacacaaaattatactgatgcttttcagttatttattattttttaagccttcatataaaaaaagtatctgatcagttataaataaaaatataaatattacatgtgcatattctttttattaaaaattgatgaaccaaacaatttttttaggggttctgtttggtttggtttataagttgcttggttcagttctccattcaaaaagttctggttttgcaaattttgaactgaacaaaccagatcaacctaatgatcacccctgttgataagttgccccatcaccctgaaaaaaggtatattttaatggcttatgcaatggagggttgcaattgtggactctcaagaagaatctttaagcaactttccatcaggctaaccaatccagtttgttattttcaatcaaaattatacttttaactttatcttgaaaaatcatttaattatttctccttgtattttataaatccaaaattggcatttattaaattaatgctttctcctaatttaaaaacattttctgttatttgaaattttagtttagctatatttacttctaaaatttaaaataattctctgaatattttattgcattttagttttgttatactaatctatactaatctaaataatatatttataaattttactgatactatggctttttagttaattatgatgtaaataaattataataattttagtagattttatataatttgtaatgtaatttaagttcaatcttagttgaatctgtaaacagggacactcttcctctgcttgtttttaagagcggtccaaattgaaaaccttgtttttaaatattggaagatgaaatcatatttttaaatattttatgttgattctacttaacattctagggcttgttttgcttatgttttagcaagttttgggggggtattgagcaagctcaagtgatccactaatccactggtgattgaagcaattttctagaaagcctggtagttttggagacaataacatgaggggtagaataaaagccaggattcttatttgttagaagtaggacattatgtggttgaaatcttatcttatgttcaatcaattcacatttcacaagctaatgtgttattattaattttactcttattgcatatttttttagtcatatatcaaacaaaagctccacattactctatgcaggcattacaggttggggctgctaaggtattatctaa

SEQ ID NO: 5772 - DNA, 925 bp, Manihot esculenta
  Intron number 5 from transcript cassava4.1_003262m (locus cassava4.1_003262m.g) derived from phytozome v7.0 (chr-ID scaffold00341; pos 744347 to 745271)
acaaagcctgtgtatgtgcatctacaattctgcaagtttatatctttattttatccattaataagaaatgatgcttcttcccagctcattttattactttatcaagtaagggattgaaatttgttataggttgcttaaggtctctttttcttcagttcaatcataggcatttctatccataagatgattgagctgaaccgtgttaacacaaatagagtgaagaatatcaaggaaaccttagctgaaaatcattgataatattaatagtgggacaaggtgtaaattgtcttactagccttgacgcttgatgagtacctttcctcacgcatgttcagtgggcttttgaactgtaaatttgggcaattctttctgtagttttgtcttctgtacttaactattccttttgaatgtgcgtgatctgcaaacagctttctttcttcaaaacttaaaagtgtgtgcttttgcacgtgagtgtggataactcttagaatatatttggtctacataatttttaatgtctaaatggttgcttactgttgggtagccatctgcaattgcaacttatgcatttttatttaggcaagttgctgttatcagttgcacctgttattgaaattgtattagcatctcacacatttaaatgtttaattactgggtgtgtcttcttcattctgaaccacagtaaaatcaaccgaagttcagaaacagtacaccgagagcagaaaacttaaacaaaccatttgttgtttatattatgtcgaggaaatctgtgtttttgcagcaatgataaatgctctgctttgtttccgttggtccataaatgcctgttcaaatgattctttggcccagatttaataattatcaatgttttcacttttccacaattttcctctatccccagtcaccagctgcagcaaagaaacaa

SEQ ID NO: 5773 - DNA, 2038 bp, Manihot esculenta
  Intron number 1 from transcript cassava4.1_034340m (locus cassava4.1_034340m.g) derived from phytozome v7.0 (chr-ID scaffold11202; pos 79577 to 81614 reverse strand)
agcatcttccatcaattctagctaaacctctacatgtatgttcttatctcatttttgtttattttattttactttattttacaagttagaagtcatgatggagagaaaaatatgagagagaagctctagctcctttttcaagatgatgagcaacattgttagactgctgaatttgtataactaaaaggagaatactcttcaaaacttaggatacttatgaaagattactgtttctctcttgttgtttatgatctgcttaatattctttgttgctttctgcaatctcaggtttgataaatagatttgggtttggaatttgaattgttctgggccttctggatcatcatctttgtttaaagcaacctttcttgtttacacgttccaattcaaattatttttcctttgaggttaagtttttatttagtctagtcgatgataggaatagcccttctctagtattttgtatatggtatgtttcataggagaaagaaagaaacaagggtgctttggagatgtcacatgtttttacttgtctagtgtacttggccggtgcataatgctatagtttgaagatcatatataactttgcaacttccttaggatttgactgcttctttagctttatatgattttatatgtcatagatttgtggagggatgtttttagtagatataaacaaggattacagagcccttttgtgttcgtggttattttccattcacatctttttttttggataagaccttattcaactctttgcactcattttctttcttttccccccttttcccttaattttttaataaaaatgagacagactgacagagaaaggaaatggacaactcttaatacataagagaatgcagacatcagttggtggagttttaagctttaagtctttaaagtttaacccttttgattctgtgaatctatggctaatcttttctcttcaagatttagtgatccaggattaagtaatgaaatgcatcacgaatataattatcctctgtatcattaggaaatttaaaagaaaagtttcacctagtgggaaaggtctccaaaatagaaaatatcctccaatacgtattattgtcaattttttgtgatgttatcagtagtagttacttgtaaacctgcatatttttaggtgctctaaagcctcttctattttttcgtcaaccaggagactaagatggtgaaaatgtagttgtaagacagacgacaagtccaaattattggatttatcttttagtcttcaattatttgatgtgtggaagtgattcctggttattggatttggcttttgcatttaggttagagcaccttgcaccaaaattttccctttgttgctagctctttgtacaactaatttggttttaaagctgattaatttagcttttgatattattgcctatcaaacaacttttttgaacttttggcttgagcaaaccatgtctattgctcagagatctggacattgtagtaactctattgctcacagaattactaactttggtatgcaagagcatttattattgttgtatcccacatcggttgtggaaaggggtaatgtgccctttatatagcccggctataggcagttaggcactcttaccccttgacctaacttttggggtgagttaggcttacctcaaattgaacatggtatcagagccttcctatccgatgttgggtctcccataaatgtgtcatgaaccagtaaaattctggacgtgagggggtgtgttgaatgcaccagtaaaattctggacgtgaggggggtgttgaatccacatcggttgtggtaaggggtaatgtgccccttatatgggccataggcactcctcccccttgagctagcttttggggagagttaggcctggcccaaatttaacaagtatgagtggacttctcattctcttttgaaatattcaattatgtgtaagcagttttcatttcaaggaccaacttatattcaaatttcatgtgattcaccttatgttatattacattgaccattacaggtaccttctcgacc

SEQ ID NO: 5774 - DNA, 1284 bp, Manihot esculenta
  Intron number 8 from transcript cassava4.1_002072m (locus cassava4.1_002072m.g) derived from phytozome v7.0 (chr-ID scaffold03175; pos 9972 to 11255)
agggcgtaagctccacatttttcttacattctttttatcttttatctcttgaggttggtctcagaagtgcagaaacatacaagttttcctctttccttctttctttctttatttccttttcttttctccctcaatttttcagtacaggagccagcagaatgattagaatgtaggatctctatctataaaccctttttcatgaaccaccagagctaggactaggagactagagattagtttgacgttgataaaggggcgatttgaggcatccatacatcttagaacctgatagaaacttttagtgagcaattggagtggaaatgtattattgaagttctagtattttcttttcatgcttccttctccatttttggttgatggctgggcggagaaattatttgcactatataaatttatgaagaattacgaggcttagtatttatctacagtgtagattagcacttgtttgggcatagataatgtattacagcttgtttcttctttttactttttttttttttaaattaaaatttttttctctctctctcttttgtagcaggatcaggtctacctcttgaatatgctcctctcttttctctttctttttcttcaatgccaaagatagttgaaaattatattcttgtgaattgtgattcaattttcttttggaaaagaatggggaagatttgatgctagaggtggttttgaagttctacaagattttttgatgtcagagaagtttcttctccttgtagataaacagtagttccgaaataaaggaaactatgtttgaagttcaagatatatgttccttttggtcttctttttcttcctcttgtttgattcaatttgtatctaatttatgactattgttggggaagatttgatggtagtcctcaatgcatctcttattttgattaaggttccgtgggaaattctccatcattttatttgacctttaccataaatcaactaaatgtacatttttgctcaactaaatgcatgtctgcttgtctctgcataacatgaccctgttatagttcaggatgaatgttggtgaatacattgctagtagatttgtgtgatgtcatgaatgtgctgtttacattgtcttgatcacaagaagacagtataactctgatttcctttcgtagtgttcatggtggttgagagaaacatgcatggttaggcgacttaaaattggatcatatgaaaaattttactcaaatttccccatgttgattgaaaattagagaatctttttccactttgcaggccgcggcc

SEQ ID NO: 5775 - DNA, 4118 bp, Manihot esculenta
  Intron number 3 from transcript cassava4.1_001529m (locus cassava4.1_001529m.g) derived from phytozome v7.0 (chr-ID scaffold04002; pos 129564 to 133681)
caccagccaatcgagttgctgtcattaatctaaaggtatttagactgggaattttcaacttttttttttggtaatttcttttattattgtcatttccttaacaattctagggtaattatcagtgaaatttcatctggtaaagtccaattacatttagttagttatgatctcagaaaaattggtgatttacaaagtcagtttttttcccttgaattttttacagctttctttagcttgcaatatatttaggctgatgtagaagtcaccaaactggccatgtcatgctaagtgtaagctggctggcttttcacgttgtaatacttgatgcaaaatcgtacagcctatcatatgtaataaaaactaatccttgagcttcaagcattgattggatatttattcactttaaaatctgggtatcttgttttatgtacttaggaagttcttaaaagggtggggctgtcatgatttaatcctgatctccttcacaacaaggcaagcactcgaccactagactattagcccaatggcttaaaatctgtgtagctaatactccgttttgaaccacttttgtgtaattatcattcagataataaattgtatgacatactgatctagaacacaatagaaccatggaaagaagcagcacacctaagagaaaagaaaatctaagataaaaaagagtctaatgtaatcatctcaggattcaacgcatccaagtctgcaggaattgcactgtactctgatttgtacattattctgctcatacataatttattatgtgcatctgtgccaaccactaaatctcctttacttgattactttccttcaactatgatagttggggctggaaattttagacaacttgctaacacaacatgaaaaaataggattaggtcttattcgtatgtgttgacccacttgaaatgcacataaccatgttatgttgtaggttgacctgttatcccaatttgacacgtttcatttctcctgtcaagtttcaatatgtgacctgctaactcacaaatgacattattagaaaaagttaaattagtaaacataagcttaattatttcaaaaattaattttcataattatttattttcttaaattttatcttgcagaagcttaagtttatatttagttaacattattgaagcttaagtttgtattttgcaattttctgacattgttttttaattatttatgtatttgcctaattgcctaaaaataattccaagaatagctacaaataggaaaaataaactatatattgcataaataatgtaacataacttgtaattttttcttcatcaaatgagataaaataccaccaacacatactaataactcaatctctgcaaaaatttgaatgtaaaagtgttgattttcttttattcacttctagaacaccttatctatttgatgatctaagcttttgaaatcaaaaaattgtaaagaaattaaggatttcacttgattgtgaagaaacatgagacacagtagcaaaatgcatggagataatgtgttgaggagctgaatgaattagccaacattgccttctcaaagaaaaaaaaaaagagagagagaagaaaagagcctcttattgttgccttacaagatgtccttttaagtaatggctggttactgtcattacctttacttaatggtaattgcctttagcatcccaattttaaaactccattatttataggttataacagtaatggtaggctaaatttcctttaaataatggccgtcatgtaacataacaatcttatttaaaaccatgcctatcattcttgacattagtttttcccagcatattagattcaaccattttctgcaatctgttgtagctttcatgtgttttatggttctgtgaaggaactacttttaaataagttattcatctcatatgtgtcaaatgttaaaacgtgcatgtaagagggagccttgaagataacaagatgctaacgctgtaacttctcaagccctagatagctatataagctactccacttgtgaattctcatagttaattcctctgagtgctatcaagtagaagtttgccacatatttcataatttgacatccctaacttatttatgcttttgtacacttgcttatgacccaacaatcaccaaacatgtcctacattatgtagcttcatgatgcttaatcaaattaaggtggattccaggagagatgtgaattttggaagatatacttgatgtgacaccttttgaagaacgactctttttcaatctgtttttggagtttatctttaactcataatattatcagaactctccatatattatcaaataattctgatggcactaatagcattttaattgttttttttttatgatcagcttctttcagatcctgtcttcttcttcatccttttttcccttccttttgcggggatagtaatatccagtcattttgggtatgcttaaactgaatggtgtacttttcacatcagtactcttatttgccttgtaatgtttgactcattttactaccgaggcctttttcttccccagctgctttgcactactgatcatctagttcatgctttaagaagttctgggactaatttaagccactgtcagtgggaattgctcagcaatgctcttgtaaaacctaaaatagtctgtcatatttgatgtacaacagtcctaaagttctagataatgcatgatattgagattatgcaaacacagtggtaaatgctaagtggtaaaaagtacacaaaaaagtgtttacagctcctctattacatgggaaatatacatgacaaacaggcttacacattattggatttatttattttttcattttatggctttattatcatacaaaacaggaatttaattattctctaatatttaatgtgacatctaccatttactagagtcgatcattgactcactgtttttagaatagtgattcgccatcagctaaagaactttgttgctactttatttatttgtttgtttattattattatttacttggcttttctgttggcatgaggctttgtcttcttttgtctatatatatttttcaatatttgtggttattaactattttgtaattgtgtttatgctaaccattattgttgttacatacaataacacaattttcccatctaccaaatattgatggacattcaggtattataatgtttagaagggagaaaatttacttccattatgtagcctagacctgttgattgtaccaattaacattttttttcccaagtagtctagataatattagttcacaagcaagacaatattgcttaaacatttttttttaataatgtgcaccctattttaattttttaaacttgttttatgtattattacaatttacacttttataaaattttgtttcgtatcatattttgatgcatgacttctataatacttaattaaattctaagattgtgtcatttatatttattagtttcaagcaaaaatattttgaaataatgattgttgtggaaaagtaaatttgattcaatgttattcattaattgttattttactattaatagaaaatgttttgacattcagttatttaagtatatttgtttggttgtataccatgaaaaaccatattagattatatatggtacaaattttataattaaacattaattttggaagtataatttttgtatcataaattaatactagatgttatattttacaaaagttataatatatgtaactgtacttctataactatttaaaatatatgaatttattgagctgcatttgcttttagacgttgcacttgcatgaactggtgtttgtgcttttgttttgatatgtgcttaatgctgtttagatatgttggtagaaatagatttaatactatcattacaactcctctctttgataaaccaacttcttggattttaattctcccacgcagttaagatataggtcattcctttatgaaatatgcttttgctctattgtgcttctgtgactttgcagagaggctatattgatgactgatgatttgatatttttgacttacaatttgtttgcttatactttttagctccaagataccaaaacaacaacaggggaaacaga

SEQ ID NO: 5776 - DNA, 1810 bp, Manihot esculenta
  Intron number 7 from transcript cassava4.1_031190m (locus cassava4.1_031190m.g) derived from phytozome v7.0 (chr-ID scaffold08359; pos 472538 to 474347 reverse strand)
tgtaagtatgattccagagaagttcaagtccatctcttgtctgtggttttaatttcttaccacattgcatttcgtgatatctgctggcgtgctgtttcatctgcaatgttacctcatttaaattttatttttgaagtgaagtacccaatgcacatccttgtatgagatgtagttttgaattcaaggatacatgtttagtcagacattattgcaattattcctttagaattttgcattcctcatataccagatatgctagagtccctgcattcattacctgaaggcgagattatttgaagaaacggtcaggcataggcgtaataatgaatcctttgtgtatggatctaaaaacaactctggcaacaacacaaaatcttgaaaattagggttggcaaccgaagaatagccttaaacaggctatgatacataaaagcaactggttaatacaagctgtgctatggaaagggaactggttaatacaaactgtgctatggaaagtcaagaggttaataagtagtgggaatataattatattgaatactccagtggtatatagtcattaacacatcttccaacagtaatgtcatgcctcaacggtttagcatttgggctttgctagtttattggtagatggtggaagtagctgtcacatatcttacatttgtttatgcctacaattaacaagttacagaaatagtgctctcaccacaaatactttgtgaaagcatttgctgcttaagttcagtccttttgtgctcctgtagttccagacggaacactttctgacattagaatatacttggagtcttcttccagatcaaatatcaagaaattgtttgtcttgttcattatctgttgtcttcatcagccattcttctcatcatatagaaattgtttccatgtgccacccttgtagctcctttccaaatctagctagaacttgaacttcccttacttatagtctcgttattgttgttagtaatgcattgttattagaacaggagtgctctggcctaaccaggaaccagacttattggtctgattcaattataaaatcctctttctttcaaaatcagaaatctggtcaggtttaaaaggatggatttgcttaaaaaaattttaaggcttgggagggattggagcccgggtttgtctaatgcttttagcattagttgctaattgcattgcacaccaactttgaataatcttgtgtgcctgtattaaaattatctgaaattgaaataattatctgaaattgaaataattaataacgactcccatgtgataattgcaaagcaaagttaatgtttatcctctaggtcaaattgtgtcgtgaataactaattatgtgaataatttattttattgtacttttatatcttagaagtatataaaattttctttgtttattgtgttatatattttaatatatcaaaagttactatataaaaattttcaaataagcactttttgaaccgtgaatctcaatgccaaacaggtccacaaaatatttttctttttcaaaaactgtttttacatgaaatgttgtctcatattttttgtgaaacaaacaaataaataaatcaattgcatttcaaaaaccttcactacattatgcttgattattattatcacttgcacctgttccgatattgcagtttacatcatcataggtttctgtacttgtctcaatcttctttgtacttgtttgagtatccttttaagatacaaccatgagtcataccattaattatgtgcaaatctgcatgaaattgcaacctaagtttttataattgtattttgatcagca

SEQ ID NO: 5777 - DNA, 1869 bp, Manihot esculenta
  Intron number 3 from transcript cassava4.1_022041m (locus cassava4.1_022041m.g) derived from phytozome v7.0 (chr-ID scaffold04251; pos 99365 to 101233)
caagttgaggtgtggtttcaaaaccgtagggccaggtattgtactactccttatatttgtatatttgctcatcaggtgacattaaattttgatggtggtctcatattattattattatttgatggtggtggttaggaattgaggattaaaagcgagtgctagggtagatattaaagttgacagaatatcataaagaatttagataatctgaatcagattctacacccgtatttatcgtaccgccataaagtagaaaacgatctctcagtattagctcggctttctttggatatatatgttatgcaaaataacagtacccattattggtttcttcttaaagatgcttttggtcactttcacggcttaaaagaaaaaagaaattaaagaattcaggcatgcaccatggatgatcagagcaaaggttttaaggagttggctaatttctgggtcaacacatttcgacttcatatataaataaaaattgtttgtgggttaatgggtcattttcattcttaccttatattttcctgtaataaataagtttataactgaatattgttcacatgccagtaaattaaggacgatgttgtcacgaaataatgtcaatcactatatgatttttctttttttttctccttttattattgttttgtattacttagggatttatcagtttaattatctggtagaaattttagtagcaagaaaatctagcatatattgatatattgaacgtttcaaagtgttactgtttattgacattaatacactagtcaaaaagggttgctatatagaaatgcgatattgaaacctaattattattattattatttactgtaatttttttattactcttccaaaaataacagttaatcaaatagggggatgagcgtatgtttccggtgaccggaaaatattcaagcaatgacataacatgacatatcaaatagggaagttaaagacaatgttattatttttttattgccatagaaatagaataaaaaacctaaggaaatgacaaaatcatagaaataaataaaaggatttccagttgcagaaagtggacacgtgagggacaggtggctaagcaaaaatgtggaacaataaatgatgaggttatttcatgagctcacctttgaggaccaaaataattatgggtctctaaataatcaagctaatgatatcacacaacgatttctattaaaaaggcataaatgtgtatgttaggcattgatttgcatgtgtttctttcttggcctcgtgtgcttctcagatcataactctaataaatgtttctttgactcattattaacttggactagtccatgcatttatatgccctaatatttcctgtaatttatataaactgtttcattaccttgttcacagaagtttgaagtcattcaaagcataagcataccaaaaaacttaatggaaattgcagtttctgagttctagcaatagcggtcagacttaaaaacatgattctgttaactttccctgttagaaaaaccttaattatatgtatttgtttaaggatgaagagagctatgtagcatagcaaaatttatttgagcaatatagaattaattgctgcattaaatgtctgaattctgatatgaacacatccccatctgtgtctagtctgtagtccgcccacagagagagagagagagaggtggggcaaaggctttaatgttgcatgcacttaagttaattatagctaccaatacatctttggttgcaatcatttgtactttggaaaaagaaagctacaaatatttgcattatttttttataaaaggagtaacatttttttggtgacttaattatatgtaaaaaaacaggagcaagcttaagcagacagag

SEQ ID NO: 5778 - DNA, 1215 bp, Manihot esculenta
  Intron number 6 from transcript cassava4.1_010664m (locus cassava4.1_010664m.g) derived from phytozome v7.0 (chr-ID scaffold06340; pos 54293 to 55507 reverse strand)
ttgtggtagtctttcaggtattgcatcatcaacaggtgagtgacctattttgtgatccgctgctcagttttcagttcttttacaattcttggagcacactatgtacttgattttattttgtcgctgtttttgttatcaggtctttatatgtcaggtcctgtttattggcagttgctttagattttcttttgacattgtctctgtgttgctgtgaagtaggaactagaaatttgtaaaccttgctaatatctgtcctttctcttctgaattatgtggtccttcacatttcaatgtctttaattttttttttgttaaaattctgtgcacttagttcttcagtttaatcattttagctccaaaagctgttcaaatgaaataaccttttgatctccaagttttcatatatatgcttcattcttgagaaaagtgaaaacccaattgtataatttgccaattatggtgatttatgcaatctacctgactttttatggtctctaaactttgcatatgtcattcattgctaagtagatgcattagtaacttggagtatctatgctcattcattgtgattttcttgttcaggtttaaatgtgagtatgaattgattgttatggttcttgtattaggagaaataatttctggtgcaaattctagagtgaaatttttttttggtttgtactagaactaattgtttggaaccatgtggaagccttcaagtagtttgtgtagcatgatttgtgtctgatatcttttatgttgtcttcatatgctaataaattctcataaaactttagcaactaacaatagagttgagcatattgccattattcatgagaaacttcattatttgtctgcctttataaatatacttctgctgcctcttcggcagagacctgttggcatggcaactttcctgcatatttataagtagctattttattgtgattgtttttatttctgttgtcactgctagtatgatgttagtagtaatcccatcccattgataatttgtggttacttttgtttgtttattagaagccattttcattttttttttcttttgattatgtccggttattctaataatgtacagtaatatttcgctgaataaaaatcactaatcttcgtttgttgttggccattcttgtcctgtggatggctgtatgtttataacaatatacagcgacatttcctttggaccttgtgagaagaaga

SEQ ID NO: 5779 - DNA, 2960 bp, Manihot esculenta
  Intron number 4 from transcript cassava4.1_030492m (locus cassava4.1_030492m.g) derived from phytozome v7.0 (chr-ID scaffold09372; pos 362026 to 364985 reverse strand)
caggtatatgctggtacaaccttaatttaattattatgttactgtagtactcggtagtcatgtatggacttgtttgccacgcgcatctacaagaaatagaaaagtaattagcacctgaaatattaaatgatcgatggtttgcatctctccctctctctcactcatttgagtttctggatgtacctttgagtatgaatttgaaaattttaagtccccctggtgacaagaatcaaatgtatgattttctgccattagcacaaaaaaaccattttagatgttcttgaaaaaacagtttagacaaagttgcttcattactttagtatttttatgactaaagcttattgaatttaattgtaaattgttttctttaataatctttaactcaactcatatttagaacttagaagtgcttttcttaacaacaataccataaagaccccaattatatatatatttaaaattgtttcaggaatttattaatgcaaacgctaaggtattaaaatgattgtatggaatgaatcaattggtatcggatcaaggaccacaggaatacgagaaggtgctgttggaaaaacatgtctgttatcgagaaacatatatctttgaatgttcatcctgaatgattattcctccgatggatcccatgtgtattccatgatgaggaaattaaaaaacatggaaatggttgaacagctagggagttgctcttccattctattttatgccatccatgtaatggctagtggattccaggggacttggtgataatatggagaggcccatcaataaccctctatttcaatgacttatgttacatgtaatagagaaatataggaataaagtataaagagaatagcagtgaaagttctggaaggaagtaagttctagaagagaatagttggtgggaagctggtgtgctacaagagcagctgattctgttataattgtctattatagctgtagctcacttgtcagttagtaactaagatcagctataaatctcaggatagttaaccttgaaattcatttcagaattagcaattagctagaataatacagctctttctctctcagtctattcttcctcttcttactcttctagttcttctccatttcttctacaatctctgatagatatctgtcactcttaacactttttagcactagatcaccgagaatatgattgtgaagtgtgtgggcatctggatgactgaatttgtctagaatgctcttcaattaagaaaggtagcagtcacataatggcttttgacaaagctgtattcaaatgttctatgtagcctgtttctgtgattgattcaatcaactgaaggttttcatattgcagttttggtacagttctagctatgaactggaaccagaaccagaaccaaacttttggttattcaatttttaagaatcgaacttagaaaccaaatttcgatttggttttattttttatttaggttctattttaattttaatttgagttttaattttaattttaattttagttattgtatataaaattacaattatgtttattttaaaatcaaaataaaaatagaaataataacaatgttatttaaaacaataaaataatattaatgtcaacaaaatattatattgtaactaatatgcaattaatatccaaaaacatatataatttactcatataattaaaaactataaaataatttatacactcatggatgattttataaatttatattctattattatagaccctattaataaggagatgcatttagattgaacatactttaactaactaatttagctaaattatatagttagaaatttttaatcattatttagaatatacagttactttacgatattattaataactatttaataattagagagaacatgcatatttaaattatataaataattagataatattaaatataaaagtagttgaaaagagtatatgtatatatacacctatgcaatgaactcgagtttccaatagctcagcttaattggtttatacctctacttatttatagttttctattatattttatttaaataaaattaaatttgaattctttatataggaccatacaattttggtgaaaaaatataatttttatttcatatagtttattgcatgtataagattatatggaaattatccaatatataaaacatatcattaaactttataataaaattataatatcattaaaatcattaagaattgtatataaataaaattggttcttttgtatagatcgattcgattttatatggtaccgaataaagaactaaaatcaaaattaaatacttaaataagtttgattttgtacggtccaatttctataatatcaatttttttttgaatttcagtatagttggatatgattttcagtttgattcggaaccctcacaaatcatacacaaccctagtccaaatgccattgttcaaccataaaaaagagtgcaccactggatttctctcataattataatagcaatgaagctggcatgttttaggagaatgtatggaactttatttaaaaattctggctttactccacatcagttcaattttatgttacatgctattatggtttgaagttattcaagaagatctttataatttatttgtgctgccaatgaaaagcagaaaagaataatagaagctttgaatttcttcatttgtctatgtgaagatttttattacattttcagagaaggttagtttccagcttataaaggttctaagattagttcaagtttttaagggttcttgtgttcaattattcatttttcttcactacaaggacaataaccgcaatttgttttttgatatgtttttgagtatctaaatatttttgctgatagattactgttacaaatgaaaatggttgcgtataatggaattgataattattttttggttccctttcatgaagactaatttgcaatct

SEQ ID NO: 5780 - DNA, 574 bp, Manihot esculenta
  Intron number 3 from transcript cassava4.1_026528m (locus cassava4.1_026528m.g) derived from phytozome v7.0 (chr-ID scaffold10269; pos 30327 to 30900 reverse strand)
aggtagttctttatttttgagcttatatattctgcagcctttaaaagcactttgattttatttctggatcattatttttcttggtttttcctcagttaactgtcaagatagttccatttcactattgtggattttgtagtttattcattattccttttcttttcccctgttattctctgaaaacctgatgattgataacaaaagtttgtggtattactcacagccgttgccttgcagtgttatgaaatcatatttttttagcaccacgaagtaacctcagttgatgagataaattggtaattataaattaacacaatacagttcaagtaaaatatttgcttaaatcttggccatctaatgacactggaatggaaatttatgaagatgataaagacacctccattttcaaggggaagtccagaaaaaagccttgcaattacttttgatgattagtttattttaaagtgcattgggtgcttgtagccacctgcatgcttttattctcattgttttttgtactaacttgctagatgctttcacagataactgaaggagaaagacttacccttaccct

SEQ ID NO: 5781 - DNA, 2468 bp, Manihot esculenta
  Intron number 2 from transcript cassava4.1_027927m (locus cassava4.1_027927m.g) derived from phytozome v7.0 (chr-ID scaffold08910; pos 324775 to 327242)
gtgtgccacttaccagagaactaggattccaccaggtacgtttttgtttgggttagttagtgattttctgccatacgtggcactaggagaagggtcgcttgggttgaggcgcttgagtcaaaagatttctgcgtctcacttgaccgtgtttgacggttttctgggctttttgccacgtatatagtccatcatataaaatgcaggtaatgattattttactataattaattaaaattactatttagtccttttaccattacaaaattaaccaattaggtcttgtatttttaaaaatggccaaaaggccaaatttacattaactatatagtgatcaaatacaccaaatttcaatttcagttcacatttgcccttgcattttcattaaagagtcaaatacagctgtcatttgtcataaatttaaagtatgagctataatttatttagtatctttgacgttatttggtttgttaccgatagtttaagattaaatttggattgaaaaataaaatttgatatttttatacatgcaactaggtgatacatgcaactaggcactgaataaaaatcttcctcgtagttctataagattttcaaattttatgtttcacacaatatttatattgaaatttatataaagttaattaaaaatacacaccgaccatatgattttaatctatacaagctttcaatttttcacagtttaataaatagtttttcatttgattaatgatacatagcacttgttatcaatttatctgcatagatacccacttgaaactctacatttcaccaagattcattgaactaaagctgattatctttgttggaaatgttcctgtaattgatatgaagtgggagtcttattttcattgtgataaatttgacatgattcaagagtgaattttaattcaaatctttttcttgtaatttttcagccgcttctttacattcttgcatttgcagtcatccttgttcaatgaaaactgcctacgacattaatttctgcttcatatatccccacattgatagagtttcttgcatttacataaaaatcaactatgaaatttggttgcctaatctggtttgatctagtggctaaaggcatattactcacctgggagacccatgtttgagtccctacaccttcaatcccttaaaaaaaaaatatgaaatctactcgcatatatcagataaatattggaagagcaatgcaagtgacacactgaatagtttctgttttcttttcatctttagaatacgataccgtgcatctcttttttgaaaaaggacaggtgaggtacctgcacagacgttttttataaccttgtatcttgtccttggcacacagaaaattttaaaatctgctctgctctttttcttattgctttgcccatatacttccaatagagggaggttcctttactgtttgacagctaaagtaaagtttcttttgagtgctacacccacctcttatattcttttgcatctatggtagccacattgatcttggaccactgtttttttcatttatactaaggaaaaagatttttaagaaaacattaacttttttcttcgagatttcatcacatgcttgtgtcccggcatccatacattggcataccgtctttgtacacttttatattgtttttatttttaccatctttatacccaattctttatatttaaaattaataatcatcagagaagtcattagacattcaaatcttggtaaaatgattaccttttggaagtcaaggaatctcatactttacttaagggctataagcttgagtatgagttcgaggttttctttgttgctttaagaacttgttttgttcaaataaccttatttcatggcacatataattttcagaaagtacacttttagggaattacttgctgaaaagtatgatattaatgtgtttggtacaaaacaagtctacaaaaggtagaattatttttaagttgcaaaagacaataatgtccataatataattttaagtgtaataaatttaaggataaattggtaaatcccatggaacttaactagaaaagtgcaacttaccaagtctcacgtaggtaagttactttccttaccatcctaggaagttaacttaaaaatataaatcaaacaagatttttgcattttatgagaagtgtgacttctttggtttacttactcctaactaaactagacctaagtttaagtttatgcactttcaacatcctttggagatatcatataacttcttaggaaatggttgaaaaaacaaagcattcaactcctaatgttcttctatttttgttatattgttaggattagatttagtgttcaaatacatcaatgagtgaaacaataatatgactaatttaagcacactcgttaaattaatgttgctaaattttctgaaagtgctttaactattttcacctggtgttttaaatcttacagtttgatattagaggga

SEQ ID NO: 5782 - DNA, 1549 bp, Manihot esculenta
  Intron number 27 from transcript cassava4.1_000599m (locus cassava4.1_000599m.g) derived from phytozome v7.0 (chr-ID scaffold08542; pos 414444 to 415992)
atcagtactggacattgcgtgcagaggaggcaagtcctttttccatatttctccctgttattaggcttgttgattctatccttgtatgttttatattgtcttgaatgtggctgcatgtcactgcctctcttattttccaccaaacgcactctaataggatcattaggtacaggtacagttttgaacttagacactgggcatggatgtgtaagcctatccatgagtgttacttgtgtatatatctagtacaggtaaccggttggaaatggctaggagtggcatttggtttgttcagttttgaagtaaaccgaaaaccaaattttaggaatttgtggaaactgaaccgcactgaactgccctggtttggttctattctgtacactttttaatggctttttcttttagacctcatttttaattttctaaaatttaattgaagcgtttcaactttgaactttaaagggaaaactacaaatttttttttcaaaaaaacaaacccttcaagttcatgtacccaatgatactaaatcatcaaaaaataactagtcggttcagtttggttttaacaaaaaattttttggacaaaaccgaattgaaatagttgaaattttttaaaattaaaaccaaaccgaaaagaaaataaaactgaaccaaaatttcgaattgatttggtttggtcgattattttagtttgaactgaatattgcctactcctaaaaatggcccttgagcttttcttttttgtaggggcaaacaagtttttggaaatttcattgaaggtgcttattttgtaaaattgtagtaattccactttaatgccccaatgtattgattcatattatcaagcatcaattgattttgaaaacttatatcgtatggtgtgtgtgcgtgtacacatcattttgcttgcttatttgaattgttgataggagtggttgtctttatttttcatttttttctcatttgttttagtttcttttttgatgtttataccatgttgctattgtgatgttgaaaatctgataacttgcaactatgggaagtgcccccacccactctgcatctcgccccatctccatattcatcaatattaattattctattttctaaaggaaaaagtagatagccaaacttaatcaactttcattagttacatttgggaaatattgcatctaattttctgttgaggctctaaatattttccaaattgtaaggagctgaattgtgttggccaactcaagtcttcctatatgaagttataatttctctttgatattgcatttcattataatttctctctggagtgggattttaaaattaactggcttgtagcatgaagttaaagaggcatgaatagataatttttcacttttcaagttccaagagaatttagcaaatgcccaatagcctagatgcaggagatattgtatgtctgtgcttaccaattcaagtcttcaaggatattcaattggtatttaatttgacaatatgttagcatcttctcctttctctctacagatcccagaggaagagaaaaatcttggacctc

SEQ ID NO: 5783 - DNA, 1181 bp, Manihot esculenta
  Intron number 1 from transcript cassava4.1_013956m (locus cassava4.1_013956m.g) derived from phytozome v7.0 (chr-ID scaffold03614; pos 1962807 to 1963987)
aacactcccttggaggtttttgaccttactttcaggtaatccagtgaaccaaccatcaaaattatgtctattcttttttttgtttggatttgcggttgggtgtactttgattgatgagtatgggtttgttttgaaagtcaggaattggatcgtcactaattaaacatggatagaaactggagagtgaaaaatgaagaaataggatatattgttattattgttattttttttttattcttgagaaatgaaagtttataccctatttagttcaagtaaactagagatgcagaagtcattctagttagaattttatttgaaaggtaggagagggggtgggggagagctgtggaagacatgggattttagaaaaatgttagtgttttagttttggggaattcatttgaaattacaccttttttggtggaatttggttttagttaaaacaatctcatagaatttaattcctaaaattatttttaaaaaaaattcaaacaaaacatataaaacatggaattcattttaacgaaatacagccttagtttcaacaaccaagcatattgtagctagctgatttaattgatgatttacaatatttttgcattttgaattatagaaaccaagttctcatgcgtgtcctttggttgttaaattgagccaagttatggccttgggaaggtggtaaatgcaaaaagaaactgaattttagataaagctgctttttcaactgttaataatttatagactcaagtgtgattgattaacagtttgaatttgttctcattcagcatagagataaaacagaatgaccttgagctttttgtagccttaacctaggaagattgaatatagtcatatttttgcatagttgtcaaaataataagccctgaagagtaaccccctctaaataatttttcagagaaacaatttcatcatcagggaagaatagaggtgggaattttcaatttcaatggacagatgaaggtggaactagaaaggttttgaatgtgaggacatagagaagagttgattttcgtaggacttgctatgtaatcagtaactaccaaattaaaactctttactgagccaattcaaatatctacttgtttttcattttactgcaaactctaataatgtccttatcttcagtgttaacactaaaggtgcattcttgtgctgtaaag

SEQ ID NO: 5784 - DNA, 801 bp, Manihot esculenta
  Intron number 1 from transcript cassava4.1_010101m (locus cassava4.1_010101m.g) derived from phytozome v7.0 (chr-ID scaffold07528; pos 405941 to 406741)
ctgccactgttgaaaccattgctaactttttgcaggtattcttttcaattttatttctattcacctgtcttaatcttgttcttgtagttgttcttcttcttcttttgcctatttccatttcctcttctttgttcattttgtttgatttggagtttcgaattttttgagagtgtttattgacctctgtaattcttgacctttttaccttagtagcgtggagtgcattgcttagattgaattctggaatttgtgggcaaattttgtgatttttggcatctgggtaatgtttggttttccatttctctcacttgcacttgtgaagatatgaaatttggcagttttcagatggtgcgtcacttgttttgttggtttgtttaaccgcctcccttaaaatcgtcatttttctttcctttaattttcctgattcccataactattacctatcagtctttttgtttctatttccgtgagcagaggaacgctgataaacagattcaaatcgttactttcatagtataagttttgtttgggagaagtacttgtttttcattattgaatgatgattttgctcaacagaactgggatctggttgattactttcagagaactggattccatttgattgtgtcacatttaagcattaaacttggttgggatatccaaatggctcccccccctaataataacattatctgaagatcaaaatgactgtcaatgaaatttaattttcatcacgtagtttttcttatgtttttgtataattcgtggggaaatatgttctctaggaggttggctgcaatc

SEQ ID NO: 5785 - DNA, 1521 bp, Manihot esculenta
  Intron number 7 from transcript cassava4.1_000562m (locus cassava4.1_000562m.g) derived from phytozome v7.0 (chr-ID scaffold07933; pos 16229 to 17749)
attcctctccagagacagtgaaaaaactatttaaggtgcataggatatgttaacttctaattgcgtaatgcaatactcttcatacgtggaagatctgattcattctctttcttttgcttagaatttattttttggttcttaaattgcaaaattttcccagcagcaacctgtattatgtaatttttgctctttttttttttaattattgttttgtaagtcatgagttcatgatcctttccccccaaaaaaaatcaatatcaagatatagtggttaacctcaaattgtcattacaaggacctggtctgaactatgaactctgtgtgtataaacacttgggttttaatgtctaaattactctcttttagtgcctgtcagttcaatgttgaatttatctctacattaagatggatccaagctactgattttctcttggctataaattttctttggacactgatttttctctcgtcattgaatttctttttgtattagtttggacttccattttttttttcggtatttcccttcatgccctaattataggctccaacatttatttgtcgagctccttgtgttttcaagtacttttttgcttatatatcttagaatagggttgccccagtgtctggacagagagagggagagagagacacttgttacagcagttctcatttagtttatgatcaagaagtgttttgtggatggatttctgaaaatgatactgccttttagtaacatttgcacaaagtagacattcttagctcttaaagatgtaacctgttggtttcaggcacaagaaattacattgcacttgtcaaatcacccttgatctgctcatgtattaattatttgaaagcatacataaggcttctccagttttgattatgttcatagagaattcttttactccataccagaatctacaaaacgcatttagaagtaaatccctcttcacttttgtcctctagcatgttaatttgattagctgttttaattgtacttatgcacaccagtctgctgactgaaactaggagcatgcttctctacagtttcattagtgtgattttttggatatcacactcatcaaatctgctactgccagtgatgaaccctttgtctctcactgatttatttatgagccacagcagaaccttatcctttgctgttctaaatgcatactaacttgtgtatgatttatcattcccaatggtgaagtttttcattttcccttttactctgtaagtttttagattatattgctaaagttaggctgatatcttttgcaggttttccattttctttacacttattctgttgcaattgatatttgccccttcactcttgatgaatttgctcaagcattctatgataaggttaattctcagattatatcttttgcttaccatgtattttggttcaatttctcactgccagtttatttttcttggcatttagatttcaaattttttgaattaatgtttgcattttctttcaggattctttgttacttggaaaacttc

SEQ ID NO: 5786 - DNA, 3531 bp, Manihot esculenta
  Intron number 1 from transcript cassava4.1_005554m (locus cassava4.1_005554m.g) derived from phytozome v7.0 (chr-ID scaffold11998; pos 1064541 to 1068071)
cttagtagtgaggtgcgctcgtcaacatttgtgttgtaacttccttattccattggttttggttctttatatttgttcagatgtttggtggaataatagatacatgtatgcatgactttttttccaaattacatctttatgcgtagggttcatgttttgctgtgtatttatactagcatgagatttgagatattgatgagtctaaaaggacgagtaggcttagttcttttaataccttgtttgtaaaaacaaaccacattactagtgaaatttatataaatgtaattgtggatgctgtattgaaagattgctatactgcttaagtggtgttagtttacagatgtggttcctcttattttgaaccttacttgcgtattgttgcaaaactttcccatagaagtgtatgtgtaattgttgctatggatgtgtatgaatgcatggtattttccattctcgaagtctcaatgaggcttttgttttaattgattggtcgtgattgagtgacattaactctttggtttgaaggaaagactgatgattttgtcttctgtgtaaacaaactggcagtctcatgctcactgaagaaaataaaaagttctgatgattatctgatgttctggcaacttctaattactgctggaacaagttaagattattttgattaagcactcgatgactaataaagagatcttttaatatgtagtttgagaaagcaaatatttgatttcatagaccagcacctcagcaagatagaaatgtaaattttgtaggattcccagataaagatggaatttgcaaatctcagatgtggtttttacttttttactgagaacatatttgtttttatttcttgatgtatgcacctaagacattagggaattgtgaaattgtgcaccaaagttacttcttcagcttaaccttgtttttgatggatttcttgttgagaaaaaaacatttaattgtgatgaagaaaatgtgatgtgcattgtttattagttaataaaaaaagcctgcattttctgttttgcatttagtgttgagtggcatggttaaaaattagatgctagccctaaaagttataatcaataaattttaatagtgaaatactattttttcttgtttttttggtagcattggaaatgatttacatgtttaagaatgagaatagatttgtctaaaagcgtctttgaatatttttgaagtgtaataaaagaacgtcatccaatattgtctcacaaattattctctgtagtagatactgaacatgttattttcaaaaaaacaaactgagcttagatttcttatgattctacttgtaaatccagttcaagatgtgcaagagcaggcagcaagatctctaaattcttagaattaaaattcagttgaaaatagcaactaaagtctcaaaactctttctgattcctgcattaggttgcttcaaaattctgttgatgttagatgcccatgattgttagcagctagattgagggatttatatatatatatatgtatagagagagagagacgtctgctggatcatcaatgaggaaatcatataaaggacccaagtcatcatcaggaagatgcttgaaatatacaagaccaccaattttgtttcgtgcatatatatatatatatatatatatatatatatatatgattgatacgagtacctgagtaattgtttaacaagtccaatggagcatcagcaacagagacatcaatgtcatcagcaagctcaaacatgtggttggaagatcgttcagtgaatagagaaagagtgggcacattatcgtccacatcataaagattttgcaatgcgaagatggatgtttttcttacactagcactcttcaagcacataaggcagatggtagttatgattgagtagcttctggtggaagagatggttggttggatggagatctggtgctgctggcagttgaggtgatgggggagggacaggtggtggagaagaggagagaaagagggagagaaggtgttagtgtggtggacagatacatagtaaagaagagagagaaaaaataaatattctgacacatatgactcatcaacaagttaaccgaggaatcggtgagaagaggttatggcgagttgattgttatctaaattaaagttaatggggttttatgttacaaattgaagtttagaacaatactggtacaacattgttacaaattgaagtttagaacaatactgtgacaacattataagtacattataagttcaaaaacagaaggtgaaatttatccacaaaattgtaaggaaatagtcccctgcagtccagtagaggaccctcctttctgctgactatagttgcctgtttcaacatggaatcaacctggagtcagcactacgccgtggatttatttcctgtatgtagattacagagtggtttttttatgggatgtaggaacttatgtttagtgcaattatgcgagcagaaataaatgatgcaggaaagttgcagtgggagcaaggttgaggcttgagactcttaacctttgattaaggtcaaagtgaactttttatgaaatgcgcttgtttaaatgattgtaaaaagaacaaaactgctgttttgaagtcgtaaatatgttttaaagtttttatatttagcgacattaaatttactttttaaaaaaggttctactgtcctctaatcaacatattgaagaccatgatttgttcttgagaattataacaataatgttaaagaaacctcatcgaacgcttggaagaagaaaatctccttttcatccagaatttaaacaagggtatagattggttcttttaaggaagaagaataataggacctaaagaaaataaaaaataaagataagtaggaaagattaagcaacaagaaagagagtatgacagatcaaattggttccgtgctaagtttagggtggctgttgttaggtctcatattattccctcgattgtgcaatccacattgaattttccaatatgctttaatgttcttcatgaatgttggttcaactgtgtgtcggaggataggctctttcaaaggaagtagctgctccactataattgccttgatttttttgtctttttgagttttatattttgtccatttgcttttcattctgtgttatgcaagattcaaaaactatcatttaagctgatttttttaacacaaatcaatgattatttcactgtggcaatcaatactggttggcaaaagaagtctgatatgctttatgagttgatgatacaaagtgtttattggtagcataaaccatagtgagctcgggaacagaatgcctggcccatctttctttcaattggttgttgtctctttaacatgtatcccgggtatttgcgcagatataatgtgagctttcattcaactttatatacatgaaatgtctgttgttctactggctgctgatattgttaactggaatatgatgtcacaactcacgaaggcaaagtatttcagaatctcacgggtgctgtattgacatttcaggtaccctatctggagac

SEQ ID NO: 5787 - DNA, 1378 bp, Manihot esculenta
  Intron number 2 from transcript cassava4.1_003137m (locus cassava4.1_003137m.g) derived from phytozome v7.0 (chr-ID scaffold12262; pos 234131 to 235508 reverse strand)
ttaaagtgagtaattactctttactgcttggctgacaaagtcccaaaatattatcttatcaagcaactcaaggcatgcaatggttgtttcttttttcttttgcttttttgaatgaatttaataggatatttcaaagaatgactatttggtagccgaaggaaggttttgcttgggagttggtggtgaagggaggggacatttcattcctgtttgtagtgcagatgttatcatgccctactataggaacatttatgcagactaggtggcatttagaccaaaggttgaaggaatggattgatgctcctttttggacttcaaactaatatataacagagtcctttaggggatagaacagatgtcactttctttttttcactctaaaagaaagaaaacaaaatttcatttggaaagcacaaggttctttttccaagtagttctattatgcgttgtgcccaagaatattgggagtgggatattatttaggttggtcttatggggtcttttcactcaaaaagtgtcatggatgatattatagttaagaatgaaaagaatgtttgaaggaaaacttgtgataatcatgagctagaagaaaagattttgttgaagttggaggagatggctgtaagattgcccttttcttctaggtttctgttaatggtgaacccaggctgtgaaaatatcctcctgctctaattgttagagctctgagaaatgtgtaagtatgaggattgagaggatctttttttttgggctagatttttgtctaggtaattagcatgttgttgcacctcatttataattttataaatgatactattctttccattctactgatttaaaagtcttcaaaatgcgtcatctctatcaaaacaagaacagtaaccaattagggttggcttaattggtacacctctaggtaattattgtaggtgaggtttaatgcccaatccctgcattaccaacaagcaaactgaaaagttagcacacaaagtgatgttgagcatacaactataatgaattttagtctagttatgtagtttgtttaagagttaaaagcacttttatttggtagatggcaatgtggtagccatttcgatattccccttaggctagtagtaactgtagagtttaattgcatgccatgccacattggcaatcttactatggagctaaaggataatctagaaatttatcaaacttaaatattgtgttgtcaatttacttagtatgataaagggattgctaattgttagtgtctttgcaaaaatatgactcatttgcattagatttttttttttgtcttttctttttcccaattatgaatatttttatgattttcaaaggcggggaacattctcattgatacacgtggtgctat

SEQ ID NO: 5788 - DNA, 1686 bp, Manihot esculenta
  Intron number 2 from transcript cassava4.1_012491m (locus cassava4.1_012491m.g) derived from phytozome v7.0 (chr-ID scaffold09120; pos 161712 to 163397 reverse strand)
aaggaagtcgataaccctggtgctcgatttgggtaagaaagcgatgattgtcttttttcttactaattacattagttctctttcctttctggtgtcttattttttcccccctgttaaatgtccttattgatctttttaaaccatttcagtaatcaattaatcatgactcaataagcgttgaataggttggcaaattttaaattcatcatgaagctatagaagtgaaattaggggtgaacagtattaagttctgttaaatttgggtcaggcctaactcaccccaaaagctagctcaacgaggaggattgcctattgcccatataaagggcacattacccctttccacaatcgatgtgggattcaacacaacccctcacgcccacaattttactggtgcatggacatatttatgggaggtccaacatcggatgggaggctctgataccatgttaaatttgggtcatatctaactcaccccaaaagttagctcaaggaggatgattgcttattgcccatataaagggcacattacccccttttcataatcaatgtgggattcaacaagttcaaaccgaaataaccatcctaactaaataaatttgaaatttcagtttggtttcgaatttaaaaaatatcggttatttcggttcggctcggttttgaccaaaaaaatttcagtaaaaccgaaataaactgaatagttatttttggatgattttgtatgaatgggtatatgaacttgaattttttaaaaaaaattttttgtagttctcaatttaaaatttctttttcttttgttcatattatttaatggttattatcgtaaaaaaaaaaaatcaaggttaagaactccaattgaaccttggaacactaaaagtaagatttaaaataaaaaacccattaaaaagtccaaccaaaatagggcagttcggtatgatttgttttttcctctgtttggttttgtttggtttccacaaatttctaaaattcagttttattcagttcggttcagttttgaaccgaactaactgaatgctcacccttaagtgaaacaaaggtctatgcattattcaacttaaaattttgatttaaacattatgcacactaaccatgcagtatgcaccctgctaaccttattataagaggaaatcatctgaagcatgcaggaattcatgtttttatattgtgtcaatatttcagaattaaaatacaaataatgaactctaacatcttgctagctttgtttttgttgcaaacagtttgatagtgagactgaaagagcttaaaacttatgagttcaggtttataaaatctttttttaagtttcaagaattttcaaatgctaccctttttaagcatattctctctaaataaagttcttccttaaagagttgaaattagcaattgacacattagattaccattttcacaagatatggaatatattaagaattttctgaactgagcttccttaaggaggggcatttagaaaaccatttgtggttctcaggaaatttctgaagtgtttctgatattccacatccgggtttttgaaattttctgtcttaggatgtatagtttataataatttgcaagtataatatgaagatgtgttgaatatatatatatatatatcttttttcatgtgcagagactctggtccactctacattggaacattgtgac

SEQ ID NO: 5789 - DNA, 1883 bp, Manihot esculenta
  Intron number 1 from transcript cassava4.1_007624m (locus cassava4.1_007624m.g) derived from phytozome v7.0 (chr-ID scaffold02581; pos 82609 to 84491)
ctctagggttttgcttcaggtcgtctttgcttcctgtaagtcctgatttcactttgaatctatgctttatcattttgttcaattccacttctatttttgtcttcattttcctacttagggattttcttctattcgttttttttttttttttttttttttttttttttttatgttttgtgttaatgggttgtgcgtgttaaggtatgtttttgtggatttgttcgtttatgttgtatatgcttaatttcgtacttcctgaaactatacgtttagcttagataattaggatttatttgcttttgccttctctggtttctgggaaaatgttggacgaattgaaggcaactgagaaggttttgaaatttaaggattcttttttagctggttctagatacccaagaaatgaagcacgttgttctaataattttattttaaacccgctatatatgttgaactatgatatttttaacaagtattttcatttttagggttttcaaagtatttcctggaaatcccagttttattagtcttttgtttttcttttgcttttggaatttcttggagttcctgctagtcccactctctacccacccaccccccccccccccgaaaaaaaagaattagtagcctatgtgagcatttgagggcttctccttcctcatttctttttccaccaccgtcttgttttgcattgatgctgacctcacttttggtgactattttaccatctccccctgttatgcaagttggctacctcttctttttaaatatgattttcttgtgtaatgttgagctttcatcttttgtttgcaatttctgatatttcgtgggttcttcatcatcatttggaatccccctcctttcttttttaataaaaaaagttcctattatcagtgttggggaaaccaatgtcaaaataaagaagaagaggataaggcatgaggatttagtggcgtttatatttggaagaatactgtggaaggtgtagcacaacatagcttggaaagtatttcataggtgttcgatggcctaattaatggtattgatcttcgggtcaatcttgttttttcagttcattaccagctagatttgaactggaaaagagagttctgacagtgctagatgagtgtcaaactgacaatggattgaaggccaaaatttcaccaacttttatctggttttatttcttttgagagggaaaatcaataagaaattgcaaggcataagttcttcagaagccatcttatttttcctgttgcttaatgggttgcaagtgatgttttcatgattagaattttagagcattggttacatcgtgtaacaaggagaagcaagaatattgggttaaattcagaagttcaatatggtatttacttgctatgatctttgttgcaagttgcatcttcaaaatgaaacagaagtggttttatgcttgattggtgtaaagttcaacaattgaccaataaatgggcatctgacaacagttgcagtttgtagctttttattttttctagtatataatccagtgttgctctctaagaatatgattgggcaagaccttggaagattttgttgattccattttattttaattactttgcatgtacaagcttagtttttcatatatacattttaatatcacttgcttcagagattgctttaggacttccttcagagggaccgtgttgaatacctttgtgtgatggaacattgtaggggacaactccatacatatttagattacaattttgttggcattttagcactgttcaccattgtttccttttcctttatttgtttttatattgttgataatgcatttgagaatgtaagttctatggtatgcagacatcacacttactccatcttgttgggacaagttg

SEQ ID NO: 5790 - DNA, 2394 bp, Manihot esculenta
  Intron number 3 from transcript cassava4.1_031855m (locus cassava4.1_031855m.g) derived from phytozome v7.0 (chr-ID scaffold03741; pos 153625 to 156018)
gaagctctggaaaatcgtgctcaagctcgacagtggttggtctttttaccatcttatttatcaaaccattttttcccgctctccttttgctgttctacataaccaggggattgtcgtgcttatttattgtaagatggaaatctgtaatttctcttttacgctctggcatttataatgtctgaagtaataaagagaagcaaagttaatgttcattaagtaattgttttattgctgattattaacataaaaaatcttttacaaaaagtatttacaaatttcatgggactgtttattgcaatgtggataacaaccccaaagtggtggacattgatatgctaattgaaagcgtaatttccattgacatctctcatttcctaatcatcaatttgccattactgtaagtttgaaaaatttaaaactgttaaattctagaaaatttcttattagctgtttctcagttccagcgatgatgcttgaacatcaatatatccaattcctattcaatccataaatcataactactttccatttgggtttccaatgctaaattcccaaattctgagacaaacagcctaagtgcctattggtcctccatggactggatataggcaattttttcctgtatataagtattcttgaagtgcccttacacagaaagttgtctatcttcataaacatagctaatagtactttgtttgggtaacacagagagagaatgatatggttttatgaagttagggaagtgtagtaaaatgtgtatcctcatcatgtttggaagagggtgattggagaggaagataaattaatgtaccctaacttttgtttgttggtgggaaggcaaaggaatgtcagttttgtttttttggaaataaaataaggttattgtcagggagattaaaaatattgttaaaatattatctatttctcctcatggcgggtgggaatatggaggttttgatggaatgaagcttaaagagaaagtgagttcaaaaacttaaaacatttagtgtatagttcgagattttcatgcaagggttatttgggatgatgttcagtattgtcttgtctttctagcgtgttacatgtatgtttattgaagtgatctagaagttctacaacttcagaatttaaggctatttaacattttcacatatgctggagcgattgacatgtaacttttgtgcttctatttggtcaatatatgacttgactggtgatcaggtcttcaataatgtagtaggcaaaatgatccgtgttcttatttagatctccaagtcttgcaagtattatggttcaagtatgtgtatgttcaggattacttgagtcacttatgcttcgtttttccgaggaaaatattttgttgaaaaacagttttgttttttctgatgtttggtgtacatgataaatttggtcaaaggaaagttgcatatacatttttttttgaaatgatttgtctttttcaaatcagatggtcatttttggactttttacgaacttaatcaaatgaaaggaagttatgagaaaatactttaacactcttttgttgaccaatcactgctggctgctgttggctgtcatctgtgttgacaaccactaaaattttgtaccttttttatttttcctgattctcttttattcaactttaagtaaaaaaatggagtcttcactcttcataagcccaaatttcaaatggcctttttcaaagagagagaaaaagacaatttttgccaacattagaaaaatgtttatcataaccagttacagaaaattgattatttaagtaaatgttttccaaagatagttatttgatggaacaaagtctaagaatttatgtgcaaaaagcaaagctgccctatgtgtgtatgctgtgagatgaattgaaaatgaaagcaaagctttctgagttaaaaaattgtagtatttgaaaaaaattgcaatgagcaatgaattaattgtgttatgtttgtgaagctctctggtagttccctaagttttgactatagtcctgattaatctgatagctatcccttcatttctaagcctttgacattaagctgctgtctattccaagatattaaaaaggtaaataatggaactgtacatcttcactggaagattcaacttccacttctattctatcagtcccatgataacttttctccaaccttctaatattgtatatgtccacatttcaatgagcatagcatatgtctttagtctgtcacatttcttcttttctcctttcctttgtttctacatttaatttatctttgataaactctctgaacttattccaccaaaaacaaaaccttgttgtctttgttgaagggcttattggatctactctgttctgttgatttataggtacaaagctgctatcaaagctgatccttt

SEQ ID NO: 5791 - DNA, 2435 bp, Manihot esculenta
  Intron number 5 from transcript cassava4.1_000150m (locus cassava4.1_000150m.g) derived from phytozome v7.0 (chr-ID scaffold02817; pos 71968 to 74402)
aagaagttagagggttcattttttccaaaatactggtttgttgtcctcaaatgttgcttatactctattattgttattgttattttacttggttttattacttgttactagtcatgactactctgcagtccactggtctcccctctctattattttagggttgtcgctcacctattgattgttgttattggttcattgaaattttttgatatttgtgtttagcatttattattagcaactgaaaattcctacaataagttggaattgtttttcacataagatatattttagtttattgcattagtggtctattatgaacatggtcctttttttttaatttttttttttgtcttgatgagaagttgactttgttattgatgattgataacatagattttgacttgcatgcttgtggggtttgtgactttgtgtacctttttcctgattatgaacatgcctaatgtaaatgaaaccccttgaaatcacatgggaatttatgggttttacgcctgtttggttgtaatgaaactcagctagataaatttgtgtggtttaacaagtgtattaaaaagttaaaatgcactgtgaaataagattcttcaatttagagaagggtgtgtgctcctccgaccttagtttgcagaattgattagtaaagactttaggcctgtattttgtaaaccattattgggtaacttgctttatcagttacatggagtaaggaaagaatgatatttggctaaaaacctgccttcatcatcttgatttattaatgtaatataaactttaagactgaaactaacaaggagacaaaatagtggccaaaactacgaacctgacaaaatagtagccaaaactacgaatgtgacaaagtagtagccaaaactacgaatgtgacacaaagtagtagccatgggcattatttgaagtgctaagtgtggagcatgaattgaaatcatgctcactgccaattgttaaagcaggggatgtttcaggcataatgtatggatgcagcaaattctaaatatgcagaatgcatttgaggaatagatgttcaggaagttgataaatttgcaaaatgcattcaggaataaatacatcaaataaaaacatcaaatcataatttaaagttaccacttgatactagctcaaaatgtgaaattttaagttaaaatcaatctaaggaagctgaatcccccctatattgctagagtgttgggggattttgaagaatactctaaaaacatgacaatggtgactgaagaagtggggatcctcgcaaaaggaagctggaaaagtgatccttgaaaagggcctcattgattttggtaatggctgttgtattggtaaattaatggcatcctcgtgttctgtgccaagacaatggtatcagggcattcgaaatccattaaataatgactactttttgaaaccatggtgtggggttgtgccagattttaggtgaaccaagcaagaaatttcaaaaaaagaaaaggggaaacaggtacaggaaaattagtgaaatgtggattccaaaagccgatgcaacaatttggtcctgcatttcattttggaggttctttttgtagttagtcatttaatggaaatagtagatatatttgagattgaatatggtgacaaaaagttcttataaaatgttattgttaaaatttttggtctttttgttgggtttggaaaggttggtttctcatatgggtgtgattggacttaagagtgtatggctcatgtatttatgcattgctcaatattaggtgcacgtgcagacatattttttgacttcaagattgcttgaaacttatggccacataaaagggaaattttgtcatttaaggggacaaaaccatggggacatttatggtaatgaaatagttctaatggagtagaacacatcaggtgattttgtgtctaggagaattcttggaaaatgcttggtgaagagtgagtaacatactgtttctcatggacttattcccttagtttgtggtctgttgcactaggtcaccatgactgccatgtctatatctatatgatctctctctctctatctctctctctctctctctctcttttcatgtttggttatctaaagttaaatattagcgtgagtttgacactagttactctttaaggaaactgcatttctcttctctattatccttcttggattaactctttcatttttcttttttttttcttttcgtgaaaaaaatttgcctcttttatgcttaaagctctgctatggcttgtggaagctatttgtcaaagtgtctaaatcttgcatattgaatgactcacaatgatttattgtgttcatattattttctaagcactagcaattggcttacttattgtaatgatgatttcttttatgttttcatgtgcaggaacgcaaacctgagtttacatctgagata

SEQ ID NO: 5792 - DNA, 3163 bp, Manihot esculenta
  Intron number 2 from transcript cassava4.1_009824m (locus cassava4.1_009824m.g) derived from phytozome v7.0 (chr-ID scaffold12004; pos 382605 to 385767 reverse strand)
gagtatataaagggagattggaaagtaccaataaggttagttacactttttagattttacttgttgcaaaaaaaaaaaagtaacagatatattgactctattatatgtatcttttgtcttgaattattcctaggaaaatttactttgatataatctctaaaaggttaattcataaacatcttcttcccgttggctgcatgggtccgcaaaaaaaacctacttgaatatagctcattagaacactaacttgagattgttacacaagccaaacgtgatcactaattcagccttgattaattttattgaataatatcaaacaactataaacttggcttgaaagctcttgggcagcttaacattaattttcaacataaatatttttatagaaatgttactgaaaataatatttctatagagataattataaaataaacatatattttgttggaacgtataaaatcactattggtttacattatttaagcaaaaatgcatcactaaataagaataatattaaaattgtttaactttgattagcttgttaactgcatgaagctgttgtcaaaatcttatgattcaattttccaacaaatcgattcaaatttataggctgaatattaaatgtacctaaagtttatgattcttgatttgaatcttatgattcacgattcgattccgcatcctagtgattcaaatatattgaataaattgcaaatatacctgaattgttactaaaagaaagaattaataatggatcaagtaaatcaatatgaatccaccgagtcctcactctattcaatcaattatttataaaagatttgtcagacctcatatttttaaaatttaagatctcattcatttttgccatgaaaagtgtatttaaaacatttcctcattatttttcttccaccacccattcttttctctttccctcctttttcttttcagttaatttatttaactatttatagtggtcaagttatgacaatttatattactaatattaaaaatttttttactatttaattatttgatcaaatttaaataagaatttcaacttatttataatgataactattgtctataatttcaaagtttataatttataagataaaactatatgcaaatacatagtattctattataaagaatatttctaattatataaatgataattatatatttgttaaaacatgccaataataagttttttttttacttattttagaatatatattatctttaattaattctaagaatttttatcgaatcttatgattcaatttaattttcgattcccaatttgaacctcgattttgacaactatggcgtgaactagctcaagctcatttaaagactaacaaaccaaggttgaataggttgcgcttgatttagattcgagctcaaaatgaaaataaacaaatcaaatgatcctgttaaaattaatgagatttgtccttaatgaggaatattagaaaatgatttatgacaatttgattgatgaccatactcttaagtaatttattatttattgaataacattccatatatattacatatttttctatggagttctatgtagtttaaaaaaaatacacaagtgaataaaatacaatacttttaatgttttgtgtcgtggatataggcttccatagccgaaccacataaattcttcttttgttcatttctcttttcttttctataattctaaattccaatagattcaaattatcaactggttttgttagaattaatgagatttttccttaacgtggaataagttatttacaacaatttgattgattaccaaaatttaggagtgatttattatgtattgacaacattccatataagttatcttcctatggagttttatgtactacgaaaaatacacaacacaagtgaataaaacatggtccttccatgttttgtgttgaatgtaagcttctgtaaatgaactatgtaattccttcccttgttcatttctcttttctatccaacaatactaaatttcaatagttcaagtttgagaactgctcacacaatcaaataatggccgggattttgggaggctgttacccatttcatcattatttatttcaggcccctcgcaatttgcaagcggccgttacttaacagtacaaccattatcaataatttaactcttctaaattttattgtctacataattattttaactatagattaagtaatgataatgatgtttgagaagatagatttgtattctttatctaatgaatttgtgtttattaaatagtcgtgtaacttgatcttacttatatctaccaacatctattcatttcatgaactttgtaacttcttcaaaaaagatttgcatagcatcaggctgttactgttgtattacggccattataggcctatttctaaaacccataaccccgaccgcgatttaaaaccatgttactactgacatattggctcaatgacaactttagctgtcaatcaaattgtttactggatttacatgaagaatattataggttttacatgtcttggacatttttgctagcttggagtctaacatagctaagtggagacaaagaatccatattgaggcttagttgctagtgttctgttgttgtatgcattgtggggcatatacccatgctaatttgctgatgagatagactaccataaaccaatgtggaataaaattgctaacttgaccaagagtcccaaactggtattttgcaaaatatagatctcatgctacttcatgagaggggtggtggatctttcaaaacaccactattaggtgtctatcaagggtcaagtggctcctaattctcccaagttgacaagttaataagttatgcatgtgtttgctttgcaccttattacaatgtagcataagcatgtgcatcaaatcccttggatacaattaacacaatttatcaagttgataaaattaaaacttagtagacaattgaaaaacacacaagggtattcaaaccattagcttgtcagttttaacttgaactattgttaaccatgcttattttgttttacttgttcagcatttgatttattttttatgctgcagtttgcataatattgtggtaagacttgaaacttgactttggttttatgtaggttgtagctatcaagcaacttgatcgta

SEQ ID NO: 5793 - DNA, 2856 bp, Manihot esculenta
  Intron number 1 from transcript cassava4.1_018331m (locus cassava4.1_018331m.g) derived from phytozome v7.0 (chr-ID scaffold08686; pos 289790 to 292645 reverse strand)
ataaacctggcattgtaagcactttttccatctttattgctttattttctttattgcgttgattgtatcaatgcgcagaattctctagaagtatgtgggatttttttttctatgtggagtcaaaagcaccttttttaatttttaaattgcttttgagacatttgaattaattaatttattagtatcttggagctgtagttctagcttcaatcgttactacgattatttgaaggccaattcaaataaagaagaaaaaagaagaaaaataaagtccaatttatgttgttgaattatttggtatttttttcttttcttttttttcccccttttattttggaaatgggtgagttgtagcatatattatcataggaatatatggatgttctgcataagaatttctgcggattttctcattgggcagaactacctgactatgataaaaaaaatgaaaaatctggctgtagaaaactctgcatgtgttagatgcaagtgggtggtaacttcaagaaagctggaagatctttgctgtgagattcttgtaatcttgagagctttgataaccatgttaccaggttaagcaatctgtttgggatattttgagtacatggaaacttgtattgtgccaatagttgtaatggatgttgagaactgtatttttcccagaaaatttgaagggtgtaggataattgactgcatccagctgaagcatgatagcttgaaaggtgctgctgcacatctgtggttaggaatgttttgcaagatatcttatgaagtgcaaatcagggtttacattttcttgatttcaattttccttgcattggtgatggatggatgagctgtctaatatctttcagagattgatgaggttttgtcttagtgaaggaggtctttttgttggcccaattaaggtcctatcctatctaccaatagctatagatgagaagaataaaaagtttatactaaataaaaagagagttgcaatagtatattgaaatatgattatgcaagtaatttatttgctgagaagttgtcatctcttctgagaatttcttgtggcctaagtctaacatggcatctactttcttccatccataacgggatttcatatttgagttgcttcaatctttgggtaatgttgctttaagccctgcccttcgcgcacttttgtcctttctttcaatttcttttttcttatcctttattttaagaggaaccgatgtctccttgtagcgtgctgtctcttgtaagtgctagtcaactaaaggaaaagctttctataaagagtagaaaggtagaaaagctgttatgcttgtcttatgggactgaaaagattcagagagatgagaatgtaaatgaggtggcagcaagaagagagcagtataagggaatgaaagaagtaaatgttatgggtagaatgctgatattttatttcctttttatgagtaaagctattaattgaaatcaattcagaaaataccagattgtagggggtttgcattcagctaatcctacgaagcaaatttccaactaatgttactaacctaatttttttggctcttctaaaatactacgttgcaactaaatttccagtagctattgaaatcaattcagaaaataccagattgtagggggtttgcattcagctaatcctacgaagcaaatttccaactaatgttactaacctaatttttttggctcttctaaaatactacgttgcaactaaatttccagtagcttcagaccataagcgaaagacgatcttggtaactaaaaaacataatttgtatattatttgatgttaatttataaatttttaataaaaataatgacattattataaaatagtaaatcttaattatcattaaaataattatatattattaaaaatagtaaatcttaatcattaaaaatgataattataaatattctataattttttattattaattaaataaacttgactatgtccataaccatttcaaatataattgaaccaataatcaaaatataaaaatattaatcaaaacctgaattaacctctactaaaaaaattgaatttggtcaatttggcaatttggttcagtttttcaattataaatgaagtataccatgcataccagatctgtatgaatttgactctttatgttaattccagttactggaatattatttagtacagaaggagtttgtcttgaagttaagttattgattaatgttctatctgtttattcaccatagctattctagaataaaggagtttacaagtctattatatttcatcattgtatgatttttcttcttcttcttcttctcctttttaatattacaatattgaacaagaacatagttaatgattatttcgtagaagtcctttgtgcattatgaagttagagtgctgctataactattttatggtttgcaaaatggagcttttgaagaactgtccaatctatctggagtttaactgtctaatctgtctgaagtttgaggcaggtgttgaattacatagcttataggctagaagctttaaaatgtggctttgtgcaatttgaatgtaacgtgtatgattcttttttccctctttgtttagtcaacgccaacaaatcaaaaatgatttttttttttgaggtagtgtgatttgggatttcctcagtttgttctggtgcaagtgcaagatgaacaccttttcaatgtcaaacgttgttgaacttggacccaagttttaaaagccaacgttttgtttattttgggagttccaccatcattctaagtatttaatattatttttatttacgtgtaatgctaaacttttgttctccagaaacctattaggaggggtgtagttgggcctacatt

SEQ ID NO: 5794 - DNA, 1670 bp, Manihot esculenta
  Intron number 7 from transcript cassava4.1_002253m (locus cassava4.1_002253m.g) derived from phytozome v7.0 (chr-ID scaffold07519; pos 274268 to 275937 reverse strand)
catattaataacttcttcaaacttgcaaaagagaggtatggtaattgttacctcttggatagtaatattagaagtttttgcttatatgcggtctgaaagtgtttttctctgtcattttgcctacattgtatgttcatgtaaagggcacagtttaaaatatcattatttcagatcagatcacctgattctgtaacaatgtttctgattccattccattattccaaaccctgtttggtcaagttttaagaaatccacagaatcagtggctgattcagtctgttgcagactgattcactcttattctgacacaccatttctgaaaccaattctgattattatttaaaaacaatggtaaagggtgttcatagtgcttgaggatcccaactttgagggccaagggagagttttattttttaatttcttgagatgatggaattttctttcataatttgtcaaatgctaccatcccatccttccaagacagggaaggccactctaataatcaataattggtatagggtactgaagttgatttgagctcaattaattcatttagaaaagatgctcctttccctaataaaaacatttttatctttgctaatgtgtgaaataaatagtcctattttttctttgttgttctatttcttggtccatttagagttggctttttggtgttcccagtatgcattttctagttcaaatatgttcgactattctagaataatattatcttttgcactttacatgcttgtttccaatgcttatagaaggttatccagtgctcactaaaggagtataatttatactcattcttatagtagttggccaatacattcttctctttggctaccattttttcctttatccaaaaagcaatgataataataaaaagtagataatgccactgcctttggtttcatcttgtcttcgaaaattaatcttgaaaggcgataattatgatatttggtatgaaatagttctttcaactagagaaagaagcaactttcttttttctagttctattttatgcaacatgtttaggatggtttggaaatgccaatgtagagaatcaaatactctggcatcaagatgtgataaactagtggtgaaagaagtgagagaagataaaatggggagacaagacctaaaatgatgtgcagggtggtagtgtcaaaagatttgcaagtttaaatatgggctaaaacaaagctgaatggtgaaaatccatatagctaactccaactagttggggatcaaagctcagttgttgtttattcataattgtcaagtcttagcaaattggagttgtttgtcaggcctgagaatttttagacataagccaggacaattttttgcttaggcctgcattttaaagaagtagttaaaagagatacttgcataattgtggctataaatttattccttcttttggctctgaagtctgaaatatttttacatatttttttcagtacagtttctgcaaatgaaactgcttattagattcttaaagtatccccttacattattttttcattagttaatattttagatatgtgtgtggatggacagaaatttagatttttgccttgtgattgtttcatgatgatctctgatgaagttttgtgaactgtacttttgcagcccacaaaccctagttcgtgctttaaggt

SEQ ID NO: 5795 - DNA, 2562 bp, Manihot esculenta
  Intron number 1 from transcript cassava4.1_019932m (locus cassava4.1_019932m.g) derived from phytozome v7.0 (chr-ID scaffold08799; pos 617019 to 619580 reverse strand)
aattgttttccttcttttttcttctttcctggtaggtgatttcttctggcttttggttgatggatttattcgattaatgtcttgtatgcaatccttgtaggctattgaatatttttggagtttttattggtaggttcggctttgatgtttattgggttttgattaatcttttgatcttagcagtaatttttcagaatttcaggttttgcttggtttagggtttaattgagagcttaatgtttgggctttataagtttttctgtcaacgggatttcttatgattctcttaatgggattactattaaatcgtgattttgttcgtgggttattggatttgaatatgactgattataggacgtgtttgatatccaacatttcatttgaagttgctttgatattcttggggtttattaattgacagatgtttacttgatgaatgtttgattgtggtatttttgtgactatgagtttctaaggttatttgtgggagtttcattttgcttttttatcatttactaattgttttttagaattttagatgttggctggtgaatttcttgtcttttggtatggagggctctgcttaactgaaaattttgatttcaattctaaggaccacttctttttggtcagtaatcgtttacaggtccattctgttgtgacttttgaattctaatactagtatacatttcttggtttcgatcatgatggttcctttacagaagtgctatgaactttttgggaattattctaaacctttgttctggatcttgtggttacatagtaatttggaattttgtggttcataacaatttggaagcaacttttagtggtttccgttttatggtcatttgtgatttgtgaattggattctgcaaagtgaagattcaaaatagttacattatcacttgccattaagttttagggggaaggaaggccagtttgaaatttataatgtagtactagtaggtcattagtttgggattactgaaggcaatcagctatatcaaagtgataacactattttccaatgctttagatcaattggtctattgcagaaattctcaaaacgtaagaactattttctgtcagaagctatcttctttcttatttagctgacgaatcacattttcattctcattactgaatgcttagtgatttctgaaatcgttattaaaacttgggtgattgatgtaaatattgtaatgcatttttcttggagcatgctagagttgctgctaagggaagcaatagcaacaaaagcgttgctgttgatatgaataagtgctggcatgagaactgtaatgcgcttcagacagttcctggacttgaatcattgggctgctatgtttaatggtagaactaggtttatatatatacatgccaccaactacatatttaagaagaaatggaaatttttaagtacaccaaacatccttgtcttgtttgcagttgagaactaggagaaaaattgagccagtgcactttgtagttttcctagggcttcctcttgctacctttattttgcgatcatttggacattgtggattatcttcccaaacccatattgtgcatttttttaacctatattaacttattctattaaattttccacatgatgtttatttttttcatgcctacagtgtcggctaattcaaggattcattttagagatgtacttggggggaaatatgaagtttcttcatggaattgaaaaaataaaaatgcaaaacaacaaaaaacaactagttcttaatctcaaaaaattgcaaagatctaatgatatttttgttattaggctaaagtttagtttctgagagaattctttcgtctttctcattttggagaatgtggtcttctatcaatggcaatgaagtttcaaccgatagtaatatgaaatggttatatctgtgaattcatattttggagtgtaggcttatatgtaatgttttagtaaaagaacattataattagcatttactatcatcccctcccctcttggtaccgtgaaactggtggtctttctttggctgtacaaattatcttcgtaatttttgttacctcaacaaatcactatgatttttgctagagcagagcttatccatctaaataggtttattttctaccgtgtgaaaagttggttcaattcctgaagttttaatagaaccatacaattgttattgaaattgagaaaagcaaaaggcataatcaaatgcaaaaatagacatgtatatataaagaaaatcgtttttatactcattaggacatgaacagctgaaagatgtgcacatgaccgcaatgggattgcctaatgcgtaagatgttcatatttgattctagtctcaattgctggaatgtaacgctttttgctcaggtttttttctggagtcgtagctattgatgtttgatgaggaagctaatctttgcatctaatcgttgtccataatgtgcccacttttcttgatatggttctgttatggttggagattttacatatctatttgtgctgggcatgcaattgattcaattttctgacatgcagctttcaaaatttgccgagag

SEQ ID NO: 5796 - DNA, 845 bp, Manihot esculenta
  Intron number 1 from transcript cassava4.1_014104m (locus cassava4.1_014104m.g) derived from phytozome v7.0 (chr-ID scaffold06278; pos 708344 to 709188 reverse strand)
aagttcaaagctcaagttcaatctgtaagttcaatgcccgttgaagggtttaagaattttgattgtgcttcctactggggctaattatagtatactcccattgcatgtgcatcctcactcacaaaatcatggatctcattctctgtaattcaagaaaagactgatattcatcagggtgcacatgcactgcgtgcacccattcttgattttttttctaaatctattatgtggcccctgaattataacagtgcttgatactgagccttcaaaactgtagctgggtgctatggaccctctaaactatttattgtgtgccatggagccctaatatatgtcagtgtagcatgtgcaaaacaattgatgcaggaatattcagtgttaccgctacaaaaatcaaggctaaatgcattattttgaccgcgattattctaatggtagctgtgaatatgatgatcctatcagcatagtagagataaaattttgttgtccatgaggcttttttacatgagcttgatgatgacagtcgactaccattctgctgtgggcttacccaaagtattttttagcgtgaaaactagcaaagttgttattctatgtttgccaaatctaatctatgattgttttaacttttgatatcatgtgtcttttgacaagatacatttatttcaatcgctgattgccacttgaactgcaaaattttatgtcatggtagattagctctggagtttatcttgcattattaaatttcctaggttccagtttggatagctgattgtatccttttttaattgtttattgctccacatgcagccaatttatccctttcagaaaccaaggtcgttggg

SEQ ID NO: 5797 - DNA, 737 bp, Manihot esculenta
  Intron number 1 from transcript cassava4.1_010753m (locus cassava4.1_010762m.g) derived from phytozome v7.0 (chr-ID scaffold03581; pos 1230315 to 1231051)
tttcgctattttaattcaaagatctagtgtttttggtaagtttttctcccatcttttttcctttgcttagctctttctgaatagtaataggctaagttaatttttgcgtttgattcttttggtttgtttatgtttcaattatcaattgaaggcatgaatttactcagttgttctcttccagaaagaaaaagaaaagtatttttattttttcatagatgaagctcagattgatataggtatatatatataaatatatatgagacccagctctcaaacagttgtgtctatttttattaaacatctagttttttttttatatattttacttttgattttttaaggtcttatttattttccattttttgttgctttctaaaccggtttatactgtataaatttattgtcaggttgaattggaaatgaaatttgacttgcgggtcctttgatatgattttgatataatatttgtaaggaattaagtgggaaggttctgtagttgtagcttcattatttttatttttggattagtttatcatttctaaatgatggtactgtgttgatagcgtcacaatttctcaatttatcttgcatacgttctgcttggttgcaatccattctagatcctgcatattttgtactagtattgtacaattctacttgattcatggaatttgtatctcttttagcaataaaatcaatgggtttgttttgtcaactcattgcagtaaataaccaag

SEQ ID NO: 5798 - DNA, 4023 bp, Manihot esculenta
  Intron number 6 from transcript cassava4.1_003361m (locus cassava4.1_003361m.g) derived from phytozome v7.0 (chr-ID scaffold10015; pos 434014 to 438036)
agattgtatttggtattcttgacaaggtttgtccttcattatcttcccttggcactttaatttaagaatgctgcatcccagaagaaagattgtgctttttttcctcttgtttttttctttttttttcccccccttatatagttaaataatgtaaggcaagcttaagttgctcttgacattggtgttttcaattagaggaactatgtcgatgatggttgctacaagatgcttttgagggaatgaactgcttatttattctctatgctatcctcatatgcgtgcatgaaaaaagttcttttgttgaacttcgaatggtcataaacaagataaaacaatcatttgtaggaaggaactcaatgatttggatttttggctttaggtggtttaaaagggcttctagttttagtttcgatatgaataattaatctcttgcaatgactaaaaacctgtccatgataaattgcactactattggatatccttttctctaaatagctaagacaaacttttggctggcaggcaggggtaagcatttgatttgttcagtttactctcaagagcagagtatgagaacaaaatttagagatgagaaagagaagaatttgagatgagaagtagaagattagaataagatgagagaaagaatcagattagatgagaagagaaaagaatatatagagagaataggatgattttgttattgattcttcatgaatagttgctgagtacttgtcagctgttatttatacatcagagtagtataactgcctctaacaaactctaactactaagctgacctgtacataacttccctccaaatcatgctaactaataactgcttttccctcccatgtaacaattcctttcttcttctttctataatatgtgacaataccctctccaagagaatcttcttgtccccaagaagatggaaattcatgattgagccactgcaaaagaatgatcttcccaactagcatcttcctctcgtaaattgcaccatttgacaagtccttgaagaacatgttgattgttctaagtcttcctcgagtaatatatgatcacatgctccaaacaaaattatttttattctattatcagtattaattctccacatcacagttctttttttttttttttccttttgccttcttgttttctcccattcatccttcacaagaatgataaaatcgcataaactgaacttcctctttctgaatttcagctccagacatgtttgaagactctaatcttgataaaattgcctcttaccaaaatgcttgaaatggagcttatgcgtgttaccttcgaaattgtctctagcttcattgaaggtcggcttctcattctcattgaccttcaatatgatatatttggggacattaatagaaacaaaaatgtttacagaagaagcaagattatcatttacatcttctgcatactcgccaaacttctccatggagaatccatttggctttaatctccttgagggcaaaatagtacttacaggaacctggactaacataaattgcttctcccaagacgcattctctccatcaccactactaacaacctcttcctcttcctatcatcaacaatattaacatcttttgccatgtcgacatcctaaatagactcttgctcctctatttttggggatgaaatagcatctcttgtcacagtttccattttccttgggtttgattctttcaatttatccattttctcttcacaagatatcccccatttctcccatattttgtgccacctttccttgtatcttttaaatgctctcgcaacaatttcacaaatccattgttccaaatccagcagattagttcccaagtttatgtttccatgatctgaaaatctattatattttgtttccaagagaaattaaggaagaaacaagactcaagggaaggaattcagcaccatgttagggaaccctagctgagaaaagaataagaaaaagaaaggttgagaggaaattgcagaaaaaaaaaatcaacttcagcaaaaccctagattggattcaatgcatttaagaaacaggtttcttgaattgcgggaggtgaaaaattaaaggagaaaataaaagaaagaactagaaatcaattaaaaagaaagaagttgattcaaaaattcaaggaagaaagaggaagaagaagaaagagggcttatcgagaagaaaagaagaaaataaagggaaaagaaggaaataaatctctggaaaagaagaaaaaatagagagaagggaaagaaatcttgggaaaaaaaggaagaagaatttgagggaaagaagtgagaaagagagaacaacagaaagaaatgctgagtctggatatggatgcaagtcagaagaactaatttgcagccctacccacttggagacaagctctggtaccattttgtcaagaacagagtctgagaacagaatttagagataagaaagagaagaatttgagattaaaagtagaagattagaatgagatgagagaaagaatcagattagatgagaagagaaaagaatatatagagagaatatggtgattttgttattgattcttcatgaatagttgctgagtacttgtcagctgcctgtaacaaactctaactactaggttgacctgtacagaacttccctccaaatcatactttgctaactaacaattacttgtccctcccatttatctcttaacaattcctttcttcttctttctataatatgcgacatttacatggttggaaaatttagaaccaaaatgacttgagttgcaccaaattattataaagatttagtttatcaagtggaatagtaacaacaatgccaattagacccttagtattttatgagcctaaattactttataattacttaaaatgccatgtttctaggttaataattttagaattttgcctgaccaaaacaatttgttctcatgtaacgttatggtttttaggtttgtaattccttcaaattcttgcatgagatcttattcttttaagacgttaaggagaccttgtgacaagttctttaaagagatttttgtgtcattcataaagaggatgcatcactttctgctgttaattcctttgcacttttcaaggattagatccttttatttagatgggctcagttttattaaggggagtgcaatactaaagcgacaaggactctatggccttggcgagtgttgaggcgagatgagagtcttcttgaagtgaggtgccatagcctaatatcatagttgatgtggttgaataagctgttgcctgctgaaattgatagagaagagaaaaagaggaggacaagagaagagaaggagagatgataacaagagaattagaaggaaaaggtttgaatctgtaatttgctgctccaggcagtgagaagatagagagaaagaagaggaggaggagagagagagagagaggaagaatgataaatacctcttagattctcttccatcagctggtggcttggaatggagaggacaggttagtgtttgttgttatatgtacacgcacgcacagacacaagcacacattatttcagagaggcagccccatccaggcgagacgggatgggagtgggactgcattgcttggagccttttgtccccttttagaacattggacgcatccaaattaatgtctaaattcataaactggcctcacctgcactcactataaaattgaaatttaacctaattctggtgtcttgaagttgagatattgtgaatatactatctttttttgttgaggttggaaagcctgtaatttttagttcctcatgcaaactgtgttatgactgcatcgcaagtatctatttttcatgagttattgcaacgtctatctcagaccatgaattttttgttccttttcatgattaactctagcttattattgttttcttattcatgatatttggttggtttatgtttaaaaattcctaaattgtaactttgtgctatttcttaattgtcagataatgtcttaattttttttcccaggttgctg

SEQ ID NO: 5799 - DNA, 1355 bp, Manihot esculenta
  Intron number 2 from transcript cassava4.1_017282m (locus cassava4.1_017282m.g) derived from phytozome v7.0 (chr-ID scaffold06631; pos 66974 to 68328 reverse strand)
ttttgcagtatctttggctcctgctggtgcgcctggtatgttctgatcttcttaattgataatactctgcatcttgattattttatttttcaaatctctttttaatttctgattatgttgggttttttattttaataataattacatgcaatctatcttcattcaatccagaaggctattttatttatttgtagcagacattctctgctctgatttggtctcatctattagatatctttcacacccttttccctaataatttaatttatttagtttttatttttgtagttgcaatcaagtgatgatatctctgaaatgtgctaattatgctttgttggtgtgtatgaaaaagatagagaaaatctatggtatattctggcctattgaggatctgatactcttcaatttggcattcaagaacaaattgaaacaattttctagttgaattttctcttctcatagaaatgcaaatttctttttttaatttttttttttttttacttttaccttgcaaaaacacatttcttatgaaaataagatgctgattctgcttttgtttaagatctatattccaaattatcaaagtactgaatttgtgtgattttcctctgcactgatatataatgaagtggaacacatgggtaatgtgcctgattgcaattcaatctgtgagttatgctagatgacagggaaataatgcctttcttaatacttttaatatgttatctagctttatcatttagttagcataatgagtaaatggagaagatgaaacccaccccccatctccccaaccccacatgcttgatggagaattttcttttttcttttggttggatatataattttttttagcttctcatctttacccaaaaagtcaattggtacacacttgatttaactcctatatagtcttacacggtttacatgcacttcaaatttttaagagttaaacagttgcacttttgtaaagattagttgtcaaaagttaacaacaaaagggtcaaaggtcaagctgccaactttttatatgaagtttaggggcctaataatgtatttgtcctttttttttgaacatttactgtctttatgtgctgtatccaagcatgctggttgttttcaaatggattcagttcataaatctagaatgtggaaaggaaagtgagaaaagttcacttgtttttgtattgatctattttgttttgtggggtgggtgggtggggttaaggatagttacatgtttgcaattttgcattttgacatgtcattttcacttgtcaagttgattacttttatcaaattgctcaattgctgtcttaggtgtatctccaccctctatcgctgctgcacctact

SEQ ID NO: 5800 - DNA, 533 bp, Manihot esculenta
  Intron number 5 from transcript cassava4.1_032058m (locus cassava4.1_032058m.g) derived from phytozome v7.0 (chr-ID scaffold05268; pos 14447 to 14979)
ctcttgaagaagcgtttctgattcaaaatcaagaggtaccttgtttgctagtttgtttaatattcttctcttttttttttggcattttatgctatgaagtgctgttatgtttgttttcttaatgctaactaatgcctcctgaaactctattgttgaaatattgcaattctttcaatgtaaagctgaccttttaaatatctccttgagtttaatcaaatcatgtttaataatagggagaattattatttagccctatagtatagtgaaactaattatttaatccctttatttttcaatgtaccaatttttgccccattattttgcatagaaacatttgctattgcgttcttaacatcaaaactcaagattttaacgcttgcaaattttcctatattcagagttgggtttcacagctactttttgtagataagaattcaatgctcgtcttttagttctattgtttgtcatctagcttttctgatgagtttgtgactgcaggttgcactagactacattggaaagcgtggagcaac

SEQ ID NO: 5801 - DNA, 4685 bp, Manihot esculenta
  Intron number 7 from transcript cassava4.1_006191m (locus cassava4.1_006191m.g) derived from phytozome v7.0 (chr-ID scaffold09761; pos 459496 to 464180)
gcagccaaaaagaagttatttcaggtattctcacattcagagcttttaaacatgttgtgtgctctaagtggagaaatttgcatgcattttatcacgtgaatgctgctgttgcctataatatgttgcaatatcctgtaaaatggcttaatgacaaaagatttccaaatctctggtccactttgcagttagtcaattcttcaaattgacaattctttcttttacattggtgtcatttatatccaaactagggaatatgctaaaaatcccaaattgctcatttagtatattttataaaaaataatcttctttgaagaattttggagaattttagagaatttctagattattcttgtattccactcttaatctttacatgtgagatttacatgactatttatacacaaagaattacaactaaacaggcagcaaataattaaaataattatagaaataattaaagattataatttatatctagaattaaatcaaatcatatcactagaaatcagcaaataagtcaacactccctcttaagttggtgtatagacgtcgcacatgcccaacttgcaaattggtaagttctattgttgagcccgttagtaaaaacatctgcaagttgcgcagtagaagtcacatgaattaaggtcaaggcactatctattaatttgtcttcaatgaagtgctgatcaatctcaatatgctttgttcggtcctgttgaattagattggtcttataagaagatcctgaatagcataatgataagaaaagaattcaattttagaattaagagcattggtgatagcactgacagataaaaaattaacaggaaaacggagaacataaaggacatatgataatttaatattgggtgcataaataacagaatatgttcaggatatgggaataaaagagtcataagccattttgatgctatctttgattagagaaggaaaataatttagaaagcttttagaagagcttgtcatgtgtctattcgcaccagaatcaataatctataaataatattaagagaggaagcatcacctgactttacaaagttagatgtatcagaggaggaataggtgtcaatatgagacaggaggcgtttgagactctgaattttgttaggggaaaggaactcagtagctattgtctccataaagggctcctccacaatttctactaaattagcttgagctctagaggtacctcatttcccctacggcctctagtggggcgaccatgtaactttcagcaagtctccttggtatgtctcgattttccataacagtcacaatgcaggtgatctttctcagaattaggaggttgtggtgtgctcagactagtagacaacccaaccttctcaacttgtgcagtatagagcatggcatgtcggtgactttcctcttgttgaacatgagcatgagcctcttccagtgaaggaaaagggtttttccccaatatttagacccaaattggatcatatttgttattcaccctgcaaaaaaatcatagacccatttattttcaatcattcttcaaaatttaactgcctcttcaatacagtctgcctagaagtcctgatagtaatcaagctcctgtgataaaccacatagctcagaataaaattaagagatagttatttttccttgcttagtactatgaattttatttcgaatatcataaattttggcaccattcccaatcttgaaataagttaaagacaaagccttccatatctttgcagcagtatcaagtaacaaataggacttagagatatgaggttgcataaagttaagtaatcatatcataacaagaaaattgtccgagtcccattgagaaaaatcttgatcactctcattcggttgcttcttattactaatgatatagccctgcagtcttttagccttgataaataacaaacaaaatcttaaccaaacaagataattggtttcataaaatttaacgggactaatttgcaaggaataattattagagttaagaatcaagacttttttaccttctgctataataaaaacaaatgaaccgtgaccttgaccaaacaagataattggttcgatcaagttttatgggactaatttgcaaggaatgattattagagttagaaatcgagacctttttatcctttgccataataaaaacaaatgaaccgtgaaagaataggaggtacctaaggttatacacacaagagaccccaaccaaatcaccaagagaccttgtagcggcacaggatggccgaaaagaggtcagaaacgacactagagtggattgagcagtgaagcaacatagagtttcacgcaccgggaaggaagggagcatgagcctcacgtgcatagctttccagtgttgaagttggacggctagttggcaacagtccgacaatcttgttggcggcagcggtgagagatatcaaaaagttagatctagggttttagaaactctaaagagaaaaaattgaatttaaatctaaaattaggaaaaaaaaactttaatacaataaagaattttggagaattttagagtattattgtatttcactcttaatctttataagtgatttacatgactatttatatacaaagaattacaactaaacagaaagtaaataatcaaaataattatagaaataattaagaattccaatttatgtcaagaatcaaatcaagtcctatcaccagaaatcagcaaataagtcaacattcttattagccttaatttaaatattgaagcatagatcctgtaaaagaattattaattatatattaaagttattaatctcatttaaagcttaaaaagtaagaaaggacgtttggatcttttcactgcatcttcttttctgcatatatgaaacttctgtaaataaaatgtgccatgccagcaatttgggagttttactcctagtttggttatgactaacatcactatggaaattttaccattttagtaatagctgccccaccaacatgaaaacatgcgcgcacacacacgcaaaaggaggaaacacttgctttaaaaaagatttagagattattgtagttttaggaagtacttttattacttcccatttttcactacgttgtttatgttgggggcaaaaaaacccattttcattttttaggccaattttgcacagaacatttattaaagggcaagtatggtctgcacctgttagagctgagatgcatgagctccactctattttaaaatgaaaaaaggaatattacttgttgaacaaaatattatagaaattgtaccagcgccactctccttccactggttccctttttatcgaattggtagggtttggctttccttctatttaaaataaagaaacaaaatgccgaaaaaccttggaatctgcgacaagtgataaacttaggagagatatcattatagatcgagaattcgatttggcatttttgctaaataattttcttattctaattgaatccaaaaactaacatttcatgaatcacaaaaaaaatgtgcatcagtctattatatagattattctattgtgtgtatatatataaaaatatattatctatatatataatttaatataatttatataagtcggctttgtttatatggcatcaacaatcatggacataaattcataagcagtttgaaaaacaaagtaaagaaaattcctcagctttcttcataaagtttatgtagttactttatggtcatccaataggttgttagatatagtctgaatattcctccagacaaaattgagtacaattagagtttagtaacaaattaagaataatgcattctacttgtggaagagagaaaaatattaaagagggaacattttgaattgaaatgaaaaagtccagacttttagagacgcaaaaggagaagaaaggatgtcacagcatgaaggagccatttttccaaacaaaaactcatcattccgttgacggcaacctcttcaagcttaaaaatcggtgtgacttgagctccagtgtcatcgtcctcttcggtaggagcttcatcgtcttctatgtgagcttaccacgaaggtggaggatccagcaggggtgcccaccctaacgagttttttaattttattgagcggaaagatgaggagcaacaaaagagaaaaattggttttcaggcggagagaaagcatgagaaagtgagagaaaacctagagagagaaaaagagtgaagatatttttttctctcactctcgtattacttattataaaaaaatatctagagtctccatatagagctgtgtatctcacactttgaagttcggacaattttttttcatatttggccatttaatgaaaaatcaataagcctaaaagataaaattaggtatatttcgctccgagatataattcagaggtgaatttagccctttttttttttcattacttttataggcatagatactcaggtaggcttatgaactagttctaataaatgcacatccaaatcctaattcacattccaataattaaatatatgcaactatgcataaattacctagtagacaactgcaacctattattctattatgaatttctttaattttcacctgattggctatatttcttatcttgtgcctgccctatcttatgtggttcaattttttgatttaacaggtgctaacaaatcaatttattcccctgaaccatta

SEQ ID NO: 5802 - DNA, 663 bp, Manihot esculenta
  Intron number 1 from transcript cassava4.1_033513m (locus cassava4.1_033513m.g) derived from phytozome v7.0 (chr-ID scaffold11069; pos 238543 to 239205)
ccgccgcgtcagtctttttcttccttttgttgtttatttgtttattgctttctaattttagttaataatgctgaattttgattttgggttttgaggtttttgtgcgtctgaagggttttggctgtaattatattagttgtattacgattattataactattggaatgtggattgcgcaatcgtgtatgtccttgatttggtatgctaaccactgttgatgcccttgctatgatgtagtgtaattgggcaaattattgaaaaagtcaactctttgatttcttatttagttgaattgggccggccttgatagttattgctgttatgtaaattgttaattgtagctcaattggctgctatctttatagtaattgtgtatttattggaaggggttgtgtgttctaaagcttttgtcgcccttgatagagtacgtgttttgtatgtcaattgtaaagttgcatttgtttacagtcttactagttttcatgttatggtctttaaacactatctttatactagtggttggacatggactatattcttaaatgatcaagtgtgtgttcacttattctgtcaagatatagcttaaattttgtttgtacattaatttgattatctcttatataaacagcaacaagaagaagaaaagaggtcaaagagcaactg

SEQ ID NO: 5803 - DNA, 3357 bp, Manihot esculenta
  Intron number 3 from transcript cassava4.1_017565m (locus cassava4.1_017565m.g) derived from phytozome v7.0 (chr-ID scaffold03400; pos 9398 to 12754)
gagagaaaccaggatacattgcttgcacaattgccgtgagtgactcttccatttcctgaaaatttgcaagttcttctgctatacccgtttgttctttgttgggattatgtttaaatttcaaatctttttattaaaaaaattgttattcttttaattttgttctgaaaatttgaaaagaaatatttttatttgtatgaatgccatactggagaaagctgtacattgcacgactagcagttagagtgaactttctgttgacttaagttgatggagtatgttcaaaaagggtttcaatatattatataacaagtagtgaattcttaagctggaggagaaattacaaatatagaaatgcctctgtttctatattatattatagtttgtaatttaggatgtgccattgaataggtgaagccatgaaaggacttggttattaggctattaggttgattggctgtctactattgcattgcaaagacagttcaaaacatatatatttattgacgagaaaaaaagtaacaaacatccttatacctgtttatttttcccttgctcgtaatcttcatttccactaataaaatttgaaaagtcaatgtgctgctatatgcggtcttttgttgggtcattagtttaatgtgagaactaatttgttgcaaataaggtggtgtaataagcccttatctcctaattgttttttcatgtattgcaagcatattgagcggtgagtatttggaaggaaagaatgcccaaactttaaaaattaggttttcccttaagtttactgttgaattctacgtcggttgtggaaatggataatgtgccctttatatgagtcataggcactcttccctctcgagctagcttttggggtgagttaggcctgtcccaaaattctgggcgagggggtgtgttgaatcccacatcggttgtggaaatgggtaatgtgtcctttatatgggccataggcacttctcccctttgagctagcttttggggtaagttaggcctgacccagatttaacatggtatcagaggctccccgtccgatgttgggtttcctataaatatgtcatgcaacagtaaaattctgggcgcgagggtgtgttgaatcccacatatgttgtggaaaggggcaatgtgacccttatatgagctatatgcactcctccccttgagctagcttttagggtgagttagacctgttccaaatttaacatttactatggttttgggcggtcttattggctttttggatggatttttttaatgtttgtttggaagttattcaatatgattggagggttttacttttttagtgatttagctgttctgaattttgcactgattagtctaagaggatgcattatccttcaatttatttattcatttcttttcctaataaattcaaactttttgttgttattgagaagaaaagacataattattgctaattatattatacatacaaaaaacatgcaaataaatgttcataagttttaagctatgaaaatctgtattggtagttgggacatcaagaaggtgattgcttatgtcgcgcttctgaccaccaatatgtttgtcatggatgatttatatgtgatgtagagaatctttgggaaaactggctttttaggattagggctggggtttgtagaatacaagaattaaggttaaaaaattaaaccactatatctgattagtaccaaaaagaaaaagagcaaaggttactggccttattcttataggatctgtgaacctcttctattgagaaaccgttacactttctaggatgaggattgcatgacaaactcaaacaaaggcatttggctcaagtactgaataatattcttacaattttgagtgcttgtaatctaaattctcaagagccctcctaaatattttcttgctgacagccattggcggtcaatagccaatggtcgaagggccaaatgctgatagctgtaaatcctaacttttttctttttaatgtgaactattgacaattgagttttgagaagttgttctaaatgtcatgtttaccaaacacttggattcaacaattcaaagcctaaaagcaggctcatcaaccaaatagatgctcaaacaagttaaaatccatattcatgaatctacttaaagaaaatttatacatcatagacactaaaactaagttatcaagtccatgttcttacattccaaatgcatgtcagggtgcaacctaaaggaaattataaaataccgtatagaaaaaagtatcaatataacttggagttaagatgtgattgtccaattttttccttataaaagggtgtatatctgtatattagtgaaaccataaggttgttcctgtttgatatggagatcacaagtttcacatggcaacaacctctttgtaatgcaatgaaggctctgtgcttctagctttccttaaagctgacaataattgaagattttcatgatttatagaaaacaatatagaaaaagtatccctttcacttggattgaagatttgtttgtccattttttccttataacttggagtttttttcctttttagaatagattatatctcaaaatagtgagaatattttaatatttgtagtttcatttttatattagtgaaaccattaggttgttccaggaggtcacaagtttcacatggaaacaacctccttgtaatgcccaggaaagttatgtgcatctaactttccttaaagctgacaataatcaaagcctttaaatatttctctccggttgcatgacattccaaaagttaggagttaatccatttggctaaaattactataatcatcctctttgccatagcttattattatgatttactcttttttttaagaaaaaaaaaaatcctccagtagccaccttattctttcctctataagccgttagcaatatggttattgaaatatagaaatcaaatacaatcactcaagattccacccactatttggtaagcttatgtgaggtgatgtttgaggaattttatctctccataagagagattttcatgtcctatcatctaattccaaatattttatatagaagctacttggaaatccaaattctcttttggttgcttttgataacttgaggagcatgctttagtatgtgtttcaatgtaatacatgcaatcatcaagtactcgttagatttttctttgtctgcaattatttctagtcacattcaccctctcatataaggatcactgtgcaatatgaaactgcattttcgttaactgggtttggaaaatgatagattattttgtctgttcttacataaaaatgcgagaacatttgtgcaggctgttctggccactgttgctattattcttggtgt

SEQ ID NO: 5804 - DNA, 986 bp, Manihot esculenta
  Intron number 1 from transcript cassava4.1_010762m (locus cassava4.1_010762m.g) derived from phytozome v7.0 (chr-ID scaffold03581; pos 1230066 to 1231051)
aatctcagatctcgtgtgagcaggtaccgattcaggtaccaatcctctcagttcctggcttcttccccttttatctttattttatgctgcaaaagaatcgggtttccttttggattatttttctttttgtggttgtgtctatctaagattatagtttcttctttaaaagatgcgtttagggttcatgcttttgttgtctgtttctgtaaatttgttccaatcgctgagggatcttgtttaatctctcgttttcgctattttaattcaaagatctagtgtttttggtaagtttttctcccatcttttttcctttgcttagctctttctgaatagtaataggctaagttaatttttgcgtttgattcttttggtttgtttatgtttcaattatcaattgaaggcatgaatttactcagttgttctcttccagaaagaaaaagaaaagtatttttattttttcatagatgaagctcagattgatataggtatatatatataaatatatatgagacccagctctcaaacagttgtgtctatttttattaaacatctagttttttttttatatattttacttttgattttttaaggtcttatttattttccattttttgttgctttctaaaccggtttatactgtataaatttattgtcaggttgaattggaaatgaaatttgacttgcgggtcctttgatatgattttgatataatatttgtaaggaattaagtgggaaggttctgtagttgtagcttcattatttttatttttggattagtttatcatttctaaatgatggtactgtgttgatagcgtcacaatttctcaatttatcttgcatacgttctgcttggttgcaatccattctagatcctgcatattttgtactagtattgtacaattctacttgattcatggaatttgtatctcttttagcaataaaatcaatgggtttgttttgtcaactcattgcagtaaataaccaag

SEQ ID NO: 5805 - DNA, 1195 bp, Manihot esculenta
  Intron number 4 from transcript cassava4.1_001866m (locus cassava4.1_001866m.g) derived from phytozome v7.0 (chr-ID scaffold03000; pos 28432 to 29626)
cagcaggtaatgccaccttgcactaggaggaagtgaaatttgtgattttttttcagtcatttgcttaatggtgctggttgtaaaaatctggtgaaatttctggatgacaataatgaactgtgaatttgtggtgtaattaagtatgaagcactagccaaaggatattattagtttattaagtaaaaaggagttagatactaaagcgtactttatactgaaaaatgatcatatggatctttcaatttggtaataggtgtatggtttgatcctcctccatgagatgagtcttgacagaatgattgtgatatatgttgaacaatctaacaaaataaatgggtctgtagcatttatatgtagacagttttgcatgcctattgatggagcttgagaaaatggaaattcttaatcattgtttgataatccagaaggttttgacagcatgtaaatcttagtccttcaggttggcatagattttgtcctgtcctgtttgaatgatgatttgcctccatgaaaaacttgtatagatctccatgtgatgagctggaaatttcgtcactgtttattagatattttgcctttaatagtttgaaaggagtaattgatggactttctggctgtgtagtttggcagtatgaagacttacattttaggtatctgatagataataatcaccaagtacatttgctaaaccattaaatatggtgacagaaaaaacaaggaattggaattcttaaagaaatagaattcaataatttgatctaggttgtgatggttaattttgcatacccactttattctgttaaattgattaatttggggaatcctcttctttaaccaagggaaacacatgaaacctggaattagatgggatatgtgagatttgagatgttgtgattaagttgagaaaaccttggagttttgctccctgactcccaagtttaataagctctcattgacgcacagtcttttcaacttgaagaaaatagataaaacaatcctttaatattttgatatttgatatccttactagttcttgtttgcttccacggtcttttcaacttgaagagaacagattgaactagcctttagtagtttgatgtttgatgttgttactagtttttgtttaccttttcctggggaatctgttttgtatgttctcagaacttaccatgagtaacttattgtggcagctcag

SEQ ID NO: 5806 - DNA, 3135 bp, Manihot esculenta
  Intron number 3 from transcript cassava4.1_008851m (locus cassava4.1_008851m.g) derived from phytozome v7.0 (chr-ID scaffold03604; pos 837873 to 841007)
aaaagagaaggcagtacgatagtgcggggtttgaggtgcatattcagttccttctctttttcctctttatcctgtctttgatatggtgtttggtgctgtgttgtaaaaaggacactgcatttggtgctgatgattcttctttaattcaatatgagctgaaacttccccattgaatgatatatgacgttagtcatcagagtttttgaccttattgaattgaattttctctctagaatccttctctagtggagatgtattgcctttcttaacccattatcacctcatttcccacaattgtggagtcaatgcctataaatgttgcgtctctgccaaaatttgtggcagctcctttatgcaagtaatccttgaaggacatgtgaaatcactgcgattctgaatagaaaggaatgagttgcacaagctaccataaccattgtcattgattaaataacaaatttgtgaacatttttctaaagtgctttcttcttataagaagaaaaccgcattgtttcatcaaagatagaatattctgatcgttggagaagtttcctactgccttacttttgtgcctaaagtgaaatgtggatatcacctggtgaagttttcactagtatgttctttgctgctaccccacctcatctccttctccatctctgtcatgcagatgctaataaggtggtttaatcttggaaactttggaattggaatttgagtgtttgaaaatattaatgggttttgctctatagattacatagagatgataaatactagacctatatggacatcaaggctgtaatatgtttgggattggttttaatgggatatttatgggggcacaaagttatataattatattggaaggtttgtaatcatagcaccaaatagctaggtttaggatcacacctagacagaagcctttgtatttgcaagggtttgtagtatattttatcatatctgtattgtatttatatttatatatcagaaactaaagttttgaaaattttgttttttatttctttatatttcttaattaatagttattattatttaaaattgacatggtaggttgatcttaattatctattggtgggttgcttttattcaatgtatgagagatatctacttatttttccaatcctttcaaagttactcctccctctcacaaggataggcttattttactttttcatccttctgaaattataggctattttcctttttctattagtaatttatgtattagctttctgatatgccctatttaatatgcattgaaatttgttagttctaagaataatttagtaatggagcaatatgagtggagggtatattaggaaagattttataaaatttgttattttagctatgataatatattttcttaattcatgtgaaaatagctatttgcctatccttgtgagacaaagattatttgatttctttcaaagcaatgcgcaaagaaatcaaagtttcttttttgcatttagaaggaaaaaactaatagtaattatggtgaaagaaacatggagattgttaactttgttctattacgtggagaaagataaaatgcaatgataatgagtgtgatcccccaagtaacaattttttggtcaatgattcatcgaagtctgaattgggtaaagttagtaacctagtatttattccacatgagcttgaatgtgattgtatatttaaccattggctagaagtgtaaaactaagtgttgtgtaagataagtgttatccctttgaaagtttatgggagccacttctagggtccatattggttagtgtgctaagttctattggatgcaagagatttaaatataagtggagcttactcccaatttttgagatgatatgtaatcaaggttttgtacggattccttacctgtatcttctccttctatgctaagttgaaaataaaacctcatggatcatgcttgtggcatgtatacaaaataattgaaaaatagagccataattgcattcctttgttttctgtgtgtctacttgtggaggtttgttaggaaacatgaaagataaaataaatgaatgcgtacatagctaacttcttgatatttagagcttcattttctttacactcttagcaagtgttgttgtgtcctttcttcctattgtcatatagttgctagggtatttatcacatctagtactttgggttcagagatggtgcttttgctacacattgttattacttgctaattgtgctcggagttgtcaattcaacaatttatactagggttaagcataattttgggagttctgaaccaaactgagtaaccataccaaactgttgagaattataccaaactgaacttatttcactattttgatctgtttctggtccttcaataagaactaaccataactatttcgaaaccaaatcaagaatcaattttatacacacatcttcctattttttaggtttattatattctttaaatataaattatatgtatttatatgcattaagatttatatatatatataattattaattatatataataattatggacactatacaaaccattattgtcttttattcattaaccttttcttaataacttttgttataaatacattaattaattttattattcttaatttttggtgcagtgctatattttattagatgttcaatcatttattaaaatataccttatagttaaggattataaaattaagaagtacctaaaatatatattaaattatatacttatgctactacattcatgcttgtgaatgtgtgtgtatgtatactttataattaaagatttacataattgggaaatagtttaaatctgtattagtaaccatctttacagcttaaatggtagttcaagtatgaaattgtttcacaaaccaagaatcgaactagaactaaaaaaccgaaaatcaaactgaaccgaaactgtaacagcaaacaactgaactggaaacaaactgaaatttttaggtagacctggaactggaaccacacgatatactcattcaatgatttcttactacgattcctgtaattgtcttcctgtttgcataatatttactttctttgctgaatagatcctaattttttggaattctataattgactcttttcaggctcttg

SEQ ID NO: 5807 - DNA, 2445 bp, Manihot esculenta
  Intron number 4 from transcript cassava4.1_007428m (locus cassava4.1_006655m.g) derived from phytozome v7.0 (chr-ID scaffold09761; pos 175979 to 178423)
aaagctgctgaattaggtacctgattctgtctccatttgatgctcatatcgatgcaaccatgcaactgccctaatgttctatttacatgtatcttttgcaccatgatgtgaaataaggcaattaaattgtgttctacttgataaattgggatttgaaacatatgcattgctgtatggcatatggaggcctattagtagttttatattcttctatgatctaagaaagtagcaatttattttgtctggaattgtattggtctaaagttgctttttttttgtgtgtggtgggtggggtgggggtctcctttcaactaaaggatttttactgctatgtacttttagatggttagaagttctgtgcaggtgaaatatttattttattgtttctgttagaaaaaaatagctatgagcttttacagtgttgtataacatacatcaaattgtcaattacctcaacttaggtagctgattttcaattttagtactgataatctatgtgcttggcatgagatttatgctttaaaaagtagtattggattttctctgtgtaacaggaacttggattggttgtttacaaattacatcagaccccatttttaaaagttggcgactcaaatcatccaggccaaaacctagtatcatataccttggatttagtaacatgaaaacacaatcacccagtggttgcctcttagtagaggatgtcaaatgttcttggaatttgtaaacatggtgtgggaaatgattatgatttatgataaggggactgttgggatgggcttattctaaagctaatttgaacatcactaattacaagatactgattttgtggtgtggatatgtatgtcgtcataataatgctatatatgagggagatttagaagatactaaattcataaattcgtggccgcagtcaggtcacaggtaatggacggaaataggcctgtaacagctgtaatgtaattgtgatagaaacaggcgtataatagccgcattaccacatcaaataaagatatccaatccttcattattagacatctttagcaataattaatttatagctaaaataaaatatatatatcatggatagtaaaaaataattctttatacttcaaatttgacaaaaagaacttgacattcaatattattttctttaacaaataagtaaaataaagataaataattcaaaatttataaggtattaagatataaatgtatgaattagacacattaagagaaaagaagtgagacatttgtagaagatagtaatggggtgataccattgcttaatttgagaaaagtgagatataacggtataaaacttctcaatctaaggaaaggaaattgagttttgcctcatatggctttgaaaagaaaaggtaatgggctgataccattacttaatggtaaatatcggccgtaacaggaacaaatttttttttgccctttaaataacaggtgtaacggtaacgggagggccagaaacctatagataacggcctttacgcaatgtaacgtactgcctttatttaaaaccatgatactaatagaaagctggaaaccaagtttgtctttagctaatttttgttctgatttagtctcttcataatgatgtaagattgaatatagaatgttgtaattacacatcctgagaaatgcagtgtagttaaaattgccaggtgcactaagtacagcacaaaagggatccgctgcttttgccccccaccccctctctcttttcctcatctgctgtttctttttttgacttattttatgttacttctttttaacagaactcaatttcattcctgaatcagtcaaaataacttctttgcaatatcctattaacatttatcattcttttcagctttcaaatttggttatgaattttccccttatcttttacacatgtttcctactttatctactgtcaaatataattactaattatttattattaagtaatagtaattgtaatagtatttttttttaataatattttttagtgagttaattttaaaacctccttttatttatttatttatggtgctttgcacttcaagcagtaagaagacattgtattgaatgtgcttttcgcttttgactgccttggaaatgcaaatataccagggaaggtttcattggataagagatgatggaaattcaaccatgacttgtctaataccaggatagaatttgaacatgtgaactatgactagtgatcctctcaccctgaatatcttttggcatgcattgtagtgcagaggatgatattcctcaaaacctgtgggaataagttgatagttctatttcaaattgaagcccggaatattgttgaaattatgtgaaataaattagtgataatcttaaacatcctggaaaatgttcttaattctaagttctgtgcataattcagttaacaggaacctcgttggggtgggtttt

SEQ ID NO: 5808 - DNA, 1877 bp, Manihot esculenta
  Intron number 2 from transcript cassava4.1_015702m (locus cassava4.1_012247m.g) derived from phytozome v7.0 (chr-ID scaffold09692; pos 8285 to 10161 reverse strand)
ttgatttcaggttggggcttgttgcaactataaaggtatgatactgactaaatatttatgtttctgctgattctgttaactgtatctttattggggaattaaattactcttgtttgcaagtatactttgaagttatttatggagtattactcattgaggatgggccttgtagcttgttccaaggtgactactagttcactctggtttaaaatgcaaaagcagcctcctgatagtagtactgttgctgctagcttagtttcaacagtgaccattaagttctaatcccttaatcctacatgtttcaagttccaattgttagtgagatggggaatgatagttcccaggttaaggtaatttgatctaatgatctgacaatgtaatgtttcagatagattttgctgatctatactatatagtcaaagccacataagagagagttataaaaaatcctgattctgtggatgacttgaaacaggctggaggtgtttcgagtgaatacaacaaattaacaactttggcttctctttgaatttgaaatgagaaggggacttctcattctggtggaaagaaacttggttttaagggaaaagtggcaaattattctctgtagttgatactacttgttgagtaggcatctaaaattttccatgaagagaactatcttaaatatgaaaattgtgttgcccttatagaggtgggaaaagaaataaagagatggcagcgtttttttttaatgcatttttcctttttctcttcttttttacttttctttgttatttcattattattattattattattattattattattattattattattattattaagtttaaactcttgtttgaaaaagggttccttttaggcctttttatagaatcctaatgctgaccttagccttctttggaagtcctatggatggtagatcttaccttctattaagtataaagatgaagtaacattgtttcacaagatcattttgtatttaatactttatttgtgtttttatatttctttgttgtagactaaaaaatcaattttaaacattgttgcttgcactaaaaactaaaaccttttgtttttcttcctgacaacatatatttggagggtttttccctctagggtgtggcccaaaataaatttctggctgacccaatgagtttgggtttaagacttggtgcctgttcagcactgtggtttgagggctaaaataagtttgaagaaaaacactttttaggtgctgttgaaaaaagctgtttaaaaaaactgttctgttattttattattcttatgtctaaaattaaaaaattaggttttgtttctttcatgaaaaatatctctaggaaaatatttttttctgcattgtttggcatttaggatactcagtaaaattggtcaagggaaaatgactatttctaaagaaagtaattttctattattagatgtgtaaaatattattttatgtggaccatatggagctgtagttttaaattactttttaatactctttaaccaatatattttaaaaaatatttttcatcaacagcaattgcaacaatgatgccaaacaaatccttagttaagcttaagttcagaacaagaggccatattttattttagatttgattaaatctgcagaactataattttgagctattttgattatttaaagaaatcttcatggtagcactggctgacacagtttgatatggactgatatggtttgctactgtgattttgggacagaattccattatttaacacctgacaactgacatcagatttgttattcatgtgttttgtgaattgatttcctgtaatcatgcttttgtacctctaatgttggatttgtgatgatctgaaggaccgggcca

SEQ ID NO: 5809 - DNA, 485 bp, Manihot esculenta; identical to SEQ ID NO: 5713
  Intron number 3 from transcript cassava4.1_019475m (locus cassava4.1_018436m.g) derived from phytozome v7.0 (chr-ID scaffold08265; pos 3832611 to 3833095)

SEQ ID NO: 5810 - DNA, 2532 bp, Manihot esculenta
  Intron number 2 from transcript cassava4.1_010444m (locus cassava4.1_010444m.g) derived from phytozome v7.0 (chr-ID scaffold06598; pos 352666 to 355197 reverse strand)
attcaaagctctcactgtttcctctccaaattccggtgataatattctctctttctctgtctcgctctgagtctgtggatatgtagggctttagatctcccctaaacgtaatttttttatcgtgattaattttgtattaaaatgatcagtcatgcatgtatttgtttccaaggaggattaattaacagtatagaagaacttgttttcccgaagtgggtactttctgtttctttttctttatatatatatgcaaatataaatttttattatccactttctctttgactgaactgtgtttgaggtgctagggtatcctcgcagaaggtggtctttctcgctgaggagccgaagagttttttttttttttttcttttttcttttcttttagggggagggaggatttcaatattccttgcttcgattctcttctcgttcgtgtattttaatgtgatttcttggttttctcgtgtattatacttcctgaattagtatgtttccgctcattttcttgcaatttttaggtaacaggaagaaataagtaggtattggttttttgccgagttaatgtcgagccatgtatggtgccgaagtagtccagaacttggaagttaaacatgcttcgctgtgcaattttgtatcgcatccttgaaagcctatggaggttgccattgctttaatctctgttagatgaagacctaattgcatacgaaattccttagaagtggctgataagagtggcatcataaagaatctgaagtaaatacagtgggacttgtggttgttaggcctaaggacttggtcttagtaggttgtctcatgaaatttagggttttttggcacataggtaagcacactagtacatccctgtgggctaatcttattatgatttaggcacacgagttaagccaagcaagccaaggagattaagatctggatagaggtgtctggttctaaggccgacttccaatcttattttcccagtgtattgatcaatagacacaaagttttcaggagtgaaagggagagatttttgggataatgttcagtagctatgctagaaggtcctgaccaaagagttaaaaagtgttctaaatggctgggatttcatttatatatctacagggattttatgagagaacttgcacttgaaaacatttactggaagttcagttggcccacttattttgacaaaatattttttattttagcatgttatattcccatggattcccatagggtttggaatagtcactagttgaattgcttatttaaaaccctagaataaacaaaacctttttgttgcaacttgaaaatgagtgactacttgaaatagtgttttcattaaatgctttatcatcaatattacttgaactgtatgtatctggggttgcttcatctctgatatagtaattacatgcaattttcaattgccatcttattgaagggttatgcgtttagcatccaacttcttaacgaacctcaaggcttgagagatgccatgtatagttggatatcaatctcccaatgtaaggttgattatagtcattgttatgggtgatgatcaaattaatacactggtttgcttctcttcatttcaaatggaagatgcatcttttctggaaccttgctcgggttcttcctgaattgccaatgtatgcttttgtttttttcaactggtaagaattttttttttgttcggtgtgatttatctataggtttggaaggtgtaagagctaagtgaaatggaataatctccagttagcgattctgaagaagagaaaaaaattccgtgatagttttgtagaaataaaatctaactctcctggagagagtgggaaagttggtggtgctgatctggttataattgaattgcattcgatgaattttttgtggaactatatttgcattattaaatgtttggtcaaactatagaaatatctaagcaggttggtgtatctacgtattttccttgtgtaataattttgaagaaatgatatctgtgggaccgagaatagcacctgtatgcatcatgaagtagacttgggctatagaagagtcctcactcaggtgaaaaaaaaaatcattattcaagtccatttggtgcaacagagtgcaacctttgtttttttttaattgcttaaacttgtctttccataaactttatcttcattatgacctcaattcaatgcaatcatctaggacaaggctttctgttatgacctagtacttcttgttcttaccacggaagagttggaaagtgttcttgtcagtggcttgagcagctagaaatggtctcattctttattctttatgttcttcagttaatgtattacaggtttttaaacatgggttgatgaagcaataattttttttcctgcgttagaatggtttgtattaagcatttcactaaaacacactctgaaatcaaagctctggcttgtgtttttagtagtttttatagttgcttatgacaaaggcatgctttttgtggttcttacatctttaagttgccatcagcttgtggtgagggca

SEQ ID NO: 5811 - DNA, 3747 bp, Manihot esculenta
  Intron number 1 from transcript cassava4.1_031141m (locus cassava4.1_031141m.g) derived from phytozome v7.0 (chr-ID scaffold07520; pos 1792622 to 1796368 reverse strand)
agcagttgcagaaggcaaatcaatccaagaagctggtattaattttatacaatcatgttcttttttttttttttttcttgtttgagttttgattaataatgcgaaatttcttgattttgagttatggattctgtagctgtagctactttttgttttcaataatattcctttcctaattttttttttttggtttttatctgtttagatttttcttaaactctggattctgttttgttcttgatgactggggctgggaattgtgcatctgaggtcgtgagtttataattatggggaatctatgacggtggatgttttttacgtgcttatgtgatcatatatcagcaaggatgtgctcaacaggatgcattgtgtgtgtatgtgtgtgtgaattttcattgggacgtgatccaaacatatttagctggtctcgaagttttcatttcgatgtgataatgatttgtacttggattctggagtgagagtgaaaggttcaattgatgatttggtgattgatggttacgggggaattgtttttcgtgattggatctggacttgggcctccatagatttttaaatcatgcatgttgggccatgttcacaaccatatctaataggcataaaaaataaagcctttagggataaggaaggcgatagcgatgcgtagattttcctcagcggtgaaggatgaatgtttattggttatgcaactcaagtaatttataaaattttccccctgattgttgatgttttagtctcgtttggtatgttgtggctggttaataatttaccttcttttgtggtagttgcaacaaaacaatgaatttctttttttataaaagaaaaattcattaaccaaccaactaaattctcagagaggatacaaagtaaacttggtccatagggttatatgagaaagactgatcatgcaagactttttcgaccaagcaatgagccgcattattacaattgcggttgacaaactggaaacttgcttcggaaaatgattgagctaacactactaatatccctagttagccccgcaaagtctccttgaatattctacccttaacgaaatgaatgacttgctttgcatcaccttccaaaatgatagaccgtaaacccattctgtgagtcaagaagacatcctcctgacctgcaagagtttccagaaataaggggtcaacaatagcagggtgtagtttacagctccaacccaaaggcaatccttggctattccttgcaagcgcagcaacagcctctacatatcttttaacactaacagctgcaacgaaatttatcttcacagttgtagtaggggaggaagtccaattctgaggaatagaagcaaacctgattttatctttccctctatttctgacaactgcataaaactcttcatgggcgaagatggcttgttgaatcacttctaagctactagactccttattgtggaaaatcagcctattacggctttttccagatgaaccacattagaaaaactaggagttggatccaattgcacccttgctcttgctgtctcgaaggagttgtaagctcactccaataatctgccattcatgaaccggagagaaaggaggcccgtatttggaaaggagaattaatccatatttccaaaactctgggacacagaaagaataaatgtctagctatctccacttcaccacagaaactacaaatctacagtcccgggggatatgagatattctcctgttgagaccccccaaatcggtatcgtgtcttgtaccagctttcatgagaaaacagaaagctttgtgtgaagattaatgctccagacggttccaaaacttctcatctctttgattagaaactggcctcagtcttgctatatcctgattctctctggtcctattgatttctctagctataacatatccctacttgaccgagtatgttccctttttattataatgccagacgaaaatgtcatccccctgaaacatgctcacagggatagccattatgttgtttacctcttctggcgtgcagttttcctccattgccctgacgttcctggaattgaagttttcatcaatcaactgcttaacccaaaccacatcctaatagttatcacttttaatagcaggaggattaagataaggcttaggaatcaagaggcctagcttacgcaaaactgactctctatttctcacctgccgctgaatccgtttctctaaaatgtatttcccccgacctgccaccgaatccctttctctataatgtatttcccccacattatactttgccaactcaaccaagcattagtagagcatctcgctttcatgaataatgtatggggacaatacgtacctttttaagacccaggcaaacaaaaattgaggtctagttagaaccctccacctttgcttagctatagggctttattaaaatctactaaatccttaaagctcatgccaccatataagcttattccgccacatctttccctaagcaatccagtgtaatttcctttcatccttttgctgaccccacaaaaaatttgcaaccatactatcttttgcataatcttattggaatggtaccccacagattttatttatataaaattctagttccttttttttttctgtgatatggttatatattcttttttggattagtggccattttcatctctatacttgtttcgtaagtttaatttaacctatttttaactttttgtttaaattaatctaaaaagtttcaattttagttcagttagtacaaaaaatacagaattgagtttattgatttctagccgaaattaaggtaacaataaatttagaccaacaatcatgaatttaagctttttatttatctaaatcaacaaaatcaagagatttagctcaaaattttaattttgatttaaattgatcttattgaaaattttgagtttttggaagtaggttaaattaaacctctcaattagaacaggggtgagatcaaatatttggtaattattttttaacttttttttttgaaaaacatttgtttcaacaaggagaaatttactttcgtttttattttattcagtagagtaacacgtctgctgtttagggaatgaatgaaatagtatacataggtcctctatacggtgaaaaactgtctgtctactacacctttgttttttctgctggcttggattgtttactgttgtctatttatcattcatgggtattttcttaattctatatatcccacagactgctcactcgataacattgttaattgtttttagtaactgttagctaaagagtagtatttcttgatccactatctaatcactctagctaatgtttgaccatagtgaaaacaccaaacattgccaagaagaacctttatatgctgtgtatgctctatagatttctgagccatttgtcttgaggtccacagaaaaggagaagtatttcatggacgccttttacagttattttcttttccctttatatcttgctctggggtttggacccaataacttggatgggcattgggcaagatgctgttatcggattttggtggcattcacatatcttgcatttaaaacagaaataaaattcccgagtaccttcaatgctcgcatgtgaaagtttaacgagtttgctattatttccaactgaaacctttcattgtgttttttctttttcttttttttttttaatttatattgatcttgggtttgatgaaggtggttgttgattttactgcttc

SEQ ID NO: 5812 - DNA, 796 bp, Manihot esculenta
  Intron number 3 from transcript cassava4.1_028079m (locus cassava4.1_028079m.g) derived from phytozome v7.0 (chr-ID scaffold07402; pos 244607 to 245402)
cctaaaggtgtttacttttctccagttttgatattgatattctgtgctgcaaaactgcagaatttttttgcagtcatttacctagatgttttgtacttggtatcatttaacttaatttaatggattaacgactgcagtttattctcattgtcacttcacttgatctatatttatttgtttttcttatgcaatctgtatttgtgccctttcttacaatgtgtgctgcctgaaaatgaaagaagttctctggtcacaagctagatttccttgtttctagcatatttaataccttgatattttcattagtcaaaatagttcactgaagtaaatatacatattgcaactgtgtcaacttatcagaggtaacattatttggaagtgctgttatgaagttccaaacgttaataattgaggatttggtgttatgctttgatttatagcgtactatgttgtgtggaattgattcagaagtaacctcatttattgcattgaatggactgtaactgtgaaatttgttttaaaatgaaagcttcttttctccatcctttttatccgtattttctttctgttttctcatttaactgcaatttaatttataaaggcatgtagtagatggcgactgttttgtctagctagcccgatatcttcccaagtttcttggagcttcatgcctctgcttttgcttttacagcagaattcacaatcttctggagaatgatattttatttttgaaattgctaacaatgtttgtacaaaagcaggagagggagttccagatttatctgaattggaattt

SEQ ID NO: 5813 - DNA, 3641 bp, Manihot esculenta
  Intron number 4 from transcript cassava4.1_013727m (locus cassava4.1_013212m.g) derived from phytozome v7.0 (chr-ID scaffold00999; pos 357644 to 361284 reverse strand)
atagagctattgaagtaagtgttatttcttttgatgtagattctttaattctaaattttttgctggttataattcctttactctatccattcgttatagaacaataatttgttggatatattcttcacagagagataaattgtccggttgttgatacaaatataaacaatacaaaaatttgttacatggcttttgatacttgtttgcaactaattccataaattaataaacctcaacatatgcaatcaaagtaattaactcttctaaattttttatatgaattattaattatagtgatatttatacaacaaaaatataattggaaaatctcaacaacatttaaaccttaacaacgtaaagtcttaacagttgtcttcaaaattaaatcaaaattaattaacctcgttctcatcaataataaacttattatcttttaactatttagtgtaacttttgctttataaagtatatatattctacattcctggcatcttttgctgtaattttggattcatcgttaagtattttcattttgtctaactccttcgacaatttttttttctacaatttgaaggctatatttttttaaagactattgcagttttgaaacatactgatctctttattctcttcatccttttttctaatttctttttgctatatctgttttaaggtggtttgaattttgagacatgcagttgtctttatcatcatttttttatttgtaatttatggacatatttggtcttttagtacttgtttttattcttggctacttctatttcattggatattctcagctgactcctctcgacttggtgcccctagtttaagggaagtctttgttatttacttcttcgcttagtgtgtgtgtcttttttttttttctttttttacaagcaaactgaactacaaaaatcttcctttaattgccttgcttcaatcttgccttctacttttgtctaagttttttgtcattcttgattttttattcatctctatttttttttattgtgtagaatttctcaattgtgactctttatactttttttcctttcatctgcaatctctctaaaatttgcaagtcctttgagatatcaactttgataccactttgttgatttttgagaggataaaaagaagaataattaatactgaatattgtataattttattgaaaaatagcaaaatataaaccttaacaacttaaaatgtgacagttattatctgttttaaatcaaattaaaactaattaacctccttatcatcaatatttgcttattctcttgtaactacataggatacatagttttaagtgcttagttctcataatcggtttgatctttagtagtgcttttaatagctttattcaaactcatgcctaaaatatctatatgctattctaaatttagatgcaactgtggcacgtaaatcgtcagtggcctggtcctttatttgagcatcactgtgaaaatcaaagcacatcattgactcattcattcccttcgtatatattctgcaactagtatgagatgaaatgagaaaattcggttttgtcagtgttcatgtacttgatgccagagttaaaagctcaaatggcaaagtacagtattctcctggcaaaaaaatttcaagcacatgtctccttgtatcttatacatttcagtacctcttaaaaataaataaataaatataatttgcaatcatataattataccaaaatgtgaattaatataaatgcaattaaacttcgagtcttggactaattaacccattattctcatgaaaattcacaataatagttgtatatttgtgttgtacattatcttcatttatatcttaggcaaattaataatcaccaatcaactaaaacacacaagtaatgtttttatatatatacacgcacacacgtccacagactctttggcttcaataaataattaaataaagataagccttttaatagtattctatcatataaacattttggtaaagtctcgtatatcaaaacttacatagaatcggaaagaagatgagtttcagtggggcatatatatatatattgcatcacaatttgaaaaaatgctgaactttcaatgtgggggcacttgtccccactactatttttggtttttcaattctaagcacacctatgaaaatttgtggaatggtcttgtactgttattgtgaatattgttgtgggcactaggtgaatgagttggagtctatttggcttttaagctagctccaagttcccaagtagctatagcctgacaaggactaccgctgtcatctgacttgactgaaactttgcctacttgtttcgacaagtaagctccagcttatcaaattggctgttaaattatctaattgtggtggcaactcatcctaaacatgctggccgactccatgtatttctgtacatgttgctcggattttaaatttacaaataaatataatcatgcattaagattgtaatttcggctgccatgtttagttggtaacacattgtaaatggccaaaagcattattttactgatgttatccgttttaaatttatattaggtgtgtgcttcaattcagcatggaataatacgcgagcacttagtttcttgtcaaataattcaagtggtgaaagaatcgcttcattatccatcaattattcagatgcattttcctttttcccaatatttacacactttttcgcttccttatcagttcttttgttgtatggctgtgttaaaaaaatatatcaaatcttgtaggcatgaatttcattctcatcacttctattatacagctggattagcatcttaatcttaatcttgtttcaagtttcgtaagaatgatgtcttaaccatcttgtttacgcaattcttacaagaacaagaaaattgaaaagaatgaattttgcaagaatgattgttgctgtactgctttgtgtttagtcagagtccttttaattgttctctttttttgttgtttacctgtttataggttcacagggtgagcagtattcggttcaaaccgaaaaaaccaatcaaatcgaattaaattgaaaatttgattcgattttttatatatttcggtttggtttgatttttaatttcagaaatttcggttatttcggtttggttcggttttgattagaaaaaaaattgaaaaaaccgaaccgaactgattagtgataataatatgttttttcaataatatagagaaattaaattatattaagattaaaatattttaattaaattttaaaatattaaaaataaagtgtaaaaaataaaaaaattattaaaaataaaaaatgatcaaaccgaaccgaatcgaatagaattagactgattcgattcgatttctgatcaaaatcagttcaattcggtttttataaacactaaaattttagttttcaatttattcagttcgattcgattttgaaccgaaccgaccgaatgctcatccgtccgttcacctatattgttgtcattctagaaatatggctgtgatatattgaatgacaatattgtattttattattattattttttaaagcatacggagaaaaaaaatggagtattttcctaaattgatgagtattgtgggcatcataattgcaggaaccgggtgcccatagtggg

SEQ ID NO: 5814 - DNA, 2380 bp, Manihot esculenta
  Intron number 3 from transcript cassava4.1_007183m (locus cassava4.1_007183m.g) derived from phytozome v7.0 (chr-ID scaffold07991; pos 124476 to 126855)
tcgaggttaattttattctcatgcaaagtatcattatgtattgatgatagattttacttatttgaagatgtaataatacaataatgcttgaatgtttaatcttttagctttcaccaaatatctaataaccatctgtttggaatatatagaagttgctattaagttaaaatatattagagatgcagatgtactttatgcaatcagcttcccaagcaacctaacaacgaactaatctccattgtagaagttgatggtgaactaattaataatttacttattacatcattgttttggtccaacccctaatcaagacaaagaaaataaaattgatactgaagcaagtctcaagattgaaaatttagaatgtgcagctgtgatgctgaataaattatttaatcattataaactctttgtgcagaggtattttgctaataattcttgagttctatgttctccttaaaaatgcagtatcaatatagttagtgcaattattagatggtgctgcttctctatagggtgaaccatgcatatgtaataattggttttttatgattgaaatttttattattggatgttgaatgaatatctgagacacatgtaaaacctatgttatgtacatcatatgctggtgtctaattttacctccgagtattgtgtattgaaaaagaaaaaaagaaaaaaaatcttcatctccataatagataactgtggaaacttatgattatgaatatgattgcgaaaagttaaagctgaaggcagagtacttacatttttatatctaaaatgatttatttctcagataaccaaaattctcttgtactttctcatggaatataatatataatttgcaatttcaatttgcaaatttattaatttttaatttgagaaccaggagtcaatgacagcatgggctgagtgctctgtaacataggaaactgttataattcattttgtatgatcttcctgccaaagttctgcacagtttatataaaatccttaatggggcacttcatcttagacatgttttctttgcctcgtttagatgtgatttcaggatgaatattaaatctggaactttatgaattcagattagttcttgaagtatttgcattaaaattttgtaaatagcatccccttttgcctaattggcaattgctatatactgtttgctgccaggatttatcccaacctcaatatatgcagcctctatcctttaaaacttatcatttgaactgttgagccaaggtgattgtcctagatgttaggattgctggcttgctaatttttttgaatgctttagcgaagtgcttatttgtgcaaaaaatctttaaaaggccttgttttttactttctatgctaatatggatatatggccactagagcctattaatttttcttttattcctttttttctttttaaaaataccctgtctggttagaatttttaatctaacactagagtggttgtaagagacagatatatgaaactaaaaggatggttggaatgccctatcaagttagttattctgcatccataaccacttgacattagtaatgagtactgcagcattatttaattttcggatagtgattttatttgattcttctcactcattttatatttggtcaatgatcttcctacagtttgccaaagttgatatccctttcctgttttagggtatatctgcctgcaacctcttttttacttctttaagttttgggtaaatttcttggtgctcattgggttgctacagtttgccaaagttgataaccctttcctgttttttattttaggaatatatcctcctgcaacctctttttacttttttttaatttttgggtaaatttcttggtggtcatttggttcttaagcttgttagggcatctaatggtaaggaatgttactccagaactaagattaaccttaatgggaatgagatataagaacatcatttatagcatgtcttgccattcatgaatggtagatgccattcaaaacagttgtcgagtattttttttcagaaatttcatcatcttgtttaagcttgaacattttatttgcggtggaaagtatatctattttcctttaccaaactgagagtagggacacattggccatgggccagttgaataagaatactgatgggttgagttgagaattcttagtttgttgctggagggcatatgaaactactaccatttattttatgcagttcgcattattctccaatagtaagtcaaggtcttccattattctgcaactttaaagtcttgtgcatagtatggtactagtcttatcctaatttaaatatctgcttggaaaaagaaaattagaaattagacatgctattaacactgcaggttgctgcagttccagaag

SEQ ID NO: 5815 - DNA, 3044 bp, Manihot esculenta
  Intron number 20 from transcript cassava4.1_000064m (locus cassava4.1_000064m.g) derived from phytozome v7.0 (chr-ID scaffold00325; pos 151359 to 154402 reverse strand)
ctatccctggagtggtatgcccttatgccaatttttcagaaagtattcagacacaaaagaaagaaaaaaaaaatcaaataatagtgaaattttcttataatttttctagtacatttcatattccaaagctacttaatgtttagttcaatctaatatgcttttaatatgtttcttcaatgtgtgtaatgtgataattgccagaccattcacctacctagtaattactgaggtattattattggattaaaagaaatgcaaatgtgttaaaaaagaataatattctagatctgatgttgatcaaaatttaaaaacttgaaagaccaaaatgttggagattataataaggagaatgtttagatagctataattcagttatgtattttgccaaatttagaaggggagggggtggtttgtgatttgctgtaaatttttgtacttcataaattatcctctctgttggagattctgtttaaagatgaaaaggtgaattactctacagtccctaggttttcccatttttcggtagttggtccctggattttgtctattacttactatttcaactactaactattctgtcccttgaaattttcatgcttttaccgttagtcaatactgttgaaggtggtctaaggagatgtacaagttcgtattccaactttaatctctctctctctctctctctctctctctctctctctctctctctctctctctctctctctccctccccccatttatgtcccttcttcccccttgcatctctctacaaatgcaaaatcaaacaattacaatatcaatatcaactacaaattgacaagttccatgaattcaggaattagaattataattgacaagatcacaaatcaacaagatgaattcacaatcattcttttcgtgcctagtcgacccccttacacagatctctaatgaaatgagattatgacaaattggtaattgtgacaactaattttgagcttttaacctgatttgaacattatgcaattctttagtattgataaatgatataagcaaaatctgaggctcatattcttgaaaagcaaaattaaagtaagattataatcactagcaaaatcaggatgaatgtgaaatgaaaccaggtatcaccattgccaaaatcattgatttcttggacttaacctctgcttgggaaataaattcataactggtctctatgttaagctcaatcgattatggttggctttaatttgcttcctggcagggtgatatggtgagtgctaaaagggtacttgggttgtaatggcctttggccgagacataggggcagggtaaagcacaaagacttgatgtattgggttgaagagctaatgcaggaatgctggaggaaggagagagaggtctgggggtcgaacaagagggagaggcagagaatttgaataagagtagttcagtattttcatgatgcaccaagaaaaacttcaaaaattggacaaaaacgactacttagtaggtggaatggaaagttaggaaataaccactgatgtagtaatattcaaaatctagaggccaactatagaataatgagagcaccaacagatttaaagtagttcagccaaaatgaaatattctttacgcacaactttattttgaagaaactcatactcccttgaagacaaggtttaacaataatcccaaaaataaatggacaataattgagttataagtaatttttttgtcttaaatttcaatgaaggaaaatttgtgaatcttcctcaactctatccatttattttgtatgttttatcttttgttttaagtttcatattaaatcttttgttatcaatttcccacatacttgttcttaattaatgggctaattttcacctgcagttcatcaactttgagtgtactttcaatttggtcattctattttaatttctttttttaaaacttcttcaacttttcaatttaagtattattaaattcctgtttacctgctatgtcaggcttacaagttaccgcaattaaaaaattatttctttcttttctctcatctcacaatttcattctgtcttatttttttctcatgaaagataacaagtttaaataataattaattaaggaggagcaatttgaaattatctatattcatttcattattttattatatattaatttatttttgaaaatcattactaaagtaattagataaaagtttaaattgtagttcataatagtggcttataataatcaataatgttaaagtaaaaaaataatatttaataaaatgtaatggaaagtaaaactaaaattaataatatttacaaaaatatttcaaaatagatttatggacaatatctgttcatttaatatttaatattcatttattttatttaatttaaaagaaagagaaggataccaaaagctaaaataaattaaataacttaattactaaaaatttttaatcctgcttaaagaattaaattatattattaataattgaaagtacaaacaatagaaatagaaatttatataggagagtaggagagaaaaaaaaaataacttttatatgtattgatctacaaacctgcaatagtagttaacaaggactgaggactccaataatactcaaattgaagttggagttccaagaaaaaattgaagtcagagtgtccaaattgaaaacataccaaaagttgagggatttgggtgaaaattagtctaattgatgtatagaattagcatcatccgcttttgcttggtaatgtgttatgctgtcattgagcttcggaggatgaaatgtaaaaaattgaccatattctgctgtatgcataagcaaaacttttcagatcattatctgtttcttctggatattgttacttgatttgttaaactttctgtgacactctgtgcatggagatacgtgcatatgcatgtagttaagtatctgaaaataatagttgataatccttagacaatgcatgacattcgacccctaataactgcatgtgcttgctgatattacagaataattcatttcaagagatattgccagttgttcg

SEQ ID NO: 5816 - DNA, 3823 bp, Manihot esculenta
  Intron number 2 from transcript cassava4.1_003988m (locus cassava4.1_003988m.g) derived from phytozome v7.0 (chr-ID scaffold07519; pos 858276 to 862098)
aaggtggtccctgtggcgtcttagcaaccatacaagtaattccttgatttgtaattgtgttgtttttcagtttttggttgtgggaactggggagtacatgaattcctaactgatataagtaatttacatgatagctggcctttttgttgtcatgtaatgtcgccacatctatagcacaatcctcttggtgtgctcagtgtaaatcctacatgcttctttcgtgcttttaatctggctaatttattgtcagtatttaactccatggtgaatttgttcttgtcaaaataaggtactgagtcagtatatcgtctacaacttattggagtggcagtgagtttgatatgactcccttttaattgcaggaattctcattgatcgtagttatcatacaagttgtctgtcaaacagtttattcagcctctatagaactgttttgagattcctgacctattaccatgtcctgctatttttaacagaaaactagagacactgatagtaggaaatgaactttgcaaaaatcaatgtcttgctgtaaggttttggctaaatcacttcacttcaccaccattggtttttgaatttctccaatttggatgttaggtgttctgtggatagcctattgtctagtctggaattgtcaataactacaataccacggaagtccactaaaccttaattttctgaaggatattggttgctcatcttgggtctagtcctagttgataattagattagtcttattgcctattccttacttttgaaaattgcataattatagctcttttgtcctttcaatgttatgatatgtccaattggatagtgatgggattatcttcctatttaatgaaaggttatgagctttagtttaatgtagatgtgttactattgttcggcataatatttgcttgaatttaatatataatttcttgacatagatattaagaaggttatttatttctggagagcatgcatgtccccatttttttttcaattatatataacttgatcttagtagtttattgtttgtttctattgtcattttgttcttgaaaggaaacgtcaagaacctccacttagtaatattttagttttcaatatgttttaatatggaaaagtgttatggataatggatagaccatcatccatgactgtaacgacccggaaaccggaccgctaccggcgctagggtccagattggcttaaggccgccgggacccgtagcaagcctaacatacttcctgtatacctgttaaatcccatacatgatcatacatatacataaaactttaaactttttctttcatttaccaagcttaatctgtgcatgcactaactcataaccataaaaccccacactggagccctcatcaaatgctccaatggggtaacctattatacattaagcttggtttacataaacatcattaaaacatttcattagaaagatcatgtaccaaaaagagattaacatattttagggccaagcacaattctatcctcaatacaattctttacattacatcacattataacattttacagtacatgtccacatctaactattacataaaataagacttctttactcttgctgacttcctagtctatcccgtacctgcaaacctgggggttaagggaaaggggtgagctactagagtccagtgagcagaatagtaaaacattatattaaaattcatgctttcatgaaatgcatcacatcacaaacaaatcacattaaggatgaacttgtcaccaatagccctctacatatccaatagtgccagaacgtagaatgggtcctggtctttcccttacataacatatcataacattccaatgtgccagggacgtagaatgggtcttcctggactttctcttacatagtgccagggacgtagaatgggtctttttggacttccataccgtatcatatcatatcataccatacgagagctaatggatcatccaatgttcatccacatcaacatcaaattatgcaatgcaacatattcgtgaattctaatgcaaacaacctaatatatctcatggtattcgtgatgcataaacatgctcaaaatttatttatttactttgcaacataaagagtcattttactcacctcaggctagctctgaaaagactctgaagcagctatctcactgctggggttcccggttcctcgggtccgaacctacacaggtgcactcaaatgagggaccaaacatatatgaacttgactctaaacatttccccaaaaaccccctaaaacaccttaaaacaatcataaaaaacatgcaaaggaaggctgaacagggcacttttggcggccaaaagtccctccagagccgaaactcagccactttcggcggcaccttcggcggccgaaagtcccttccagagacgaaactcatgcatgtttggcggcaccttcggcggccgaaactcccatccagagccgaaagtccaactttcgggggtagggttcggcagccaaaagcttgcctccacaggcaggttcggcggccgaaagtccttcggctgccgaacctgagttcttccaaagtggcagaactcagcctcctcatgcacattttgcctcccaaacctttcaaacatgcatttagctattctacaacatgcatactcatgtaaacaagcatataggggtctcacactctcctaaaccccaacaacaacacatatagcaactcatataccatacattacacatattttcaacaaaactcacatgaaccctaacattaaacagctagcttaaacatgcatttctaccccataaacttccataaaacttgcttagaacatcgaagaacgtgaggatcgacgcttacctcttgaatatcgagagaaaacgtgacccaacttggagatttggggaaaatgggttccggaggtctccaagcttccaaacttcgatctttgctcaaaaacttcaaaaaccagttaaaacttgttagaaacttgtaggatttgaaggaaaacctcaaaaccaaccatgggaaggcatgaactcaccgttgaccgaaaataggggggaaaactcgcccattttcggccatggggccttttataggtggctggccagaccaccttcggaagccaaaggtgactccaaaactccaccatgttcggcggccgaacctggattttcctcaatggtcattttcattcaaaactcaatttctttcttatttaaaaccataaaatacatgaaaacactttataaaaacatgattttatccttctagagggttccgacattcgagattccaccggacggtaggaattccgataccggagtctagccgggtattataatgacgctatccactactggaaaaaggcattgcaaatttgcaattgaaatttcaacattttcctcttgtttttgtttcatatgctcgtttcattccttttccctttagtctggagggtttattcattgtgattagtggataggtctatagagtcctgtccttattcatctttctacttcttcttttctcctttcccagttctttttcatgtatccaaaatgtatatgaaagctgaatcccgtgatctgctacgcaactgcaatgcttagtaaatttggaacttttttcatgtgtatggtaaataattagtggtgtgattctatacccctttattactgcttttgaattgttgtttcctggagtcatttcatgatgatttttgttttcttggtgctctggtatatcagatccaaattgatatcacttataatattttctctgattgtgcaggcatttgttctcaaataccttcttttctttccaga

SEQ ID NO: 5817 - DNA, 2075 bp, Manihot esculenta
  Intron number 5 from transcript cassava4.1_009644m (locus cassava4.1_009644m.g) derived from phytozome v7.0 (chr-ID scaffold02993; pos 26112 to 28186 reverse strand)
tgacaggatctccaccaccacttggtaagcattcatgctctctcactctctccctcccgcccatttagaagtgatagttagaaccatatttgtcaactcaagttttaaaatcatgaatttggtatgttgctggaagaaaatacattttgactataatttcgaaatcatcaacataaggatagtagtgttgctggaagaaaatacattttgagtgtgtcataagttcattaacagcttggggaaaatgaaataggaatttaaagtgcttatttgtgcgcaacagtaacaatcatttaattttgtttaccattaggtatgttgaaaccttttcctttaaatatttttttaattcattttccaattatttaggggaacctgaagggtgccttgcagagtaaaattaaagttaaattttgactataaaatctgtaggctcctaatagatgaataaggaaagaattaaataaataaactgattcctatctattcatttgattcagccttgattcaggcatatgtgtgatttggcctacagatttgaatttctacggcgaggaatctgtttggataatactatttgagttttattagaacataaaatttttgtttatgggtgcatattcaagtcaactgttgacgtccctttctcccccacctccaccttaaacaaggttaatgttttttgagaagcaatatgtgtaatctatggtcataagatcaaatgttcatctacaagtttttcttttctctgatgttgataagaaattgaaagcatctatcttttatctttcaaataacctttaagtttctgttagatttactttcatatttctggaatgcttaattgccaaaaaaattgaaacctttgtgaatgtttttaattttgtctggaccttttaatttttgcaatttggtcttcatcttaaaacttatttgcaattctaacctatgggtcaaaattgaaatttaaaaaaaaaaaatttgttgccaatttgaagataaaaaatgacagaattagttgcaagtccttccccatgcagtaatcatatatatatattatttattaaaattgataacttgttactttttttttctgatttttggccaattgagcgtaattaaatgacagaattagttgcaagtccttccccatgcagtaatcatatttttttaattaaaattgataatttttttttctaattttgaccaattgaagtgattgctactaagctttgaattcattgcagaaaggtgtggataaaattgcaaaatcagctgaaggttgggattttttttccataccattaggccttgttgaagactgcaacattatcttgttttaaactagtaggcgagacgcataatgcttgtgttattattactctaaaatttgaacggagatggaaataaaataattggaatatttgtactacaaaataaaatgagatcaacaatctcaaactgtttgagtgtgttgaagggttcatgataggttaaggtcaggaaattaaactgcttatcttatggaggaatcacttttccccttttaaaaatcttctcatgaatatttcactaataatggaatagggacaatgctcaacataattaatttaattcattttcctcagattttctcaacatagggttgtaaaattcccattggccattgctaatggaaaatttcactgagtaatgcatttttaactgctattgtcattaccttctttcttgtaacatcagattctccatatttgttaagatactttatgatgctgaatgtgcatggattgtatatacttttgagtaaatttttacaatagaaaggtgaactaatctcagaatgaggaattttttaggcaatagaaaggtgaactaatctcagaatgaggcaggtatagtcctttgtgttatgttacatcaattacaggttttttctttttgctttccttccattttatctgccatttttttgtatcatttactcattttgttggtctagaatagacaaagctgttttcttaaccctttggccgtttgtgatcaattcagatttgagtttggttccagaattggca

SEQ ID NO: 5818 - DNA, 1442 bp, Manihot esculenta
  Intron number 11 from transcript cassava4.1_000872m (locus cassava4.1_000872m.g) derived from phytozome v7.0 (chr-ID scaffold06591; pos 130114 to 131555)
cctatatcaataagagcctgcttacactaggaactgtaaggcctcatataccattgttattcatcggtgtataaatagctattaatttctatgcgatctaccttctaaagcctcaacattgcataaaaattatgctacttgttccacttttgaacccagattggacccgttgttagactacgtaaactaggaactcgttgccagtgttgttgaggtttaaccctttctaagtcaaaactagcattgagatggtcaaatggaaggttgaaatggtgaactggcctaaaacatggttcgaactgtttgcatctaacaatctgacaaatttcaacatgagaaattgaacatacatcctcacattagtggcaaggataggcatgccaccttcctacttgaccattgttgataatttttatcatttttctttttttatatcaagcaaaataactaaccaaaaaataatgtttatccatttctaaatagatattaaggatatatttgttaaaatagtagtagtagtaatcatgtttataaaaaataattgtctttcattgtttagaaaatgttaaaatcaaaagaatgctttccaatgatatttcaaaattgaacctaaaaatatcaaatgaaaggaaaaattatattgagtagaggcttttaagtttaatggttcattatatttggcattttaaaaaaaaaatgcttcggtaaatgttggaatttcaatctttaagaaagaaagaccagctcattcaacatatatatttatgggggttgaatgcattgataataaaactacaacaaaaacatacatgcatacttgcacatggttgatcctttgaccttctttctctattcttccatttgatgactaatttgggttttagaaatggtggttattcgtcaatctctagtttttagttttgcaatttgaaagcattaattttaaaacagattggacaagcttgtttcaaaacatatatggatatgtgcatgaatgtatcatgtctactgatattttcttccttgtaatcttcattctcatacatgaattcacataaaacccaaaacatgtaaataataggaaagccattcagcttttcattgttggtctattcactaatgggtcaatgtgaacatgtagatgcatcatttggggtgtgttgtgcattactaatatgttaatactttctcaatattatacatttaggatctaattttaaaactatatattattttcttaattgtttatgctggaatttgtttgaaacaatgaagtgataagcaatctaccggttgtttttgtaaatgtcctatgaagtaatctgttgaatctgacagtctaagtgagtttcctgtcataatttcatgatatgttgaattgttgatagacttaccttagatttggtacttgtgattttcataggttatttcaaagttgacag

SEQ ID NO: 5819 - DNA, 2584 bp, Manihot esculenta
  Intron number 4 from transcript cassava4.1_013212m (locus cassava4.1_013212m.g) derived from phytozome v7.0 (chr-ID scaffold00999; pos 358701 to 361284 reverse strand)
atagagctattgaagtaagtgttatttcttttgatgtagattctttaattctaaattttttgctggttataattcctttactctatccattcgttatagaacaataatttgttggatatattcttcacagagagataaattgtccggttgttgatacaaatataaacaatacaaaaatttgttacatggcttttgatacttgtttgcaactaattccataaattaataaacctcaacatatgcaatcaaagtaattaactcttctaaattttttatatgaattattaattatagtgatatttatacaacaaaaatataattggaaaatctcaacaacatttaaaccttaacaacgtaaagtcttaacagttgtcttcaaaattaaatcaaaattaattaacctcgttctcatcaataataaacttattatcttttaactatttagtgtaacttttgctttataaagtatatatattctacattcctggcatcttttgctgtaattttggattcatcgttaagtattttcattttgtctaactccttcgacaatttttttttctacaatttgaaggctatatttttttaaagactattgcagttttgaaacatactgatctctttattctcttcatccttttttctaatttctttttgctatatctgttttaaggtggtttgaattttgagacatgcagttgtctttatcatcatttttttatttgtaatttatggacatatttggtcttttagtacttgtttttattcttggctacttctatttcattggatattctcagctgactcctctcgacttggtgcccctagtttaagggaagtctttgttatttacttcttcgcttagtgtgtgtgtcttttttttttttctttttttacaagcaaactgaactacaaaaatcttcctttaattgccttgcttcaatcttgccttctacttttgtctaagttttttgtcattcttgattttttattcatctctatttttttttattgtgtagaatttctcaattgtgactctttatactttttttcctttcatctgcaatctctctaaaatttgcaagtcctttgagatatcaactttgataccactttgttgatttttgagaggataaaaagaagaataattaatactgaatattgtataattttattgaaaaatagcaaaatataaaccttaacaacttaaaatgtgacagttattatctgttttaaatcaaattaaaactaattaacctccttatcatcaatatttgcttattctcttgtaactacataggatacatagttttaagtgcttagttctcataatcggtttgatctttagtagtgcttttaatagctttattcaaactcatgcctaaaatatctatatgctattctaaatttagatgcaactgtggcacgtaaatcgtcagtggcctggtcctttatttgagcatcactgtgaaaatcaaagcacatcattgactcattcattcccttcgtatatattctgcaactagtatgagatgaaatgagaaaattcggttttgtcagtgttcatgtacttgatgccagagttaaaagctcaaatggcaaagtacagtattctcctggcaaaaaaatttcaagcacatgtctccttgtatcttatacatttcagtacctcttaaaaataaataaataaatataatttgcaatcatataattataccaaaatgtgaattaatataaatgcaattaaacttcgagtcttggactaattaacccattattctcatgaaaattcacaataatagttgtatatttgtgttgtacattatcttcatttatatcttaggcaaattaataatcaccaatcaactaaaacacacaagtaatgtttttatatatatacacgcacacacgtccacagactctttggcttcaataaataattaaataaagataagccttttaatagtattctatcatataaacattttggtaaagtctcgtatatcaaaacttacatagaatcggaaagaagatgagtttcagtggggcatatatatatatattgcatcacaatttgaaaaaatgctgaactttcaatgtgggggcacttgtccccactactatttttggtttttcaattctaagcacacctatgaaaatttgtggaatggtcttgtactgttattgtgaatattgttgtgggcactaggtgaatgagttggagtctatttggcttttaagctagctccaagttcccaagtagctatagcctgacaaggactaccgctgtcatctgacttgactgaaactttgcctacttgtttcgacaagtaagctccagcttatcaaattggctgttaaattatctaattgtggtggcaactcatcctaaacatgctggccgactccatgtatttctgtacatgttgctcggattttaaatttacaaataaatataatcatgcattaagattgtaatttcggctgccatgtttagttggtaacacattgtaaatggccaaaagcattattttactgatgttatccgttttaaatttatattaggtgtgtgcttcaattcagc

SEQ ID NO: 5820 - DNA, 1011 bp, Manihot esculenta
  Intron number 1 from transcript cassava4.1_006080m (locus cassava4.1_006080m.g) derived from phytozome v7.0 (chr-ID scaffold01551; pos 2901191 to 2902201)
gagagtataagaaggctgtcgccgactgtacaaaggtataaccattgcttgcatttacccaatggtttctactcatgtatgtcatattattagtttagtttttagtggttaatcggtgaatttgaagtgttctgtttacgtattaggtagtaatcatcgtgtgtggaactatggtgaggtgttgattgttagttagcacttcatatgttataacatattaggttgctactctcgtgtaataggttgcacttattaacagtagtagaattggttgggttggcatctacagaattttagaatcaatttccctttttaaaattttcaggtctgccctaaatttttctttccttttactattttctctctattttcttgacaggtttcctgtgtcttctcagttttcctagttaggcctaaagatatcatatcgtaaaattttgttaaatgtacatcaaaatccatgacttggttttggtttttaggctgtatattagtttagtttttaggttgtatagagaacataagaatcagctattgatgtgtattgtgtagctagaccattaaaaagaagcaatatcatgatcatcaaattaagcatgtaggatcttctagtttgcctatgatgtaagtcttcaagtaccctaatggtgtttatcttattttggtctatgacagcttttgcttggacctgtgtcatgtaactgtaaataaatcttgcagaacttgttacaatataaacaaataaatcctagtgaaggcaaagaaaatagttaagcattaaccatttgaaggtcagcaacttgcctagtggtacaacattcattgatgatgttgctctgcataacatgctgatcgacgagctaaataaatgtgctatggcttatattttgcctgttatggttttggaacctgtttccttcactctaataatatatcattttttccctcaatatccaactttctggagtaggaaatttattgtctttttcatgtttgggcaggtgcttgaac

SEQ ID NO: 5821 - DNA, 3764 bp, Manihot esculenta
  Intron number 2 from transcript cassava4.1_016233m (locus cassava4.1_016233m.g) derived from phytozome v7.0 (chr-ID scaffold03614; pos 3724631 to 3728394)
aaagtaagtttcattgacattttaaaatctaattgtttgccttgtccacaattgcactgcatgttgagtaatgttattgggacaggttattagtactaatttcacataattggtgacattatctaggttttagcttgttaacagttctgtgtgcatttgcttccctcaagctgttgctattgaacttttcaggctaggaaagatttagttaacatattcagtatgaatattgaattgagaaaattattatggggtctctgagatttaataaaattaactcccttataatttcaaaataaagctattagatccttccgttaaatattctattagtctattggtagaattattagtcaaatgagagagaacggtaagaaattacaaaattatcctcaaatccttttgccaaagaccctggcctttccccttttctctctcattcttctcctccggttccttctctttcatagtcctttttagcttctacacctccattgttgaacccttctcaacgatatgcttccatccataatgaagctcctccaattagtgttatcaagtgagaaaggaaaggaaaattgaaactaaagaatggaattgttagctgctaagtttttcaccgccgactatttgcaagccaatctattcccttctccattaatcataatttcccagcaaaagcaacaaagcccatatagaattttcatgaaaaaaaacccagtttgtttgagaaagaagagcgatggtctactcataatttttcatcaattacagcttccaaggccacaaattgctcaagttcatttgtcctcatgtcccaaaacttttagggtggtttgaagactgtcaaatctcatatcaaatagcattaaggtctcaaattgagaaatagatgaggctgaaacttgtatagagagctctgaatcttgtaaaattttgagtgatttctgaaaccattatttgacaaagcatagaagttgtaacaacccgggaaccggaccgttatcggcgctagggttcagatcaagcctattatacatcctgttacacctgatataatccatttatggtcacacgaacaacaaaaacacaatcattacatgaactaagactcgacctgtgcatgcattataactgaaaacataaaaccaatactaaaactcttatcaaatgctccagtatgatcaacataatgtgcctcaagctcggttcaaacataaacttatatttcaaaacttttacataaaaggatcatgaagcagggattacaaggaagaagccggacaaagcacaattctaatacataaattaatacatgtccacagttatactattacaatagactatactagcaacttagccgactttccaagctaactctgatcctgcaaatttggggttaggggagaggaataagctataagagcctagcgagcagaacataaaaaaaacagttcaataaaatatatgattgtatgaatgtgtcacaacacaagcaattcacatcaagatggacttgtcactagtaaccctctacagatttcaatagtgcccagcctacgacgggtgctcctcaggacttcctcttaaacataagataacatatccatagtgccaggggcgtagaatgagtctcgacctggactttcttttacatattgccagaggcgtagaatacgcctcgacttgggcttccgtatccatcataacatatcataacatattcgagggctagtgagtcatccaacatccatctacaataccaataaattatataatgcatcatattcgtgaattttaatataaaataacctaattacatatacattgcattcgtagtgcatgaacattcttaaaaagtttgatttctttaaataatgattcagtttagttctactcacctttggctgacgcttgcctaatactgaagcagttatctcactacaagtctctacggtttcccaagtcggatcctacatagatggagttaaatgaggggccaaacataacttttacaacgcttataacaaccccccaagaataaacatacacgaacacacataggaaatgagctagaaaaggctgggcaggggactttcggcagcaagttcggcggccgaaggtctttcacagattcgaaggtcaaaaccttcagggccaggttagatggccaaatggctgcctccacaggcagtttcggtggccgaacctggattctccagtaaagtagaactcgattctgtcctatgcctaatattgaagcagttatctcactgcaagtctctacggtctcccaagtccgatcctacacaaatggactcaaatgaggggccaaacataacttttacaacgcttaaaacaaccctcaagaaacctctataaacatacaagaatacacgtagaaaatgagctggaaaaggctggacagatgacttttggctgcaagttctgcggccgaaggtcttttacaaatccgaaggtcaaaaccttcagggccaggttagatggccaaatggatgcctccacaggcaagttcggcggccgaatctagattctccagtaaggcagaactcgattctgccctatgctcacagccaagaaacaactcaaacttgcatgcaacaacctaaagactaccacatacacttaacacgcataagggacctcaaaaactgtcctaaactcaacatgcatcaacaatatcccaagagaaaatcatccatcatcaaaactaactcaaactttaaaactttagaataatcaatcatgcatgccctaacgacttgtaatattggtttaaaaccttcagaaaacataagaaagcaaggattgaacttacatttttggagacacgtgacaacaaccaagatttggagaaaaaggtagccaatctccgaaaggtctccaaaagctaaacttgaaattcaactcaaatcttaaaaaatgaagtaaaaactcgtgaattctttaagagatttgaagaaactccataaaaacattaaggagagtgcatggctcacctctgcccgaaaatggagaaagagttctcacattttcgggttgaaagccttttataggtggctagaggagccactttcggcggctgaacttgaagatttggcggccgaaccttcaaacccctctaaaacttttttcttttacgcgtttaaaaatgcttcaaaattattttataaaagccctattttactcctctaaagatttcagtttcgagattctagattccaacggaaatttcgtcggaaagttggaattccgacaccgaaatgtagccgagtattacaaaagtaagcttaaattctttctcgattctctctttgattgtttgggagccttgctgattgtaaaatttttctattagataagatgtttttgtttggttgctgagaaattggaagaaagattgatgcaggcattgaatcattgctaggggttagaaggagtgaaacaccgcaaattgaaggagggacaaaggctatttcagacaatttacataaaattaacggtaaaaattagcagtctttgacggaaggatgtagcagctctattctaaatttacgagggatatattaattggagtttcgaagtataaagacttagtagttaattttactaaaattcagaccctatagtaatttttcctaatgaatttcatatgcccttttctatcattaatcttgcagctgtggctaatttgattcttggctttttgaatgcagaggaatttagttgtgacattgaacctg

SEQ ID NO: 5822 - DNA, 1573 bp, Manihot esculenta
  Intron number 10 from transcript cassava4.1_010325m (locus cassava4.1_010325m.g) derived from phytozome v7.0 (chr-ID scaffold03942; pos 148894 to 150466 reverse strand)
acacaaactcaagggccaagctttttccttacctggtatggttacgtgatcacctttaacttatgttgtgcatatgtgcctttcctgttctaaggactgcttattttttaaaaaaataataataacttgttatggtcctggatcatggatcacatcatgggataatgtatagggaatgagctccttggagggcgctcttaatacctcaagactcaagaaaggagagtctcaatctcacaattttgtgaataaaatccgcttgttttatttaataaagtagaagtctaatataagcaatcattagataagcaattactagtataaggtaatggaaaatcagataagaaactactggataaataaaatatgtttgttatggatttggtttttccattattcataactgttgccaactagtgtgcaaaagtgggttacattatgtagattctgctaaattgagacttcctttcattcacataaactaacctgcagaccaaaatatggagttttcagccatctgtcactcataatggcaagattaccatgcgttccttatatgctctccttaatctaggatcttaggaaattatataaataccattacccaaacatgagctcactaaaatggttctgtaagtcctatccttcaaatattgttgtcaaagctcaacctgcatccttgcaattgcaacatgaaatgtttactagttgttccaagtaacagcccctagattaaagaaacaaataaatatgaacttgaacacgtttgagatgtctctcagaaaatcagtttatgtaaattcaaatcaaaggtctaggggtctaggctggctgccaaattcactataatcattgttactgagtagggagtaggcacatacatgaaaatttgttataaaccatagaaagaaatatgaaatttatcagataatgcataaaagttactttttaggttagttcatttgtttcccttgtgtaatatccctctttcatcgtgaataactttttgggagatttactatttaatgtctgagtatcgtcattattaacaaattagtttttcggtatctttctctccatcaatgaaatagtctttctattcaattttgtctatttctggtattaaaaatatagtaaaaaatcaaattaccctttcttcttcgcatgaggaggaggcatgaggaggaggagaaggactggaggaaaaggaggaggaggttttagtaggtttctgaatgcagggactagcttgttaatcatgacaatacctagagactaaataaaggcaagaggaaggaatgactatttcgttgatggagagaaataatgacgttttaataggttttgaaaatgtagagactgatttattaatgatggcaatatccagggactaaatagtaaatctattcaacttttttggcatctgaaatctgtctttttttgcttgtatgtcttgttctgattgccagcatgcattctctatctataatatatgacggataaggtacaatgggaaacttatgttctgttgtatgggcttgtgaaataattgacctctcattatgtgtgacag

SEQ ID NO: 5823 - DNA, 2609 bp, Manihot esculenta
  Intron number 6 from transcript cassava4.1_016083m (locus cassava4.1_016083m.g) derived from phytozome v7.0 (chr-ID scaffold07290; pos 320434 to 323042)
atttggagaatacgggattcattgagcgccaagaggtaagatgagaatcattttatttggctttatgataatccaaatgcttatagctaggcttgggtggagctacttattggggagtgggggtcaatttactgcactcaatcttccttaaaaaaaatctcatacacattgccgcacaaagataaaactgcatctacagattgacccccctcatttttttttaaaatttatcatatatgtatagaattattataaatccttatcaacagatgcgtgttttccatatatgtgaatatatatatatatatatatatacttttgccagctgaaagcaaaaaatgaaaaaaaaaatttgtgcaataataaatcattaattgagaagaaaataacaatgtatttaaatttttaatatataataacaatttagtagaaattattataaattaattttttttggtattgtaaatttaaaattatagtgggaattttattatttaatgattttttagtagataattatcaaatattgaaaattaacatacattattatgttttttctctatggataattatcattgtatatactgttactttgaattgaacagaataaaattttttgaccccaattgctcaaattcctagccctgcatctgtaggtaagtgaataaacttagtttgtgcattaagcttttggttatagtcaagaaccctaagtgacagtggtgttgcaaaggaacttgtagattgtacccagtgttgttgttttcttttttcctccatatttgcattccagttggaatttctcaagctgtaaaatataagtttctctgccaacttttgttggagtcattcttaatatacaactaaaaaagaatgaaaggaaaagcaattggtttctgtaaatacaactagcatttggaggtgggttcaggcatatgacaagacaaaatgattggtttttgctggattccctaccaacattcagttggtgttatgtccttttgttggctttcccacagtttctccatctatatagtgaaactctggtcccatacaactcacaacaaacttttcttgaaagtacctgtttttgatgagaatttgttgggttactttgtaccatgcatctctttttttggttgttgtaataaagttaaatgactgaattagagaattggacccatttgtggtgttgctgcctccctttacccttgtctttgtgatctgtgagcttaattcgggtataagtgtggagtggattggcttgggtttgttcatgagtagatttcttaccaggcagaagatagaaaatggcagatctggttgttgataatatccctctccccatttctacatatgcatttctaaacgaaaaatggcggttgcctactaaactacgccatgcttttcaattaattggatttcattgtgtctagatcataatgggttttcccattgatttttcatctcttattcatatctatactcccaagtcctaacttcattttgtgcctaaatctgtaatgaaaacagtcagattgtaagcgtatgcattatttgcacccccccccccccccccagcccccacactagttggggtgttgttttcttgtacaagaggctactagaataaatgattatgaaaaaagaaggggggatgtattaagaggagtacaggctagcaatttggccataatatagtaaaattttataatatatcacatttagaaataaaataaaatttatttaattaaatatttaattgaattattatcaataataaatcatatagtttttttattactttttagtttacatataatttatactatatatgaaaataagaggagtagcaaataatatctaacataatttattataaatcaccttaattttgattaattaaataataataaataagtttactattctgtaaaatttttttatttaaaactaattgtaaaatatgatatgatttatcggtcgcaatatttgtaatctatagattagattagatcaatcccatctgattttccatcttaaaatcagagaggatgataaagtttttatctttataccacttttatatataaataccgcaaaaagaaaatgaattattgaggatgagtagatcataacacatgaatttggaaaaatagtcctcaccatcaaaaatatttcaagacaggaaaagaggactatatatcgccacacaatattaagaaaaatgctccattctatatatatatctcatatgttaattataatattacatctttcttggttattcttttctaagagttgggatggaagtatgattatttttctctattttggtttatatttttatgaatttcattgttataaattggtttatgtatattatgatctttataataaaaatataaacattaaagtatttttataatataattttattttatatttaaaagtaaggaaacaagtataaaaacgtccaaaacagataatactagtttaagaaaaaggagcagaacatctttcagatttgtttcatttatttgatttttctttaattaaaaaatctccgcaggcatcttcattgtatgtgattttggcaggttaagcaa

SEQ ID NO: 5824 - DNA, 2027 bp, Manihot esculenta
  Intron number 11 from transcript cassava4.1_005979m (locus cassava4.1_005979m.g) derived from phytozome v7.0 (chr-ID scaffold00206; pos 412453 to 414479)
cttttggtatgcaatttgattctgaattagtcaaatgttaattattgtcttcctctctagttgctatatttatgtttatgtgaaaacattctttagatggagttccttaaaaaaaaaaaaatcattgaggatatgattattttaattttttttttcttactcatactttatgtttaaccttgatttcttattaaaatatctacacatggatgaatagctgaactggtgaaatctctatgcttacctaatatctgcatcaaatattactttgtagttcaatttcaggcctaggatacatcataagctttagggttggtaattaatatgctggcattgtcaatgagaatcaagctaaattccttttggaaaataagatattctgtgaactctagtttgcaccagtccaatgtggtggactggagactggttagtcagatgggtgaaacaattcctttatccccattcttcacttgtgttgtgaaaatggggaaggcaatggattgagatataattgcaagaatcctttctgtaaccttttagtgagctttgaagttgcttgtgaggttggatctttactgtttttggatatggctgaaaatggactgaaaggtttcaagatccatatatactaactcaacattttgggccagacctaactcacctcaaaagctagctcaagagggaagagtgcctatggcccatataaggggcacattgcccctttccacaaccgatgtgggattcaacacactctctcatgcccagaatttttactggtgcgtgacacatttgtggaaagtccaacatcagatggaaggctctgataccatgttaaatttgggatagacctaactcacccaggagtgcctatggcgtatataaggggcacattaccccgttctacaaccgatgtgggattcaacacaccccttcacgcccagaattttattagtgcgtgacacatttataggaggcccaacatcggatgtggaggctttgataccatgttaaatttgggccaggtctaactcacatcaaaagctagctcaagagggaggagtgcttatggcccatataaagggcacgttgccccttatgtgagattcaacagtttgaaaacataaaagatttaagaattcagactttaccttttgatattcagtgttggatacttagcctttaatgaagggaaaccggattaaccatccaaacattattcattgatattaggataacatgactgcactatatagttgtcttagttcatgccattaaactgatctcacatattcaatatctgaagatataatctgtaattatggaattctaatgcacaccactgcagcaaagatcagaagtaaaatattttaggaaacgcaacctctttgttttataggtcaagttctagaaaagaattcacgtgtaaccttcctgcaaggctacaagaagcaagtcaaacaacagtttatgaggactggaaattagtgtatgaaaatctaaattaaactggacttagattttggacaagtcttcaggattatatcctggttatgatggtaatgggtgaccttatgtacaaataccaaagtacgctcatgaagtggtcagaaaataggataaataaagaatatcagttgtttaatgctaatagtaaatacacttatatgtgaagtgaaatgaaagtcaatttttttttcattgcaaggtaccatttcttgttgaaagaatatccaagtgggcttgtgttaatgttgagttccttatttctgcatatgtttgtacttctctaaaatgtaaatataaagaaattaaatttttataaaccattttaatgtttgcagatctcaaagggagtatatgccatccattgattctatattcaatattagatcttattcccccccccccccctttcttttgatgttttgtcctggtgatatttaagggtatggtatattcatgtgaattaaggttggtcaataatttgtgcaggtggttctggggcagattatcctaccaatcggcct

SEQ ID NO: 5825 - DNA, 1216 bp, Manihot esculenta
  Intron number 2 from transcript cassava4.1_015023m (locus cassava4.1_015023m.g) derived from phytozome v7.0 (chr-ID scaffold08315; pos 38108 to 39323)
ggaggtggaaaaggtatttttaaataagaaaaggaaagaattttgtgggtttttcttggttagatggtttaatttttttgtcttaatcaagaaccaagataattacgaagctgcttccagaaaggcaattctgctttcaataaaagttttgaaatgagttctgttcatacacattgaaaagggttgttttagtttatatatgctgcttggttccatttgcatggtacaatgtggtttacatttgtaaaatgtgtgaataacaacggtactcttatgtgttaaggtttctgaagtttgagcaaactagcagtggaagctttacatgctcttcttggagtgaatgaaagatgaccaatgctgcaattagagaatactagagatattatttctggtttaaagtggcatttgtaggataattatcttgctttatttcatttctgtggccgttagtattgagattttgggtcgagatctttgtttttgtgttgcaaattgcaaatattataaattacatgtttatgtttcaactcctagaccaactgtaatattctttgtttctttcatgtgcttttcatctttatcgttgtcattctgtttggactagtaagtgatatatcctatttatttcgccaccaatgtgctgttaaatattgatacttagtttatgtgtgaccttgttgtcatgtcaaaatcactatgaaagctctaattcagacacttattttcctgaaaacttcagcatatataagtgcatcatggtagaatgtaaatatgtaagatgaatttgcatggtgccctttggtggttgtactactattcttgcaaagcagttttttgtttctattgccctcagattttttagtattttatttaaggccttgtgtttttatattttaacttatgtcttctttccatttctctatcacgcttcaccaattgaactaaatatttctgagtcatatatgctataactagttgggtagactattttgagttggggacttggggtgtttctggttcagccttgctgttttgacaaaaaaaaatcctaatcatcaatgtgtctaaacatttaatgcaaaagaatattattactgtttatcatgattattttagaccatatgatattatctccataacatatgtctccaaattagtgcactcgatattctgcatttacagatgtttgacaaattctctttaatggtagctgctg

SEQ ID NO: 5826 - DNA, 798 bp, Manihot esculenta
  Intron number 7 from transcript cassava4.1_025065m (locus cassava4.1_025065m.g) derived from phytozome v7.0 (chr-ID scaffold00069; pos 249736 to 250533 reverse strand)
ctcacactgatacaagggaagagaaattgcataaggtaagctttcacaggattggattgtagtttttcacattctctttctctcttcacccttgatttaggttttcttttaaatgttgtaaaatttaaatttgtatttaggacaccatggggttgatttggtagttggtttagttagttaattggttgaattaaccaaattaagactcaaaatatctagcaggtgtgatttaccaaataagtatctatcgtagaaaagtcgtgtaaattagatagaattgttgaatcccacaccagtttgggaaaggggtaatgtgtcggccataatcactcctccccttgagctagtgagttaggtctgacccaaatttaacaagaataataagcatgataatagtgtaagattcacttctgtcaagaaagtctcccatcttctggggtttgaatgtattgcacaggtcaatggaaagtataattgctggaatgtcctttaatcaagattctgtggaattgagatgttatattgattgatatagacaaatattacttcaaatcctcattgtgcttggactaagatcccttgtttatttggctagtagactcactagaatattatatatatcttaatacagaataaacaactgcagtttaatatccatctttgcatgattattaaatgtcatttgaacctttcttcctaccttttgcttaattcttttactgagactagacctgacagaagttaataataataataataataacaactgctcattcctgcagatacctgcagaccaat

SEQ ID NO: 5827 - DNA, 4697 bp, Manihot esculenta
  Intron number 1 from transcript cassava4.1_027464m (locus cassava4.1_027464m.g) derived from phytozome v7.0 (chr-ID scaffold08924; pos 237674 to 242370)
caaagataattgttaatgtaagtattgcctatgatgggatgtagattaatgtctgaaaatatttcaatctggattaatgacatgctgctcttgtttattttctatcgtcgatttagatgtaaactctgaatgagatctgaatctgtaattgataagaaggctcagaatcaagcagagagaattgggaaaccttttaaggtttattctagaagacctaaagggcaggcgaagggcaaaggaatatttgggtctctgatagttattattgttgtggaaagtaaggagaaagagacacctgtcaataattagttatttcctaaaagattctatgacagctcgaatatttaaggaaaaagaggagaggacaagggcatctttctggtgagggattaagagcaggggagagatactcagctgtgaagagcttggtctctaggaggcatttcagcattggtttctttcatgtgtttcttttttctagtttgttccttattttgttttgagtctcttgtctgattgtgattgggtgagttatataatcaaaattttagcagaacttaatcgagggggagtcctgttttattggcttctattggttttcctctattagaagtgcattcttagtcctcttactctattagtactggtaactcattgcttcaatttagaattttcaatactagctgtgtcattgccagtcactggatctgctaaacaaagctgtcaccataacacctccaattcactttcagaggctatattccaccactagtttttgtactttggtggggtgggggtgtaggggaggaattccagacttgtatgcttttctgaaatgttttttgtagaatgagttgcaatcatcaatttctgctttccatttatgggcacattccttcaattccaagtgttctgtagtgtaatgtgagagttcaacttatattcacatggataatggagaatatctgtctagtgtatgtgcacaaacatgcacatttggaaatgctgacacactttggttgtgtttggaaccatcataaaattgaaatgaaggccaagcttttcgcaagttggaaaaaggagtaggtttgtaattttagaaggttaaattgaattcagtttactagaatgcaccagtcatctgttctcggaagaagcgcagaaaggacaggggagggagctatgggaatgctgttttactattttaaattttcattactttgtgttgtttgctcaaaatctagtgaaaagtacacagatataaggagtgagtattcggtcggtttggtttaaaaccgaactgaaaactaaaatttaaatttttgtgaaaattgaaccgaaccgaattaggagacaaccgacttgaatcaaaccggtctgattcgattcagttcggctctgtccgttgaaccttttaacaaactttttattttttacaccttatttttaatattcaaaaatttaattgaagcattttaactttgtttagggtctaaactccctatattatcaaaaggatgtagtgttttaacaaatcggttagatttgattttgtcaaattttttttcaaacaaaattaaactgaatcgaaataatcaaattttttgaaactcaactgaacagaaccatatcgaaaaagatcataaaattgaactaaaattttgaattaatttgattcggtcggttatttcagattgaaccaaatactgcccacccctagatataagggaaaatgttgtattgttaagaacttcatgttttcctttccaagggcatggagagtttgagaaaaccaggatacaactcatgttcattgatgtaggttaaatgaacccgaaaattggagagttaaagtagtttgattaggtcataaaactcattggccattttgtatcatttaatgtatagatgttcattttaggttcttctatattaatccaagttattcatactcaaaagattgtcctattgtggagtttttggctgtgtgaatttaattatacatgggaacttatgagataaggcttaggtgattgtgtttctcgtatttactggtcccaacaatttcctaccatccccttttctttttaatttttttttctttaggaaaaccacaatagagtgaacaagatttaactgatataaattttatggaagacatccaaaatttactaaagcaatttatagggatcttatgatttttcttcattttagcttacctcaactccactcaagttggcaattattttagtcctgagctagttcatttcttgctctatggatatatttttttctgttctttcagtttagctaataccttcacaaagatgtagcgtggttaatcctcccttgctgctcccttcctgtcctaggtctctttaatgggcataaactttgtatagcatttggtttacgatacatgtgtgctgaccatctaaatcctggtttcaattaattacttatatcatactgatttgatacaaacaggaatgtagtatgggctcttatttcgtactttttccctgaaattcccactaatctggacaccatattccatgttttctttagtcttcttcaacctaaatcttgcaaaagagcatatttaggccttttgtagtttgttaatattgtcccattgacaaggataaggcaaatgtgcttcataaggacttggcaattcttcccctgcaaggtgtcttttacggtagagctaggtccgttctactttactgttatagattataggaagtaaatattgatagatggattagttgcttaattttagagattctataatcatagacttagttaccttcctgtttagataccgtcttttatatataaataggttgtaatctttattatgaaatacaataataaaatattatatttctacatggtatcagagccaggttcgtagagatttattttttttctctctcgtcaagtcttaaatttttggagattcaggactcctgttcttttgtgttatccatttaggataatatttgtctctcaccgttcacctaaagaggatgccaaagtcgccttacatttggagacctagggtaacatttggagacttaggctctattcatttgggttactcataaatggtaacatttggagacctagggctctgttcatttgagttactcataaagggtaacatttggagacttagggctctgttcatttgggttactcataaagggtaacatttggagacctagggctctgctcatttggttatccacaaagggtaacatttggagacttaggactctgttcatttgtgttactcataaaggataatagttggagacttagggctctgttcatttggttatccataaagggtaacatttggagacttaggactctgttcatcaggtattgttcacggaaattatttatcgggtgctgttcacgagtactgttcatcgggtactgttcacgagtactgttcatcggatactattcacaagtcaggagtactgttcatcgaatactgttcacggattcgaaattatattcacagtaaggtgattagtcttattaatcattctgaatttgtttaaaaaaaattaatggagcatttggaatttctatattctggcaaagggaatatttctcgtatttatgatgtgtgtaaggcgttttaccaagctgagaaaatgtggtctcccgttctagtgttgaacttgaatgtcgagtcatggcaaaaaccgtttatgaagttttgtggatacgtcaattattggaagaatttgggttcacaaattcggtgtctactaagttgtatgggacgagttgattatatatgtaacaagttgggtatgattaacatttatgctccaacttgagggggagtgttatagattataggaagtaaatatattaatataggaagtaaatattgatagatggattagttgcttgattttagagattctataatcatagacttatttacctttctgtttagataccttcttttatatataaataggttgtaatctttattatgaaatacaataataaaatattatatttctacatttacaaaacatgatatcatagtctaccatatcttgatattaggccaccaaaaatgttcagtcctgcgaactttacactacaatctagtattgggcatgagggatttcccacattgaccgtgtagaaggaaaatatgtttcatgtaagacttgggtaatcctctccctacaaggtatattttttgtggagttgagtgcaatcaattttatcaatagttattattgcttctgcaagtttattgtacgaatatttggttttactggtgctagcattagtgtaattgtagtggtaatgttattagtggttaggtggcatcaatggcctttttgcgactagttggaattattcaatttcatagatgctccttgacttgatacttcagtagagcactctggccaactgtaggcaacattgatcttttcatagttagttgctttcatctttcttattgtttaaccaattagttgcaaaaggtggattttcgaaataattatgttgtttgatagaaatgtaatgaagtggatgacatgagtgatgatgatggtgcttttttctaatggataaagaatctatatataaatagaagatttgaatatgcagattccagcagtttattggtggtacaagaccagtag

SEQ ID NO: 5828 - DNA, 1674 bp, Manihot esculenta
  Intron number 6 from transcript cassava4.1_001768m (locus cassava4.1_001768m.g) derived from phytozome v7.0 (chr-ID scaffold04251; pos 562518 to 564191 reverse strand)
catttgaacatctaattaatcttcgtcaggttagtgtgcctatatcttggtttttctctcactgattccagtgttgtgttagcaatatggtaaaagtatggatatctaagtgagttgtataacttgtgatacaaatgatataatttatggtaaaacatgttaaagtggtcagaattagacataaaatctgatttaaatgatggatagttattcattctgttgttattgattgtaatggagtcttccttagctaatgttaaagcagactcttgaataatgttaatgtgagtcaccttttcaaagttgtttatattcctgtaaccttgtcggcaagagtgtcatattgctggactacatagtaatgcaatgagcaattgagagagccgtctacacttgcttttttggttggctggaatccaagaaaatgagaattgcaggtattgctttggaagttgatgtttcagcttatagtgtgataggcatttggaaaatctaggtttgaaaaggccaaaagtagatgaacatctttggaagtaggttgctagaatctaaatttgcgcaggaaaaggagagaggtcaagtttgagtttggttgatggataatataaaggggatggcttaagtctaatattttcaaaattggagtttttgctttttttgacttccgagaaatctaaaaaatcgatgatttagcaattatagtcttcagttttctggtgtttagattctttttttttttttaaaaatgtctgcatgctccaagtgttgcagaaaaaaaatttgatgagcagacaactgctaagagtcttgatagccactaaacaggtgattactgaaattgctgctctaaacaagctgctaaatgttgcccttggactatggagttttaacttcactttttatcttccaaacgggtctcatctttgcaaaaatatcaccataatattggtggatgtcatttatgtttgtagataatatgaagattgtatacaatttactaatttcactggattgatatttcatttttagagtgcaagtcatcaattcaagtaagttagtagcttgtgattctgccgtacattagttacaacctgatcccttttgcacgcttctacatccttgtggaaaattgtgcattttgtgtgcatacatgttagattgtaaccttgctttcgtttgctgacataaagaactgtgatttgcagtattcctttttaatgctgttccctttgcatattttgaagaatttgattccttcaacagaaaaaaattcaaatgcttgtatccttatatgaataattggaattgaactttcctccttccttgtcctgaaagaaacataatatgcattctcttgatatttaaaaattttaaaagaaaagttactacttcacctgtatatcatttgcgtgcacatgtcttgtgctcttagaagtttatctgctacttgccaaaatactgttgatttgagcaactgttagtcaatgtctaaagcatgcagtataaggaattgttaatccaaatagttgatgtcaatatcaggtaatgcttctgggtcagccagttggcactgctgattctgtgatattattctcgagtttcctggctaagaatttcatttttcccctccctttaatagaaccgaccggcagagttgattgcaaagtttctgga

SEQ ID NO: 5829 - DNA, 2955 bp, Manihot esculenta
  Intron number 2 from transcript cassava4.1_026650m (locus cassava4.1_026650m.g) derived from phytozome v7.0 (chr-ID scaffold04796; pos 364366 to 367320 reverse strand)
caactagtcgaaccaggcaatttgtgagtaaaatgttcttctattttgcaccctttataacgctgcagtaactgttgcacattgcttgaatggtatttgcctgtttggaacaattcctttcactctgaataggggcgaactgactttctaaataatagttactggaaattttgtgtatcatttatacttgaatcagataattaacttctgaataacctctacaatatctgaaatcaaacagtaatggtatccagtaaaaaaaaagaacttagctttgattcatgtatggaagctgcttcttatttgaaaagaaacccaacaatatccaatgtccatattaaatttattaggtgaaatgttttgcttctctaaaaagctcttcaaactgtgatgtcattgcataaataaatatatgaataattaacaaattgataagttgtatttattaaaacatttctgatttgccatccatttacttagtacactgaacttccctgtcatattgctttggaaactattagaacatttattaaatttattaggtgaaatgttctgcttctctaaaaaacttttcagactgtgatgtcattgcataaataaatatatgaataattaataaattaataagctgtctcttcatactgtgatgtcattgcataaataaatatatgaataattaacaaattaataagctgtatttattaaaaatctctgatttgccatccatttacttagtatactcaacttccctgccatattactttggaaactagtacaacatcaaaaattttggaaaattttagaatattcttatattttactcttgatatttatgaattataactaaacaaaaagcaaataattaaataataactacaaagataattaaaaatcctaatcaaatcaaatcatatccctaaattcaacaaataagtcaatacttccccttaagttggtgtatagatgtcgcacatatgcaacttgcaaatcagattatggtagactttattgttgaactctttagcaaacacatccacaagttacccaatataagtcacatgaactaaactcaaaacaccgtcggttaattttctttaatgaagtgccgaacaatcttaatatattttgttcggtcatgttggactgaattttatgctatactgatgatagttttgttgtcacaatgcaaagttattttatttctctcaggcaacctcagctcctccaataacttctgcaaccataaaagttcatacacaccttgggccattgtctccttaaaggcttcctccacagtttctactaaattagcttgagttctagaggtacctcatttcttcccacggcctctagtgggacgttcatataacttccaacaagtcttattggtatacctcgatttcccacaatagtcacaatgcaaatgatctttcttagaattaggagattgcggtgtgctcaaactagtagccaacctagccctttcaactggtgcagtatagagtatagcatatcgatgactttcctcttattgaatatgggcgtaggcctcttctagaaaaggaaatgatttcttcccaacacttggatccaaattggattatattcattattcaacccaacaagaaaatcataaatctactcattttcaattattctccgaaatttgactgcatctccagtgcagtctgcctggaagtcctaatagtaatcaagttcctatcataagccacataactcagaataaaattgagagatagtcatttctccttacttagtactatggattttattttgaatatcataaatttgagtatcattcccaatcttagaataagttaaagataaggccttccatagttttgcagcagtatcaattaataaataggatttagagatatgagtttgcatagagttaagtaaccatgtcataataaaataattattcgagtcccattgggaaaaatctggaccactctcatcctgttgcttcttattaccagtgatataaccttgtagtcctctagccttgataaacaacaaacaagacattgaccaagtaagataattggttctatcaagttttacgggactaatttccaaggaaggattagtaaagttaggaatcgagacatttttatcttctgccatcgaaactcttttaccttctgccataggaaagacaaatgatccgtgaaaaaataagaggtatccaaaattgtacacacgaaagggcccaactgaatcaccaaaaaattggatagcggcacggaaaaatgtaaagacggttgaaatcatcatcggagtgatcggataagtaaagcagcgttgggcgactatcacacactaagaagggagagcgcgtgagcctcacacgttggtttttctagcattggagctgggcagttgggctggcaacggtccaacgattctcctgatattggcggtgcgaggtgaaaagacttctagatgggttagtaccaaaatggtagatctaggatttcaaaactctaaagacaaaaaattgaatttaaactactaaaataaaaaaaaaaactactaataccatgaaaaattttaaaaaattttagaatatttttatatttcgctcttaatttttataattggtttaccttaactatttatacacaaaaaatcataactaaacaataagcaaataatcaaataatagtataattaaagattttaatcaaatcaaatcaaatcatatccgtaaaattaacaaataaatcaataaacataatgctcgttgtttctcaattgttgttactttaaaattaatgacgcatttaggtactcgtcatgcaatttttttcttaataatttgatttttatgtgacttgattttttttccaaactcttaagttatcttgagttgctggtgtttatggtatttcagagagatactatccaagctgcatcaaatttcgcaca

SEQ ID NO: 5830 - DNA, 504 bp, Manihot esculenta
  Intron number 1 from transcript cassava4.1_020736m (locus cassava4.1_020736m.g) derived from phytozome v7.0 (chr-ID scaffold02969; pos 38055 to 38558 reverse strand)
catgtatttttctctcttttttttagatatattaaatttgattttggtctgttagaacttcgaaaactgatgtcaatttaagcgtttgatgatattaaattattttctgtttaagatagattcgccgttgagttgcgggctctttagggtttcagatgggtattttattttatttctttttaattcttagggatttctttatattttaaagttttaccatttttgatcgttggctatgttgatagtctgtttggctcttgggaaattttacaattgttgatagtcggctatgttgattttctgcttggctaggggaaaatattgggtattctgtggagtcggaaattggaatctcatatgtagacatcaactttcagagtttgttttggcatttcgatttaattcttttgtgatacgtacaggagttgttccctcttctaattgttatgtttttgggttattttcattagtagtgtacatgtttgaatacagcggttggagatt

SEQ ID NO: 5831 - DNA, 4371 bp, Manihot esculenta
  Intron number 6 from transcript cassava4.1_013827m (locus cassava4.1_013827m.g) derived from phytozome v7.0 (chr-ID scaffold00421; pos 20763 to 25133)
agggtactgatttttattctcttacaatcatatattctttgttctaaaattggttactgtttttgttttctcttacaattatatattctttgttctaaatttgttttgtgtgattcaaataatggaataacccttcaatagcttttctacatcaaccagatttaaatatttggcctggaaacttatggaaagctagtcataagagactcaagaaacaacctaacatacaaaagccactctaaaagctgagaaactacctccagaaaatgaactatattgatctatcaattagctcatgatatggcgagctaattatatattagctcatgatgtggtgagctaattataaattagagcaataaaatggtagtttggaagtgttttggagtttggaagagatagcttcatgcttccatctttcttttttatagccagagctgtggtagttaaagcctcattttattgacatcttcctaaagtttttcttcctttagcagctctccgcatttgaaaccttgagctaattataatattcacctattgggttttatgcttaattcttgaacaaagaatgcacaaagattgtatgtgcttctgtttgcattctcagcaactttcatgtgagtgctcttttttttctgcttgagttttttaactaaacttttttttttttttaacgaactacagctgttctaccatatctcaactatctgctaatttgccgagttcatatgtcatttaatcttccattttgacagaatctatggatttgccaaactgactcgatgatcttttcacgtattcagtcagcctatgtagacaacactgataacaacactgtcaaatcagactaactggtcaactttacatgaatgcatgtgtatctttggatacttcttaactactatgattcatttccatgcatatactatgctattctttcgtaacattcagctttaatattgacatgcatgggtaaattattctatgattggcacattaacaattaataagatgggttctttgatttttatttgttggttatgtgttgaaatgaggcaataaaaaaaaatctaaccatccaattttaccttttttctgatatattatatttttatggttgagagcaccacttcactctaatgatatggtgcaccaggcttataatataaatggaattagattatttgcattcccataatttgactatactccattcactgtatgctatacttgtgaagttcttataaataaaaggcaagaggttagaatgttaagtaccacttgtgtttgctggctatgcttttcatgaagattctgtcacatacaggaagattaggagggtagttattttggagggaaaagtagttcaatagttagaaaaacaattacagatgttggaaacagttacccagagttgcataaaaacagaaacacttacctatagagattcaaacatttacctattggagattcattcaatgatcaataacaaaacacatctctcattctctggttctttcccttctctctggcgccactttctcatctctttcctcctcctgattctttttggtactgtttctctctattctctggttatagctactgtaatctacttccatgacagtggtatcagagctctgcttgaggatgggctttgcttcatggttttaaataaaggtcattatttgtaggtttttgacccttccattacccttacacccatcatttaaagggtgagaaaattttttcctgtaacggcttttatataatggtaatggccattgtttaccatcaagtaatggtaacagtctgttaccttatcttttttaggccatattgggcaacaactcatttttttcctagattgggaagttctatgctgttgtattacttttctcaaatttccatcgaaagttaactatctatctataaatgtcttacttcttttcacttaagatcatcaactatctttctaattctatacatttataccttataaaatttgagttatttatctttgttttttggcattgtttttacttatttaataaagaaaataatgttggatgccaaatcctttttgtcaaatttacagtatgaagaattattctttactatttatattctctatattgttattttagctataaattaaatattattaaagatgtctaacaacgatgggttggatgtctttatttgatgtgttaatgcttatctttaaatatctcttcatttcatgagttttgcaaattttttaagaaaatcttcatagcgataggccgttattgttacattactgtcattaaaggcctgtttactttacctgtgaccgtgacgattttaaatccatgctttgcttttaaatgaatttataggagttgcaaatgagtcgagatcccaagctttctttccaacttccaggtttctcctttggttccttcctctatttttcttcttcttttgtctctcttgtaacttttgataaactctctatattattctcctttagtgagattctctgcttcatcttctgctttttttcaatttctaatttcttgattttcctcaaaattattttccttgatttctcttcttctttctttccaagaatgaggtctttattctctctctttaagttcttgaatctataaaactcagttcttttcacattcaatcttttcttcaggcaattctaggtttctgcttctaatcttgctccgaattactgttacaaggctgatcttgcttcagcttcctgtttcagctacctttttatatccattctggtttctttttctattttctttctatttctggaacttccttggcgattttccttgaaattcttattcttccttaattgttcttctcctttcttttccttattgtgggacaccaatcttggtaacaaaagctgctgggattagaacaagccatgtgtgacactatcgatggggcatttaaaagactctaggagaggctggataaaaaagtgagaagttggaaataccatttcaagaaaaaatggggaaattggaaggtttaattcaaagaactatggaaaatcatatggatcaagtgcctattaataatatataagcaaaagggtcagttcagattccaataaagatctgatgtacttggagtgagaaccatgaattagcattggaaggtttagttcaaagaaatatggaaaatgttatggatcaagtgactattagtgatgtgttagcaagagggccagttcagattccaataaagaaatatctgatgcatcttggagcaaggactatggattagccatatcaattcaagatgggaagacagctgattttgatgagagaactgggctcaatcttgaacaaaagtgtgatgagaaatttaattctagtcagacttcaatcaattcaaatcctgcaatacattttggaattcattgtgacatggatatcaagcttgctgatgaaaatgttggaaactttgataattaagtttgttgcatggctacgtatcaactgctgaagaagctgatatggccatcagaggtttgcacaatcgacagactgtgcctggaggagtaggttctattcaagatgttggcaggtgttgggtcaatggacaaacaagctacagaaaagaaagttgagggacatctttcatcatatggtcacattgaagatgtttatctcgtgtgtattaagtaaatgttggtagaatgcattatagttgagatattgcattcatgtatttctcaaggagattgagtttgaaattagaaggcagaggaagaaaatttgttagatgctgcaatcatttgttactcagagaatgagtctgaaatgagaagacggaaagaaaatcatgcacttgttgcaactgtttgtttatcaaaggactctccaagttgctgtcaaagattgtatcagcaagttttccctcatcttattcaatggaccaacttccagctgagtttgagcattcttgaggacaagaatgcagtcatggaagggggtattgttacatacaggaaggttaggagggtagtgactttggagggaaaacaagttcgatagttagagaaacagttatagatgttagaaacagttttcaagaggtgtaagaaaacagaaacacttgtatgtagatattcattcaatgatcaataacaaaatatagttcttctcttctctggtttctcttctatctatctctgctttctcatccctttcctcctgatgattctttatagcacttttttccctctattttctagttctggcttactgttacaccttgttccatgacagattcagcattagtttgtaactctttgcaggctgccgtgtacttcaataaaataca

SEQ ID NO: 5832 - DNA, 3321 bp, Manihot esculenta
  Intron number 2 from transcript cassava4.1_004892m (locus cassava4.1_003991m.g) derived from phytozome v7.0 (chr-ID scaffold03329; pos 80008 to 83328 reverse strand)
gagagagagtcaagggaacgggacagagaaagcaggtattccttatcttatatttttatatctattactcttggtatatttattttttattatttctatgggttgcagaatgctttaaattttgttattgtccttttatttttgtttcatattttttagaatcttgcttcacttatcattgctgaatgtgtggcccactgcatattttagcagaagttgaatgtttagtttaagctgttcatttcataaactagcatatgaatgttggagttggagactctaagggcagtttgtagtgaattcttggaattgaaatttgctccactgtgtattcatcgcttttatcactgacatctaatgggtggcttttgctaaagtgtggtaaaatgtgaacaaattcaggacttgaacttgtttctacatttttggacttctagaacactttgataatttgtccgagttatagtctttggagtccagctcatccctcttttgcttcttcttattctatgttttcatcttggtctgggtaggtcttttcccaatatttctactctctgttctcccatgtggtccctgtcatatttggccggtctggtactgcatcttttcatagtttttggaggattcgttttttggttggtggtttgcaggctcagatgtaaccagcttttctctgcacatgaaaagaaaaagctaaccctgtatgctttgtttctttctttgttttttgttttagtaaacatgttaattttagtggttagttcttttcaaggaattaggatagagttcattgttcgagtacttgattaaggccctttttcctgaattccttgtatctagtgctgcacaattttctgctgtactgtgtatcattatttctttttgttgtttttttattcaactaaattatttatgctggatatgtggcttattcgatgataagctatttactttccctttgcttttttattattttatttttattggtaagagggttgcctggggggatgattggtggcttttgcaattttggcttctgcaacttttagatgatctaggactgggtggatgtgcttatcctggcagttttctgccaacacaaagacaaccctcttggattttagattcagatttagcatcctcgtgaatggctttgatatacttctgttatatatctggttgttaaatatagctctacagccttgttgtaccagaaagaaactattttcatttgctcagtgcatttgatattggatgagtcctctgtgttctaacatgattctggatggtctatgaagtgattcatcaactctgatctgtgtgtcattgttaaatatttacttgtccgtgtcctttctgtttggtagatttttttgctatggagatgcttcttagctctagagtcttgctacattattttcacttcatcatcagttctccagtgctttttatgtccagctttgctggattctggtcctatgttgcataggaaaactcaatttgaagataaacccaccttgtctgtgtggtagatttttctcctccttttcattccttgagtgtaatttttcaactctaaaaggttctatactattacttaaatgagatttttcactggtatcgttagtttcgtgtagttacttgtgctattgaatgtcttgaaaattccgaatattgaacattagattgtgggaatcgcagatgtgctagagcaatcttcagatggtccttctggcaattgggccaggcacaggaactcaggttatgggttttaaatgtttcttcatagactttgtggaatcatttaaaagattgcactgcaagattgggggttcagtgttgaggttttggccagggcagcaatgccgtgctatgatttccattatcctccacctttgaacttagttgcttaataacatttattctgttgcagaaatgctggtgagagtgatgggctttgcttaagagaagttcttcatcttctgggcttgtggaaaaatcagtggctaagattggcctctattttttttttcactgttttgctggatagattttattcattgttacatgattgtctatattaaaaattaggtttagatgaaaaatagggttcttccagttctgccagatgtttagattactaacttttgtttcaaaattctgtggaactgttttcaagttgtttccattgaaaaatttcccatttgaatgtttttacaaccacattaactcaccaaatgaaacttttttctatgatccttatgctttgcgcttcctcgcttgctatacaaaacaaattctgttgataagttttttcgtttcccctgggctgggtgggggggtgccttcctcataaagtgaactagctagcgccctgcagtgttgaatgtcatgatgctgtcttcatgtttaacttgcttttctgcaacataagtgctatatgttcatcatattaatcgtgcatataaatttttagaacaattgatgttctgttgcacaactagaatttgtttatcacctgtcacatgtacatttgtttaaacaattgtgtgaccatatccaaaaccttaattaaagttttgattttcatttgcatttcttttgatttcttcaatttgcttattgttgataggatgtgttgaatgacattagttacatccttctttgtagataaggccttatattttgtttaccctccttccgggatacagtacttgaactggaatataagttgttaacaggttctaaactattgcaaataggtactttgatactgccatcgataccacttgatgttgctgtttccatttaagattatttatatataaggtacatgttaatttattacttgaacttgatttttgtacttgactaataggtctcagtttttccaattccttttagctctttcattattgtccaggttggttctattaaattttatcggatccttaattttagcatatgcattcatcagtcctcttttgttaactttgtgtagttgcctgcaggactgtgttacaagggttcggcgtctttactcatatcaagaaaatttgatggaattttgggattgttcttttattcattttttattatgaaaatgtaatatgccttagaaagtttaaaaaaaaagataataccagagtttttctttattacgaagaggaaaattttctttttgctattattgcttcatgaattccctggatcctccgttatttctctgctgcaactttggtcagacagttatcatggtaattttgatttcattgtgttgcaggagaactaaagatagaaaggaagaagttgcagagc

SEQ ID NO: 5833 - DNA, 4186 bp, Manihot esculenta
  Intron number 3 from transcript cassava4.1_005364m (locus cassava4.1_005364m.g) derived from phytozome v7.0 (chr-ID scaffold07432; pos 29858 to 34043)
cattgcgggtattgggttttcatttcttattggctattgcttagtttcaatacttgttgatatctagctattttggtatgattagtcatgtgcctacatagtttagagcattgtgctaacaccttggagagttaaatgtggtcatagttgggtttggctccggaatcaataacaaaattagaattaatattatgggaaatggaatggtcgattctcttatgtgttaggtttatgtggaatggaatttgattctattttaatttttcagtttattttcatactggaattggaaaaaaaaggactatattaaacatgccttgtgtcataaatgatatgaaatacaatgtatcggagtgatgaattcactgcacttcaatctcaatgtttttctaattaacttgccatatttctttactagttgacatttaatgcattaataatatgacaaggtcttgtctagtttgtaactttttgttagttattcttttgcttcaaaccatgtcacttttgttctacctcttcattcctacctgatacgagtctgcatcactaccgccttagtatgcttgttattttgtatgcttattattttgtatgcatgggtgttgacgttcaagttgtggtaaggtgcaaagtggttttgtgttgggatttaatcggattaaacgcaatggaaagaataggaaaaataaaaatttttcttctaacatggatcacgtttaaatgaatagtgtagagaaaataaatactttttattttctttgtagcaaaacatgaaattgattgtctcggttgggttgtcgcaaaccacaaactgtctaaatttacgatttctaacaatatccacacagaataccaatcaaaaaacctcagaacagttccaagtgttgggaaggagaaaatgttttgagtgttagcttttaactttttttgcgaattaatattctttcatcacaaatgtcttgatttaacattaatgtatggagtgtatttgctatgttaaattatattagttctcatttattggccattgacttgttgaatgaaatttcaaatttaatttgctaatttcattccacgttgctcaaggatttcatgattaatgccaacagagaacaaatgggacatttccttaaaaaacttagggtgatgaatcctatctcaatcacataaacatttttatacaatttttactatatccaattcatccacatttattactcgtaaactaagtctgtgtaagatgaatcaaagcgtagaagtctctatacaagatgatttattgatttcaagtcaaagaatcatttgtacaaccatcacttaagtaatttatagacatgttactcttcatatgaatttctcagactggtcggtttagcgtatttatttatatctcatatatctcaacctataagatcggtcttttcctctgaaaggaaaaaacaaattatgtaccagttttaacagctctaatagttattcaataacgataaaaacattaactaggaacatttagagacattagttaaatgcaataggaatctcacaattatgaccacattataattttttttgtatattaatatagtctcatggactttatctttactcgagattcatttaagtgaatattaatgataaataaatgcgtttgttgaaatgtattaaatacttaaaatacatgaaatatgatgtctaactacaaccaactgatcggctgtagtgtatataactaacattttagagttgaggggcaaaaagatttgaaatttgaaaataattctaaataagatctaatattggaaacaaattcaatgtataggtattattaggttcaacctgaagttaaacaaatcaccaagaaaataaatgcaaaacaaacatcatttgcttgaaaattgataaaatgttataaaatgtattaacttgtatgtggaaatgaacaggaggtatctaaatcttttggttatgttttccaatcagatgtgcttgaaagcatatgattcctaaatttcaatatctaaatttgttaagttcaaatcaaatataattttaaaggagccttatgggtttgaaatcatatgatacctatttcaatatttcaaattgagaagttcaaaccagataaaatttttgaaatttaaaataagaatttaattcaatgatttaaaactcttataagcctcaaatttaagcaatttccatatattgttctgtaattgggaaagatcaagttcaatgttgaatattttgactctgccaagtcacgtgtgtggggaaaaaacttttgaagaaacattgtggatccttgaattagaacagagccaagggtatagaaaaaaagggaattgaaacaaggtagaatgagagatatcagctgcatgttcagaaatggaagcattgtagcttgtgactctctagggttttgtggtaatatttcagtgactttccattgtctcaacactagattttagtaggtcaggatcaagtgtcgtgggggtagcctttgttgcaagaaatttggtagggctagtgccttgtgcaatttgtgccttgtgtgtctttatcaactatgtctgcaaggatacagtatatccataaatttgcatggaacgtgtcaaacaatgtgaaataagacatgctcccccccctggttttcttttttccttatctttatcttctcacatttttctcctttcttcgatgaggaaagaaattaaggaaacaagatgattcaacctgtgtacaatcagatatttttaatgataaggagtttgcatagtttgatacttgtgctactcattggcaaattttgctagcttgctgcccttaagaacagatgtgcttttagatctggcttcacagtttttttttagttgtctccttcatgacattggtggtgttatatattcttggaaatttgttgcttagccttgggtgttaagcccttacatggttttaaataacggtcgttacgtaacataacggctgttatttacaggttttggagaaggccgtggccattaaggctgttgtttaacggcaataaaattttgttaagagtaatggtcgttatataacagtcacgaccgttattttcttttctttgcaggaatttgcagagaatgttgtgttcttgctgggacagccttctttatgtgatatttgaataattgaaggcttgagaactctcttttcagccttatcacttcatttttcccaagccgaattgccaaaattaaaaaaaaaaaacattagatttccctcaattctcaagctctcttctcaactttctcctaaatttttgtaagcttgactactaaggactgcagattcctctgttcacttattcaagtatcaagaactttatattttagagtggtttcaaaatctattgtgcaaaaaatttagcttttattatttttttcaacaaatgttagatttgtttgaatcattgttgtagttaatgcaaaaataaaaataattagaggttagaatgttagataattttgattacaaactcagaacttaagttattattattttcaataatttttagagtttttttttaatccctttagtttttactttgtagtgaatgtataaatatgaatgattagaagttaaaatgtttgataacttttattagaagaacaaagtggatctactcaacaacctactaaacgctcattctgatgaggttaattatcatgcatgatgtttaaaaattgtaaattttttgtttatttgttatatttatacttattattaacttgtataacttcgttttgattgtacctttaaatatttattaatttcattaactttgcaaatttttcaaaaaaatttgcatagcgacaggccgttactgttacgttatgaccgttacaggcctgtttccgttacccgcgaccgcaagctgtgcggtttaaaaccatgaccccttatgtagccgtttcaagctaagaaggttgatatttatgtaatttgcgtgtacaagtaattgtgtcagattaaaattaattcttttctactaactatttcatatactagttatgacagatgaaattagtttatctggccctgctcacgcacactctggttagggtgttgataacattattcttatttgtgtaatctgcattgtttaggagaaatacaagaataaaccttggttgttggagga

SEQ ID NO: 5834 - DNA, 3512 bp, Manihot esculenta
  Intron number 1 from transcript cassava4.1_020507m (locus cassava4.1_020507m.g) derived from phytozome v7.0 (chr-ID scaffold10821; pos 65889 to 69400)
ccaaggaatcaagctttatacaggtaaagcaatttacatattagttattctctgtctctaaaatactgggatgattcagtttgtttcttgagttatattatgttttggatttgattcatagcctttctgtttagaaaatagaatggggatggtttaggaggctgtataggctagtagtattgagcttatacttctattcatggtgacatctatctaaaggttagctggaattttggtttgaactttattgtaatgtcaatactgtttcctcgtgatagtatactcatctaattgtctgtcattgtaggccgaaatcaaaagatttgttagtctacaaaatctatgaaaacaagtttgtttatagaaaaaagagagagagagagagagagagaaacatactgttttgtagtcttatatgtctggtagtccgcacttactacaaacttgcacatatgcataggggaacgaagagagttttaaaaaaagacacgaagctgaaagggaaggtcacaccacactaattacatgaaaaggctcgataacacgggatttaggaaactgaaatagagggtctagagatcattggggtagaattccaaatcaatttttatttctgctcgggtggatgcccttatgaagtcaaacatctgatttaagttctctttgaaggatctgagttcatttgggctgtaaggcagatacttgtttggtccacaaatggagaatgtgaccgtttcaaggacttctgcatacttcagaaagaatatgatcaactgcacctcatttcttcttcccattagctcagttactgtgatttccttcagagaggttttcaagcaagggaattgccgaatttgtgactcccaattttcctcgtcaatgttgtatatggttcgatttggaaggtcagatctgaaaattgcctgttggagcaattaataacacttcaatctcttacactagaatgatgaaaggtgattctgtaaaaccagacagagagtttagtcatgcctaccgtaggtccatataatactagagttaagctctccaaaatggggcaactcattaataggcaagatattctgggcaattctctctttgatctgcccattatcaaccttaagcgcgtcaatttttggagcggaatatgcagtctctgcagcaatgttgactccgtaggtataaccttcatgtgaaaaaccagaaaagcttacaagaataaagcaaaagttaactttagtaatgtgaagactaagaaaatgagatcaaagtgatacccgtatgcaatgggtgcttaaagttagggattgacaatggtttagaccattcaacagtgagttaagagcatgtccatcagctttgtgtgcagatattgcactaatgcttatctgagcatcaatcagttttgttgctttcctaattgatgctgatctcaggtattttcctacaattgtcagcatcaacaagtttggagttgatatatcgacacggagcatttcttttgatgcacagtgaatcatcgaaagtcttttgatcattatgtcgacttcactcacaaaagacccatcaggaataagacagtattccaggatcagatcttctaggacaggacacctggatgttatttgttctattgagccatcaagaacttcaagttgtttcaagtgtaacctcagaagagaacttaaagcattaaagctggatgctctaaacttgcaaaatgttaagacaaaggtttccaatattttgggtttaaaaaagccatgaggcaactcatatggttgatgggggttggcccatctgactgccaatcttttcttacctaagaacttgaaatattctctatcactgaagttcagttctagctccttgatgttgcttctcagggcatatcggacccaggtgtcaatccttttggtatatccatcctggtgatcataaaggaaagatagcctcaagttgttgatggtgtcccctgagtgtaagaggagcattcggtccacaaaatctgcaaatttcctttgtgctgcacatattgaattgtccaggcagggacaagagctacctggactaggaaattttccacataggggacagcttatatctttctttgtaatatttgtgatcatctcaacttcatcaagattcaggtttgaaatttgtgtccatagatatttccatctttttgataggaggcttactttgatccactcttttaaaggcaaaagagagagaatgcagagtaaaattgcttcagggaggttgcttatataatcaattccctcagagggattgactatggccctttgcttgctgttgtctgtgctcttgttgttactgccactacaactgataccactcgcaatttccattggctggagatggaaattgatgatagtttaaggaggagctgacaagagggggaaatatattaaacatattggaattgggagaaacaagaaataagtgcattggaagattaatttgatgtgggctttagcattttttgaacagatagaagaagagagtaaaaaaaaaaaaacccttaagccaaaaagcatatgcaaggatattttggatgaacaggttatggctaaatggcaaaagtgtccacatcagttaattgaaaagtacctagcaaggagctagcaagttgctgttatggattttcagattctgtctagtggacccaatattggtccaattcatgaggcctttatcagatcatggcaaattgcaatgcactgagtgttatgcttttaaagtttgaagcaattcaaatagatacaatggatagccactaacaggtcaagggaacttataaataatgcagtgggtctccagaatcgagcagtttatgaaagatagtgaaaaggaaagccttctgattatttattttttcttttaaaaaaacatagatcttttgtatgcttaataactagatatgttaaacactgccttaccaccatctacattatgatgaagcaaaatgcatctttcatgaataaagtctgaaacttggtattacttgtaatcttttatgctagcaattaattcttaatttccataaatattttgtattcaagatttgaatggttgcaaaatcaaatctattgagtttcctgaaaatcaataatctttctatgtcgtgttaaacaaattgagatggacatggtattaacaaagattcataagagatgtgaactaccatgactaaatgacaaggaaaagggtagagattattttttgcctcattcttacctttgatgtttgttgtggtgagacgaagaggatttgggatgcgagtctgccatggaatttaatagcagaaaggaaaaattaataccagaaaatctatcaaatcaaaattattgtctatatattgcacaattcacagtgatcaataaaagagaatcgagtagatgtttatgatatacatgaaccaccagcgctaaataattaaatagtgttattactttcttaccttcagatttctgtcacagggataatag

SEQ ID NO: 5835 - DNA, 4303 bp, Manihot esculenta
  Intron number 2 from transcript cassava4.1_008377m (locus cassava4.1_008377m.g) derived from phytozome v7.0 (chr-ID scaffold08655; pos 150352 to 154654 reverse strand)
ggatcctgctgcattggcaaggtaaggttctatggcttctagcattatgcatgtggatatcttttttgttttgaagatatgaggtcatttatttcaagagctagttttctatgcataaacttgcatattttttatttgattttcacattttttttccaggtcaattggagcttgtttatatttttgttattagcaatcatgtctcatagttttttgacctcactcatttaaaattgtattgattatacatttatgttatgatatgcccaagagcttttacagtcattagtaattgaaatacaattagtcaccagctttcgcctgactgcctaaggtaggatgttcataaaatgacatcttacaataaaatgcaaatcaaaatttttggccacagcattggagaaaagtttaatagattgtggaactttgagtttttgtgtatattttgtataaaagaatagtataaatttatatacaagagtcctagctaaaaaagaagcatgtattcctagctaatttaatgaagacacaacatggtagcataactgacatttatttggggtagagaagacagctttagaaagaatgttaattaatataggagttattaggatgcaatgcagatacagggcatagggtggactaatagtgtggactgacttggtaaataagtgagctggagttatttaagatgtaatacggggcaacagttagcttgttaggaagaagccatataaataacagttgaagcatttggaatagccaactaattttgaatacttagtctttagttctacctatttctctactactgttccataccaaatatgttggaattataaaccctaagacatttaatattggatattattgaataattatccattgatggtgtgaataggaacaaattacagaatttatggttaatggttattgagcagaaatcaggctgggtctccatttagttaacagtaggaattatcaaatttttggaacagtgaataaattgtgatgaaaataaagttgatgataaactcagggcaaatgtatgattagtggctgaactgacatcaagctttaagttaatgaactacttgtaagatttacccattccaaaaataagtaaaactagaatataggaaaaaaaaattctaccagaaattttaaaatgtcgtatcattttcagaaaaagcaacaggcaactgacattcaagatccatatttcaaattgaaaaataaaaggactgctgttgaatataggacggcgtcatttatttttgctcagcaatacctgtgcagccactgcatctggtcacattcaattaagcatggtacgcttcttttacagctgaagatccattattcaaaatttggggagagcattcattcaactggttccgaaccaaacttaaaaaactaaaaaattgaatgttctaaaatgtagactgaattgaattgatattataagtttatccaaaacttaccgaaccaggccgataatatcggttcggtttaatgagaaccaaaattctcaattccaagtttccaaccaatcctagcaatgaattctcaaaactaacaatatcaattatacaattaggtgaatattaacatgcatcatagattcagttagtattcttgaaggcgccaggcaaggcgcctctctttgaggtgctagcctcagagagaaaaggcaccaggtgccaggcaggagaggtgttacctggagccataagctgtattttttttttctttgttaaagaaaaaaagagaaaaaaaaatagtagtagagaagaaggaggaggagaaaaacacgaagagaaggtggaagagtggtgtgaaagtggttttaataatatttaaaagtcactttttctttgaaagaagaaaagttatggaaacctttttgacttttcttcatcttttttactttttccttggtgttagtagtatataataaattatcttggtattactaatatggaagtagaatattaatattgttattagtaatatataataaatacagaaaagtacaaaaaatactttgtagtttcatcagtttttcacttcgggatatttggtttatttcgaggtctgtgatttaatttttttatcaaagtagtactttgtaatatgagtttcacattagtatggagtctagaaattatcgctgtttgcaaatagcacgatatgatgaggtactatttggacacaaaattgaactacatacctgaattcaatcacaaaccttgaaatgaaaaatcaatgaaactacaaggtactttttgtacttttccctaataaataaatatttatttatttatagataatattatttctagaaaattaatattaatttctttagttatatatttatattttattttttattatatatatttatatttttattctatattctctattagaattatattctatgtttatattctatattaaataatattattatgtatgatatagattattctataatataattgatataatttattcaatttaaaattttatatattattttattattagttaatattattatttaattaattattacttttattactattatttaattattgatatattattaataactataataattataagttttatatatattaagaaattaatattaatattctattctttatttagattaaaatacataaactataattgctggtacattgcgcgcgcgcacacaattggccacacacacacacacacatgtatattcaaaacatatataacacacacacatgtatattcaaaacatatatataaaaaaatttggcctgtacacacacacacacacacacatgtatattcaaaacatatatataaaaagaattggccacacacacacacatgtaaattggccacacacacacatgtatattcaaaacatatatataaaaaaaattggcctgtacacacacacacacacgtgtatattcaaaacatatataataaaaaaattggcctgtaaaaaaaattggcctgtcaccttttccaaaatggcgttaccttgcctcttgcgtaaggcgatagaagagttcgttgccttagcctatataacactggacttagtctaaactttaaagcacaaactataaatgccatatacaacacaaactcaacatatacaatgagcctaaatggccatttgcatacaacacatagtctgcagataattgaagacataggcccacagaataacaacattgaacagaaccaccacaccattggtgaatcaagagacaaccatataatcaagaaccaagaggcaggaatctgctatggcctatgaatagcaaattgagagaaaaccaaagtgagaccacattattttcctctcagtgatcatctattcccttccttgctagagctcaaagaaccagtgacatcttttgggttgtttgaagaatatgaaaaaatgaagaagatttcaagaaggatgagtgggaatgggaagaagagaggttaggcaaatgagagacatatcaagttacgtatatggggcctatcaaaactgttaagtatcctacattggtgtgtgatggggtaatgtgcccttatatagccttgggcactcctctcccttagagttagcttttgagtgtgagttacgtcctatccattttattaagatggtttcagagactcagagcctctggatcttgcgttgagcctctcataagtatttcatgctctagatgtttggtcctaggcgtgagagggattaaattccacattggtttgcaatgggtaatatgctcccttatatagccttcgacactcctttcccctagagctagcttttgggattgagctaggcctggctcattttattaagaaatacaatgtagtatggatgtcttggttcaatttggttttctttggttttttgctgaaaataaccatatagaataatcaaaattacttaaaacctcaaattaaatcaattagacagaaatagtttggttgagttttcctgtttaaagtgaaaatttctcaactttatgaagtacttgttcttattttaatcataaaatatgtgaaagaaccatctccttttgtcttttatggtgtttgggtgagggactacatctcttgtgtttattggcgtgtgcattttctagaacctatgttagtattatgatcagtattacaatagtggtggttgaatctctggtttttttcggatgaagaatattcttcaaactttattataactatattttgcttttcacatccagttttatagaaaagt

SEQ ID NO: 5836 - DNA, 1865 bp, Manihot esculenta
  Intron number 1 from transcript cassava4.1_019507m (locus cassava4.1_019507m.g) derived from phytozome v7.0 (chr-ID scaffold06582; pos 582127 to 583991)
aagctgcttggaaggctgagctctctcgtcgcgaggttctttcctttccttttttattttttccccttttcacctatgtgtatatgccacttggtttcactgttgccttgcaaaacaggttcgggttgttggaaaaattttgggtttttatgggttattttgaataagccggatttttgtcaatttttcgtactcgagtatttcaaaacttctgctagaaattgatagggtttccaacccaaaattcccaatcgatattgataatggagtgcttcgattgtaattgataaaactgcaatctctaaattggaactcacatcccatttccttttgtgcaaattacctccatcccgaataaacccttatatttggaaaaaaaaaaaaaaaactttagtcaattatgaaccatctggtacttacctagtatgattctacaacttctctcccatattagctcaaggaaactttttctgtgcatcctctaactttttcttttttgggtcagtgttggattaacacattgaatgcttaactaaaatcaaaactcattaaatacttgaacccataaaatcatactaattaaacatgagttaattatattatcaataatttcctaaaaaaatagaaatggtctcacctattgcatactttgctttaaattttgttgaattatcataatcttattgcgaataattttgctactttatgaaaatttaaagcaaaatcagcaaaagttaaaagtgcaattagtaataagttggactatttttctttcttttttgacaagccatttatatgatttttcatttgttcaatgggttgtgattttagtttttaagtgtttaataggttaatacaaatagtagggatataagcatatttttacccttttattcacattaagtaagggctgagagatatacaaggagagtagaaagaatgttttcgattagagtaaactgttatctctggatggatgtattggacagcattaaggtgctcctactagtatcctgcactttaacataaagcagttgttttttgcacctggaaattctttggtttaatatcttggggttgctgtagcaagttctgaatcctaatttgctgcagcaaggttcttttgtagttagttctatggtgtaaggtctaatcaatactgccacatatgtatattttgaattgggatatttctaaaaacatcttcaattgaattgtcatagtcttgaataacatattcaatattgtaaaatgtttcatatatgcgcttttttcgcaccagggcatgcttatcaaatggagcccagatcataccgtgttctttatttgcattttgcgggaattgctacactaatggatatgccacatcacgtcatgtcaatctagaagctgactcctgattcatatgatatgttcttaatgattattagggaaaaaaacctttatcattcttatgcctatactctctaactatccaacaggactaacacattcttatctcatcagctgtgcaaattagtgtgttgttagaatcatgtcaacttagtgttagaaaatcgacaaccttttactagtgttttttgaatgcttggaatgctggacagctgattttaaatggagtctcttcattggtagttttgatggtcccacaactaaacgagtgtgcttgttatcaagcaacaaatgatgcctgcttagtaacaagtgcaattaagagtgtaataccacttatgtgactgcctagttccaaaatcgcttgcttgtcagtaaactgctcattgtctctttatgatattaacttcacaaacattatttctttgcttgtttcaggcagagattgctcgccaagaagcaaggctgaagat

SEQ ID NO: 5837 - DNA, 1580 bp, Manihot esculenta
  Intron number 4 from transcript cassava4.1_019243m (locus cassava4.1_018049m.g) derived from phytozome v7.0 (chr-ID scaffold02431; pos 411374 to 412953)
atcttggaaaaggtaaatgttttatgtattttttgcacaaacatcagcatactacgtttttcttgcatccttggacctggtggactagtttagcagaggaccaaatccttggcaacacctgacaaaatacagttcctctttctgctatgcttatgcctatcatgttatggtgtgacgtaattgttaatcagcaattcagcatcattgcatatctgtagccagttgctcaacatttgttaaattgatagaccttcatttatgaaatttcaatgttatgatagcttctgctcatatgataattcagtgagttttcttctgcattttgtagaagcctctattctgatatgcctatttaccaactaatttatttagtagtgcatcacaccctcagtgtaagctagcgtagatcttcatggtggagttttctttcacttctaaatattgtctgcattcttaaccttggtggagttatttgattatgaggcgtctaattgttttccaaggctatgacttattgctcactgaggcattccttcaactgagctcatattctgtataaaaatacatataatatgtatacaattatatattgtctaagcttagaatgatcatgttggcctgacctttcaccgtcccagactttgcatgaagaaagttgttttacaagaatatagcctgtagtgaaataaaagggtgatacagaaagactattgcgtagtttggtttcacttgagaagggtctaggagggctaatttagtaatggtgttacacttgcagttttttctgtagaaaaatttcgtaagattgaattggatagaattttgaaatctaaggatttggagtttttatttctatttatgcaagtatttgaactcatagaaaagagggggggaaaatgaaattatgtaaccaaatcttagacgatattttgaatttacaccttgttagtatgttcttcagattcatcctcaaataaattatcatatatatgcaggaatctatgtccatttaattaatcaatccgatcaaagaaaatttatacaccacagacatcaaaactaaaatatcactttgaaacctctcctatccaaacacaatcaatctaatgcatccttaaggacaagcctttcagtcattttgagatgaaaggaaaactttatattatttgattttttttatgcacaaagaagtatatgaaaagtaaatacatttgggtgccattgtccgaatgggtagatattcttggtttatggtgattttgtgtttgcgagcgagttagcttctcgcatctgtggttcagctattggctatttggaggtaacgttataagtttaacaggaaccgtgttgcccatttttggatagccatttgaggaggttgaaatatcagtttggattggagtcttgctttcatggaaatgtacgtttgtgtgtgtgtgtgtgtgtgtgtatgtattgcattttcatattcataatttgttaacaatattaaaatagattattacattaccacatattggatcatgtttctgagtttttagaccatatatataattacaaaaactgatgctcaggtggac

SEQ ID NO: 5838 - DNA, 2933 bp, Manihot esculenta
  Intron number 6 from transcript cassava4.1_023396m (locus cassava4.1_023396m.g) derived from phytozome v7.0 (chr-ID scaffold10015; pos 190886 to 193818)
tgcaaaggtttgtgattttgtatcttaatgttaaccctatagtagcacaagtcaagcatgagcacattcttattttgtccctttataatccattcctacatattttagttagaagcacaagaagatttgcatggtttgactatgagatcctacgcccaatggacacaatttcaaagggctacatctttatttaattgtattttctctcataatacataagcttccttatttatattggaagacacaaggcatgataccataaataaaggattttccaactaagtgggtgtttgtcttaacttataaactggccagaccagcttatgagctctaaaataagctgactcatttgtctgtaacatttttttgagcttataaatgtagcttataagcaaacaaaaaaaataaaagaaaaagctgaggagaatgaactttcattttggtgcttataaatactaggcttataagttggtttgaccaaacaacttaccatattgctctcatttaattttaagactttaccatataccttatttaatatatttttagtaattttaatcagaaatatgcttataagctactcattactaaacatgtcaattgcttatcaatcacgtataagcattttaatcaaatatataattgcttaaaattttacatgcttataagcttctaattttttataaacaccctctaaataggctgatatcaaatctccctacataaaaatatataaatataaattattctatctacaaatcctacattaatagaaataaatttccataatggtactcctttggagcatggagtctcatcaattcaaatactttaccttgatgagattctatatagaagccaaaaacttacacgcaacagttgacaaccagcaacttttagacaaattaaaacacacttggacaatgagacccatataaagcaccaaaagacaaaacaacccttagaattgcactttcctctccaaaagcgatatcagcaaggaaacatcaatgcaaaatccctctccaaagacaatgatggcaaggaaatatcaacacagagtccctcttcaaaggcaatgctagcaggaaataggaatactcaaagcaacttaaatgattgtacagaacacgcgatttgaacagaaaaatttaggtgtgagcaatgctcatgaacaatattgataaatagagaataaacagtattaatgaacaatattgatgaatgctactcgtgaacaatacccaaagcaaagggcatgatccataccataaggtgtaaccttccctatttatattggaaggatcgaggcatgatgccataagattttacaacttaataggaagatatcaaatcccttaaataggaagtatataagcataaattcttctatctatttatgaaagcaaatcctatactgaataggaataactttccataccagtcccctttaattggagcatgaaatctcatcaattccaacctacacatctaacatgtatataagaccatgctaaggatgtcaagataaattttgcgacaagaaaggcaaaataggtaagagtttccgaagcacagatcaagtgataaaggcatagcatgataaatgatcaaaatgctaaaatatagccaataacatatatatataaagctccttttattgtacgcatggcaggggtgtgcttggttggagttttaaatacctgttggtgcatattttatttttagcctaatagtataggattcactgttttcagatgatgagtacagacaacattatatcagtctgatataattgatacagatcaatattgttcaatggataacaatacgtaactgccatgcatttacttttgttttaacataggaaaagaactaaaaaaacagggatgtagagagaaaagggtaagggagggggtgggtcataggtgggagtggtatttgattgttgggagttgcactccctgacccgtttacaagaggatatgttatcatccacaatgtacttttttggttaaaaaatgtgaatttaattatattggataatggaccacagtggactatgaagggtacattttcaatatttcatgtgacatttgtttttaatgggtatatgtcactattaatgggcttcgagaatttgtaccaaatcttatagtttgattccatttgattcttattcaccagatgggatgttaaagttttttgagtttgagacatttctcctcaattgactgatgtaattatgtatcaccaattaggaccctagattagctataatttgtaaatacataatctttggttttccttttcaggttctttatgaatcgtataaatccccaatcaagcttgaggagaataatcaagcttgcattgcttcatcctctctccttctatactctttcattgttttgcttgctttgctgtgatatggagcttgtagatggagaacaatgcaaagattttgacttctaatcttttttgagataaacttgccatatgaacttatttgtgggtttaagcatttggatgagaagagtatgcttgaatgtcatgcaacatgagcggagggcaatggatatgctagtctttttactattcttagctctgttgtggtttatgttttcatgctttaggggtagcctatcttctattatgtatgttgattctttttactttcctctttttaaatacaaatgagaaaatcataaagacagttgccaatcagaaaagccatatgcttgatcattctgaggatatgatgcatgcaaattttggtttcacttcgatgtggggtcaagaacttgtagtggattctatttctgttttgtgaaccttccaattttctcttattactctatgtgtctctcttattttttttaatatacttttttgcaggaagatttgtactacccacatcccttggttcaaga

SEQ ID NO: 5839 - DNA, 2301 bp, Manihot esculenta
  Intron number 12 from transcript cassava4.1_000392m (locus cassava4.1_000392m.g) derived from phytozome v7.0 (chr-ID scaffold08887; pos 16390 to 18690 reverse strand)
catttgcaaataacacaggttcacatctttgttattgctatgtttctgtattttttttttttttttggtgtttgtgtatctttttaaatatcattggcaacctaattgaatacattttctctctataatatgttgattgaaccacctacactggaaaatggaaatttattcttttgatggcatatgctattccaatagtaattgagctatctcaagctgtgattttctgattgtctgtacatgcatgcacaaatccaaagcagttgtatgcttatccctatagtaattgtactatccattcttttttctatacaaacatgacatatccaaatcagttgcaaacaagcattagccctttttgacgttgataaatttactaataataatctatatattttagaacctgttttggatatcatagtagtagttactcagtgtttcagtttcatggtaattttgtgatatttagttttgtctgagacagtcgattgtgctattttggattctgtgctattttggattctggtgctttttaagttttattatgccacaaacattttagaatctgagggtgcatttgatatgagggatgggacaatgtgagacaggagagtactaataattttcccttcttgtgattgatttaaatgatattagttgagaaaaattcaagtcactttgtttgtcttgaaatctagaatgataaaaaagatgggaggagataacatgagaaaaatttgtggttcggctacaaacctcaaggaaggccactttttattcacttgtgtcttagcttgatatgtacgagtctatatttatatggaagatacaagaatatatggcatcacgtggatgctccttaattcaataattaaaattaagcaattattttactgatcaatcacatgattttctcctaatcatgtcacatgaatgaagggaaaatctcataaattcctacagtttataatatttgacttttataatttttatagtatttttttataaatgtaaaacttgggattctttttgattggaactggacaagtcccatcagaagtaaagggatagaaaaagaggaaaggcttctcccatgtaagtgcaccaaaaacatgagcgatagttgttctgttcaaaagactaaatatgacctaatagtgaaattagttgtgcttttctagtgggaaccgttgtaagtactaggggtgtggttgtttgcagaatttaacatttccattcggaatcacttttctgaggaagtagctttccaaggaagtgtttggttggattatgagaaattaaaataaatagagattggcacaacattgctaatctaaataaataaattcatcataataaccagactgatataaaatttactacttcctctgtcccaaaataattcactttctttttctgttatcccaaaattgtagtctcatttcataatgtaattttttgtaacatgtataattaatattacttgagtttttatatactgaaagtaatctaacatgtataattaatattacttaagtttttatatactgaaagtaatctactaaaatcattaattatgaatgtttttgaacaaaattatattcgatctttataacttttcaaaaatactagtcttcattaagaatttactcatatattctgtaattaattaccaaaagcctactccgaaagggagtatctacattatcactaatgtgctcttcctttatgttaattatttcaaacaacacatttaattagggatatgcaagaaaataatagtagaaacctactccaaaagggagtatctacattatcactaatgtgctcttcctttatgttaattatttcaaacaacacatttaattagggatatgcaagaaaataatagtagaaaaaatttagttaaacttacataactatctagtatctgcgcataaactgtgtaaatagaagttagattattattttgggatcttagggagcaaaatgttgaacaaataccattttgtctgtttaaaatatatgataaaaaattttaaaaagttttgaagtatgtgatcaattattaaaaagcaattaaatattggaaactcttatagcctatttattttctggaactttgttggtaaggcttgaggagaataattaatttagttgtctttttaaatattattacaaacaggagtatttgcattgacagacacgcacatatttcatagaagcatcttttcctgatattatacaatcaaaatttctgaaattaatatgatcattgggccctttatgcagagttcttga

SEQ ID NO: 5840 - DNA, 783 bp, Manihot esculenta
  Intron number 5 from transcript cassava4.1_017728m (locus cassava4.1_017728m.g) derived from phytozome v7.0 (chr-ID scaffold02421; pos 654209 to 654991)
aaacttccatcaattcgctccgtataagcctcaaggtaagtaaaacatgttaatgatgctttcacctacttaaatgagctagatattgaaaaaaggcttatataataatgatataatttcattgcttttcaattttcatgctcatggtgtataaatatatcagcattcagtagacctgtgtgctttcttaatattcttggtaaaatactttggtgggtgctgaatgttggaatatttaggtttagattggaattttgtaatcagtagtataaatttgtatagtgtcaaaaatcaagatagtagataactcctgttttaatcttgctaggttttgcctagtttggaagaattaatagggttttaaggagaaaaaagtctctctctgatatcacaaatagctggtttctccttgtttttggcaacccaacagtcttttgttgatctggttggacttgagaagttgttggtactgtggtgattttcattacttattaaaaggaatattgtgtgctgaactgagttcatacactgtttgttcaagcaaacttttttgtgccacctcagatggtaaacattaatatctgagaatagactgcaccatttcaattctgctaaatttcagatgttttactatatctaccagaatttgatatgaggtgatgccataaaaatatatcgaatttgatatgaggtgatgccataaaaatatatctaattttgaattttctctgattttcttcttgtatgattattcctttcctattgtgtaggtaaaacaggcag

SEQ ID NO: 5841 - DNA, 4115 bp, Manihot esculenta
  Intron number 1 from transcript cassava4.1_009322m (locus cassava4.1_009322m.g) derived from phytozome v7.0 (chr-ID scaffold04247; pos 39545 to 43659)
ccaccatattattgaggtaactgttgcggttcactttctcatggttttgatgacatgcagtttttggtattgagcatatttctcttggttattttaagtatattttctttttggtagaaatagtaggcatgtttaatttgttggtttgtggatggattattgtgggtggattgcctcatctgtttcctggttgatagctctcttgtcacgtacaattttttgtgcagttggtgtgtccatgtgtatgttgcaaaggccaagttcagaaatattttgttgactcactaaatcctctttcctttactttccttgttcatctgattgcttcttggtcttttaggggcatcttttgggttttttgcattcatggttatatttgctagctgttcactgcgtcttctcttaaaagaaatgatgtgattattctaagatatgcgttagtgcattcctaagttcgtttgttatatcaagttttggaatgcttggatttcgtccttctagatttgatactttaatcctgctgatctacgtcatttattaataatggatttgactgctttttgtagtttcataccgtgtcctgtttattttgaaaattttccaagtgaattatgtatgctttcaaggtgctcaattttgcctgtattcagtgctttgtagaacaatactttgtatccgtaccttgaacaattttgttctaatgttccttgtagtggtctttctgtgtaatatatcttgagggtggctgtgtttgtttcctgaaaacctttcagttggatacttgaattgaattaccatttcctttgtaatagtgttggagcgttatctgttgcacatacacaagcttcaaacttgctgactttgattgtcatgtgcattgtagactcatcttaatttttttttttttggcttccttctgctatgttaggttgatatttttgctttatttcagtttctgtttatgtattggtttgtgttctgataggtgtttggttcaggtgtatgagttgacagcttcttgggcacaaatgctttaaatggttgtcgtgatttggtgacggaagacatttaaatctttgggtttaattatgtggactgctgtgctttcattgctgcttcacttcatcttccattttcaaagttgtggttggatttgtgatggatgctagtgctacgtgaattttacaaagctagtttagcctctaaatcagtgtacttttttggaaggattgtagaacttttttggtgtgctggaatacatttatcattagttactacaaaccgtagttcttgcttattagtttgcgttgttcatgctgctacaagctcattttttgtattttcttctggcatgtattaattagtgcgtgagtatttttagttttattgccaacttgatttatgttagatattgatcgtatattgctagaggcgtggtgtgtgtcttatcataattgatgcagcattgactttcacacttttaatttttgagattatcgcattgtttttgttgctttatctcgtacctcttcgagcacggtgtgcttcaattattgtggagggctgttaggtacagtcatcccttgttttttccatgttgtgggtattttatatctagtctatccattttggactactcttcactattttaaactttatcaaataatataatagaaaaaatgggcccaaataaaacagaaagttttgatttgctgttggttttctttttctttgtccagactcttgataacatcatgcttctatcagtgcttgagtagagacagcattcgtttaaatctgactttatttttattggagtgtacctatccgaagtgtatatacattataactagaattccatcatccttggtgaataatgaatggaaaaaagggaagacttgtgtctagcttctatctaatatgctgatgatattgtggcattctgctgtctatttagcatccttgaatacttgttcatactggttcttaggcagttggataccatttgtaattttggacagttttcagcctgccaccttcaccagaaaagagaaggcaccctcaaaaatatatcaagagattgttattgtctcctgtgcttgttcataagtaaaatatgcatgatgcaacaactggcttcttatgcagtgttagagaactattttgcagttagaattttttcttttgaactttttgtactaatagctttgttgttccttgtgtccttcaagtttattccattcttccaatgtaccttattctaatatgtatgatttttatctgactgtcttttgtggtttgtgcatgcacaaaaagtgaatgatagtattatttgatgaccagaaaaaatggtgagatgcattgccatcgagtataaattgctcaacaaaatgtataacctctaccacttttagcatgggatacatctttgataatttaaattagtttgtgggtgatttgaatggatccaaagtggaagattttggttgtagcatgaccgtgcaatgcaaatagatgggatttggcttttggaaatttgggcagctgatcctttaatgatgtcatgtcaatataatgcaagttttgatgattagcctttccttgttctttgctttgacaatgtttttctaggtcccccttgtgtagtttgaatttttctcatggtagattgatgtccatatggatggctgcagtttcaaatggatttctgaaaccttattgtgtaaatttttagttagggtgtgttataatttataaagtctaaaacccatgattggctaactaatgatttggcggttcttctccgtgtgttgatgtgttttgtggtggttgatcccacccaccacatatatcataaccctttgaagttgggattctgatttgctttacctgcggagaatgctgatatgctacatctgggcaaatagagtaccagcagtggctgttgatttgaagacgaataggaacctctatgtactattcaaaatctttaatatcatgtttgaaattttcttctctctcactctaaatatttaataaaatgattttcaaaaacattccccgtaggtattttgcttaaattttaattggatagtgaatgctccattttgtttttggttagtataaacaattctatttcatcacagaaacagagctgtttaatttagttgtaacttgtaagggttccttactattgcagtgctcttaacgagaaaaagatcttttaggttcctctgatatgcaggaaaaaagatctgttagggtcctctgatatgcaatgaaaaaatatagagaatatctacttttcgttcttgcaaaaataacttgaaaaaagtaatttattttcattcttttattgtaatttgaaaaataaaaaatattaataaaattatgaaaaagattttgatttcaaaagacgatcattttctttaaaagtgatttatattacctttggttgatcaattttcttcagtgcattgagcatcagaaattaggaaaatatttttaataataaattttgtggttcagcttttcatagcttgcatcattttcctttccaatggtactttaattctttttcaagctttgaagatgtttgacaacgttaaatttatatatatattcagaaagattccacaatgaaactaacgaaatccagtgggaatgagcaaacttttaaggagcgggtataagtgggtgtagagcagaatgagtatacaacagaaagacatggatacaacataatgagtactaaacaatgccattttctacgggttctgaaatgaaagaactctttgttagctttctttctctcctacttttctcaggttcttttcttttgtttgtgaggcagtttgactttggtttgctggatatgtgtcttttccttgccttttgagtagggctggctcttctgtccttacttggatgtgattttcttcctactcatcttgagtgggacttatttttttttttctttaaatttttgtattgctttcggtaggaggtacttattagtaaaagtggtctgtcggtttccttgttttgtttctcgttgtttggttgtttgtgcttgtgcaggtgaggtggtcccaaatttgtgcctttgaagctaa

SEQ ID NO: 5842 - DNA, 1930 bp, Manihot esculenta
  Intron number 1 from transcript cassava4.1_027874m (locus cassava4.1_027874m.g) derived from phytozome v7.0 (chr-ID scaffold03773; pos 101580 to 103509)
ccaaggcaacagagcagtggctagtaagctttattcatttttaattgtttaattcttctattttaagaagtagactaaatgtttatgtctttaggaaatgttaattatttaattatttttatttatttatttaagcagttaatgtgtgtagaacaattaaaatgcatttatttttaaataatacctctaatttcgaattataatattgtcgagtctttaattatttaatttctgtaattaataggaggaactaaataattaacaaatataattttaaaaataaataattaaataattaattttactaaattacatgaataaaaaatttataataatttaattcaattgatttattttttaatttatatatttataatgaaaattcccaattttttaacttaaaaaacttatttttttaaacaatagaaatcataattattatcttgcaaacgatttattccaaataaaatgtatatatttagattttgccaaaacagtcatcaaggaggcccatatatgcgtatatatatatatatcatgaagaatgtgcacatcaatttataataaaatccggtcataacaaccgaattcattattttcataaaaaaacaaaaaaatcggattacttagcatttcttcatgggcagcaatctataataaaatccgatcataacaatcaaattgattattttcataaaaaaaaatgttgaattacttagcataaaaagattgagcaattgaatatttaactttcttacaaattttttctagcaaggggtatatatggaggataatagcaaaaaatttttttgttctaattataaaagttaattaatatattctaaacaaatcagctaaatttatttatatcctaccattaaatttcaacgttaaatttaccaaacatgtcatatcatcggcttaatcagtctcaaaaattaatattttaatataatttaaataaataattataaacaaattttaaattttaaaaattttatcagttatatctcaacttatttttaataaatatatcctaaattattttttaatttatttaatttttaactttaatttaatttacttataattttaaataacatatttttagagcgaataactcttttttaaaaattttttttgcattaataaatataatttattttcataattatcgattataagttgtgtgatatcaatgtcactagtaaatcaagaattacgattttcatgactttaaaaattaattatgcttatcgtatcaccttaatagaggtgaaatcaactatcaatctaattaattaaaaatagttaagttcaatttaatttatgattataatttatatattatctaataaatttagttattttaaatttattaaactgttattaatttttaattcaattaaaatgaatataataaatataattaattttttggagaatcatacactgatgatttataactatataaacactacagtgatctataactatataaaaagttataccgattgatgctaaaaaatattgaaaaataaattattagttcttaaaaatatgtcccaaattataaaataaaataaattaaaattcaaaattattttgaaatatattcattaaaaaaattatagtataattgttaaaattcataaaatttagaaattttttaataattattaattatattaaaatattaattttcgatattgactaaaataatatgtaatattctattaaatttaattgtagatataaataaatttaaatatttagtttagtatatattaataactttaataatttggatatatttgttaacatgcaagtaactcagagtttttttttagtcattttacatagaaatggagattgtttatattttgttaatgcaggctgaaaaggagtacttgccagaagtaaagcatca

SEQ ID NO: 5843 - DNA, 1455 bp, Manihot esculenta
  Intron number 1 from transcript cassava4.1_016406m (locus cassava4.1_014992m.g) derived from phytozome v7.0 (chr-ID scaffold09086; pos 215530 to 216984 reverse strand)
ccagagtagtaatccccacacttcctcctctgctagtacccttcttctcttctctctctctcttatttttattttatttttttttcattttcaagggatttagattttgtatgattttcgtttctcttgtttccttgacaatttgttttcttgagtggtcgagacgagtgggtggttgtttgtgagagttgtttgtgttccttttcctccttgctgattgtttggtggaagagaaaaattggcgaaatgcggaaatcattcaaggattctctgaaggctcttgaagctgatatccaatttgccaatactctgtaattttttttgcctttcctctgatttttatgctttgttatgtagaatatcggtttctgggttttaagccatatcaaattttcgatcatgatctttgagattttgagtggtagtttcgatcttggtatttaggtgaaggacatcttatcttgcactgctttgtgttaaactttgtctcgtgcggttgtctgattgctgtgtgatttttgagttgatccaactttattaattgaggaattttaagtgaggattccctatgaccatgtctgtaggacatgatacgacgacgtatctcttacgtaaaagattctgctccatttaagcattcattgactttgtcggctgctattggagacacagtaagacatagtagttgattttgatattttcgaacccagatataattagaagtatctggtatgtcccttgagctaggcggcgttaatgaatggttcagagaattgaaaaagattttatgtttctgaattctcactatctagaattcacgatttgaagttaagtttctgattttgtaacaagtatttgggtttgctttggattgcttgatccatcaaatgtttgcaacttgcccaagagatcatgtagataactgttagattttgctggaaagaactcaacttaaggttattgagctgaaataagaggatgatcagacaataaaaaggacgagaaccttgtcctttgtcccttggcagtcctatgattgctttttaatttgggcagataaatgatgccattgtaacttgttctgtttgaaggttagagttcaagttatgtctaatcctgttcattgtgatattaagctgtttactatgcattttattttccttaaatttcccacgggatttccttgtcaaggatttcctgctgatccttacaaatcggaatgtaacctacttgtatagtttcaagatatctgtggccagtatttgtgtgcttcggtggggttcattcagctttctacctggttgtggtcaaccatgaagaaatctgattattctctgctatccaatgtttggactgtaatgtttagttcctactgtagctaccgttcagctggctgtgttctactgatacatgtagttttattgtgacacagggcttcctattatcctagggaat

SEQ ID NO: 5844 - DNA, 2566 bp, Manihot esculenta
  Intron number 2 from transcript cassava4.1_018342m (locus cassava4.1_018342m.g) derived from phytozome v7.0 (chr-ID scaffold12270; pos 186549 to 189114)
agaataccaagaggaaattacgactctcaaaaattgtgggttctcttcatacggtctcttcgattcttcttacatgacaagcctatgttttgttagttcaaacatgagggtgtgtgtgtttgtgtatatacttgtccatctttctatcatgatatatccacataatttcattgcattgatgctatgcattttggtttcttatcctttattgttacagaagctggcttcatattggatagagtcttgaaagtaacagcaatatcttccattcccaatcccaacattaatcttggtttttataccatttctgtttcagtagaggttgggaggcctaaaaagagttttctaaaaagtataattctagatgttgttgaaaagagtagcttaaaaagagttgtttatttgttttgtagttctatgattaaaatatgtcaaatttaattgtaaataaaatttttaataccatttaactaatatatttgaacagattttttttcttctatagcagcttgaacaataattccaaatggatccttaaacatttttccatgactctcaactcaaccatgaactgttttgtgattccttgaatgatgaaaggaatttcttgtgtgaccagtgatgcagatatttgctaaagcttaaactgactttggtttggtgatcccacataaagaaagtaaatcttgtgaagcacaagttgcaattgaattgacatgatagaggcttgtaaattttcacttgtggcaatcatatatgttacttgttaaaaatgaattcagttatgaaatgtcatcgctataatttgatgaagtgaaaatggaaaaatagaatttcacaatctagagacattagattaattgatattgactttacatgtttatttctaagttggcttgaggaagatatgcatatgcttgaattcaaagttttttcatgtgtcatatcatatctgttatagccattgggtcactcaggtatcaagtaggatacttgaagtaaagaccttggtggggttttaggagaacagacaaggaaaatgattgccctatcttatttccagagtgctaattagggatttattcttttcaaaatcattggggactcatgttgtaaattctgaatttatttatttattcgtttcactgggaaacaaatgctgttgagagttgatcaaaatattattatacatatattaaaatttactgtaaccatgggaaagaaaatatgtatttctttggaacttgaagttagatttgtgcaaggggaagaaatagaatcagtagagcattatgtatgaggatatctagaagaagtaatatccctcgtcatttgctgttatgcaagataacagaatcttggacttttggccaattattataaatctgatgattttgacactttatattcaccaagatgtctttggcctagagaaatttctgcaaataaactagttaatgcttctactcttctgaacacctttcgtgtcctttaattttaatgaatagaaagctgaaaacatcaataagttgctgggtccaggaggcaagttgctaaattggactttatgttgtcaaaatgatgatagttcaaatatttatccatttctggtagatgcaactgtctcttgtttgccgctggtctaaaatattttgggtgttcttagttcttatgtgtgaatttttaaggcagatgctttaaataactacattctacagagaactgaagtggtttttctttttaaattctttaaatagggttatgcaaaaaaatgctgcgaaagagaagggatagagtgaggggattcataaattcacatagttttttgaagtgttaccaaatgtttttattttcttcattttgtattagatctcattacagattcattggttctatctccaggaattctaaactaaaaatctggaagatgctggagcaacataactgctcaggacaagtcgcttgaatgcatgcatacttgcattgcataaacagtatcatgattgtgtttttgttttgaatttgcttttatgtagcacctgaatgcagagttaccatggagacgttgacatatgtgtttaggataacaacataaaataacatcatatgtcagattatctgtgattagtgttcatctcatctcagtgcttttaatacaagattccttttcagtgctgatatgactgttaacaatcgggtagggtgttcacctgtcaatttgaatcagttttgctaaataattccgattgagcagcataattcttcaaattagactcttactattgtccttcaaattatttctaaaatcagtttgatccttgttccatcttttggtctttaaaatgttcacatctccaaaccaaagcaaactgttaaccaaatggaacgaccaaaactgaaaactgaatcaccatttcaactgagcgtattctttgctgtttaaacatcaatggttgtatcacatattttcagattttagatcatgaattttgcttccacaaagaagtttgatctcttactgtaattgtttgttattatgtgcagcacccagttagccggagtgact

SEQ ID NO: 5845 - DNA, 1780 bp, Manihot esculenta
  Intron number 23 from transcript cassava4.1_000834m (locus cassava4.1_000834m.g) derived from phytozome v7.0 (chr-ID scaffold05859; pos 111798 to 113577)
cactttcagggccaccattgaagcttcaagaagtagtatgtacattatgcttagcatttgggaatatgaattttttcgttgaatggaaaaaccttgtcatctccatgttcaccttattttattgttcaaactcattctagttaggggtgagcattaatcggtttagtttgattgcataatattttgaaaccaaaccaaactgaataaagagaaaaaaccaaaatgaattgaaccgtgacgaatctgtttggttcatcagttaaccttttcttctcaacccagattaaatccaatggagagaaacctgagggagaacatttgctcggtttagttccaaactgaagtgaaattgacaaaccaaattgatctaaaactctaactgaaaatgaactgatatgagagatgaacagaatctaaccgaaccaaatcatttcacaacttcggtttttatctatgcccaaaactctgcatctgccaatgaacgatattgttttgcacagaatgatgctgttagattagttcctgccttccctagaatcacaataccaaatgataacccagaaacacaaaaaccctctacaaataacaaaaccatagaccagagaccaagaaacctcaaatccataaatccctgaaaaccccagaatgacaatgtcaaggagatgatcaaccagccaatctgaaacggcagggagggattggcgaccgtagaccagcaaatccgatatggcaaggaaaaaaagaatcaatggtttaatggtttcaaaaggattgttcactggttcagaattgatgatggtttcagcagcaatctttgagtgagatgggatgactgggtatgggtatcggtctgttggggaggtgaggagcacctagagtagctatatatatataggagattcatgattttcgatttggttcagtttttcttcagtgatgaaaatgatcaaaccaaactgaaaaccaaaaacttctgaaattctaaactaaattgcatcgattagacaaaaaaccgaactgattgaaccgaactattgctgtttggtttttttgtttaaactgaaaactccacagccatatagaaacccatattcagatgaaatacaagatcaggaaaacataaacccatatgaaatacggaacaccaatttcagtttccagtttcctttggaaacaaaggcaacaagataatgacaattatagttttcaacatcaacacattataaatctgaatagcaaaaaccaaaaatgggaagagacaaagaatcaagctaacctgcaggttttaaatctaatttaattagtaacccaaattagagaccaaaagaaaaacgaaccaattttccaaaaaaaaaaagaaattgaatttccaaattaaatcagcttgtctgttttttcagtttgatctgcattctgttcaggcctagttctagatttcaattgacaatgtgtataactagcttcctacatttgagccaggtttgtaggtagaaacatgcattgaagttcttacaactgatttctttatttatagtcaattgaagtctgatttgtagacaataagatgctaactgagcatgcctgcctttagagtagtatagtattgcctttccatctcatttattgtaggaaaggatatttaaactatcttcggcattgtcaacttatatgatattctgagtttctcgtgtcattctctgtttctactcgtgtgcatgtgctcatatttttctatatgtatgcaggttagaggtgtaaaaccattgcctttggtggaaat

SEQ ID NO: 5846 - DNA, 2179 bp, Manihot esculenta
  Intron number 5 from transcript cassava4.1_003962m (locus cassava4.1_003962m.g) derived from phytozome v7.0 (chr-ID scaffold04511; pos 18595 to 20773)
acttgaaacttaagttggtaagccttcccatgactttgtcactggaaactttttcatattttttctttggctaattgtgttataactttgcactgtttgaaccaggctgaagacaagaaggcacacaaagtggtgtcattcaatgaagtaagatttcaggaggtttattatctctctatcatatagatgtgtatggacagtagacactcgaatttatatgcctatattttggtctgataatttgactacatattgagggccttctcccatctcttaaagttccaccagttctaaatgcgggccaacagttctgatacatattaattttctatcctaatggtatgagattcagtgttttgggatattgaatttgagttcacagtatattggtccagtggagacaatatttatataaacaatgatgtgtaattgctaaaactccacctaggcaaaagaaaagaagaaaagaaaggaaaggcgggagggggggggggagtgagagagaaaaaacacttggcaattgcacacttagacaggagtaggctttggtagctggacttttttttttccttatctttttttctattttgttttttaaaccatagtatccatctaatgggtgctttcttcttttacactatgtttgaatcactgttgtcaaaatcttacaattctccattcgaatatcacaatttgaatgaagttttcaacaaatcgattcaaatttgtcaggtgaatcttaaatatgcctgaatcttacgattttttattcgaacctgatgattctcgattcgattccacattctaacaatttaaatatataggagaaattgtaaatatacctaaattgtgactaaattgaaagaatcaatattatttataaaggattcatcatatcttatatttttaaagtttaaaatctcattcatttttgcgatgaaaggtgtacatgaaacctttcttaattatttttcttccaccacccattcttttccttctcccactttattctttttctttttagttaacttactaattaattataattgtcaaatccatgacaatttatattaataatagtaaaacctactatcctttttcactttttaattgttggaccaaatttaaatgagaattttagcatgtgtataatgataactattgtctaaaatttgagagttcataatttatagcatataattatataacatagaaaatacatattattctattataaaaaatatttctaattatataaatgataattatatatttatcaaaatgtgttattataagatatttttttacttacttttagaacatatattaattttaattaatttttaggatttttatcaaattttacgatttaatttgattcttcattcataaaacgaagatttcaattcttgatttgaatatcgatttgacaactatggtttggataaattatggaggaggaaagaaaataaaagaaggtttttttttttttccatcttctattttccttgtgtttggataagagggaaaatattttggtttccatccttttattttgttatacacttttctttctcacattaccattttctttccaaaatggagagaaaaaaatctgaaggaaaataatgtttattttctttcctctctttatttttctcccttatccaaacaagaaaaaatgagtatcctactttattttctgcttgttattttccttcctctccattttccacattttcaaacaagctcttaaaggtctagtatcttgtgagtattaacttcttatttgatttgtatttatattaacttcatatttgtatttctgttagactattgtactttgtctcaataaactgtaattccaaatcttgagtatagatatgttgtgtatttcttgatatatgttaaactacagattcatgttttttgtttgtttatttattttaaatttactgtagaaccaacgatacaattcaataaaaggtttatactaaaattgatactgtaatttaaaatcctacaccaacttatgagtgatccgagctctagacctcaaagtggacatcccaagttttaactgccaggatgttctcttggggacacacatatctacttgtacttttgtttaatgcctctcacacaaatatattttgttgtaacctaggttaaagaagat

SEQ ID NO: 5847 - DNA, 677 bp, Manihot esculenta
  Intron number 4 from transcript cassava4.1_015850m (locus cassava4.1_015850m.g) derived from phytozome v7.0 (chr-ID scaffold06278; pos 144247 to 144923)
ggtatgtatttcatttagttgctatttgttgacagtgaatggtttcattttgttcttctatgtttatatcatccatcagtctttgtttgcattgcaagcttctccaatatgttagtttcttataatgaaaaagctgggtcatagatctcttgttcttgcctctctacgctctttgttacatggtcatttgtagtttgcatggcaattaaagaagggacctgtataatgtcacaaaatagcagtgatagttatggccaagacaagtcacaaatctcacaaggctaatgctcccttggaagtgtgtattttttcaatgagagctaatttgttcagattggttacggtccaattttaatatacataaagagttggatttttaaaaggagttgagaaccttgttaacgaaatccaagtatgtgtgtgaaattttacatttttattgtgttttttaagtttacgttgaaaaaattcttccttccatattcatgaatctacccgttcatagaaagattatgcatcacaaatctcatgcaagtctttatattctttcgttttaattccccaactatccaaatgcaagcacattgtaaaatgaacatcagtaattacatttaacgttattttttatactttttctgacaggtacatcttggagggtaaagagttggagttctaca

SEQ ID NO: 5848 - DNA, 5062 bp, Manihot esculenta
  Intron number 3 from transcript cassava4.1_029448m (locus cassava4.1_029448m.g) derived from phytozome v7.0 (chr-ID scaffold12541; pos 66458 to 71519 reverse strand)
ttcttcgaacggcagcttaccaggtttgttgttagaatgtttctcatctcccaagtttttttttcggagcttaatttcctctcatcaggttcaacctcacggcaattagtctttttagttgaactatcattttagcacaagtctttactttactctcgactaatgttgttttataagcacatctaaaagaagcaattaaaatggttgatttcttgttttgattgttttatgtacgtttttattttgtaagatgtctttgaagccagggtttgaatttttccaaccggtccttcattgtagtggtgggaatatatgacgaatgtacacctgcactgcatgtgcacgcgcacaccctcccacccaccttttagtcaaatgtttttttctatggattctatctagtctcttgaataaataatgatgaacatttcagtcatgattagtctggtgtcaatttgatgtccacagaatgatgatgaggatatgaaatacatgtacaatgcttatctacacaagctggtcacttgcttcctgtctcatccatctgctagggacaaggtacgttgaattatcttcttaatttctggtggcacttgaaggggtaaaattgatggtcaacttcaaatgtccgatgatgagttgcagtaattagtatgccatttttagttattagattttttaaggctgtatgttacataactactattttatattgtttattggtttttgctctcccattaccatgacacccgttgtttaatggtaaaaaagttttgttcctacactggttgttatacctgttgcttaataacaatggcagaaagttatttaccattatgtaatagtaacggttcattactttgttttttttaagccagatgggggcagaaactatcagctctcgtcatttcctttctttgatggttttaagccgttatatttcactttctctctcagtttccacatgaacttttctatctttcaacaaatctctcacttcttctttcttaagctaagatcatcaactatctttatcattatagtctctagacatctatatcttacaaaaagtaagtaatttgtttttatgtttggtgttctttatgtgttgaagaaaaatttgtttgacgctaggcttttattaaattcatagtatgaagcatcattctttactatctacatgattattttagcttcaaatcgattaatgccattgatgtctaagaatgttgaaattgatgtgttagtgctttagccttttatttttcttaatatcttaaaatatgtactcatttcatgaactttgcaaatttcccaaaaaaattaggggagaactattatttggtccctcgagtttttaaaaaattcgttagtttatacttataattgttatgcccaattgaaagttcccttattattttcaaatgcaactaattagttattctgttatatatattgacagcttctgtagacattcgataaacattataaatgtcttttaaaatttaattcctgatattttaaacaaattactataagatccttcacatttcattattataaattatttagccctttgactaatgcaaacattaacaggactaggtagttgcatttcaaattagtaaggggccttttaattagacttaagaattatagagatgaactaatgaattttctaaaacccagggaccaaatggtaattctctcgaaaatttgtttagcgatatgccatattcatatgttacttccgtcacagtgctatttttgttacctgtggtgcgaccgccaaccataaatgtgctgtgattgcgatttaaatccttgttcagtgtttcaattttttgctgttgttttgttctattttattttttgtggtgtttgttgttggtgctgcatgtatctgtgcttgtttgtgcttgtggtttgccaccttttctatgtttctaaggtcttttctctttttgtttgcatttgcatgggcatgggatgggcatgtatatgagtgctctatgctttgtggtttggcctcttcatctgctgtgtatggtttgtcttaagtttttccctttctattttttgcatgtttacaaatgtgttggaagtacacaatttacatgatatgtttatgcatgggtgtgctctttaatgaaattggctaattatatgctgaaatagttttagcttctatatttgatgattttatgcaagtatgtgttagaactgaaattctaacagggaaatttagagagaagaagaagaagaagaagaagaataagaggggagaagaattagagaggataggagagaataagattcagagttggagaaagtagtattgttctgtattgaatttcataatgcctttacatgtggaacatactgagattttatagatcttagctataataacttaactccaactgtactgcaaaacagctgtaacagctggttgttatttgtaatagcaatattctagagatttctaacccattacattccttttatgttcccttggcattttccctataatacgtgatggtatgttactgagtactttgattcgcaccatgcccaaaagtttggctaaagcgtgccttggaatgtgtccatgttgtttatatcatatattagtatatatttttaaatgagatatttaaagtaggtacatgacaacatgttatacgcacagtgggagagaaagaggggagagggagagggattttcatatcttgccaattgttattgatatggtggatacattgacataatgtactgtgggtatgatccgctacttttgtttgttgtctcaactcccaagttcatgaatgtgagaacatagatattcattcattcattcttttaagaaaagaatatgggccgaaggatctaatgaattcataatacatgaacagagggagagggattttcatatcttgccaattgttattgatatggtggatacattgacataatgtactgtaggtatgatccactacttttgtttgttgtctcaactcccaagttcatgaatgtgagaatcgtagatattcattcattcattcttttaagaaaagaatatgggctaagggatctaataaattcatactacatgaaccccgccattggtttatctgtttaagtctcttcagcatgagtttctgttaccaaactactgcaagtctatagccgattcagtcatggacccaagtcaaagcagccacatattgagcctctaaattagtcaaatatttcagttatttttcagctatcttttagttaaattgttccctgtttgtaggagggtattcctccactttctatttcatgttgttagttgaggagggtgttcctccatgttgaagtagtgctcctttaatgtaggaagaagttatacttcctttctgtatttaagcaataacattaatgaagaggggagcttccaaaatcaattaagtcttgagcgctttaagtctcagaggtttcaggttccctctttagagcctgaattgttaatgacccaaggtcgtaaaaagactcttaacccaaacactcaaactctagccatacccttagcccacagacccataaccaaatccacaactcgggaccataacaatttcttatcttcaagaaacaactctttgtggaataaaatggttttcttattgattgggacttggaagtgagatgggctttaggccgcgggagaattccactgtttcttgtggggaagcaatttgggttagcttgtttgttgaaaaatcaatatttgggtcaatacaaacatggcacagctagtcatttcacatttgtatattaaacttgaaatgaacatgaccctacaatacatcctaatttttaaatgataacatgctgcgatgcacatgattgtataacgattgaactcaacaagatctgtttgacatgagttgatacgtttaatgctaagtttctagtttctaactatggcatatatccttagtagtttaaagtgtatgtatttttaaagttgttttgttactttagtgggttaatcatgcatagaaagcaaaattttggggatgtggagttgtggacatgattacatcaattcaaaccctccaattttgtgtttcatctggatcatgttcatgaaccatgtccaattttgcgtccttgggtcccatatttatgtgattttaatgggcctctagttgaacaaagaagggaagtttgtagctcataatatacctgttccaataactataatttattttctagcttttatggctatctttgcagttggtttgtcaaatgtgatggtttatatgacaacaataatgcagtaagaagtaaataaataaacaaatgacaaatgtttctgttcatgccacaatgctcaatttggacatttttgttgactccaagtaaaataggacgcgtaaaggatatagatttccactcatttgtagtgtattctgttatttaaagtgtcaagttgttaatagtgttttaagatttattgttttgcatggtgagtgtggtttgtatggaaaatctccatgaatcatgtgtgcaagtagatgattcgagtttcaaacactatgcagatgctatctgctaactcaaacatctattatagtcgaccggtttgatataacatatcatcccatgagctgttctgtgtcctgccacttatttccatctattcctttgcgaaaattatattgtttgggggtttattcttaaaattttgatggtgggggccaaaaatggttgtggattgcaagagtaatctgcatattgagtgcattaataaattttctcaatttgagcatcatccgggcagattggtgtgcgttttctaatctatggaacctggtaagaatcctaagtttttgtgtggagggaaaaagtctggcaaaaggtgtgcatttctctaacgttgtcatttttttaattaatatcatgatgtatgcatacacatatattatactttcttaatgtgttcttatcattatcactttgagaaacttactatattactttcttaaaggtaaaagattcaaaggagaaggca

SEQ ID NO: 5849 - DNA, 2181 bp, Manihot esculenta
  Intron number 3 from transcript cassava4.1_003899m (locus cassava4.1_003899m.g) derived from phytozome v7.0 (chr-ID scaffold06948; pos 251453 to 253633)
acatatccacgtagcaggtaattggttaagtagtttttgctataacatattggaacaacataactgcttcaaatcacttgctcagaacttcaagttattaaaactaaaaaaatattatatatggatattagaaaaatagaatatagattattttgaaaagagtcaaattgtaccatttttttttactgaaaccggttaagtagtttttgctataacatattggaacaacataactgcttcaaatcatttgctcagaacttcaagttattaaaactaaaaaaataatatatatggctattagaaaaatagaatatagattgttttgaaaagagtcaaattgtaccatttttttttactgaaaccatgagaacagcaaactgattaatttgttatctaagatgtaattgcacaaaggattaaatcttcattaagttccattgtttcgtttgatgtttttgtcttgttattgaattttaattttttttaaaggggtgaattattattatcatttttttttcatcaatttatggtacctgtaaaaaccacaactcaaaggagttctattaagtcctcgtcatgggacctcaattaatagcataacctttgctgagggtgtgatgttgacatcataagctggtcttttcgaagagttgaaatggttcaacagctaagctttatatgtaacatggaaattgcatgttagtggactatattttgacagcaaaacatgataacagagctgatcaacataccactttaacatcacctttcaacgatcgatgggaatttaaaatgtgaacttcaagagcctcttagcaggcaaataatctgatcgagagatcatgatgacaaaaataaggccaattttcatgcaagagttttgaataatttgcatttagttggaaataaaagtatttagtgacttgggatacttatttattcagttctcgggcaaatcaaatgcatttagttttatacagagtaaaccttttcttttaaaacttccataaaatgggtacaattttagatttatcagcattgtctttggtcgtctgtgtgtgaaatctatttgtaaattgaattaagtggaagactatcaatatattattggttgagtgggaattaggttctcatggtccctacactgcccttttctttctaatggtagacattatccatccaactgcttgcaagtttttagcaaaacatttgaattataagcaataacacatggttttgagttcatattaattctaatatcttgagcagaaaattcttccttttccttattcagtgaagtttgtgggatgcctattgtgaataggagacgtttgaattgatgatggctacattatgttgtagaatgtacgttattgcacattattgcacaaatgactcatgcacttgtgtgtttgagttgaaatatgcttaacagttgcaatttccattgcaatcatgcacacacaacatttatttctctttgagtaaaataaatcagattgatttttttttaatcaaattaccatgtgaaatattcggtgttttcttcttttgctatccctatcccataggtagttgtgccagccttcatatgtttttattaggtgccatcaaagcctgtggataagtttggagctactttttgtgatcttggatatttgtcatttctttgcactatatatgaatttgagttatgcagaaccatagttctcagtgatgtatcataagttcttctaggctcttggttaagactgtgtttggaagaaaaggagaatggggaaatgtatccctattctatgcaagttaacatacatttcctccatttattatatctactgcatataattggctgtatcactctcctttcttcctaccaaatataatgtaaaagaaatgaatgaagatgacatgttacttcttatattgaactatgtttggtgatggtttctgttcttttgcaccctagtggttatacatggcttaggcaaactgaaggtgcatgttgttcttcccttgtgggggctgtaaatgtaaaaccaccttgtctggatcattcaatgaaaaatggacaagaatagcaaacataattaattattcggctcaaatgttttggcattctaactgatttgatgtgtttatctggcaggcccgagtcgtttgaccaaagaggtcttttgtgtg

SEQ ID NO: 5850 - DNA, 2743 bp, Manihot esculenta
  Intron number 1 from transcript cassava4.1_031404m (locus cassava4.1_031404m.g) derived from phytozome v7.0 (chr-ID scaffold09517; pos 60902 to 63644)
cgagaccgctgcctcctcctgaggaagtcaacgaggtcttttcccattacactttctcttgtgatttgagtgtcttgtgtagtctatttggtgaacctctgggaatttcttcttttcatcagttctctgtttggttatttttgataattagggaaaaaggaagagaaaattatgttaagtaggaagagaaaattatgttaagtaacgattgcattactgttggatatagccaaactgagtaaaattgatggacctggatttttctaaagtaagttgttttagggttttctttgtttaaaagttttataatagtagcagtagtagtatcgctagtataactactacttcagcttgtcattagtttttagtcgtttatttctattatcataatgtagtaattatcgttcttgcaattgcttagggtcagttgtccttgactgcactatatattgtatgttggaatctgtcaactattgcatgcattaagttgactaatttattttcggttaaaaaattattcattttccttttcttcaaaattatccttatcatctagtcagtatacattatttgatacctaaattttatgtttgttggcttataaaagtgatctcttattactgtgtctgatcacaataacaagaatgaattgccaagcggcatcacaagtgatctcttgagaatttgatatctacattggatggttccataaaactcctaccaaaatcccttttgtaggttttctatttgattttcgtgttgaaggattataggaatgttttttttttgaggttggggctagggcttgtagccctgtagaactcaagaatagtggtttgtagacaacttggttcatttggatatcttaaggaaatcaaataaaagtttaagcaaacaaaatcaaactgttagcttcacactactaggagctaggacacactgctatcaagaaagtcacacacaagattgttgaactcgcattttggaccaatgatcatcgggtaatttgtaaactcaaaagatttaaagaaccatttatggtaatactcagaaatatttatatccttgtaaataatcgtgaaaaagctttctagtatataattatgcctaaatattcaacttattttaattttaaatgtaaactaagatgtcaagatgagaataattgaagttatttaataatttgataagttaaggcacatataaatttaaacatcatctttgagagcatattccaactttgagaggttgtaaaatactaataataagaaaaaaaaattaactatgaaaaatattgtatattttgatgaataatttacagaaattagctcatattatgtgaatgacaatataataaaattttcacaaaaaataatataaaatatatgcatgataattgtattattgcaaatgctagttcttacgatatttaaaaattaaaagttctagaatgatactaaaataaacaaatgacaatgaattaaattttaaaagttgatattttaaattgaaattgcaaatttataaaaccatagaattgtcaaattgctagatcacagaattttatttatttattgaatttgcaatttggaaacatctatttttgtttgttttcaatttttatatgtttcggttagtggtcccacattttctagtgttagaatgacatcacacaaataatactaatggaagagcataattttagaatgaataatagagtattataagcttaggtatttgtagattcaactcctacacctactaatgcctatcttactagtccttttaaaattttgactcctaaactaagatctctctttcacgagacaactagactaatgaggactctaataaaagtcaaaacttaaacaaaatgagttttaagacataaaattttaacttgcccttcccagaaaaactgtacagaattactcagataccactgcttaatgttccatccctgcagcttactgtgattagtaatttgcaaaaattgacattctaattaccatatggagttcccttattttctacatcctttttatgttgaaagttctacactgggaaaaatttgtggataactctgctgctttactttaggattaaaaatcttttacaacatgaggaagttgttttcccaaggacattgagaaatgttctgtcttcatatgtatgctgaagtttaatattagcttgaagttatgggttcatttaaaatagatgtaagttgagtatcattaccttttgttagctataataatttgattccttacgtagatagtctatgtataaataaattgttgcctaggagggaagcgtttttcatgttagggaatgtgattgcatgatatgctgaaaaaatatgggtgatttattgtgtagatcaaggactttgtacacttaaaccattgtgatattttagtgattgatcataactctatcgagtcatttttgttccttgactataagatactgcgaaaggacaaacaattatgtggttgaatggttaaattcatagttttattatccatcccttgtgattggatatactaccatgttaaatttgtgttatctgtttctcactatgatgataggctcaaatggagactattatttattttttgtgatgtcttgcagtgaatctgttttttgaagttctattagttaatttccttacttgtacttttcttacttattacaaatgaaatctctcaggtagccattgaagtggagcgagaagaag

SEQ ID NO: 5851 - DNA, 508 bp, Manihot esculenta
  Intron number 9 from transcript cassava4.1_009071m (locus cassava4.1_008317m.g) derived from phytozome v7.0 (chr-ID scaffold05875; pos 1032111 to 1032618)
gcacatcaggttagttgtgctgtatctgatgaagtggattaatggtatatgtctttgttattctgggattttatcttctgagatgtgtacagatcatcattattctgttttggggtttggtgatccctgtcgactcgttgaatacatcaatgcctaatatctgtgacaataatttcttttccctttatcctgtgttgcacatcaggttaattatgctgcatctggcgtatctaattaatggtatatgtgatgtgtctttaatattctatgattttatcttttgagatgtttgtggatcatcactattctatttttagtgatttctattatattgtgggatacatcaatgcctaatacttatgacaataatttgttttcccttttattctgtcctattgtttctgtgtgtagggccctgatatatgtagttcttctaccacgtgcaaactatgatgaaagcttatctaataaagttttttccctttattgctcagaagagggcaaagag

SEQ ID NO: 5852 - DNA, 1856 bp, Manihot esculenta
  Intron number 2 from transcript cassava4.1_014260m (locus cassava4.1_014260m.g) derived from phytozome v7.0 (chr-ID scaffold04177; pos 68189 to 70044 reverse strand)
aaaggtattgcttggtgaggacatggctttaggattttcttcagcattatctattatgaatgggagcatgcagttccagttccggttcagggtctacctagaaattgtagccgaacttaaatttttggcatggttccatttctattcttaatgggttcatggtactttggttctgattcagttctgttcttggaacaatttgatgcaatagataaagtcatatcggaattatcatttaagctttaaaggtggttgttaaagcatagtgtatcatatgatataccttagctgtttcttaattacatatatttaactattaggtacataattaaagatttagcatattatataatatattaataggagatttaatgtatttataacaaaaaatgttaagaaatggtagaggaatgagaaacgatattatgttttatgcagcccataactgtatataatatatctaaacaatcatagaaaaatatgtctgtaaaattgattcttggtttggtatttgataaacttgtatggttttatcatatttaatttttagtaattcagttgacttctttgatatatactgatttatctaaggagaaattagaatatctttcccatttcaattatgtgtttaatttggttatgattaggggtgattggaattcaatttaaacagaactgactgaactgattcaatttggaaattcgattggatttggtttctattttaagaaatttagtctatttgcttcggcttggtcttctaataaagtctgtaaaactgaactgaactgaaccaaatagtttaattaattaattaattaattaattgataggtttcaaatcaaagttaaaaatataaatgtaactgaaattgggtctaaaatgagcagttttaatttagtttggttccaatcgaatgagtagttttaattgggtctcaaatcaaaccaaaccgaaatgaatagttttaatttagtctggtgaaaattttagttttgtttgattcagtttggttttcttcctaatttggttcaatttggtttagtctgctaaaaattttggtttatttatttatttctcctttgatgttttctggattaaaaaattccctgcatgggcaccatcacacactggttgagtgaggattttttcctgtgttatgagaatgcaagagatttctggacagctgaggaaatagtggtgcgtgcacagcatatggtggtggtggtttaatggcttatttggaccgcataattcatataacttgctaaaatcaaattgaaacaattttggaatctatatattgctgctttctattggggagtgttctgtagtttgcacatttcatgaaattcagattcctgctgtgtgagcacctataacatatggcattttttttttattgtggagagctttttcagctattctgagatcagcttgaaacagttttgaaatctatttttgctgctttctgttggagaagcattctgcacatttacatgtaattcaggttcatgttgtgtgtgagtacctgtaacatatagcataattgactgttagagcattttcagcatatttgttttaataagatccttacatggatttagttttaactgtttcctagacaagcttgtttatattcaaatcccaaagaactgcatgtatgagttgtgtagtacgctcgtgattggattctgtactcgtctgggtgtgctttagccattggatcgatctctatatgcattctagtgacctttagttattgagtccatcagttgtattacattagttaattaaaagaagtttttgctaccattgtagaattattcttgtgaagaaggcagtgcaggaaaagg

SEQ ID NO: 5853 - DNA, 903 bp, Manihot esculenta
  Intron number 1 from transcript cassava4.1_019922m (locus cassava4.1_019922m.g) derived from phytozome v7.0 (chr-ID scaffold03049; pos 518048 to 518950)
tgctgttcaagctttcaaattaaccctctcgcgtaattcgatttcttctctttttatttttccctgttttcttttttccctattaactctttcttgccattttttttcccgggaaagttagggtttttcatttccttccttcacatactgcttcatttatcgttttgttcctaataaagccttttttttcctgcaaggcgtagcatctggtgtgttggttctctaattagtaatttctattgaaaattgcatatttaatgaggtggttcttgtttatatattgtgctactggttcgcggctttcatttataggtttttttgaggatttgaggtcattatttgttctcatgctattcaaaaaattgaaatcatgtgaagattgattcttggtgtttgaactgggatttgagtatgcaaagacatgggctttgtagctgctagaaatttagtatgtcagtagaatatattgctccaactagcttcgtcattgaatattgatgatattctcattttgcatagcttaagggagctttattttatcaagttaatgcaatgaatgcgattttttccccagtaactaatgcactctatcaaatggttgataaaccaactaaaggtaaagcatagtttatgctgtagcctgcagggattcgcaggtagctcctttttgttggattgtatgtcttggaatacttacaatattacagttatttggtgattgaaaacctctgagttttgtccacgaggccttttatgcttttgcagaatggaattattatcaataatgcctatggagtttcttggccttttcatcatgtgagttgttatatcctcttatcttgctaggttactgactgattgttttctgttcttatgtaggctaatagacataccatcattctg

SEQ ID NO: 5854 - DNA, 1515 bp, Manihot esculenta
  Intron number 2 from transcript cassava4.1_003709m (locus cassava4.1_003709m.g) derived from phytozome v7.0 (chr-ID scaffold09460; pos 199091 to 200605 reverse strand)
atcttggaacggtgaaagtgaaacagtggttagtaagtcttattctagactgcacaaggttatgtattacttcaaagcaccgttgttagaatcttacaatactcgatttgaatcttatgattcaaatccattttctaaaaaatcaattcgaatctatagggcaaatcttaaatatacttgaatcatacaattcttgattcgaatcatacgattcttgattcgattctacatcctgacgattcaaatctacatgatacaataaaaaaaattgatagtgaataaggtgaatcaatataaagtgatcaaattttcacccgatctaattgtctatttgtaaagaatttgttagatattgtattttcaaaatttaagatcttatttatttttgctttaaaaaaatgtatataaaacctttccttagctatttttcttccaccaatcatttttttccctcttcgtcttctgttttttttctttttggttaatttacttatctaattatagttgtcaaagttatgacaatttatatttataatctaatatgctatctttttctttactatttaattttttgaaatgagagtttcagtatatgtataatgatgactcttgtctacaattccaaagttcataatttacaatgtaaaactacataacataatacatacgtattattctattatgaagaatatttctaattagataaatagtaaatctatatttatcaaaatgtcattataatattttttttgcttatttttggaacatatatttttaattaatttttcaaagtatcagcgaatcttataatttgattatcgattcatgaaatgaagatttcaattctcgactcgaatctccatttgacaactatgcttcaaagaactcgctttccaaagagttcatctttagttccttaatctaggaagctgaaactagttcgttctttagaggattggaagctgcaatatgtagaacaagctatagcatattgtttgtgcacaaataaaacacccctgggttaggactgaaagcaggagttttgagttcttccttagtcattggaaaatttaagggccttttttcttgtggaaagcatgttgcagctttctattttatttttttgtgagaaatttcatcttcatcttatgttcaacttggaaagcatttttattcatgagtacaaggaaatcatttttcaatttttgaaaatattttcatttcataattattgtagcacttcacaaatttagaaacctcttgtaatgcctctttgacctccaacttggttttggaggttgacaggtacaaatgattgacctcctttatccttctacccttcagtcaaataaagttaagaagcttatttctatttttatttcatactattcagcctttacccctatatatttctaatcaacttccttccaagttgttagtagttcatttttttatgaattggaacaagttttgacagattgttataatgtggcagatagcttgaagaataataat

SEQ ID NO: 5855 - DNA, 2628 bp, Manihot esculenta
  Intron number 3 from transcript cassava4.1_001893m (locus cassava4.1_001893m.g) derived from phytozome v7.0 (chr-ID scaffold05875; pos 232645 to 235272)
aaacaattttggaaagcaagaagaactattgtcaagtgagtatctgttctagttattgctatttccataagttgcagcatatcaacatcaaacttgtggaattttctttcattctctaaaattgatgcaccttttggtacacatatttgatccgagttaaaattagcaatttgatctatttattcatcttatatgctcttattcattcaatgctcttaggatttggagtggtttgttgatatttcaacaggaagttctaggaaatctctgttgtctatgttttcactgatgcggtctaattacttttgtggaatttggagtagctaaattcatttctaagtttatattgtggcgcccctgccatttatatctacttataaactatgatctctcacatgcataaacactataaactcaaaaatttggtacttatgtttgttatatgacttgctattcttttatttacttgcaagcaatggttgccaaactagattaatgaagcagagaggagaaactaccaattagaaaacaccaagatcaaataaggttttatgacattgtgccattttaaatggagatcaatcctatttaataatttataaatttgaaggtacaaatagatgtattatgtatgaaaattaatatttgaaagtaataatagagtgacaattttatttctcttttaacatttatttcttacaagttatattttagattaattttttaacatttttcaatttctctcaaacgctatacaattatctatgcactctctttaatttctgatactcttttaattattttaaaccctcattaaaactttcaacatcctctattttacttattttctttactacttcgttattcaattaacaaactttatcatattattttataaaaaatggaaattagcagaattggaagcttgaggaacaaggatgagagtaaaattggtgaatcaccataatttctcatctctttttatttctcttaaccctttttttttttaattaagttcaagtcatttcttattaaattttattaacaaattatttcattcttttttcttcttatttttatttaattaaaaaatttctaagaaaagttgaatatttttacaaagatgacttaattccaaactaccctcaaaatattatccaaaccttctcaaacagccttgccctttgaacagtttcagattgtactccgaccagaaatgttggttccgcaacagtcctccgaactgtcccttgactgtttggttcaggtgcaaggaaatcttgaacctaacctgtggttgagggccacccctgggtgagactctcacatattatagaagaaggagaaggaataaagaaggcagttttggaaggaaacagaaaaaggatagggtgtagttgtaaatttgagcacaggtttggatttcttttttaatcattaacccaaactgaatcattaatgtttctgtaagtactgaagttgcttgatttagttgattaactaaaaatgatcttctcgattgttaggaaattagttcctagaaatcttggatgggttgatgaatattgatattcattcctcacatgttagtatgatggtattgtccctgtaaaatcatgataaatttggaggatgacattttagagttttcagccttcaacttcttcagtagttgagaaccagcgtactgtggtttttcaatgagaagctcctcttatttatttatcagtgcttttcaatggccactgctttgattgagcaaacttggctctttttcttacgccttattatgattattattattatttacttctttgtcttgttcccgttgatcattcggggattatagtcatgcttgaaaccttctttttccccccttcgttttgtgcccaaattttatcatgatatgcatttgaatcactagggtatggatgtatccgcacagatttagttgtttattgatgctctctcagagcatgagttttctataaattttgcaaggaaataacagtgaacgttaaaaatcgaacaatcatacagtcaaagaataagcacgaaaagtaaataacatactaattgttaaaaatcgaacaatcacacagtcaaaggataggcacggaaagtaaataacatacggatctaacgggatttgccaatttgattacgttcacaacggttagggttgttttatttccctgtgagtttttgaataaaatatactataagaatattatatatttatatattcagaaaaattaaaaaaaaaaacaaaatagtcttaacaaaattcgtttcgggactccgcctcacactgtccaatcagctcagcgttgagttggtctgcaatcgtggatatggtgtacagtccataatccataatatatatcattaggctccatatcataaaagtgatccatctggcaagaatttaaatgtaatcacttctgaacaaatagcatatggggtgatattaactcctacatttttgtcttatttcaactctatctgatgcatcgaatattttgatgggtgttttcctttctctaatcaagaacgttattgtttgaccaaacttctttttgttgttttgtagtcaacaaagagtgttcacagtgcaagtatttgagt

SEQ ID NO: 5856 - DNA, 5034 bp, Manihot esculenta
  Intron number 17 from transcript cassava4.1_000342m (locus cassava4.1_000342m.g) derived from phytozome v7.0 (chr-ID scaffold01508; pos 332049 to 337082)
ttgattcttctgagccagttcaaaatctagaccaggtacaagtccaataatatttactaaagtctcaagatagtgcactttgatttttaaacatttaatataataatccgtctcaaactaatacaaataacatttggacccattttttatttaggtcaaaatggttaacccaagatatttagtagtttttgttagccatttataaaacatcaaattcctgtaaacaattgatgtgggacactataatctcctccactcaattttgccacgtcctcgtcgcaaactgaatcggcacactcaattgctaaactaggatcgagcttttgagtattatggttcaaggcacgttccttgggcggctccattttgttttgcacgcgtagctcttttctcacatcaatgggatgttcttcatctcagcatgattaatgtctatgaagaattttgaaaaaatttggagtattcttgtatttcacttttattctttacaattagtctacatgactatttatacacaaagaattatatctaaacaggaagtaaataatcaaataataattacagagataattaaggatcataatcaaatcaaatcatatctctagaatcggttaggatcagtaaataagtcaacactttccctcaagttggtgcaaagatgtcgcacatgcccaacttgcaaatcagattatggtagattttgttgttgagccctttagtaaacacatccgcaagttgcccagtagaagtcacatgaactaggctcaagacaccgtctgttaatttttctttaatgaagtgccgatcaatttcaatgtgcttcgtccggtcatgttggattggattttgtgctatacttatagcagttttattgtcacaatataaagttatcttgtctctttcgggcaacctcaactccctcaataacttctgcaaccataagagttcacatacaccttgggccattgctctgtattctgcttcagcactggaccgagcaacaacactttgttttttgctcctccaagtaacaaggttccctcccacaattgtgcagtagccagaggtggatctcctgtcattaagagatcctgcccaatctgcatctgtgaaaacttcaactcgaagatgaccatgtttggagtaaagaagccctttccttggcgcagactttaggtatctcaagatgcaaagtatagcctgcatatgagtctcgcgagggtcatgcatgaattggctggctaagctaacagtataggctatatctggtcgagtatgtgagagataaatcaaccttcctactaatctttggtatcttccaatatccacagactcaccagttcctgcttccagcttgtgattactttcaatgggagattctgctggtttacatcccatcataccagtttcttccaaaagatccagaatgtactttctttgggagatgaaaattcatttttctgatctagccacttcaatacctagaaaatattgcagttttcatagatctttgatttcaaattcctgagtcaacaacctctttaattgagccatttcctctttgtcatcatctgtcaccactatatcatcaacatacacaataagaagcgtgatcttacccttgtgatgtttgataaacagagtgtgatcaacattgctttgttggtaaccaaaggacatcatggctctgctaaacctgtcaaaccaagctctgggagattgttttagcctatacaaagccttttttaacttgcacacctttccttgtgtcttctcatctgagaacccaggaggaatttccatgaacacttcttcctctaaatccccatgaaggaaagcattcttcacatcaaactgttgcaagtccccgtccaagttggctgcacaagataacagaactctgattgagttcatttttacaactggggcaaatgtctcttggtaatccattccataagtttgggtgaatcctttagcaaccaatctagccttaaaccgttcaattgtgccatcagttttgtgtttcactgtgaacacccatttacaaccaacgagtttccttccagatgggaaagtaacaagctctcaggtctcatttttagccaatgctttcatctcttcaatcattgctcccttccatttaggatctgcaagagttttcttccaatcctgtggaatagacacagaggaaataaacaaggcaaaggctctataggaaggagacaaggattcataagaaataaaattagaaatagggtgtttagtacaagatctgactccttttctttgtgcaataggtttatctaagtcattagagcattcaagagttgtgggtaattcaccagaagaagattcttgattgggtaactcaccagaagaagattcttgactctgagtaggctgcataatggcttcttctgccttgtccaaagaccaattctctcttcctgattggacatctccccctgtctactagaattcaaactctttagttaaaccatatcatttagaatcacagaattcgggatcacctcttcttgctcattattctcctcctgaagaggtgaatgggtggtactgaagtagggttcagtttctcggaaggtaatatccatactgactaaatattttctagagggagggtgataatacttgtatcctttctgtgtcggagaatacccaacaaacacacatttaagggccttgggatttaatttccctgccgtcctagtatggacaaagcaaacacacccaaatacttttggtggaacaacgtatgaattcttaccttgtagaaccgccaaaggactcataaagtcaagggtcttgaaaagcattctattgataagataagcagatgcaaggattgcatctccccaatatgctttgagtagattcatggtgaacataagagatcgagttacctccaatagatgcctatttttcctttcagcaatgtcattttgagcactagtataaggacaactagtctggtgtactattccattattctccaaataagcagaaaaaccactattcatgtattctcttccattgtcagttcttaaaattttcaccttagtatcaaattgagtacaaattatcttatgaaacgattgaaaacaagaaaatacatcacttttagctttaataaaatagacccaagtaattcgagtgtaacaatcaataaaggtgacaaaccatcgattaccagacaaggagacggtttgagtaggcccccaaacatcagaatgaatagtcgcgaaaagaatttgacttttattatgacttaaaggataggatgttctagtgtgtttagcatactcacaagcatcacaaaatagagaatcaaattgagttctagcaaacaaattaggataaagtttttctaaggcaaaaaaagatggatgccttaaccgtctgtgccactgtattatctccttattgacattcttattttctccaaaacaggcttgagatatcgaagaacctggatcaccctccaacatgtataagccatcatgcagcctaccattgccaatcctcttccctgtgcgaagatcctgaataacacaatgatcaagaaagaattcaattttacagttaagggcattggtgatagcactgacagataaaaggttgacaggaaagtggggaacatggaggacagatgataatttaatgttggatatgcaaataacagaacctgttccggatatgagagtaaaagagccatcagcaattctgacactatctttggttagagaaggaaaataattaagaaagtatttagtagagcctgtcatgtgtctattcgcaccagaatcgataatccatggaatattattaagagaggaagcattaccttctgccatcgacacccttttaccttctgccatgacaaatgtttatgaactgtgacagaataggaggtatccaaggttgtacacacaaaagagtctaattgattcaccaaaagaccgggtagcagcacgggaaggctagaaagatcgtcagaatcatcgctagagtgatcggagtggcaaagcagcgttaggcgatgggtcacgcgtcgggaagtgatgggtcacgcaccgggaaagggaggcgcgtgagcctcacgcgcaggttttttcggcgtcagagctgggcgatcagccagcgacagtccgacgattctcctggtgccggcggtgagaggagaaaaggctcctagatgggttagtaccaaaaaggtagatctagggttttgaaaccctaaagaggaaaaattgaattcaagtcctaaaataaggaaaatgttttgataccattaagaattttggaaaaatttagagtattcttgtatttcactcttaatatttacaattggtctacatgaatatttatacacaaagaattatatctaaacaggaagtaaataatcaaataataattacagagataattaaggattataatcaaatcaaatcatattcctagaatcggttaggatcagtaaataagtcaacagatttgattgttgtaattttattttgcattaactagagtttaagtatggggtgtaactatttcttctttaatacaaaagaaagtagcttgttttgttgttaaaggggaaagttctgatgtgcaaatccttatgcttacctattaaattatgcattgtatgcgagtcagatatagcaaaaccaagggaaatcatctccattgtctgagaattgaaggtcatggttagaatccttaaaataatccttaaaataggagaaaagttatcatgggctttgataagtggaagttaatttggctatttagctatctaggttttggtaggcgcaacaatgactctatgatgttggatttttgtttcttgccattgatgggcatgtacatgcttgcacaagcatacatgagagcatgagcatacattacttgaatctaattaaaggcttcacattcctagcaatcccttgtaattattgcttgaattatggcccaggtaatatatcggataaagcttccaggacctgcaat

SEQ ID NO: 5857 - DNA, 1480 bp, Manihot esculenta
  Intron number 3 from transcript cassava4.1_004988m (locus cassava4.1_004988m.g) derived from phytozome v7.0 (chr-ID scaffold09492; pos 24697 to 26176)
ctcacacagagttatctaaggatctcattgaactggtttgtacgcttaactatctcacttcctttgattgtatatgaatgattttgtctctattgccttctgtctttctttctctcaccaatgagggatcattcgttgcaccatctcctgctattaagccatcaaaattatttgtgtttgatccactttactgctgataaatgttagtttacttagtttgatgtcttatattttggatcatgcattagtctctggtttagtgagcttcaaatgattctttgttgttgatgatatagtggagataggtgagattaatttttcattttcacaaattgatgttatcattgtctaagatgcataacctgttgcccaagaaatgcaattatttaattgacaggcagtagcatgccagatatttgaatcatacacatgatatttatgccacagtgcattgataattagcttatatggaaaattttggtatataatacagtcactgcatggcatatgagttgataatttgttttagcttgaaaaaattctggtagtgcatattgtgtaccatgtaagatttggcttttccctttttctttggtaccctcttctctatttttgttgggtggagtaaggaaacagtaaagggcttcgtggggctgaaaagtacaaaggagaactactgaaatcaactaagtctataacattaagttctgaaggaatgataatctatacaaaggagaactactgaaatcaacttagtctataacactaagttctgaaggaatgataatctatatcaaagcttaagatttctaaactatcagcacaaatcagaggaaacctttccttatccccaacagcccttcttttgcagtccctccaaactttcgaaaagagttgttagaggtataagcagcaacaaaaaaaagtatttctttcttctcccaaagtaagccttcttaaaaggaaattactgagttttggctttacgctgtttcattttttcttcattgggatgggaccatttgtcagtcccttttattgccttatatcttgaaagaattatagtgatgtaacctgtttcctgttgatgacaataaccatccattgtggagctttttgggtgttcactcatgctcaatgcctccccgactgattttgtttatggcttatatgcctttattatccagttacattgtttacagtacctagattttgactgaatagtaaggcaattctgtgcttcttcctatcagatacagatgtgcactttaatttttcatgttgttgctattcattggcaaccacttgcactctcattctatttgttagcaacttctcatgctctcattacgacctctatgctttgaatctgctgagaacgctcatgttctttttacaaatatcttccttgcaatatttttaccatatgttttcatatggacatttatttctgttaggaagctcgcgtaccattgcaaat

SEQ ID NO: 5858 - DNA, 1833 bp, Manihot esculenta
  Intron number 1 from transcript cassava4.1_007160m (locus cassava4.1_007160m.g) derived from phytozome v7.0 (chr-ID scaffold01551; pos 1168478 to 1170310 reverse strand)
ataataccgttgcaattttgagcgagtaagttaacaccattagtcctgtccctttttttccgtagtataaggtttctgtaaaattttgtttaatttgcatgttggagctttgctgatagaaatatatgcaaagtataaagttggtgataaaaattttagatttttatggtggctgtgatgatgggtattgatgtttttatgttacgtcttccattctatttattaatgcatatattcctgtaaaaattagtcttcggtcgttttcagttgaataatatgagttttacgcctaggtgaagacgggatcgttgaaaatgttcatttttagaaggaatttgatcttttctttgtccagtgagatctaagttatgattgggttttacgctaaagaccatagagttcaagtgttatgatgatgatatagagtatgtgaaacaaaaagagttttgggttgttctgtgctgcatgcagtcgagcaactaatttcacccttatcctggaaatttggtgttctctttattttttttttctccttttctttttgcaattgtttattgactgttgttattagtataattgattcatagtcatgtgatttgtttcattcttctgttgactcatggtataacttgacggtctgacccttttagtattttgcaatagagtatgatctttttaacatttcttatttctcgcctgtttgtatgatatattaacattttaagcaagaaatcttacaacatatatactaacatatcataagttacgattctgtgcgtgccaatttcaaacacccttctgttaaagttaaacataatctcattaacccccctccttgacatgacaatcaaacttgaggcttgtctatttgtccctgttcttggccaaagttagaaggggattggggatgggggagtttaacatgaggccacccaagtttgctccaattattccattgcacttgccactaggcttacacctggctaagcctataagtgcttgtttatttagcttagtaaggtgtctgtgtttttgtgcattgtcatttccattttcatttttgttttttcaattgtctttcacaaaaagaaactcatttcagacttcattatgcatagacttgtggtaagagagcagtaaaatttttgtggagcttttggcctcacaataaaaatttaaagctggagttctagaaactagaaggtttagtagttaaaagaattgtgatatggtagtagccatctatttaaaattttccatccattttcttttttcaacttggagttcactgcaatttcttttgctggtatagtggtgctgtagttttgttcgtctcttatttgatgatccttatgcttaagttttgctgcttgagtgttgccaatgtcaccattcttgttcttgttgtttcatgttgggagttttttgacaatgtaccagcatcctccctttggaagagatccaaatcttgttacttaatggatttgaagaatcggtgaatgaatgaactctagtcctgccaacgtccaatttgttgataacagcatttatacatgctgttctattgtagacatttattgtggtatttgttctaatgctgtagttcccatgttaatacctggtccaaaagcccaacatgttgagcaactcttttagagtagcaacatttgacattttgacatgtagccaatattatcatgtgattttatagttccatttctcatctgccaataaaatagttcatagttatgtgaagtcatttgcactaatcagtgagttcaaattataatgttctcagtatcgagatctacaagcatcccaaagaagaacgga

SEQ ID NO: 5859 - DNA, 684 bp, Manihot esculenta
  Intron number 2 from transcript cassava4.1_004604m (locus cassava4.1_004604m.g) derived from phytozome v7.0 (chr-ID scaffold01701; pos 253282 to 253965 reverse strand)
agtatattaaggtattataaattattttcatttttaattttagatagtcttgatgaattagcatttcatcttatgccatttaacttaggttatttttttctggttatctgaaagtttgtctcttttatgttattattattcttgttttgttgctgattatacaatccgagtgcattcaagttgttaagatttagtaggtagcttggtgaaacaattttttttttcacttaatctgagtaggtgattctttatattaggacctggcaattttgtagtctttacccttgtttattttaaggtaatagaactaacctctcaagatgtgctggttagggagaatattagcttactgctttatgtaggtacttttagggtgccaatctcagcttttcataagaaaaaaaaaaggtttcgatcccctgatttatttgttcgacactaatcacaggctatttgcttgtgcttatggcatagttgtgtaactgaacctacgtagtaaaagttttatttaagtttcgtatgttctgaaaataatttacttcatttgtgaaccactctttccatgtggcttctttcattttggcaagtgtatgtttggaagcatgtctctttccttttcttttcttttcttttcttgaggagtcatatttgtttccttgtggtgaatcacatcgcagggccatt

SEQ ID NO: 5860 - DNA, 2859 bp, Manihot esculenta
  Intron number 1 from transcript cassava4.1_002649m (locus cassava4.1_002649m.g) derived from phytozome v7.0 (chr-ID scaffold07908; pos 18486 to 21344 reverse strand)
atttacttgggtgagtattaacgtgtgctttttctttttcttttttcatgctctctttatggctaatttcattattgtaaagggctgaaggtttttctcatgttgtctatcttcttacaccctaatgaaattatccagactggatggtaggcaattcttttcagctttctgctatgctcacatttttagtcattggtttgattgtatggtttctgctcctcacaacattagtttctggaatataattgcactcaatacataaagatctgatgttttgctttttactattttttgataataccataaggaactgaaacagctatcacaaagtaacctttaaaaactagagaaagcagtgacaaaaggttcaggaaacgtaaatgagggatacccagttgtacattgttcttttgcttatgagacactatccttgtcttttgcataaatggtttatggttcatgtcctgatcaatagggaacttttttgtatacgttgtgtgggaatggaggaatgggagtagtagggaatttttcgaatagatagccatagcctagaaatggaggaatgggatttgaaagcagtgtgtttaattttctgggactaaaagagaacttatgaagtagaggaattaggcaatcaagatgaaattcttgagaatgcttctcttttgctgtctatgtattttcctttttcttaatttgtagattatctaagtcttttaggatagtttcattacaatttcttttgattatgtgtatgaaccaggttgttctacttaatttttaaacaaattttcaaaatctcttacttacctaagcctagctaccaggtgaaaggattttgtttattttatttatgttatgttatggttacttattggatgacacttgtaagttgcattgcagcaaaaaatatctcatagagaagtcaaggtaatatattgaagcatttgtctattcaagtgcaactatggaatggggtgtattccagttcattcatcatgtcttagattcaaatatgcattttttaaacatgttgtgtgttggcaatcttgttttctagaaatatagttttacaaggatttggagctttaggggtatatacatagatatggatgaaattcagtttcacagatatcttaaacaaggcttcttaatctttggattgcatgatgttaacgctagatgtgatgcccaggaaattccgtatgagaaatttagaatcttccgatctcatagttgaacttctgtagctgtcatcattctcattacatactcttctatctctcttcattttctatatccattatcattattgtagattactaattagtcatttatagggataaagtataagaatgcacttcctgtgaactgtcaccatgatttattctcaagtttagggatttgattggtatgatgcaaatgcttgatgtatcgttgaatttctggattcagtttgctgaatgataatctactaccaccagcttgtttgttttgttcacaaacatgtttggcaaacacaatcttatttgaatataggggtttccacttcacttccatattgggtcattaagtacattgaaaatttactttattttgtcctctgcctatgtgatgttagtttgtattatctacatttctatttatccaacataaagaatcaaatgcttctatatggaaatataacatagtagtggtggaaggagtgaggagagagaaggataaatttaaaacaatgtagctaaagaagtatcataagatatataatttttgagtactgtatcaaattggtctccaaaaaagctgaatggcgaaaagggatccatacagctgacctcaaatagtttcggataacaataatattgtatttattgcgcttattgttcaaactgtggtatcacagatgaaacatttatatatatatatatatatatggttgacttgaaatttagcatccgtgatctgcatagatataatcataaacccaatggttgcaaaaatatgaataaaaagcacattatgggaatgggcaacagactggctaacttatgtgtgtgtgttgatcccctatatattatgtataatgtttcagtaaacttttagatggaaacatgacatctttttttactttgttcatattttttcagtgaatatgtgtactgtgaaatggtcaaaactcaaaaatatatttgtgcttaactttcatatttatgatgccactttgatcaacaaatttttgtttggtgtgaagatgaaagaaactgggagagctttctcatgtatattttgaaatcatcatctgatatctccccctccacttgaagctataagaaaatccaagtatattaactagtactctgtgaattgtggattttcagtctcagcaattaatcacagagggcctagaatatgtattctccatcgcttgtaacttggaaaaacttattaatccttgttaagtttgctaaatctttttctcttctaaccccacaaaaactgcatggctcttatacgtctgcttataaattgatgcatgtgatttgttataccatcccattacgaagtttcaatatcttattgtctatccatgcaacttctaggagaacaatgggaatgtttttcttccaatgcaacatgaaaaaaaaaaaaaaattaggtgttgcttaaaatttatgtcacaagcattcacgatagctgccttgtcaggtacatttcagaatgaaatattgggaatcaagcacataaaatagtcataaagtgatctgtttcacattgatcattgcataaaattttagttgcttcataaatatagcaagctttaactaactttgtggttggaatcttaattgtattcag

SEQ ID NO: 5861 - DNA, 2580 bp, Manihot esculenta
  Intron number 1 from transcript cassava4.1_003981m (locus cassava4.1_003981m.g) derived from phytozome v7.0 (chr-ID scaffold03581; pos 288015 to 290594)
agcctgttgctgtgaagatcatatccaaagccaaggtaccgagttatcaatctgtcacttttgatcatatttcactcactgtattatgtccctgtgtcacccttttctcaattcgtttgatatgtgaggctctgctttgcagaatttgtttcatgcttaaattagagaacttttgaatctcataacaatgaactcctttggagtaggatttttaagctgcatttactatgttcctaatgacctagcataatgctttgggtgttaatttgtatatgatttccttgttatttactttttcattcattttgggtgaatgtagtaaaggcgcatatgtcaattaagtgaaaggcaagaagacggaattttgatgtccttatttagtgaaatagttgttgaggttactgattattactatgaattcctggatacagataatagatgcacaggaataaattcttattattgggaataactgtagccaaacgttccaagatactgtcaagggtatgaaaagctatcagctttcttgttccctttaagcgaattgcaaatgtgtgtcacttagacttggccattgtttccatagacatggaaacttattgatgatgataattctaaggaatagattttttttttaaatatacaaatggcatgttcgttggcatttgaggaggatgtgaaaaaggtatagcaggttactatgtaattcacttccatgtgttgcaaaggtattttaagtctccaaatttccacaagtcaaatttcgcttgatgctgcatatggagaagcatactggagagaatattatcagaagattggaatgggtatacacatggttgtttcatccaagaatgattagaagtttgacccagacagcttgtttacaaaactggaatgtaattgaagccatgcaaacatggctgaactgaatcaaattgcttgatgccaaacactcacagatgcctacatgaacttgtgttcagtatatttgctttacctttttgtttctgaggaaaaaagatatgataggcaccttgcaactgttcttgaagtttgactttacttaggacactggcttgatcatgaactttttctaggttatgtgcaacttataaagatcaacgccttgagttttatggatctcattcttcctattgcaatactgaatgagtgacttttgatgagtataatttagaagaataaaaatgggctcttttccacctctctttgacacctgtaactggaaaaattatggggtatttgagtcaaggatcgtgattctataaataggatcccgctgtagatattttactacatccccaagctaacatggaagtggaatctacatagagaaaaaagatcaaaactggtatcatcaatcatgataaataaacatccacctgtaattgtgtatcatcaatttagaaaaaggaattgagatcaatattagatttggttgaatgcttcccactagatatttatttgcacatatattacaaccagtaacttggtaccacttgattctttgttttatcattctcacttttcccaaatcttttgtcagtaaagaaaagcatcggtgaaggtaactgttttctggattttgcaaattcaatcatgattattgagttagtagatactgtttagcatttggtaattgcatgaccaagaataaaagttatatgattgtatttatgtagaactcaaatctactattagctgtctttttttttagtaaattttgttgtcagcatctgtattaatagtgaaactttactatgaggatgattttagaaagaaggaatttgttatagtttattggcatatgcattctaggtatcctaactatatttttatttcaaggtatcatcaacaaattaaatcttaaattttttagaatacttttttatatataaattatatatgggggagggggagttgtctttaatctgtgatttttgataatggatgatcattagacatgaaaattttgagagggctgcaaaatgagcttttcagaactggaagaaatttctgagaatctaaagtacaaagcagtagacacaactaaattgaattatacatggaactgaagatcaccaagctgactagcatattcagttacatttgtattcttggtttttttatcagggtgaatagcaacaacagatttttgcctcaatgtagcttggacataatgaccttcaagtgacttactgatagcaaatctttcttttcttcccttaatttcatgccttatttatcagataattgacattttcagttaagtttgtatttaaattttgtagcatcatcaaagatgtattcgtccttgatagctagagttatcatttctgttcaatacaatttttgaatttattacaagctttataatattattagttgtagtattgattgtataatatctgcattttgatgagatctatatgtgtccatccttgatagctagagttataatttctgtcaatatgattttcgaatttattagtagctttatcatatcattagttgtaatattaattgtgtaatatctgcattttgatgagatttatctggcag

SEQ ID NO: 5862 - DNA, 801 bp, Manihot esculenta
  Intron number 1 from transcript cassava4.1_003110m (locus cassava4.1_003110m.g) derived from phytozome v7.0 (chr-ID scaffold11661; pos 145067 to 145867)
accatcatctattccccaaagccatttctcagctggtacttgttctttctttttttaatattcttttcttttgtttggctgctgagaaaatatagggtgatgggtttttttagttaaaggaaaacttggttgtgcccttgcttttctagttatacagggtgctgatttctgtccagtggagtttagtggactgattagggatttgaatatccttacttctatttaacttaatggtatcaagctgcagagctagggatttttgagatctcgattattcagattttttttgcataattttcaagtaaattttgtattcaatttgagctagtatgggatttatacttctagccctcgtttaagttgttctattaggataatttgcatcctgccatttttcgttctattttttctagtgatcacagaagaagcatagtctattaaaaaacccatatcctttttgcggagacatggcatcctgtaacttgcgcggtccaggaaacccgttttagcaagtcatgaaaaactgactcaatctttttacctattaactataactatgaatcaattaatcaatttgcttgcttagttttaggcttggagtttgtagacttgtttaattttctaagtctcttaacttatgttttgcctttttgttttgtttcaataagttggttctagcataggttgcggtaataagctgaaccattgacaggatgtgttatatttccttggtactggacatagcatataacgcatagaatagcattacttggacaggtacaaaaatttcagattaaggaa

SEQ ID NO: 5863 - DNA, 2385 bp, Manihot esculenta
  Intron number 11 from transcript cassava4.1_000293m (locus cassava4.1_000293m.g) derived from phytozome v7.0 (chr-ID scaffold10963; pos 112719 to 115103 reverse strand)
cagtgctttcagaccctactaaggtcctgcttgttattattattatttcatgattattttatggctttctattcctttattggctcaaaattttctttttttttttgaatgtccagtttacaggcctgggtacccaacctggcctgacctgaaaaataaatgcaagaataggcaaagagttatgcccaggcctggtgtggcccaattaaggcctgtcagtgaactgggctgggtttgggatctcattttccttaagcctgacttttccaacaaataagatatttttttattaagatggtctggcctcataaaacacatgggccaggatggatgggccttttgatcaggtctagctttttccatccaaaacgaggagacttgcctagtgaagtattatcaacttactttaagttggtctggccaagggtgtggttgtctttgccactaataagctctgatttcaagtgcaagttgtttagcacataataggtggaaaagaagtgcaagaaaggtgtaagcataaagaagcaataggtaaaagcaaactcaaaaactaatataaacattaaacagaaattacaagaatactaggcagcttattaagtggtttttggtgaaaatcatggtactattatgtttacatgatgttaggacacttgcctggtaatggtcgcagtcagcttctccgaacagtgccaagaaattgaagacataacaagtttctcagaacagttgcctggttgtgcatgcattgtctatgaaaatagtagactgtaccctatgaagaatgaaaacacttttttttttagctttttccttttgtccttttttcttttttccttggatcttcactcttttgtccctcctgtaagcgaaaaatcatagtgcactgttatgaagcagaattcttcattccagaaaagagtagacattagggagaaatagagaaaggaagagaagagaaacaggagaagaaatggagagaaatagaacttagatgagggaaaaaaggaaataagtagaaagggaaattattataatcttgatatttttttactgatcttttccagcccgtagactgttatctgtacactgttttagtgacagaaataactgccttttgacttctctgactagttctgagctagtgagctatatcttttttctaccctcttccccatagaattacatttccttacatagtgtttggttcaattctattttacaaaactatgtggaatttaattgaattctaaatagaattcatttgaaataaattctgtttgttatgacacaatttaaaatgcagaattcaattgaatttcacataattcatcttttcatttcctaaattacccttcagagtaaaataaaaagttttactctatcaaaaaattttatatctaataatttataacaattaaaaaaaatataaacccattaaaaatatattaataaatttaaaataaattttcatgattaggagatttacataataaaataaacagttttagtaagagaacataaacttagatattataaaattagaaaaataaggaaaatatattatataattgtctatatataataatagtagataaatagaaaactagttttatagttttcacttttatgtccaataaagcataagggataaattattgagagaaaattatttaggaagggcattttagtccaaaagatgtgtaaattaattccatcaaatttgataggaattcattttagttataatcaattccatagaattgaattttaatttttattgaaaccaaatacacaaaacatggaattcaattgaattccacaaaaatttaggaattgaaattgaaccaaacatagccttattctccttattattcatgacatacatttccatttacataattctcatcactcactaccttagtgatatcagcctttttcaaatgcctttggaggtaacaaaagatttgcttgtaagcttagcatatttggatcagctgtggatttcttatatttagatcaatatagtgctccttcctgttttctctcttgtagatatactcaatttgaatttgttcttgggttttagatcaattcacatggttctctttcctctgtatttctagttcacacgttttatctcttagattgaaaagggtctatcgctttgccatccattatctgtggtaaatccttttaacttgaaggttaaaaattggcttcagtataaatctaattgatgacgattttctttttcaccgttggcattgtgcccttcttttgtagcacactgttaattttacttattctagttatgttttttcagtgagaaaatttggtgtttatttttgtcaattgccatctgtttgcagcgctcacagt

SEQ ID NO: 5864 - DNA, 1195 bp, Manihot esculenta
  Intron number 3 from transcript cassava4.1_029302m (locus cassava4.1_029302m.g) derived from phytozome v7.0 (chr-ID scaffold06278; pos 386787 to 387981)
ctggccgccaagctgaagtaagatcatttactgcattataccttattacatgcatatgtgtcaactgaattaatcaaattcatcgtggaatctggtgaagttctctaataaagcatggattatgtggaaaattttccaggcacaatctaatttaaactaatggcttgctagaatgtatttgcattgtctactatcattggcttgttaatggtaaatatttctttcttcaattcaattttctttctctgaaataaatgttaaatgatatcttccccctaaatttcatcttgtgtatactaaataggataaacatgcatttcaatgtcttttttttaaattatttatgatgtcgttttgtcaaatttgattgttggaaacatgcattgatctgacattgacattctttgattttagggcagctacaataatgttattgaaatttaacctgtttaatatttaacttgtagtacaacatacgagaggttgggatacagttttgctgttaacattcatatggtgcttatgatcgataagcatctaaagtaaaatagatctgataggattattattatgctgtagtaatttgccaattcttgatattgtattgattttaattcttctggttttgccatttgtatcagtgtactttgcctgcggacaagtattttaaaaagtttgcctgcggacgagaattttaagaagggcattatgtgtgggatgcatacagtggtgtcataacagtaaaaaagaacttaagttgataatatttttctacaaaatgtctatgatttttgttcttgcacattcatactgctccatgatattctgaggaaggtaatacacagcataagcttggttttcctgaattggctgtgaatctcactaagctatgcattttatcatttttggggtatgcctcgcatgtaagtgcataaatcttatgaggtttcatgattacaattgattaagttcttcctccactttttgcttggctgtgttcattctgttgcaattttttctgtgccataagttgaacatttatttgctgctaaacattacttccattatggccaccatttgctctatgccaaagtaatctatgtggttgggtagaatgctttacctatgcatttttatatttttctcttggctaacttgtatccttttgcaattcgcagttactaaatcaaattgt

SEQ ID NO: 5865 - DNA, 4904 bp, Manihot esculenta
  Intron number 3 from transcript cassava4.1_017473m (locus cassava4.1_017473m.g) derived from phytozome v7.0 (chr-ID scaffold00560; pos 93302 to 98205 reverse strand)
gacattttctacttgcttcttccaccctcgcaaaggtatgttaacgttgctacttgcttagaaatatttgatttttgcttaaactggatgtgataggcccatgtctgatctgttcttctcattttctcttcattgtttgtcgccttatgtttttctcatcctagtatatatttaactgcatgtgctttgttttaatgtgatattgaaacagcactttctgcaaactttttgtttgccaaattgtcttagagctgctaaaactgatgctggtatcatcttctttgaaatattgagatgaatggatatattgtgtttcccaatagtactaactggaatatacataattaaagaaaaattatcaaggtggagtaatgagcagggtagcccccccccaaaaaaaaaaacctaagcagtttagcatttcatagtatttgatggacgtaaaaaagggtgtgcttcagtgtaagactacatgcacaactcagcattagagagcaatcactttgctctttagaagagagccattcatatgttgtatagtggcatactttgctgcaatacagtgtctcaccacttgcttccacaatcgtgttgtatattaaaattattaaacctgcctttggcaacaatacaccaattttagttttaaagtacttggtattttctcaaagttttgaagcattggaaatgcaaaaggctataattttcatatttcaggaaatatacatagaccattctaggatgcttatccatgaatgtcaacttccctaaataactatcctcagacgtgtgcaagaacaaacctgcttagcaattatgatccatttttttggttctatgatcagttatactaatgtagtaggacagcttgcaaaatttcagtttagttctggtttttggattaatttcagcactagaaaggtgggttttatgtggcaacttgtgttggggaagttggatggttagggatcacatgtgaacaagagaatacgagaatatggaaagcatagtaagattcttaatttcccacttagaattcttcaagtcatcattaatatagacactgtactttgtctgggtcattttccaaattaaaacattttcaggtctacaccttaatcatttaatctccaaagcaaaataaatggcccaaattttttcttttgattatgatctttaattttgagtcttaatctagttcagctttaattatagttatgatgccagcttactagcttcaatggctttcatgcttacaatctttgtgttgaaaacaatttcaatttccaattttgatcttagtttcaacattattttaatttgagcttagactttataaattattccaatttcaaattttaatctcaaatttaatttcagagtttattttcaatctctagctttaacctttagttaaaattattaatcattattttaacatcatcttagcaataataaataaataataaatgcaaattaaaattaaaatttaaaagaagacaaaattgtgtacatattaatcctagccctgcaattttagtaccttttagattagagatttgttaaagtgaaaaagacaagaaatgtacgttacaatctccataattctttttttgtaaggatgcttcttcacctatggattaagaggtacaaaagcaagttatcctaaattaatctcaacctttaatttttctctttaaatcctcaccattagatttagggcttttatctcttatagatacctttttttttctctagcgttcaaggggagagctttcaaaattcacccaacgaagtggagtgaatatttctttcttcctaaacaatgttacctcaggctatactctttttcaccttacccagaaacaggaatcatttttccttaaccctagaacattgttacttcatccatgctacatccatttgaaaccattatcttccttagctatctcatttggaacttcctttttcactctaataacccagcagtagagttcaccagacgtgtcggtccctgtaaacatgtcacccgagtcaagacatctaagaaggggtatactaatccctaagggacaatggggaggccaatcaaagaataatttaaaggataattttgataaggcagatctgatagccaaaaagcaagatgaataaaagcaacttattacgaaaatgcccatggcgtcacacggggcaaaggcgagtatcctccaatccacatttctagatattcattctattctactaaagttttataaggatcattcgctaaaccgagagttaaaatccacaaaagaatatgcctttgctgctgaataagataagcaaaataagcatattcattataaagattacaagaagataaaagggacttgagtaaagtctctattacatcagaaccttaaaaaaatctactaacagaactccatcccatcctatgggaagacaccatttgaaaagtcatatgaagagctgtctctccaactacctttctggccttgccttcagaatcaaccttacatactccaacccctcttcttagggtcgcaatacatcgagctggttgcaaccttcaatgaaggctagtagtatgattgcaccttcatgatggtcctaaggatcgcgacacttaagaagcattatagtctagccggatgcaaccttcaacagtatgaacatgcatccacaaaagctcactttcagccgcgcttcatagactatgataatatcttccacacagatctagttatcctcaaaaagaagaaagaaagtgctccattccatgtctctcgaagatagtagtcgcaaaatacaaaagagaaaggagggttcttatatagtggcgtagctggtaaagtctttaatatggaccaaagaagaagaccaccattatgaccaagggaaggcaaaacaatgcaaacagttaaattgtgccacgtgatcaaaaagacaaaacatcaccttcaaatttggagaatcaaagaccagtgaggggacttctgatgatctataacaattgccaaaggaaaaccgtgagctgtcactacgagataggatcacgtgacaagtactagatacgtagcacagacggtccatctcgaggaaggaggattcaaacaccacagtgcccggatcattattcagactcgctcggaccattattcagacttgcccgttcctggcaaggagagtcttagcgctaaagttattgttaatgagtacagtcgagagtacctccattacatcggtaatcacggaattaccaacctgttagccggcaatagtccttatcgagcaaccagccacatcgttgctggattatcaggagatactatatttatctccactttcttacagtataaaagaagaagaatcatataaaaaaaggtacgctgttctccaacactaaaactccaagcaattctttgcattctctctattcgtcaatatactcaacaacatcacatatactttgtaaaactaatttattattcatttttatgtgcaaccatttatagaattatttgtatccttattttattattaaatatcatatttttaaaaatattttactacttatttttatacaaacagttttaagaaaacaatttttaagaagcaaataacaaaatttaaaaactgttaatttttaagaagcaaataacaaaatttaaaaaatgtttttagtattagaaaaaacaaataaacagataccctacaatgttaccaaacgcaccctaaattaactacaaaaaattgcaattaaattaaagtgagatgatcaatatgggaagattctcgttaagggcataattttgattcagtcaaatgatttaccacaaattcaaagataaatttaaactcttttcgatatatcaattatatgtatcgaagatgcttcagagtcattccttagtttttaaactagccaagagactctcgttaactaatcttagcttttagacaaccatagagatacttctaaaatttaatctaatcgttatattaagaattataaatacctaattttaaagacactcgattcatttaaagtaagattataccattttttaggaaggacttattcaatttaatttaccattttaaatttaattaaataattacggatttaattaaactaaatggcaatacattattctatcaattgagcagtggcgtcttaatgcaacaactaatataacaataataattaatagacacaagaataatataaatattaaaaatgataaaaacaattagatctcacagctaattagactgaaacatggatgatctctcaattaaaaagaagagtttagctactcagctgaaacgccacaatagagagagttttcagccttcaagattgcctaagaacaaaatattgtggctgccacaaaatacaattcttaagtactgctaaaattaatgtctaacctaattactagaagtttacattgaataggttttagaaatgtttctgttattttattctaagatttaggatatcaagacataccattactttctgatgttgtaacttggtaattaacataaaaaaatttcatactcttaatgtaatatactccctgagtaaaagtttagtatgtaggtgatgtgcctgaaacagtctcttctctagtagtctagttttttttttttttgtgaacttgatggagctctaaacatcatttgtcttcattgaaaatatatacacacacacatacatacatattcatattaaatcctagttttactgtgatttcctttcccttggtgcacctttagtttccttgcttctgtctattaagcaaatggaaatttcttttttccctcttgctgatcagttaaataatggaaatggatataatatgtattctcttcaatgcaggtccaaaagattg

SEQ ID NO: 5866 - DNA, 1924 bp, Manihot esculenta
  Intron number 1 from transcript cassava4.1_004700m (locus cassava4.1_004700m.g) derived from phytozome v7.0 (chr-ID scaffold07810; pos 86723 to 88646 reverse strand)
tcattagaaacgtcatcgttttgccttatatcttggtatgcttcttctttaacttgttttaatatgcttatatgattccttccttccttccatttatatgtttgtttggagaagttttcttttgagtttttattcataatatttctgttttgagaaaatatttggtaagttgttagctacagttgaaatgaatggaaatggagattatattttattttagtctcctactatggagctcttacttcctctttaagatgaagattttggtttggattcagttgtttttaactggagtatttataagcatccgtaattctcccctgcaaatggttgtaaagtttgagaagctgtttgtgtagctgctggagggaagatggtcactctctgatatggtgagtgccacgcctttgcgtctgattttcactgagccccctatatatcttagtgacttgctacaattctttctctttaccttggcgtggatttctttgataggaaagattccagtttctctttcgcttacttgaaaatacttcttcatattgactagtgggaagatgcttttctcaaggattcctaattgtcctgccctccctacggctccttttttgctggatttgggttgggttgcagtaaagttttatttctttgagcttatttattgtgctttgatttcggtttaatgatagtgactttaagtgaaacttgggaagagaaacttcccaagaatcccttggtgtccgccatgagttcataccacatactgttgataacccattacaaatgtggtggtcgcaatacttccaaacttgtgatgtgcaaaagcatcttcccctttcaaatccgtctaatttgtttgcttcatttctttgtcttcttctttcttctcttacttcaatccattacacaccattcattccaggagtacagaataaccatttgactatagaggtgcacatcggttggtttggtttagaaaataaataacctaaataaatataggttttagcaagaaaaatttaattgaattgaactaaggagaaaatcaaactgaaccaaactaaataagctaaaattttcagcagaccaacttaaccagatgaactgcgtttcttaaaatcaaaaaccaaactaccaaaagaccaaactgaatttctaagttaaatcggttcagttggttttttttatttgaacagaatttttgtcactcctatttagctagtatagaagttcagaggtttaaatgctgggctaccaccttaacaccaaactttgatccttgtttaggagaaaatcaataactgtgatttcgaggatatacataatctggaaattctatacaaagccaccagtatattgatgaaattttatttttatggtaagtaatgatgtgaatgctagttgggattccagtatcatgaactgtaggtcatcaaaacagatcatgggaatagcaataaatgcagaaaattttgctgcataaaatataaatatatattaggtcctcaatttttccacttgtctaagagcagcttgactaataaatctacatttagtagattcgtgtaagaggatattagtttagcctatatgtgattgattctttgtgctctttttctttcaagttgaagtcatattctttctctgaaaatcaaaatacaataagtcaataaagctgcattcccagaaactgtgatttggttatcaacattaacgttttattctacttgttcaaaatggcctttcttattctacttgtttaaaatgacttttgtcggataaaattttaaaagcagtgttatgcaaaaatgcttatattttcctaaatctcaatttctcttttgctgtctttcatgatcagaagaacatacatataataattttgaaaaatatggcaggtgtttctcctttgtttgctggctgg

SEQ ID NO: 5867 - DNA, 2512 bp, Manihot esculenta
  Intron number 1 from transcript cassava4.1_020699m (locus cassava4.1_020699m.g) derived from phytozome v7.0 (chr-ID scaffold04305; pos 4034 to 6545)
ggctagctaacaggtattgtcacttctattttctacagataatgtcttcaatacatttcttgtttgattgatttttactcattggtagttctcttgaagccaaagtgtttattttattcgtattgtatgtccaacgtatactgtggtgcattttgttttgcttttatgtgatctgaagaaaaattaaagtgaagtgctgaattttttccatctgctgtgtcactcttattaagtatgagaatatttttgccaacaatttggaacagtgtgttgcaataatttgttatcttctctttctagcccccctctcgctctgttgtgggacggagagaagatgagtaaatgaaataatatgcggtgcaacttatgtctaggcaagttgttgagttattatctctgattttatattatctctcaggtcaatatgcttcatcccacctttttgttatatttgctggacattcaagataccgatttactcaatttatgaatgacaaacaattctcttgagctttaatgacttgtaaacttggtcatttaaagcttctctcttaggctgttgggactagccaatacccaacctgtttgctccctgaagtgagagtctcagagcttccatgcgttgtgccagtagtgtgtaatgctgtgcactgcatgttggatgtttgagaaaatttcaccataagctgatcatcatcccctaccatctacctttgttcctcaggaattgcttcaatttaatttgtatccttgttttatttggaaaagcaatatggagatgttttctcggtgaatgcagtattaggtggaattcttcttcgattgtcattggttaaaacataccatgaatttttaaatggtcatttgtaatatttacggacttctaaactagtagtgattgtgggccagtgcgagttgcctccagaatctgtgactgacctggtaggcaaagattttaggccattaggctttggccttggcacagtcctcaagagttaaagtggaggattttgtaacacacaagtcccacatcattctgatttggtatttacacagagggcactactatcaacacagtcctgcctcaatagttagctcaatagttcacatgggcttggatcatgtcagttgacttttttttcaatggttgcatgtgattatgttgttgatttgtaaaggaagcagagatgtccacattagttatcatcttcatgagttgaggcgttggcttctcaatctcattctagcttgtaacttgaggaaccaatatcaatgaatctcaatgctaagctgttagattagcttgtaaaattagttggttaatgcttttcttaaagctgttggctaatacattcctgaacagattgctggcctgtaaaatggaattctaagtactagattaggcagtttgagaaattttgccataaggtgatggttatctttgtattgcatctcataatgtacttgctgttttgaatttgatacattagactgaggaccgaggtaacatggatttctcagtaaagacgattagtatcatgtttgtgaacattttgttctcttaaatatgatatgttccctttgggtgttccattttgaaatagaaacataaaatgaatatgtaaagttaataatgatgaacagttgcatatctgttcacttcttcattcccttgcatagctgccaaagttgactccatatgcttgtaaggatcactgagataagtttctaattaattaacatccaaaggggtgaggcactggcaatattattagcctaaaggcattgagcgaaggtgcattgcttggatgaggcgagacctcttacaaaggcgagtgttgcctcacttggcttgagacatgagatgagatgagtgcttggcttgagatgcgaggcgaggcgaggcgactccttttaatagggaagacaccttttttctgctttttaaacaccaaaccctaatatgtagcctccttttgaagcaaatggttggagaactaaattttatgtactaattttggggatatatccctataattatgctaacttattagggatatgtatattcctatagttgtgataactaattaggggtatgtatccctataatgtataattgaggctgtagtgcctcacttcaaaaaggcccttccttggccttgcttctcacctaataacactggaagcacctgttcttctttttctttttctttttctttttcttttttttcttaaaatgatagcaagttctgtggaggatatattctgtggtgttaacattctcagtgatcactcctttgacactcccagtgccaagcggaaatatatgtagactgtagtttgcttctgcatcaagacatttgacatgtccttctttaagtgtttgttaattgaagaaaatggttgaaataaaatactgttagatgaaaatataacgttgtaattcattgactttattctttcctttttggttgcagtcctgcatttcagaggtttgcagtaagaacatcta

SEQ ID NO: 5868 - DNA, 1849 bp, Manihot esculenta
  Intron number 18 from transcript cassava4.1_026808m (locus cassava4.1_026808m.g) derived from phytozome v7.0 (chr-ID scaffold02975; pos 104109 to 105957)
ttccattgcttgagtgctttacatccatagcacaggtgttgattagtgttctgtctggctatgacctgtagtttcttatttttttttttcattttatgtcaatgcaatgtaaagtaggtatactcttctagtgatatttcagattgtgtggaaactaatagctcaaacaatagtgggtgtgttgtgtcaattgataatcttcctgtaaatctattttgaacaattaaacactattctttgtctataatgatgtgaggctggctggttcatcatgatagaagagatccattatgatttccccctccctttctttctccagtacattaataagcttccagcatattttgtaatgatcatggtggagcgaaaatttacttatggaaacatttgctctttgatcacaaaagttttggtgtgctgtattctatcgtgtatatgtgctttaacaaagaaagagctctgtccattgaaaggtctgtgttgtcaactctctaggcatattccttttgtgttctgatcatactcttctttttgatctctctttgccactgttatatgctttttcttccttaaaggtggagactttaaggtttctaatgcatttttttcttttatggggaaaaaaatccttatgatgcaccatatactttgcaaaatccttttgattttccttttttttccccctttttgtagatagatattgaagatatgcaatgagagttccaacaaagattcaatttcaatctcaatatcaccatttaatatcaaatatgatgctcattaaactgctttttggttgcatgctggatattgaatctgaaatctaaaggatttgatctttattttattttctttatttttttagttcaaatttcaaactgtatgaataatgatttggacttggaaaggagagattatcatctaaagctcttaacatgttttaattccataaggcgatcaaccaagaaaaaaagtttgtttttaagccttgttcaagtattgaaatgaaaaattcaattacagatctcttattttaaattcctgtaatgccactcaatttataacttcagataacattaaagtgggacctctaaagtaacttagaatacaaataatcataccgtccaaattaaaaaataatggatttaagcttatacgtagttagtacgaattcttggaagatattatttgacacaattctgtgcttagaagatattatttgttttggctgaatatatacttacagtcttacacacttataaattaagattaacctattaaacacctaaactaaaattataacctattcaacacctaaacttataaaaatcataacaaattaaacacgaatgagtcatattattgaaaatttattttaaaaaaataaaaattaatcacatattgttgactgcactctaagttttgctaaatgtgctatgaatttttataagtgaacaaagttaaatgagtataattttatcattttagaaaactttagagttcaattagcaaaattttgaatacagttagcaatattttaaactatttttgacttctttttatagatcatcaattatatggttaattgtgtttaattgttacaatttttgtaagtttaggtgttcaataggttataattttagttgaggtgttaaatgggctaatatgaaatagtacaggtgtacaagtatatttttggcctttttctttgttttatacatctatcactgcttgcatttttttttttcctggatgaaagtacaagcaacaatttggagttgctacaaggagaataatttctttatttgtttcaggcactgggtccagggttctctcaatttgctgagcc

SEQ ID NO: 5869 - DNA, 4789 bp, Manihot esculenta
  Intron number 5 from transcript cassava4.1_011711m (locus cassava4.1_011683m.g) derived from phytozome v7.0 (chr-ID scaffold09798; pos 63840 to 68628)
cgtgtggcaggcttttcgaaggaacacctgagcaggtagttggtgctgccaatccagggattaatttttcttcttcttctttatatttattttccgaagaattatgggagaaattttttattctattccaattgaattgatctttataaggtttgagtatttatatacaaagaatcaacctaaattaggaatacttacaataagaataaaatcccttaaatcaagcctaattaggatcccaaagatttgaatcctcctaattagaaacattctatgttgatcaacactcccctcaagttggtgcgtagatatcacacatgcccagcttgcaaaccaaggtatgataggtatgttgctgaatcttttggtaaacacatcagctaactattcatcggaagtcacatgatctaacctgaagacaccatttattaatttcgctttaatgaagtatcaattaatgcttcattgggtcatgttaaaccggattgtgaactgtactgatgacagctttgttgtcatagtataagaggagtttgtccctctccaatagtttcaattccttcaacaatctctgcaatcataggagttcacaaacactttgtgcccatcgctctatatgctgcctcagcatttgatcaagcaacaatactttgctttttgcttctccaagtgacaaggtttcctccaacaagtgtacaacaaccactagtcgaccttctatcgtcaagagattcagcccaatatgcatctatgaatgaatctatgcgaagatgatcgtgattagagagtaggagaccttttccaggagcagacttcaagtattgcaaaatgtgaaatacagcttgcatgtgagactcacgagatcatgcataaaatgactgactaagctgactacatatgttatgtccggtcgagtatgcgaaagataaatcagtctacctaccaacctttgatatctgcccatatctactgattcactgatccctgcttgtaacttgtgattgctctcaatgggagtttgtgctggtttgcaacctaatataccagtttcttctaaaagattcagaatgtattttctctgagaaataaagttctctttctttgacctggcaacctcgattcacaggaaatattgtagttttcctagatctttaatttcaaactcatgaaccaaaaactttttcagtcgaatcttctcttcactgtcatcccttgtctttactatgtcatcaacatagactataagaagagtgattttacctttgtgatgtctgataaatagggtatggtcagcattggtctgttgatagtcaaaggaaatcatagctctactgaattgatcaaatcaagctctgggtgactgcttcaacccatacaaagccttttttagcttgtatacctttccttgtgttttttcatcggcacatccaggaaggatttccatatacactttctcctctaagtctccatggaggaatgcattttcatatcaaattgttagagctcctagtcaaggttaacaacgcaagatagcaatactctgattgagttcattttggcaataggggcaaatgtctcatggtaatccactccataagtttgagtgtatctcttggtcactagtctagccttgaatcttttaattgatccatctgctttgtatttcacagtgaatacccatttgcaaccaacaagtttctttttagttgggagagtgacaagctcccaggtctcatttttggccagtgctttcatctcatcaattattgctcccttccatttatgatctacaagagcttctttccaatcctgtggaatagacgcagaggaaagaggcaaggcaaaggctctataggatggagacaaagaatcataagagagaaagttagaaatagagtgttttgtgcaagatttaactcctctttgagcaattggtttatttagatcatcaaatggctcaaggtttagggatgacttaccagatggcgaagaggaagattcatgacactggtaggctacacaatggctttttctgcttctgttttgtctcttcttgagtatctccttaaatctaatttatccaaatgcccaatttagtcaccaatagtctccccctatatagtctcctctagaataaaacgttctagagttatacttctttctcattgtcctccccttgaagaggtgatggggtagtactaaagtaaggtttagtctctctaaagataacatccatactaacaaagtattttctagatggagggtagtaacacttgtaacacttctgtgtgagagagtacccaacaaacacacatttaatagccttcggatcgagctttctacctgtcttagtatgaacaagacacgtgtatccaaacacttttagtgaaacaatacaagtaatttttccttgtagcacctctaaagggcttttaaaggcaagagctttgagagacattctattaatgagatagctgcggctaagactgcatctctccaataggtttttggaaggttcacggtgaaaaggagagatcgagctactttcaataggtgtttattttttctttcagcaacactatttttggcactagtgtaaggacaactagtttgatgcattatctcattagactccagataagccgaaaaatggccatccatgtactctgtacaatcagttttcaaaacttttatcttagcatcaaattgagtacaaatcatcttgtgaaaagtttgaaagtaagaaatcacttcattctttatctttattaaataaacccaagtcatgcgagtgcaacaatcaataaaagtaataaaccaacaattaccagatagtgagaccgtttgagtaggtccccaaagttagaatagatggtcacaaaagggatcgtactcttattgttactggaagtataagaggttcttgtatgtttagcatactcacatgcatcacaaactaaccgtcgatgccactgtatgattttctggttgacatcctgatttcttccaaaaagagcccgaggtgaattcaaactcagattcccttccaacatatataagctatcatgcagtttactattgccaattctcttcctagtttgaaggtcctgaataacacaatggtcagaaaaaaatttatagttaagtgttttagtgagagcactaacagataaaagattaacgggaaaataaggaacatgaagaacagatgataacttaatatttggagtacaaacaatagatccggttccagatataggagtgtaagaaccgtctgcgattttgacagtattttttttatagacatggaagataattaaggaagtcttaaaaggagcccgtcatatatctatttgcatcagaatcaataatctatggagtagaatcaagagaggaaacaaaagtattatcagaagttcttacattatccacacaaatcactgccatttcaagaaaaaaaaaccactctttttctgttaaaaacagtgaaaaattattgttattgaagaaagaattactgttcactggcgaaaaaggcacggatccagcagattagaagcgcaacttaaaggcgagaatgccggaaaggatcaaagccaaaaaatgtctcccacgtcgaaaaaaggtgaaccaaatcacgggtccacacagatcagaggcgcgagttgaaggcgagtctgtcggaaatgatcgccgtcaaaaagaccactgaaaaacgtcacacgccccggcccgtgggaaagacagaatcttgcgagggtgcttgagcctcatgcgcgcggcttttcggcggtccggtgaacttgctggtggcgtcggaaagatgaaaaaagattcctagatagaatagtaccaaaaaggtagatctagggttttagaaaccttaagagaaaaattgaatttaaactctaaaattaggaaaaaaaaaactctgatactatgaaatttgattttattccaattgaattgatctttacaaggtttgattatttatacacaaagaatcaacttaaattagaaatatttacaataaaaataaaatcccttaaatcaaatctaattgggatggcaaagatttgaatcctcctaattaagaaccttctatgttggtcaacattttcttataggatgtgtttgcttaaaatcctttgaaaaaaacgagggaatatctttgtttttgagggaattagttttatcatcatttgggcaaatggaactttcattttctagaaaacttggtacataaatggccgagtacatatttacatccttgtataattgctaactgtttctaaatttcgctgattgcacttgaaattttaataaaatgatataattactcgtctaattttgtcaatttataaaaatttagaatgaaatcaatataacatttagagtgcagtcaacaatatgtgtgatctaaattttttttttttttttctgataaatgattgataatatggttaatttatgttaattgttgtgatttttataagttaaggttttcaatatttcacgattttagtttaattgttcaatgggttaatctcaactaatatggaggcgtaattatattttaatcgtacttaaaatcttcaacaaaaagttgtatggttaagtatctgcaaatgctgagggctgaaatatatttatgtcatttaaccttttcttttcaatgaagttcttttgggaacttcaagggaaaaaaaaaaagaaagttcttttagcaagttatatatatgcatctgtggtgaatgaatatttcaacagataattgtgtttgttccag

SEQ ID NO: 5870 - DNA, 2760 bp, Manihot esculenta
  Intron number 4 from transcript cassava4.1_033356m (locus cassava4.1_033356m.g) derived from phytozome v7.0 (chr-ID scaffold06693; pos 70675 to 73434 reverse strand)
gacatcaacgcccgtcaacgcctcggcatttctgggtacgtgtttttatcatattattaattattaattaatagtcgtttgtttttatttaggattaactgttattaattaatagccgtttgtttttattgaggattaactgttatctgctatcgacgagagagtttttttatatttttaaatattatttttattggtttagtgggctcgatgtgcgcgggttttgtggtttggagtttcgagtttcctttgttgtttaagggattccgttgaaggaatgggacccattttaaaccgtttcggtttcgattctgagtacttaggatcctgatcgatgctctcagccgttggattatccaatggatagtcgttttttgtaggactagaacattgctctaatcgcactgaaaaagctttaattctaacctctcacctatggacggaattcctagttttattattattaattttttttttttaaaatagatggaatccctagttggagtctgagtgttacaaacaaattgtaacccatacaattacaactaggtaccctaaacgggttgattacccatgaaaattaaattattgaaatctaattcgatttattttagtgatatccgaattcgattaaaatttaatttaaactatctgaacccgttccaaaaattccactatttagttttatatattttaattaataatttatataaaaaatatttttattttcatttaaaaaatttaatatttctaaaaattattttaattttaatttttaaataaaaaaatatataaaaaaattataaatattattgtaaaatatattttttatatttatataaacgggttcggacagtgtatatcctatacataaaattcaaacccgtaacgaatattattttttaaactcgaacccgtcccaaacctattataattattcaaatccatcctattaggtttcgatcggatcggatgcccgaaaatactcagattcattgccatccctacatacaattcattttgagaggtttaaaatgcttctttattaattaaagtaacccattaaattaattagttaattattaaaattttttaaactgaatagtactatgatatttaatataatatttaatcatattaatctctaaaattcttcactccttgttcatattttagtatggttatgtgattatagaattatttaatataaattatataaatctcgccttgttgaccttggaaaaagattgatgtgtgaagttttatctctaccttggagggaggatttttctataaattgatttatgatttttaaatcataaatagaataacgttactgttacacaaagtcattgtttgaatttaatataaagttgtgataattaaaatattgaataagacaaatctcaagaggtttttcataattaataatactaaaaatattcaagtttttgttggagaccgttctctttttgatatatatatacatgtatatatattttaaacaaatatatttttaattcacttgattaagctagatcttgttcgtgctggatcagtgtaatcgaaattttcgatctcacttaaaaaagagtgtcaaaccactcgatttaatatttgttgatttttttaattctttttaatacattctgaaatttattgggggaagggaatatacaactaatcgcttaagctagtgattgtagtttattttagtacgaacggagaatagaaatgctataaacgttatgcaattgtttgatactttctaaagcatcaataaaaattgcataaaaacgtaatgatctgcttcaagacaagtatatatattctgcgtttcttagaattattgagcgaagtacacataaaagtgtccctaattggcgaacattgtgagacattgtgttttgtccgatagcatttggatcatctaattttagccattacccaaatgggtatgcttgtttccaacaaagctaaaagggaatagcttagccaaagtgttttgtttcatctttttatcattcatattctctcttcatctaaattattatactcattttgcctttgttttctccgtttctttatttaaagttaaagtaatagaaatacccttttgagtataaaccctatacaacaattgttaataagaacatatgaggaaatttctcaattattagaatcgttttaatttagtggtgttagaatttagaattatcaaattttaattaaaatcaaatgaatatatatacaaaaagattgtcaagttggaggagcatcatctatcatatataataaagatatggtgaatttatgtggaaataatttaggaggttaggcatgtgacttgagaataaagtgtgaaggaggatgaaatagaaatgaaagcacatggtaggcttgtgggaacttctttttttttttttttttttacctaaaaaaaattatagaaattgtttaaatgttttaactagaaatatatgtgcacctctcaattttttgcacttagtagttatttttcttagtgactaataaatatacagacatcacagaattaggtggtccaaattggtccagccatctctcaattatgcaaaaaatctcctggggatagaagaatatcttgtgaaagttaccccttgcagagaagttatttattttcaaaggattgattattgttatgaagaatctcaatttcctaattttttaagaatttcattttcaggtatcttcacagctgcaattgccctctttactgat

SEQ ID NO: 5871 - DNA, 1965 bp, Manihot esculenta
  Intron number 5 from transcript cassava4.1_029921m (locus cassava4.1_029921m.g) derived from phytozome v7.0 (chr-ID scaffold09702; pos 232166 to 234130 reverse strand)
attccacttgaaagaaagcacacatcgcttcccaggtaaataatatgggattttcttctgtagctaaattatttgtttacttgaaacgaggagggtgttcaatggttgatttggatcaaatttggatctaacaatatatcttattcattggttaaccattcaaaccatttaatagtcccacactcccgtcaactattaaaataaattttactagttatgaaatacaatgaaaagacattcattcaggtcttaactgtaaatttgctaaaataataaaaatataactaaaaaatataaattaggaagtatcataaaaaataaataaaataattaaatttagatattacatttcaaataataagaagtaaaaaacatctgattaattttataaattatacacttctaaatcttgcaaactcaaaaaaaaaagttaacttcaaaaataaaaattataactttaattttaatttttcagaattttaaaaaattaaaataaaaaagtttaagtaatttctgcatgttattttaactttttcagaaatgtgactaattttaattttgtagaaattaaaaaataatataaaaaagaaaataaattttacatattattttaactcttcttttccagaaatgtgactaattttaattttgcatgaattaaaaaattaaaaaaaattctacatatcattttaacttttttcaaaaacatgactaattttaagtttgcagaaaattaaaaaaaaaaaaaaatttccttgcattattttaaccctttgttttagaaatgtggctaattttaattttgcagaaattaaaaaattattactcctaaaataattgcagaaagataaaaaaaatgtctgcataatatatgcaaaatatattacaggtgcaaaaattatggctaattgtaatctttcagaaattaaaaaaataaaaataataaaaaaaattgtgctgagagattacattactaataataatagaaatacaaaaaaaatctaattaatattatatccaaaccaacacaaaactaaagaagataagattaaattaggattagaatatataatcggatataaaatggttatttgttagttaaccaacaaaagactatacaaattagataaattatctaaaccaatccaacataactatttaaccaagtttgttagttggattggatttgttggatttaatggattgatccaatctacgaacacccctactttgaaagttgaaactgttctcatcctcttcttattatttgctactagttgttatgttatgttgcttaactagtttcttgctgtttatgttatatgacaagtaaaattagacaatgatattatgatgttaacagacttaacagctagtgtctgtagtagttatagtcagttgttgtatgctattgttttcatctaaacttcagaaatttctgaaaattggaagcaataatagtgtgggacatgcttgaaacaatgaaaagtttgctgtttgtgcctaggttttagataatgactgttccatccctaacaaaaaaattgccatcctgtgtaaagttccctctaattcagccatatcattcatattgatcatacacattggttacgtttattttagatgctgtcctgctgagaatacaagactaccatattttatttcaatgaattaggcagtggtgaaactataggagtcaagatgattttagttttcttcaaaaaatttactaatgtaatttacttttgaccggaaactttattataaactggtaatatcttgacttcttaacaggtttttaagatgttgctttaaaatcacccttgacctctaactgcctagctagcttgtgcattgtgtttggcctttgtttcctttgaatatccttgctgattgcaatttacactatatcctttcatgccgtttgcaggtccacaattatacattcaaatacagttccttcca

SEQ ID NO: 5872 - DNA, 3455 bp, Manihot esculenta
  Intron number 1 from transcript cassava4.1_010835m (locus cassava4.1_010835m.g) derived from phytozome v7.0 (chr-ID scaffold11297; pos 562961 to 566415)
gatcgaggaggccctccgattcggcggcgtttcaggtttgttattataatcactatcgctgttttttctccttgtacgaactattaagatgtcatacacataatgattggtgattggtgactgaaacgaaaaagcaccaaaagacatgtaggcttgaaaagaaaattcgaaagcaaaaggaagaggcgtaggccagtggctctccattgttgggggtacagacaggaggccaagggaccctaaaacgaaggggcttaactggctggcctgtgggtaggttggaaatagagtcatgtggtcttggtccgggtaaaagggcaatataggaagcgacacatggaaatgtggatagaattttttatgtgcaattattgctctgtggttctggagatgagttgtgcccaaatctcattagttttcagctccctgattccctcaaatttttttggcttgaatttgaaaatttgtgaagtaaaaaaaaatagaattacctttttaattcttcaattttaaatttgagaaagaaaatgaattttaaattcagattgtctggtaaaaataaattatatatgacaaaatattttctctcgaaaatattttatatataaaataatttattttttattatttaattttaattttaaaaataaaatttattaataaatttatatataaatatcttctatatatataaaagatgacttttattttcttaatttaaatggcttattgatattttttctttaaataaattttttaattgttttaaatataaaaaatatcaaaaaaaatattttgttgttttggagctttagattttctaaaatatccaaaatttttatctgtttttgaagaaaatattcctttcaagcaaatctattgattttagcacacaaacctaaggcgtgagcaccatcgctattgctaaggtcgctgtcctcgtagggactgaagatcgcttggtgtcctgcttgtttgaaagcccttttgtggagccattgataatttggtgagaaaggatttggaagttgatcgttgaaaccatcaaaaataaaattaagaaccgtagcgttaatagattaaattatagaatttaatactaagtaccttttaataataatttgaataaatcaataataaaagtaaaataaaacaatagttaataaaattagtttaggtcatgtaataagctcttcaaagttaaaattttccttaattttagtttgattatgttgaaattttttaccgttcaactcttaactgaattaaaaaatagaaaaattcaattctattattaacaaacgcatgattaagttagatcatgcaacctattatcacttgtattcaaataatttaagcaattatgagatctaaattattcaaactaacaatatattacttatgcaattaaaaaaaatgagctcttattgattctaatagcaaaataataataaatataaagaataagttgtataaatattagaaaatagaaatttaataatagagtttagatcttccgattcatagtaaaatcgaaattcccccatttcaattagagaaaaaggtttttagccctggacaaagaatatataaaagagagagaaaaaggaaagggagagagggaggtgctgctggagctttctgccgaaaattttgatgattgctgctggttgctgtctttttataggtgtaaaaaccctagatcaatcatttatgagataaaatttcttcttgacttggtttttgattccttctttatttgtatttttttcataaataggcttttttgggtaaatgagttcttttttcagagtgtttgatatgtttcccataatgtgtttaagataagataaaactcttaaaatttaaatttttgcaattctcgtttttatgcacttttctattgatgttggtgacagttgatttaggcagtgattttgacaaatcacttgtcccaacttgccccaattaatcgatctggttatttggccaaatagattttgacatatcaaaactttgagttttgacttcttctatatacttgtacagcctctttagttatttcggagttgaattagccaaaatatttcggccaaattaatttttaaatatttttaaaatttttttattaaatttttattttttatattttctgtaaaatataattaaaagtataaaattaaataaaaaatatataatttagcattaataataataaaaagatgggcataaattacgatcaatcagcaactgggacacatctgtcgtgaagttaatttctgtgctgactggttggccagatcttatcctgctggggttcacaggcttcagcttcctcctgctgagctgagcttaaggttgctgcgtgattctgtgggattgaatgtccccgtacctgctgtctttaacctctcgtgggtcgtgaggcatctctttttcttatttcgaataattcttttttaactataaaatgtagcttacacatttctgttttgtcctttacgggcaaaaaagaagaagctggcttgcttctaatttccttaagatttagattcacactcgcagcttcaaagccttaatccctatattatcattcgaaattctatctgatagagacatgccaacatacattataccacggtattggaaaatgcactagcagtcatgacttgtatatattctattacttagccgcttttttttttcctgtttaaaatcaataattttataaaaaattaatattttattttttaaattaaaaaaattatctcaaataagtaaaagttatgtataattatataataattcatctgttttttttaaattgttctaaatgattttgttttttcttctaaacacagtgacgttgtttgtagttcactattttttgtaggtgtattgtgtaaaaaacttaactctgtgtgccagggagagagaaaattcaatagaaaccatttttttcccctcaaagcgagttgacgctttgtggcatttggaactgacaagatccctgtagttgcttacctctcttttcagttcttccctattcatagggcagtttttttttgtccaattaagatatacatcattcatttcaagtataacaaatattcacttgttgtttagaatgaatcatttagaaaaaaaaatcaattgaattcttttcagtttaaaaaaaaaaacttaggttctttgattaaaaacataaaaatgaatataaaaactaattaaattgaattcttataatttaatgtttccaaataggagttaatgcatttaatcatgtagaagttcaaggtaggattataatgttcaatttgccaattcttagtctctgatcacctaaccatttatgcttttagtatatgtgacaaaaaacgagcttccattcattttcttctcctcttaactggatttcagaggacccgcaaaagtggcctaagaccgtggttgat

SEQ ID NO: 5873 - DNA, 441 bp, Manihot esculenta
  Intron number 4 from transcript cassava4.1_008280m (locus cassava4.1_008280m.g) derived from phytozome v7.0 (chr-ID scaffold03581; pos 1223895 to 1224335)
gtcacaggtgtgtatatggtttctgattattatggttgaataaacagatgcacaccaataagatgatgccgagtggatttgtggtttcattatggatacacataacaaattttcactgtagtagtgcacttgcagatataatttctgtagctagtactacatacacttgatacaatcgaaatcactatatttatactgactgtgttttgtataaatgttgagaacacagacaaggttttcatatatctttcttattctttgcctttaatttttcttcatcagttaagtagttggatgattatcctgctcagtatttgcaagctatttctgttattaaccaaatgtattcatttcattcgatacccctcaaatggttttgatttgttttgaccatgttttcatgcagatcactgatttgcctttttctctctattcaacctt

SEQ ID NO: 5874 - DNA, 3002 bp, Manihot esculenta
  Intron number 11 from transcript cassava4.1_002113m (locus cassava4.1_002113m.g) derived from phytozome v7.0 (chr-ID scaffold05214; pos 235999 to 239000)
gaggagtggctctcaatctgacagtagcatcacatgttagtgttcttttttcttatggtggttcaattctatgtttgaagctctgttattttgatgcaaataatggggtgtcacatgtgaataacatagaattgtttgttcagttaatttaatcaattttgcttttttaatgataaaccctgtgggttctcttaccactttgaatgaataactatttgtcttctgagattaggtcatagctatgtactatagcagtttgccacacggtattgaagaaggaaataaaggagagaaagaagaattatgagtagaggaggagaagaaataggtgagacggagaaattagataggctaggagaataacatgagatggagaaattagataggcaaggagaataacattctgtattaatgtgtttgggtacctctctacaatgagtcacccgcatatacactgtttcttctaacagaaaacccagctgtataacaaccatccagctgtctaactactttatgattttataaccaaattacccttatttctaattacatatttgcctcctttacatttatcttccttctataatatgtaaaaatagccccttcatgagaacttccttgcccccaagaaggtgtaaaattagggaactaagctgagataaaagtttcgaccattcctctattagtgccagtttcagctcagctgccacttttgcatccataaaactatatgtactgccactatctacaagaattgtattttctcaacacccttatagtagcagctccttcactgccctctatagcatttaaggacaaagtttctcctaaattcttttcttcctttccttccatcacattatgccactcttcatctccctttcctgcatctttctcttcaccttgcacagccataagtgttttcagtttgcattgatgcccaagaaaatacctttccccaccacatttataacagggttttgattgtctcacgccccctgatttggaactaaggtgattttgtttggtgtttggttgccactggattgagatttggtttttggaaggagttgtggttctaaattgggtggttttggtgggtaaggagaagtctgggttgtttggctgaatctgagtggagaaggattttggatataactctttggtttggaacaagactgattggttttaggaaaataagtggttttcttagcacactctaagagttgctattgaaatctagcaatctcaaaggcatgtgctagatttgtgggcttcaatattctacattggcctaatttcatttttcaggcctccaataaatccacaaaggaaatagtcttcccccaactgaggcattactctttccattctaattttcatatcttcaaatttatcttggtattcctctacactttcttcttgcctcattttcataaattcttccactatatcttctatgctttgatccccaaacctcacacacaattccctctcaaagtcctcccaagagtgagaatctctacccctaatccaatcaagaataagctggcaattcccacttcttcctcatctgaaactttgtaaacctcaaaatatttgatgcattttctctctcacccacactctgagttccttcccctcaattttagggagatatttctgtagaccctcaggctccattactgacccaaacactccaacactaccattgcttgatcctggaacctgcttttgattcacattctctctgggtatgggtaaaatccctctaccctcgattctcttcgtgtcaaccctagccacacactcctcattaactacccttttaccctttatgaggagggatcgaaattcctctataatggaattttttgcttcaacaacattctgtttcatctcctctcaacaattctatattcctcctagattcttcttgcataactctcatgtgttcctccaacccatccaatctaacagcctcggcactcacaactatagatctggacatcttacaactcaaaattgcttattgcccgctatgaaacacagctctgataccaattgtgcttagcagtttgccaaacggcattgaagaaggaaataaaggagagaaagaagaagaattatgagtagagaaggagaaataggtgaaacggagaaattagagaggcaaggagaatagcattctgtattaatgtgtttggatacctctctacaatgagtcatacgcatatatactatttcttctaatagaaaacccagctgtataacaaccatccagccgtctagctactttatgattctatacccaaattacccttatttctaattacatatttccctcctttacatttctcttccttctcctataatacttaacaaactactagttactctttcatttgacaatcaaattaattgtcatcgacttttgattcagtgagtccctccattcatttttctgttactcaactgttataaagcaaaggtctgaaatgaatgtgaaatttcaaaaatagactattaataatttttctttgagttcttctttatgttaaaaaaacaaaattagaaaaaatgtttcaagaatgtttctttaaaaaaaaaaagttgtgcctgaaaaatagttttaatggaaaatgttggagaataattaattccatctgcaaacggcatggatctacttctagtaattatgacctaatcttagaggcaaatgaataattattccccctaacatttcaatagaacttgtcacaaatccttgggttttagtttgtagttaaatttctgaatatcttttttttctttgggattggggtgatttcatgtgttctttcactcttcaattttgatttctctattcctttttaagcatttggtctttctatttcaatttttatgttctatttcttctggtaattgtacattgtatttattctgtgtatcttaattggtatgcttttctaagtcatgacctcatgttttaggttttcttg

SEQ ID NO: 5875 - DNA, 2484 bp, Manihot esculenta
  Intron number 12 from transcript cassava4.1_005042m (locus cassava4.1_005042m.g) derived from phytozome v7.0 (chr-ID scaffold08801; pos 181416 to 183899 reverse strand)
gatttggtgagcattcttgcatcatttttttttctcttttgattacgttttcattaagaggatttctctttaactgcaagattagaacatctagtattttgattctgcattattgcatgtctggaataagagattcaatttacaatttaaagtgaaatctagctttatgtcatctaaggcattttggttaaggataattttcttgatattttcttagatttttgtctgtagctggtgtaattttagtgtttttaattttttcctcaagaaaatgtagggtttattaaattttttgtacttttttaagtggtcccacatctttgatgaacaagcttaacgaactttaaatgcaattaaatgtaatcttagtagtgctaagttgacaacatgcagattgtctttcttaaatgtaatcttagtaatggtaagttggttgataacatacagtattgttctttcttttctttttctttctttttgtttttttatacataatgttggattatcagcgtattatcattgtttttcatgcaaggaaaattatgcagctaactcggccaatagcttcataatggtaacaaaatatagaacttctatacagatatagacatcacaacatcaaaacctgttgcctatgttaaaatatcttaatgactgagactaagataacataagaaaatgaagtgcagaacacttttgagatcataggaaacctattttagattttgtttcttgaagtttctgtcccagcagcaacaactctcatctcatcaccccagcaacattgatttaccttagtttaggtagtcaaaaggcaaaaagacagtcaaggcgatagatccttttattgcccgaggcacaaggtgtcccgaaggaactcctagccctcccaaggggcaagaccttccgtaagccaatggattatgaagggcataagtgagagaaaagtatgaactggtgaccaagttcataaatatgaaagatggagaagtttggattgataggcacttacataattaaggaatagttcaaggggtaatagagaagtgtaatatttttatatttatataataatagggctgtgacgacttgagcattgtaatatctcctgctgtaggaggaaactcaaataacgctttacagaagtatggtgttggctcgccaccgtcctccatgctcatctgagctccctggttgtctagactaggagatggccattgttctttagcaagaaaaagcccagtgtcaagtctatgaacattgtggagcctgagaagcccatagaacattctcattctaaggttgaggttaatctataggggtacccattcggtatgaacattttggaagacatgtgtctgcttagttttaatcacagtcaggagtcccatatccgattaaacacaatgacagacattctgtcttgagagatatccatgtttgcttgagttggatattcacataaaagattaagctaagagtgaaattgagttgaagtttggctggtctggagagggaaatctaggtgccatgcaattcaaatgtcatgttagaagctaggattgttaatattagctgcataagaagcgcttcagtgagttgaggaaggataaacactcaattaaagctgtcagtgtcgaagataatttaaaaaaaaacttagaaaaataatataagagagagagaaagcaaaaactataggaaaattcattggagaaaaacaaatctacttaaggatacgacagttataattgggaccattagagcaggaaattcactttgattagactgctcatcgttggcagcctttttacttgaagaaacccttggctaccaacccaagaggagaaagaacttgtagtaatagttgattcagtttgattctgtgacattgcaagtgattcttattccatgaacaattccactatttaaaaaaccactattcagaagcagttaggaacttcaagccatcattacttccagaagcaggaaggtttaggatcatccttcctcttattgcctttacttaacaaataattatctgaagttatatacctttgatatccaacctttctggtttcaataactatggtccattcctcggtctctttctttggtaaaatcattgaaaagcgtctatagacattggcttagctgctcaagacaatttgccatctgaattaacaagctcataaatgagataatatttctttcttgtcttttagcatttaactgaaagaatttaaatattattgaattcggaattctcaatttgttctattcaataatgttactttgtactattgaaactatataacgggaggtgacatgtgtatatacatatattttttatctccctccactaatgttagtcaaatttattgcttctgagttggtacataaattatatttctctttttgatggtaactaataaggagctcattgttgcaggtcttttcctaacatacttaggtttatatcta

SEQ ID NO: 5876 - DNA, 672 bp, Manihot esculenta
  Intron number 7 from transcript cassava4.1_030518m (locus cassava4.1_030518m.g) derived from phytozome v7.0 (chr-ID scaffold08799; pos 243788 to 244459 reverse strand)
ccacctgaggtatttggtgcttagcttaatcatagtcttgcagtttctgtatgtattttgtagtaaaagtagtttttacttcctttgttatgtgtgtggggatgagctgatttagcatatattggtaggactctcttttacatagacaataggagtttcttcttcgtagacaattcatttccattttaattctatattgattgttcttaaatgaaattaatcagtatttgtatgaggaagcaatttatgtctcatctcaggtagcatagaattaaggttcatttgagttggattattccttaattaagcgcgtgcatgattctgtatttcacaaactgaaagttgcatgttttaaccagcacaaattatgtggaaaagatttggttatagcattgggaattatgactaatcgatttttataaacatgaaagggtcagttgctgactacaaacttggcatctatctgacatttgtaaaaaaaaataaatccttgtcttgtatttggtagcctttaaacattatagagaataattgtcttcattttcttgcattgaactatcattcttctgtatgtatgatgttaggttttttacttgatttttagagctcatgctatctcatcattctttctggatgaatgctttttgtttgtcttgtagtggactccaccaa

SEQ ID NO: 5877 - DNA, 1127 bp, Manihot esculenta
  Intron number 3 from transcript cassava4.1_008841m (locus cassava4.1_008841m.g) derived from phytozome v7.0 (chr-ID scaffold10963; pos 220698 to 221824)
catcacctttttatcttgacgttcagaatccacaggtgagtcttcctttattgatcgtattcaaatgtatgttgtttcttgtaaacttgtttttcatgaaattcaagaaagaagcttaatggtttcccagaagtatttttcccatttgacttctgtctaggattttggcatttctgtatagtttgtaaatagcaccttttgacatgataatgaaaagttaagagatagacacagacaagatattcagtgtatgttatgactttggtgatgatctctcttgatttctgatttcggcactcttaaaattgtcagcaattctatgatggcttcccggatttagcattcatgatttaagcacatttgtattttgtagtctcagttattgcaacatatggttgcactatcaccttttcttgatgttcaacttttaaggtgttacacaaattcatttggctagaaagacctgatttgcttgtatcttctatttgttgggatggtaaaattctcttgagattctgagcatattttcagaacacagccattagaatgttgaaaatattctgcagattctatatttattgtcaagttgcatggtcttatattggtatctgattcaaaatttgtccatgatacctttattgttgattatgctgtcattttcatctaggaacttttcacttcttttggaagttgtttgtcttagatattaatgttttttttttgtctatttgtagaattaacctatgaatataaatctttttagcttgcttctattgtttgttcaccagtagaagagcatgaatttctgtaattgagtatatcaaaagatacttttgcttctattgtttgttcaccagtagaagagcatgaatttctgtaattgagtatatcaaaagatacttgtgcttataaaattggtgggcatattcctactagaacaattgtgatatctcttttaccaattgtttaaggatgtatgacataagaatcttgtggaacaatattatgtatctaattggacatccgtttgatatttttaatgtgtaagcactaagcagaacatattatcttatgtttatcttctcatttcaggctgaattaattgatcctgcattgaagggaacact

SEQ ID NO: 5878 - DNA, 2533 bp, Manihot esculenta
  Intron number 4 from transcript cassava4.1_031023m (locus cassava4.1_031023m.g) derived from phytozome v7.0 (chr-ID scaffold00876; pos 130998 to 133530 reverse strand)
gaactccagtcacattgtgaggtggcaaactatattttgaaaatgattaatgtgaataatatgtgataaggagccaaaattcacatgattttgtttggttgattataaatttttatgggagttcttttgatagagttaggagctaatggagaaaatgtattggtgatagagagtggacttttctactttaagtccaagtcaaggttgatacattactaatttaggaaatacaatggaaaggaaaaagaaaagaaatctagctaaagatagcctaggcgaggcgaattacagtaataaaaccatgcataccccctctctgctctctcctcttcttaaaacccttcttctgtcatgacagctcactcccctccagacagtcgctccgcgattctctctaaccatatgacctcctcataattcttttccatctgtcctttatgatattcttccacttgtccttccttctgattcttgaatttctttctgtagtacacttttagaggttgaggctgtgtagctaggtaccttattcttgccacgtcatagttgcctctatcattaccatcttcatgaagtttagccttgtcctcaataaagtgaggaaattgattggcaatatccacataagacatccaggttgcttcttcaacaggttttcccctccaaaccttttgggagttctggtattacatcatgagagccaatgacccttttcagttggaaaacatagaatacgggatgtattctggatgattcgggtaaccttagtttataagttaccttccctatcttcttttcaataataaatggtccaaaacaacaagcagataatttgggagaaatgacctattttagaatggattgtttgtgaggacgcaactttaagaaaacagaatcactaacagcaaagttcacctcccttctatgtttatttgttgctcgaaccattctttgttgagccttggagagattgaaggccaattgacatagcaactcatctctatttgccaaatcctgtgctaccgcttctatcttagtttcactaggtagaaattgctccaagataggaggttctctaccataaactgctttaaagggtgtcatgcgtgctgctgtttgaaagctggtattataccaatattctgcccaagcaatccatttgttccagtgctttggttgttcagaagtgaaactctactctacagatatgtctccaaactccggtttaacactttcgtttgaccgtctatttccgggtgataggcagtactcattttgagttgagtcccttgattacggaacaattctgatcagaaatgacttaaaaatatagggtctcgatcactaacaatcgatcttggcatgccatgtaaccaaaaatttctcttgcaaatagatcaactactggtttggtagtatacggatgtcgcagactcacaaaatgagcatatttggtaaatcgatcaaccaccaccaagattgcatccatcccatgtgagttaggaagacccgtgataaaatccatgaaaatatcttcccatatttgatttggaattggcagggtttgaagcaagcttgcaagagaagcaatttcatacttgtgctcttgacaaatcaaacattcaactacaaactgttgaatagacttcatcatccctggccaaacaaattcgaagcaagccttttgtgcgtacggaaggctgctgcatgacctcctaagggagaagaatgaaactctttcagcaacttaggtacctaggctgatgtttttggaatcaccaatctgcctttacaatataatttgttctgaacctaggtgtaatgtggatacacagcagcattttcttgcaagtcctgaataatctttttgtagagaagagtctttttgtacttccttctctatttgttcctgtagaatggcaatatttgttatatattacaacagaaattacaagctatttatacacaagagactgtatctaaacaggaaggaaaatcaagcgtataattatgcaatccttaaaattaagcaactgatacgtctatcaatatttacttctcaagcacctatagctagctcttcaaaaatttgtctttatcttctatgaacttgaacttgttacttattattgatctctttgctgttccttgtctatttaattgtgctttgtctttattaggaatcaatacatttataattaaaagtttccagcttttcttttttgtttttccagaattatattagaacagaaagagatttttagttcttttgaatttctataatttacaacttattttattaatgatgatcatacaggacattgatgctaacaaatatgcgtatataaacttatttagacatccatttactttgtttacagtggatgccaatatatatgcttgttcctgaggtttcatattttatcttttttccttagcgattagaatataatcagattattaatttacttttattttttttgtgcatccttttgcatttgtatatgtaattgttgaacatacttgcagatag

SEQ ID NO: 5879 - DNA, 1217 bp, Manihot esculenta
  Intron number 4 from transcript cassava4.1_010123m (locus cassava4.1_010123m.g) derived from phytozome v7.0 (chr-ID scaffold11279; pos 57637 to 58853)
tgaggaagttgcgaatctctttagtaggtatgttactttgttatttaacatatttagatttaacttttaatttgaacatgctaaacgtgtaatagtattgggtgggtgaggaactatgtgtatgaacctgaagactttggtaactagttaaggttataaattttccatgttagaatttagagaattttgtaggcaagagaggagtgtatgtagatatttttcaattatgttagcagatgtgattacttttgaaaaattaatttgtagatatacattccttactaaaataaaagaagactgatcatttcacttttcttaattagaatattgatgatgatgtgaattcattagtggaatacattatttggttttcagcctctcatgttatacgatcagtcaatagtggtggcgtgttggagtgtgatttgtgtattaaaaggttatttttttggccttatttgtgtcctatttttctactttttttttgagaaaaaaatagtgttgtaacagtagaagttgtggatggttcttttccattgagactggagattcacttttttttttaaaaattttttttttgtgttttcgttcagaagttgttcgagttggctgtttatgaatatattatagatgttaaaactaagtgtcctttcaattgcttttaattgtttggttgtgttggttttgcactcttttgcctaatgaagttatcttattcttatctatgatagttatgtgctgttttgatttcacaagtggtatggctgttgagatttttgggtttcccactccttgaataaatgcaatttttgcattcttcttttatatctcattgtgtattatagtttttcacaatgccttgggttaatattctctgttaaagttgcattacatgatagtttttttatttttattgttgattgagcagtattgatgatatgatgttgtattagttttgaatttatcttatgttagatgtatttctaccttatactagaacaaaagattaaaattagctagcatctattactttgttaattttcacaatacatgcaatatcaaagctaatacagcctaaatgctatttaatcaaataaaaaagggcaaaatatcaaaataaaatgctgttactatgtggcttggttgcaagtttacattaatattggtgattggatttaaatgttaccatttaatgctttctttttacaggatactta

SEQ ID NO: 5880 - DNA, 1462 bp, Manihot esculenta
  Intron number 1 from transcript cassava4.1_018242m (locus cassava4.1_018242m.g) derived from phytozome v7.0 (chr-ID scaffold09761; pos 334475 to 335936 reverse strand)
ttctcttggtgacacaattggtgttggtactcctggtaatgcctaaaacttccttttgctagtactaagcactttgttttgtggaatgggatagaattggaaccgaatagttctttcatggcattgtatcactatctctaattatacgtggaatttgtacttaacaaatctaaagaataatttattatagatatgcaatattttattgtacattgtaaaatttagttgaactttgacatgatgaagcagctattccgagatatatatatatatatatactcacacatacatatacatatatatgtgtagatagattttttcacttttgacttaaagacgaggagcaacttttctaattctatcctatgctatgaactgaaggaagctgtagtgcttaatttccttgttggatggttagaactacaatgcaactttgtgtagttaaatgcatgctgaactcacaagggccatcatctagagcaaatgaggggcatgccttagagattgaggtgcaattgtacacataaaaaggaaataaaataaaatgaagaagttaaagaagaaaaggaaaaaacaaagaaaccttttttttttggggggggggggtggttttgggaataccttatctaggaattctcttctctctcttagacatctttggcctgccgactttctaatttatttgttgcaacatttatggttctatttgttctcccattctttttgttggggttatattataaacactggtgcaaagaatagaaaggatttgtaagttccatctctttctgagttcatttcaaggttcagttctatatatttcctgactggtctttttaactgctatgtaataattactaagagttttaagaaatttagaaagcctatttagaatttgatacaactttttgattgacatccatactttccaacaggccaacccattaaacaaggcaaaacccttgtgtcatttttcaattatagatccttttttttttttataatcaattttagctcaattctcaggtttgtattatttatagtccactatcaaaattgaaaatttgagatgttgacatggctaatggcatgctgaataatgttaatattttaaatatggctgctaacatggtaaaaatattttacttcatatatgattgttggtgtggcataaaagcatttcctgcgttttctagttatctaagaaaatttgtcttgctaattttttcccccattgtttgacaagcttctcttgctttgcccgttggactttcttggtatctgagttttacagttccatttcaccattgggatgttctgcctcaaactttagctagaacaatgttgcttgtccccaaaataaacaacaacaaaaaaaataactgtttaaatttatttacttggttacatgttatcatttgattttattctcccttcccatgactcaggtactgtaattcca

SEQ ID NO: 5881 - DNA, 4141 bp, Manihot esculenta
  Intron number 8 from transcript cassava4.1_012242m (locus cassava4.1_012242m.g) derived from phytozome v7.0 (chr-ID scaffold04439; pos 69746 to 73886)
tcagttttgaccggcagtgcagacattgtgagaaggtgacatattcttctaaccccctcctcttagagtccacagcattcaaattccgtttactttttcaattatgcacatccatatttttttagatgttgagaaaagcaattttagaaataacattttgcaattttgaaatattaatgagtgacacatcaaatttttaaggctaaccattctgctttggcccatctttggtatggaataagccacatacagtgtgttcttattgaaaaaataggatagaataataaaacccgagtcatgttggacatttccttaaggatttattttggacattgtccttaaggattgattttgcaatctctctgaattaaacaagtttttctggaatttaattttcaggattaggacatcaacaatttatctctaatttgtaactctgcagaaagtatagggaagagaaagaataacgtagaagatgggagtgtgtttctttataaaaatgcagactatttatagagagaaaaatagccgttataaactattataaaaattttgagataatataataaaatcataatggtcatatttaatattagatttaaatatcaaacgtgcaacaacaaaaaaaatctcacaaataaaatcttcaatgaccatcaaattttcgacgaccacaaaatcttttgaaatctaaatttattttacaataatctcccacatattttaaaagatttttcattgttggatttaaaaaatttagtgtatatgttttgaatttagttttttttggattatgaactagacctagattaataagacttaacatacagagtaattaataaaatttttgtttctataaaccaaaaaactcttttttgtatgctaatatcctatcaatctcataacacttcacactttacagatcttgttgtcaacattgttttgctctaatagatcatgcacatgcctagtagttcacaagtgctttaaagattatatcccaatctcatagaagtagttctactccatacttatataggtgatatcatcaggtgtatactgcagtttatacatcatccacaagggatatgaatattattaagagcttttagctcatcttctcattaatggagtctagcacttctcacattataggaagggagaacgttaaatagtgttaacagaactaacaagtggcttattattacgtatatgaaaatttttttattggattttttatcgcaaaagtagggttcctatcactgttaatttcagattggctaagtctcattctcctcgatgtttcatttattaacttttttcttaaaagatttagtcagaggattggccaaatccacttggccaaatccacttctgacaccacgtagttaatagatataatttcatttctgagcagctgcttaaccatgtcatgtcttaaacaaatatgtctatttttactattgaaagttttattttttgcaatagctattatcgtttggcaatcacaatacaccaatgatattgattttattctcaacatagtatttgctaagaaatttcttagccactcaaggctcattgttatctaattctagagaaataaactcattttatggtggttttgacaataataattgatttctaaataattgcaccaccaattaaatacataatcactagtggattttatctcatttgaatctaaatttcaattaacattactgcatttttctaatacagtgggacattcattatatagaataccataactcatggtacctcttatataattattaagtttgattaaagtagtccaatgatcatgattagattatgtgtatattgctcaatctatatagcataagctatatcaagtctgaaaaattcattaaatacaacaatcttctactaatatgtgcatatctaaattgagtaataatattatctctattcttttttaagaattagtatcatatggagtattcactagtttgatattgagatgtctaaacttctttgctcttgtgatataattatattatcattccaattttaataccccaaatcacatttgctttctttaaatattttatatcaaatttatgaataagaaaacatttagtttcacatgcttataatttatgtcaaatatcagtatattattcacatttgaacaaataatcacatgtgcattatgtataaattttgtaaacatatacaccggctaaaacacagtgaaatatctcatatcattattcaagtgcttattttaaaccatataaaaatctaagaattttattttcttgattagaaacaagacaacccttgtaccacacgaaatataaacatatttttaacaaaatactctcgcacttttaaatattttaggtcaatcttataaaaaaaaaattgtaattcataagagtcttaagaatttattatttccttctattacaatactcttaatgctgctaaaaattatttaatatagaataaaaaataaataaataatttcaataatatatattatctagaaaatgataaagaaaaattttttagagtgaataactaaaaatacataattttcccttcctacaatagccatttaacacacaaacacaacttagaaagctaaagttagactaaacactaaagaaatctaggcacaatctaatgaaaagggaaaaaacagtataatatgcaatttctgtaattaagagatcttcaaaactcacgatgatgttattgttttactgtgagaaaatgaagtgttttataatttcacaaaatttgttaattatgccattcagttcactttcaatgtaattcacttcaaatataaccacaaaaaatatataaatacgcgtagttattagaaagtgaaaagtagaaaaaaagaaaagaaatatacaaattttcaaataaatggaccctcaatgtcttcttaaattctcaaataaaattggtagttaaataaaattaactcatcataaaagaaatagattccatactgtaaaatcataccaagctcatgtgcctctttcctagtagatagcaagtattcctttacctagaagcttgacacgaacccaaccacctgcgacacatagcccagttggagattgaagtggcaaagagtgttgagaagtcgattgaatatatttttctcaatttttgtcaattcaatcttgtccctaatttgaacacaatcggctgtttttggtgacgatgtccctatcgctctgcagcaaaatcgatgaagaataactcatggggctcttttttgattgggaacggaaagttttgaaatggaaaggttcggctcctgatgctgatgctgctaatttcattgtctatcacgagcttttaacaacaataattttcaataatcgcctggagtagaccttcaattattttctcccacctcccaccattgaaggataaagaataaatccttaaaattgttggaaaaatatgatagaatactaaaatctgagttgtgttgaaaattgtccttaaaaagttattttgcaatccctaaaattaaacaggttgttctggaatttaatttctaagattaaaataataagaatttatctgtaatttataactcagcagaaagtatagagaagagaaggaataacgtagaaaatgagagtgtattttttttatgaaaatacaggctatttataatggaaaaatagttattgtaaactattataaaaatttggacataatataataaaatcatgacggttatatttaatattagatttaaatatcaaacctgcaataacaaaaaaaatctaacaaataaaatttttaacaaccataatattttcaacgactacaaaatcttttgaaatctaaatttattttacaacagttctttcattgcagtattgttcctttgtaaaactgatagtatgagttcctgcgtaatagaagcgcgtcagtgtcttctcaatagaaaaatggagttaggaacttaggattgcaatgtagtgtgtagatgggaggtgtcgtaaagttgtagaatagtgcataaagttcttttcttgaaagttgctgaacaatgtttcctctgaaattattttcaataggaatcaatcaacttgtcttttggaaatctactcac

SEQ ID NO: 5882 - DNA, 3718 bp, Manihot esculenta
  Intron number 13 from transcript cassava4.1_001810m (locus cassava4.1_001810m.g) derived from phytozome v7.0 (chr-ID scaffold09294; pos 447558 to 451275 reverse strand)
tagaaggtaaaaatcccttatctaaagaaagatgaataatactagctaggtgatttttatgttgtgtgatttatttgtagttcttaaaacattgccaatcttttggatactgctcaatctcattatctgaaaaaatttgtatgatatttttcttaaagcttgagagatgcacttagcagtgtttattaagttgaggtgacactgaggttatggagtgtcatatggtcttaagtgaaaggcaaggagagggctttcttgaagcacacatactcttttaatggaaaaaatatcttctaactagtatgataaagaggaggataaaagaaaagataacagaaaaattaaaaagaaaaaaatggtttaaatccttgatttgttgaccaggcagtgagaataaaagaataggagaggagagaggggaagtaaaaataagagaagaaaaagagagaggaagaatgacagatacctcttaggttgttgactccggaagctagtggcttgaaatggataccataggtgagtttgctgttttaaaaacaagtaaaacaaaaataaacaatatataggttattttagagaagcagtgcctcttgcctcagggtttgaggcacttgcctctccattcctaggcacacctcatccaactgaggggagagggccttgcctgatgccttttgtcacctttaacaacactaatactgaggagagtcagacaagaataagttaatagtacacttgccgtgtgcctcgtatgaagtagaatttgtgtgaattggttgcaacaatttatttatgaccaattaggttatgcagttaaatacactaattatgagtaatattgcaattctttgaactttggtggttcgtcttgaactcctggtgaccagtatgaattatgggtgtggcttatatatagcttgttcaatctttttccctaggcttgtggcgttttgaatcttctcgttttcatgagttggaaatattcatgcttctccattttaatcactggtttatattttgtgagtgtcattccttttactgtatgcatctgaatgtattgtagatctcaggtaatgccatttagactaaccttgcttcaaaacttccctcaaatattgctaaattttttagcatttatgctattcttctctatttgtttttaaattcccagatttgggtattcttccacccaaattctgcttaacttgagattggatcatgtttattagacctatgtcatcatcaagtatatacaaaggaataaatcatatatgatcaaaggaagaaaaaaaaaaagagaatcaaggctgacatgttgatgtcagccaataggggtgagcattgaacggtttaaaccaaaaaaccaaactgaaccaattgactttggttttttggttaggttttttattatatcggttcggttttggttattgtttttagaaatgttcagttttcagttgtgttgttaaggtcacaaagctgaaataactgatttgaactgatctttatccactacggctatacataaccattggcctttccgaagctaaatattctttcttttctgcaccccagtttcagctgacatacagtttgcactcctcctctttgccttctatgattgcacagctccttgccaatgttgaagtcatcccttcctcttcctgctttgttctctacttctttgttcctcctcttgattcagtccttcacagttgtctcgtcccctttttgcttgtccctccctagctttcatccctgactctcgatgagagaccatggcccattgctggcatcgtgtgcacctgtgctgggacgaggattcattgcattgcatcgcatggtcgcacttacatctcgttgcctcggtgctcaaggttgagtccaaatgctaggcgacagtatgatgctattgtcattgtgcaacttgtgtattgctgatcattgaaccacaatggttctggattctatttttttagttaaaattaaatttgactttgtgattggctttacttttgttaatttaatgcctgagacttgcttcttgctgctatattacattactcttggacttgtatttgctgcttccttttatgttatcttggacttgtatttgccatttgcccctattgcttttagattatcttttgattttgcatctgattgtgctttcttcaattggtttgttttatttcatttttttttggataattttctttctgcaaatgggatatatgtgatgggtaatttgggtttgagggctttcacctctgcaaatggagatgtcttatagccgatgaactgaaccgaactgatttttttggcttggtttgatttggttttcattattctttggttgggttcacaatattttacatttttggtattcggtttttctagtttggttgcacacccatataagccaattctgatgaggatatcttcatatggtcttcacagtcatcaagctggaaattacttgaatagatttatgtgtctacatatgtaatttacattctaacactaacctcataaatgtctctctgaaattcctatgaagccttttcaatgttgttaacaccatttggagctttcttgttttcctaaaatacttatttgttaaccccatatgagaggaagtgcaatcttcttggttgcagaatcaaatgggtttttttattgtaaggttattatatcacaacctgaaggcagtcggttaactcttccaggagtgtcatagtttgcctaatgaatatatgtatatatgtttatatattatgaatatgccacctttataacttgtgaaactttggctatgttgctgattcttaagaatagaaacaatgatgctcttccccctgttatgaggatttttcccccctccttttttctgatgttattacagtaatctctaatcctttactcctcattcctttcttccattggaattttgtaatatttgagattttctacatgattgatgcaaggatctttttcgtttaatatatttttttctccattaatattattgtctttcattgtatatatgcctcattggatttaaatcttaatataataatctttttagctttctccatagttgcttatagtgtccatgtgcaatccagttctagcatttatattcttttgatattcctttttggctttgattgctctttagacatcattattctccttagcttcactaatgtatcacctttttaatctttgtagcaatctttgtcctcgtgattcaaagtacatcttttaaaatgggctacttgggagccacttacatctatctttttatgttccatcacctcttcttctaaagcttttagtccaccttttaatgtgtcatatctagaaccatcaatctatttaagcttaggcagttaattccctttctgtgaaagattcataaggtctcaaaatctatgcatttgctagctttacgagaaggattgttaattgttgaattgtatttgcatgacatgctagttgtgtcaatcaactcatcatattgcaagctatcagatctcatgggttttagttttaatttttatgttctttttaacaagtaatggatgcaaaatgagttgcattctggccattatcatagatctatgatatcatacagccatctgttttgctcgagttaatgctacgcatgtgtcatgcagctatatccagtgcggcagacttatcttcttttgct

SEQ ID NO: 5883 - DNA, 1144 bp, Manihot esculenta
  Intron number 4 from transcript cassava4.1_024083m (locus cassava4.1_024083m.g) derived from phytozome v7.0 (chr-ID scaffold06705; pos 223690 to 224833)
aggtataattttattcttctaatgtcctggataactgagttagtttctactgtaaataatgaatggttgatttaactgcaaacataagattacatataattggtcactaacatgttaaattaacattatttttctttctagcttttcattttaattgtataaaaaattttgtgcatcaagaaagctagttttattttgcacatccattatttgaaactttcctagaataggtttttggtgttagcttttggagcttcaagcattagccaatattccatgtactaaagttctaggattgtagtagtcaaacattcagccttgtattctcttatacaaataatttgttgagctctttcatcatacaagcatttggtaaacaattgaaagcttattatggtgactgattagcgttgatgcttatcaacaacttttatttatacagacgcagcattttggggtcataaatgtgttgttagaaaaagtaccattttgaatcctactaaaagcagtttgaaaagtcttttttcttttttttttttccttttcttagttttcttaccattagaacgtattacatttatttatctaatttttagtactctctaactaatatatttaatacattgttattttctcaacagtatgtctgtctaacagtctagcagaaaaagagtatcctgctttcagtttgttaatgtttccttttcagtgttttttttaactatttgctccttatctatcttcttagtaaaaaagtttctttttcaaaagcattattctgatttgatgctcctttggaattggatatatgattttgccaagtataattatttcactattcttcaagatgttagcttagatatgcacttccatcatctcaactcctaataaggttgaaaaccatttaatctagagactatttgaattcctgcatgcactggtgtctatggatgcattttattatataggcacataagtaataaactacatttgaagtgaactatctgagcagttatatcaactgattgctgtttgtctgttgcattggttgctcttatgaacatttgagagtgtgctgtgtttatcactttctttgtctctataaatgtgaatggatgagttcttacacaggtggtgattgttg

SEQ ID NO: 5884 - DNA, 916 bp, Manihot esculenta
  Intron number 1 from transcript cassava4.1_017910m (locus cassava4.1_017910m.g) derived from phytozome v7.0 (chr-ID scaffold08542; pos 182568 to 183483)
ctaagcgcgccgtcggcgttgaggttaacaagcaggtatatttagttttccgatttggcgtttttaggttccagaagttaattatggggttattctgtagttttctagcttgtttgaatttgcttaacatgcgagattgtgcttatcagctgggtgctggtgaactgatttattctgggtttcaagtgtcgttttatcggtgtttgtttgctagattatccatcttaggtcctctaattatgtagtggttcagatattttactttctcatttttttgagtgaatataataattgatgtggtgattatccaattatatttatcatattgctgatgatagtaccgttgattatgagatctgcttgaatgtatatgtgctttagctttttggatcttgtattgggttcacttcgatttcctacacttagtttggcattgcgcaactatttgtttattacagcttgagctaatactataagcggagtagagggctgttgaacccttggcttgattccctactctatcactgagattattattattacgggtgttctaattattctgctactaatgccactgagatttttatggtttgtttggtcctatactcttgctttcattttccttgctattatatctaatgccaatgtaactgatagtcgtctttgcaatgttatcctggagtcttctagacttgaaagcaatcgagttgaatgggttataatgtttgtgttgttataactgagtcctcacttaacctattttgttactcttatgtacttgtttaacctctcctctgttgttcgatgtctttttgttgccatctcttgagtaacaatgatggatatctgtgaattgtgatgatggttattgtttatatattataggtgggtaaccgaattatcagaaagaggatcc

SEQ ID NO: 5885 - DNA, 2354 bp, Manihot esculenta
  Intron number 10 from transcript cassava4.1_003544m (locus cassava4.1_003544m.g) derived from phytozome v7.0 (chr-ID scaffold05875; pos 687925 to 690278 reverse strand)
ctaaggtacggcagatttgaggtttgattttttgcttttgtagcggtagcatgaacacagttcgtagacataatttatcacatataggactacacaaaactcatagaaattaatgtgctatattaatgtggtatgggaacataatgatcctaatacagttctggaattttgtttattgtagaattaggaattcagggtttaaccatttagcaagtttattgttttagccttcattattattattataatttcctagtttaagttattaattcttcgtaattagatttgaaatatgatttctaatttgattaggtttgcaagttctataaataggctgatttgtctattgtgttggtagcttttgattatgataatattgagaataatatcaatgaaaatgagttctctttttctttaaggatttgttccttggattgtttttgctcttccttgttgttccacaggaattggcatcaaagccccaaaaatcctccatgtgaattgaagctgtgaaacctgaacacagcccgtgcctctatttctcaaaatttttgatgtttttgttccctaaccactgtattcttggtttctgcctgactttactgattattaacaaaaaaaaataaaataaaacaagaacccaagcactgccgcttcaagttccccactccctctagttgatggaagaaaccactaccaactgcaaaactttttggcccgaggcgaccttggcttccaagaagtcacgggagggacaagttcggactaggttaagaaatgacattcaaatctgcccagatttcattattttccgtcaaatggacccctatcccacattgcctacagctgacctcccactttcccttgttggaaccttcttttttcacccttgggggaagaacccggcgagtcatggcaagagacccattggataaggaagggaggctcacccaaaaacatacaagcagattgatgattataatgatcaacttgatgaaatatgttatttgagtcttgggatatctggttgatcttacactatagagaaaaagccttgccctggaacaatgtgagtgtgactatcaaactcaacatgctcaacaagtagttaaggagaaacaactctaagactttcaagcatggaaagaagcacatctatttcaaactagagaagagttggataaagtagaagcattgaaaatgcaaaggcaaaattttttgaaaagttaagacaacagcaagaggagcttgagtctaacaagcaacttgagcttgaagttgaaaatgatattcaacaacttgataaaaaagtaaattgagaaatcctatctgaaaaatcatcaaaagcttgacttaatgattctgtaccttttgaagagctcattctaaaggaagaagctgaagaattactcacaccatggaaacttcagtggagattgaagaatttcaagctctttgtaataatttgaagagccatttgatcataattgttacttcctccatttcataatctttgtccattttattttttcacgtattaagaaaaacaatttttataattaacttcccgattatatctataagacattaaattttattaaatactaaaagatattgtgacaattaacgagaggttcttttagaaataagataaagttaaataaggttataatagtaaatttatatattaactatatataaaaaaggaaagtgagcaataattttaggataacaaaaaaagagataaaaattatgggatggattgaatattaattttatagattcaaatgtttcatgaatgcaaagggaagtaaaaaagccttcatttcatcttacagtcctccaaggaaataagattgtgtattgttcttgcgggcatttggattttaatgcacttcaaaactcgtggttgagtctaagatctttatacaatttaggaattttactttgaattaggaatttagggtttaattatttaggaacactattaatctttagcctttttgttattattgtttagtttgagttatttaatattcctaattagatttgaattattatttctattcctaatttaattatgtttgtaagctctataaatagggctagttttctattttttttggttgcttttgataataataattgtttgagaataataccaatgagattgagttctcttccccccccctcttccttttttttaaggactcgttccttgttttgtttttgttccctccttgttccacatcatatatatctttatcataaaatgctaatgggtcttttttttcctgctcttttcaaatgtggttacaggaattcaaactaaatcccaacgccaagagtttcat

SEQ ID NO: 5886 - DNA, 540 bp, Manihot esculenta
  Intron number 5 from transcript cassava4.1_015424m (locus cassava4.1_015424m.g) derived from phytozome v7.0 (chr-ID scaffold12946; pos 403857 to 404396)
ggattggcatcactcaaatttacgccggggctcaggtgactcataatcagctccataagagtttgttgctagtaaaaagtttgtgtttctatcaattatactttgttgcatgtaactgttaggaagtagtttgcgtgggcaatagtaataagtgtataacaatagtaacttctttcttgagggtaaaataggatttatctcattcttcaaatccaaaggtgtgaaatggttatgcacaagaatctagcacatgctatatggcatggaagtcctggaaattattatagtacttgccattgcaaaccaactattctgtcaatttgtttcgtttaattggtatattgcttaatttttgtagttaacttggtattgatccctccctgatgtgaattctttgtaattcttaagttgtggaatttctttacgactacatgtgatttttattttttctttttaaggtaatcagcttgcttaattttgtgtcctctgatgggctatggaatttttacttgtttacatgactttcattttcagctacct

SEQ ID NO: 5887 - DNA, 1719 bp, Manihot esculenta
  Intron number 3 from transcript cassava4.1_001183m (locus cassava4.1_001170m.g) derived from phytozome v7.0 (chr-ID scaffold00318; pos 54155 to 55873)
ttttgttttgctaccatcctggacgcccactgaaggttagctagtgtaattccagtacttcaaatctcaatctcagtcacaacacatactggttttgccagcattgttctgtgtgtctgataaacttcataatgcacaacattgatattaagtaggagctgtcatatatctgtgaacagtagagaaggtttgaaaatagattaagtagataaattgacaagaaaaggcctagatcttttttccttggtgtctaatgcagaagagagatgaagggataatttaggtagaatggcagaggagagcttggagcatagttattagagctgttgtgggaccaggtagattgttcacttattcaaccagtgggacgatgtttcaatcagtgggtcattaaaaaataattaaataccatacctattaatataaagaataaatttaattagctaatctttattttttaaaaaaaattaagatttcataaatcttaacggaatttttaaatttatataaaatatttaaattctaaacaacactgttactttttagctcaacatttataaccaatgcataaaaacttctataaatgagtaactatcttcttgatcaaggttttcaaattaagccctgcctatgaatgggtaatggtagagactcacgggtttaagattcaatcaaaatgaaattaaatgttatgtattatcttgaatacattgaatgtgtaattttagtaaaattataaatttatatgaaataaatagattttattaaattttataggtgtattattaaataatactagaaaatttgaataaatatatttattttcataaaccatttggcattttattaagatttaaaatctaaaattaatagtgttgtattatataaaaaaattgggtccttttatttgtcataaaaataaaaatagttataatgcatttcatatactataacttatttttcatgaaataatgtgataaagaaaattctgaaatcaaatatatattgagcaaaagaatatacaaatatcaagttagctcaattggtggtgacttcaaagatctctcatgaactcttggctcaaatctctcagctagcactcgctgcttcactgggtcattccaggtttattaacatttattttgagaattgtcatttctgtttcacttgctattctgagcatggttttaaataatggccattatgtaatagtgcttggctgttttgttaactgttgcaacctatttttgatacccatgactgtgactgtgattgcaatttatatttaaaaccttgactttgagtaatcacttaaatatttgttatagctgaaaattaatctcagagcaagttaacttgtttttcatgatttgaagcacttcttttttaaaaaaagctttggataaaagcctcatgttgcaataagattgcttggaatggtagtggtaaattgttgtggcatacactttagaaaatcaattaaggatgctttttttcctaaattgtcttttttaaggcccgtggtgtgttctgattttttttttctttctgtgattgtgatgttgattgcatggcaaattgatgcattccttatttagacaaattttatttgcttattagatcaatgtctgttcccatatgttagcatctttatatcaatctttttcctttcttcttcttgaagttgaaagtgctggtgaagtatttgccagacagctg

SEQ ID NO: 5888 - DNA, 1892 bp, Manihot esculenta
  Intron number 2 from transcript cassava4.1_012373m (locus cassava4.1_012373m.g) derived from phytozome v7.0 (chr-ID scaffold06705; pos 257508 to 259399 reverse strand)
tgtggctgatctgcaggaggcaatatataagcgaagtaagtgctgtgcatacttcactctttgattctgaggcttatttcaatgactagaaatttaaagtctactctaatttgtagatcctattatgattatacatttagtttggaagaaaaaagagagaaattttcttctgtaatgaaatttgtcaaattatgaagtattgagaatcccatgcaagtattctattgtctagaatttcttgttgtttgatctcaagtccttgatattcatagggaaatcctatgtgtactcggcctaccatggacctgagactcatgaaaataaaaaatgggtactatgattttttgcatggagggaccacttgcccacttaggtccatgatcgactgagtccagacaagtttttctagatattcatatccctgcttgcttgtttctggatgaacatgaaatcctacacctgcagacatgaaatcctacacctgcagaccgttcctcttctttgatccctttatttatattgctccagagtccagattatctcttttctttttcccaatttctccgatctgcttcatgctggtgttagggcttgtagtgttgcttgtgtggcacaaatgcatctttctaatgttacttgcaaagttgaattactggccgaaactactagaacttggcagaacatgttcttttctttttctcggtcagtaatcagtacaactatatgcgtatgatagtatgtaagacatgaaaaaattgcacaaagcaagctcatgtggggttcagttatctatgggcttttgtgtgtattgaagggatggtgacattttaagtgcctaacttttttgggattttacatttgagtgtttgaactttatttttgtgaattgcgtgacaggcagtgcattgaagttggcagattcatcttgtacggactgttattattattattatttttaaatatcctcaagttacaccttcatgcatgctcaagtttatatgaatgagaaatttgaaaaattaaaataaagtcatgttttttttaaaaaaaatcaaatattctatgtctgttaacatagtaaaagaaaggcagatttcctattattttagtctatcatgcatttctagttgcagatctagaacgtttttttcataaggtcaacatatcagaatattattttcctatgtttaagattttttctaataaaaagagatttaattaactttccatctgcagaaatgcttctatcactaaaaaaaggttcaataatttaatttaggagtggtcaatttagataaatacacatatacataagaacatcttttttatgaaaaaaaagaggggtcatgtgatccttcatttcttttagtgcatccacaatgtgcttttctagtcacctggaaagtataaggtacctgattgcaagtttgttttcagttcaggtagttaattgcatggaaaaattcagacactcaaattgataaccccagaaagttgaaccgcctaaactgtcttttttatggttatcttatcttgtgaaatattgcttctgtgttgagtttgtatgttattcttttgatggttggttcaattttcatttttagttgttaaatttccacttgcgttgaaattaaatttgagttgttccttttttgtaaattctgaaagctatttgatttgatttatcacgcatagtcatctctaattcttcatacttacttattaagatgtgaatatgaaaaacaatggttttctattggaaaaccccatttcccaactcatggcagaatatgcaaattatgattgtttaaatatgcattttattttaataacctggttaactgcttactgcaacagccaaaaaattctacccttcaagacagcggctgacc

SEQ ID NO: 5889 - DNA, 2916 bp, Manihot esculenta
  Intron number 1 from transcript cassava4.1_016937m (locus cassava4.1_016937m.g) derived from phytozome v7.0 (chr-ID scaffold06814; pos 757076 to 759991)
gagagccaaaggtaatttagttcgtcaaattttattggtgctccgataaattattttctggttgtttaattggtaaatgaggaagtggaatccattcagtttctaattggtttgtgggaaagtgaaggaaaaggagttagatgatgagatgtatattgatgtgtaaggactcggttagaaggtagttctttctctgttctctcttcattttttaagttaattcctaagtgccactccagtagatgcgtagtgtgcaaaaccagaaaagaacacacaaagagcctaattaaagctcttctataattagtaggagaaactaagattgatagtcgacaattactagccatcactgtagactgcaaacctcagtcggcgatgatggccaaatcttactgagcagggcaaagtttctttattcttagttccttctatgcaatttcttctgtcttcaatagtttttgatcctagataacataaatatggtacaagttaaggtatattctttgatttatttctccttttccattctcccacttgttaatgtgcaacaatgaactaatgtagccactgaatgcggtatggatgaatttacccgatcagtttggaagatctgtatttatatataggaagtattgtgtgtatttactggagcatcactcttttgaagtatgcattaacagtcactacatgcaagcttgagtgatatagtgccctaggttattaaggttcgggccaaatgaacgctctgttccaaacgctcgtttctctgatggtaaacaagttagatcaaatttttgtttcattccattgtctcaatgtgagatttgcatatgacacaaaataaacaagaggccttgatagttcttcctcacatatctgttggatttattaatctgtttaagattgccagctatgattttagctgctacaaatctcctctaggattcttcatttattactgttctaagagtttccaaaagtaaattttcatttatttttcttaagtaaaaagctgtgaattttatgtgtttttggaggaaaagtcagctttagaaagtgtatattagagttcatgctttctattaagattctctccaaatggctactgcactatagtaagattgtctccgttttcaaattgatttcttagaagatatgagcaaaagggatgtttttaatcaaatggatgaaggctgcacattgcatgaattccatttcagtcttcattttgcttggattctttggttttctttttccttgcatgattaaaccagtttgatacatgcatgcacacactttttaaacttttcctttctcaatagtgagcatttaaatttgcaaaacctattcaaatttgtcttgcatataattgtcatatgtgcctgataaaagttactatgatcaagtaattcctagtggttcttgttccttcaacgctttcaaacccaatcatttaaccggtgaagataaatggttaagaatttaaaatttaactaggaagtaactgatatattattgaataaattataatatattattacagctagtagtttgatatattttaaactattattgttgttaatattataaatctagttaaattttgatagtaaaatgtttgtattcaaaaatcatttaatttttcattaaaattttaaataataacattttagaataaaggaatacttaaaataaaattttcataatagtaatttatttataatgaatgaattttatgttgcacaataggcaaataaagtttatatgtaaaagaaaataacatagaaacaaaaaattaacaattcaagttaatacacccgaaaaataaatgagaaaaaattaatatttagttcatatggtttagtgaaatgaactacttaatttccttattttatgaacacattaattagttaatgacttttccaattgttagctatttaatttttgtattttcaaactgtcactatttactccattcttttaagcggttggtaatgtgtgaaatgattaagatgcctttgttgtccctaattagtctctacaatttcaaaacataactatttttacctgcaatttcaaaatcacaactattcaattcctataattttaaaatcataattatatagtctctcctactcataggatggattaaatagtcgatgggttggcaaaatatggactaactaatttgtttttgaaaatagaaagactaaatagttagtttcactaaatcacatgggctaaatagtaattttctcaataaattactaacaccattaattagttaagtcacaatttaacaaaaagtcgaggaattgaagaaacattcatttctctttgtagttgttatatatatgtgtatatatatatatatatatatatatatatatatatatattgattggaaggaaattaaatgaagtcaaaattgcatgtcaatgatactaagcttgaacattctctctatgatctcgggattgaatgcgcttgttatggtaagcttcaactttatagcctgcctggttgacatacctggctgggttgccaagtttgagtttgttttacctgaaaaaggggtttcatatgttaactggatggatcactgctcttgtttctgattaaaggtctgatctgccggcctgtccaatcttgtttggactaccatgttcccgctgtttctgtcttaaactccttccccttgtgtgtaactgaactttctattctaatagtaatattttatgcttaaccatctcgcaaaaggattgcatttgatgtaagttatgctcttaaagaaagaatcctttgcatgtgttgcatatttgggttttttcacgttgtacttttttgctgacaaatcatttgaactttgaagttctatttatttaacacaacatacttatgcaactgcaggactcc

SEQ ID NO: 5890 - DNA, 4025 bp, Manihot esculenta
  Intron number 8 from transcript cassava4.1_011893m (locus cassava4.1_011893m.g) derived from phytozome v7.0 (chr-ID scaffold03369; pos 4697 to 8721 reverse strand)
agatcaaatcatcacttctagagggagttttagttgtaagttcctagtttatgtttcatttatatttaatttttattgatggtgcttttgtttgttgtcattgcatactgtcagccctgtagtccatgttcataggagagtttaggggtggaccagcatatagcatgggagtggccctggtttacaatattctgaggattttttaatcctatttttcaaataatgcttgatgaacgcggtagagagaagaaagaaaaatgagtaaaattttattatgaacttaataattaaaacctaatatttcagtcatgtttgatcaagtggaagaagaatgcgccaagagtaataaaaagaaaaatgagtaaaattttattatgaacttaataattaaaacctaatatttcagtcatgtttgatcaagtggaagaagaatgccccaagagtaataaatttgtgttgggttctcatgagaacaaataattagatgtgtttcaatatcttcatattaaatttttttcatttagtattagaaattatatgctatgtatagagtgagcctctagtgacgtagatatactggtgtagtacagacttttcttagttaaatctgccctaataaattagaattaataaaatatataatttattaaaaataatgaataattattttctttgataaaagtataatttataaatttgtattaattaataataattacatgattaattaatttttggcccctctcaatgcttaatccctgcattcatctctgggagggttcctgcttctaaacgcctgatatatatttctcatgtgtgcttttgttgtttatattatatattggcttcaaggaaaatgttagcttctattacgtgtaattttgttaagaaatgttaggggggttgcactcacataagctgcatgcaagtgcttatcaaccttgacttggaagaaacaataaagagaaacaaaataaagttggcaccaaccaatataatttgaactttatacttccttgatctgctaactttaatagaagtaaagatctcaaatgagatttctcatattatcttttaaactgtggggtagattactattaaaataagactaaggcttaagctgtactaacgaacttaccctctcctttctttccaattccaatctcactaactgtatggttgattgataattccctttcattctagaatgaccttagatcttcaggcataacttccatgtttggctgtgagaaaacaatgaaggtacaagtgaggaaattagatatataggagaaatgatgagggaaagaataagaatactaggaacaaagaagagaaaaatctaggaatattaatttgttattgtaattcaacatatatgaactctttactactcagatcttttgtgttgagtattgtcttcataactaagactactaacgataaaccactgcattcttactatgcactaaccatcaagtagcaataattgtttccagcattaccctgtccatgaagatcatccttgcctgtaggatgaactgagaaagactgaattcacttgcctcaacatcaacaccaacaccaaaatcaactgtctggagattatgtaatgatgctctgttagctggaatctctctctctctctctctctctctctaattttataaaagcatttctgttagctgaaacttgcagaagagataattcctccctccatgttgctacatctgtctaggatggaatcaacaccttggcttttttccccgtttaacaaccatttaaatgattcattccagttctccattttagtgctgctctcaaaggcacataatgtccaaggtagccaccaatatgttcatgtgaagcacactccaagttttccatctgagtgccgctttacagaggaacataatctgcaaggtaccgaccaagatgtttgatgtaaagcactcttggatttcctggcggtgatatctcttgccaacctagtaagaatacaagcatagcccaacaacattccttttgctgaatccatggcatgtgcagtgcctatgcactcaactttgtctacttgagcaaaaaccatagttcttccaacaagtcaacaactacattattgtctttttcttccctcttttggtacagccagatgctcaactattacttcttatttttttccatacctgaaagattcatgaagaatttgccaattcatgaagaatttgccaatctttctctagcgcaagtagtaatcatatttttcttcaactcagttctgttctccatttttctattatgatttcaacaaggattcatgcttgaatctgcagataaatctcacatacttaatgacggacggtgagaaagtgcggagaggccctcattcttctatcacttaatctcctagcaattctctcattttcacaattatctccaaggcataaattctctattgacagaaattttgttttctttatcttttccacttcacaaatatctttcttgaggttattaatatcagactgcccgatctcaagatcactgctactcaatttaaaatcattaccaccataatactagtgttttttttctccacaaacctttccttttgtttctcaatttttcttgcagtaggagcaaatccatcaatttaaaatgtaatccagcatcaatcgattctcaacatcttggtttgattctgttacatcagtggtgaaattgaacccttcaacttgaggtgcttgttaagcttttgccaaactcatgttgcctttccttgtgcacctcatcaatcttttgaaagttttcctccaagtatgcacaagttttgcacatgaaagttttgaaagtgccatctgtaattggttatttcatgtcaacttcaaagctgtgaccttcttctccaaattggaagactcaagattctttgggttttgtgtgcaatcctgatgatcctcgatgtttagaggaatcatttctttgacatagctcttgggccccatttgtttcatggaaataacttgcatgtggaaaatatttttcaagaaaataacttatttccattgtttgattgcgatgttaaacaataaagaatgttaataaatttatgtatgtcaattttagtggtgctaataaaattctcaaattcatgaaaaggacttcctctgtgctttttccttaagaatagcttggttttctctttaacaaggaatatatttcattgaccaattttcctgagtgtcctaaatattagaaaatgcgataatgtcttcgtggaaaatgttttttcacaagcaaatggtgccttagtaattcgaaatttgattttctttttgaatgtcatcctctttcccgtagagtcttgctggaattgtgtattggtgtttgtgacagaaattaaagggaaattgaggggaagaagagaatagtagggtaaaaaaaaagaataaacagaagaggaagtggagagcaaatacataggacagaacaggtatgatcccaatgattttattgtttggctgatgagaaaacaagggaaaaagagaggacattcaatctagagaaaacaagaggctggaaggaggaatactgagaacagagaatttagagtaaatctatgattaggattctatctttgtactttagtctagatgaattcttcataactcattgttcttccttgtcttctttagcccttgtaatcaaaactaccaactaaagaacagtttagttttattgtgcatcaactacaaacaatttttcctaatataatgaagaggcaagtgccttaccatgtgttaaatttggttcttgggaaaaataagtagttcagtaaattctctcttcaatttctaatcttatgtttgaaaatgctgcaatatgtctatgctggagttggccatcatatttattcccttctgaaatttccattatttcttatattgtgatgcttttgtggtcctgatatacctgcttttgttgccccaggggattgttttgcttatcattttaatatcaggcct

SEQ ID NO: 5891 - DNA, 1200 bp, Manihot esculenta
  Intron number 2 from transcript cassava4.1_008865m (locus cassava4.1_008865m.g) derived from phytozome v7.0 (chr-ID scaffold07996; pos 293029 to 294228 reverse strand)
tttggacgtaagttttctattttatacaacacagtttcatttatagtgtgtaaagtgtttttatacagctccccaactttttttgcctgatttacatattgatggttggatttactattttctacatgtgtatcatattggccaaatttctagttagtctaatatgaataagtgtttcatctatgatgcacaatttgttctgaattataattatatttaataaaatgttcagttttaagatctattagctgaggatctttaatattctatttacttgaattttggcatttatggcacaatgtaaaaactatttaacttgcaaataataaatttgaccatacagttgtgtgttagtgtatgtattgggtttgtgtagatcctcataatttttttggtgtaaaaaagtaaatatgattgttaattcaagtgttctattatacataatattttgataatagtaattgttgccataaattatgcataattttataatatttgtgatcagctcataactggtaaatatcggctgaaataatttaatttaactatttagaatatatcacagctattaccttctaaggaaaagttctaaagggaacttctgaaattagtagctgctgcccattttttatattttatgaccaaacttttcttcaattatcagggtttgaatgactaatattttctcagttactgaacaaagtgacctgccttaatttttagtggatttaacacactggttgtttacttctccccatcgtcctctttatcccttgttgtgtgtgcatctgtgatgttggccctttaattggttttttgctgtatagataagtttgatttctgtatttcttgctttgaattttattaaagctgttggtagattttaataagaatgagctagcataaggcttgtaatatggcataaattgagatggatcagatgaaaaaatatatatttattcaaaaaagcccttcaaagttgctacaggaaaattagccttctgttaactatcatttccttgcatatgtataagcagtcacaatttagtaatgcaggttttttatttttatttttttggggggttgcctgattcttgtttcaaaactcaaaagacaaacatttgtccctgtatgacctatctttaatgatacttgttcattgcaggcatttgattgggttcttccttttcctttccttga

SEQ ID NO: 5892 - DNA, 2992 bp, Manihot esculenta
  Intron number 3 from transcript cassava4.1_015437m (locus cassava4.1_015437m.g) derived from phytozome v7.0 (chr-ID scaffold12549; pos 1911 to 4902)
tgagctcttctgtatcagatttgcttctgttgagagtatgtatttctcaaatcagttctttacctgccactgcttctaaatattggtttcgatatctgctttcattttatagtggtgttttttgatgtattcaatcgtctttttctttcattgtgcttcaagaatgatgttcgcctagagaattcctggatttgtgttttttgagtatagacaactttttatccactttcacattgccgagatttctcgaaactgatgagtttttaatgatttagatatctgctttcattttatagtggtgttttttgatgtattcaatcgtctttttctttttttgtgcttcaagtatgatgtccgccgagagaattcctggatttgtgttttttgagtgtagtcaactttttatgcactttcacattgagagagacgggggtgtacccctatctatcttagattgtaaagtggttgtgtctatcatctccatgtgcatgaatacatacttgtgtgtgtggcataattttgcactacacacatacaaaagtgctaatacaggtatttctcttatttatacacttgattatggtaactgcctccatcaaattctctaactactaaacttcctttccctccaaaactagttaactagtaactatgataattgcccttaactacgaaactacttctctctaaatctagccaacttcctggattcttcctctccattttcacttctttcttttatatgtgacaataccttcactttgagcacacttcttctctctaaatctagccaacttcctggattcttcctctccgttttcacttctttcttttatatgtgacaataccttcactttgagcacattcttctccccaagaatgtgaagatattgaaaattagaatgatttcaagtacttccttcttgtcaattgaaagaatgtgagaatcccaaatagcatccattgctggcaagttaatttcctgatttttggatactagcttgaatgtcttgtagatataaatccaattaaatccctgcactttatttaaggactaaataaacccaatttaatttttttggctaactaaattcctgttctttttcttaaaggtgaaataagtcatgacctaatataataaaatattaattttaatgataaaatattaattttaataatatattattttttattactaaaatttcatttttgtaatttttaaaaatatttactattttatattaattgaaataccaaatttttgatattttcaaattgaaaaaattattaaaaaatgatattatattaggttaggacttatttggcccataaataaagatacacggggcttaattggcaaaaaaaaaattttgaatttggcttatttccaatgtcttgtagatttgggtaaaaagttgcaactgatattgtggactcttaatgatcaaagaattgattgtttttcccttttcttgtacaaatttcctatgcttgttccttgaaaatcataatattgtttgatggctgtacctttttcctttctcttctagatatttcccattcattttccatgagacttaataggactgcaacagctgaactcattatcttgtctccaaaagttatgccacttgcttacaatacccatactttttgcaactcatttaactttcttgttttcaagaacatccccaagaatttcttctatttcctgagatgcagcactgtctttagtggttgctgttgctgtacattccctttgggagttcccagcagacttttgccaccaagtaaggcagcagttgaattccccacttcttcattgcctccattgaaatccttgtacagcaaaaagggacatctccccaggatatgattcatggattcatcaatcctgtgagtcgatttcagtcgattctttttttattctttttaatttcttctcgtaaaaccctaacttgatcttcatattctgaatggttgcggaatcagaaatctgctgagctgcacctgccctagtcaaattctgctgatttgcacctgccctagtcattcttgcaactcttactccttagaactccaatgattccccttgaaatgctgctctgatacgaattgtcaagaacaggatctgagatcagaaaatagggatgagaaagaagaagaaatatagatgagaagaagaagaatagatttaggtgagaagagaaaatacaattgggagggagaaatgtaatctttgttattgattcttgaatgcttttctaatataggtctctctcttatttacacacttgattacaataactgcctccagtagattctctaactactaaacttcttttccctccaaaactagctaagttccttttccctcctcctatttgctaacttctggattcttcctgtttcatttccactttgcttgcggtagagaatttgctcttcatagtgctcatgttctagttaaatctgtttgatactgtatctctgtccattgtgatttgtatcattatatttatgtgattgttcgacaataacatgctaggtggtaaatttgctggttcctgtttttgtttttgtgtgcgtaaaatttcatgtgatggaactaagagaattatgttatgtatgcttgctattttaattggtcatggttgttttcccgattgtatttgtttgtgtttgttcttgtattttagttggtgtaaatagatgttcatttttttcaatgagtaactgtatttgtattggatgagaggatgtaataattttcacattagtttggcactttggcttgcattttaatgtcaatctgaggctgatagatgagatgattactctttatttaagctcctcttgatatttattctgttgcataaacatactctctctctctctctctctctcatatgttgtgcaatgggattttggagtattggattgtgatcactgtcatgactgatttcgtaatatatcagattgcaaagccttc

SEQ ID NO: 5893 - DNA, 1832 bp, Manihot esculenta
  Intron number 4 from transcript cassava4.1_013092m (locus cassava4.1_013092m.g) derived from phytozome v7.0 (chr-ID scaffold02871; pos 456885 to 458716)
acataaataattaggttggttatgaagtgtattggttgtgtggatggcattaaattttttgattgaccttttttcagaacccaaggcttgtttatttgtgaaaaactgagttctgtaagaaaactgaaaaatagagttttgtgttaacatgtgtcagttttttaatgaataactaagaactaatttttaagttttcaaaaatttaactaagctttgaaaaacatttttaagttgtttcccattgttgtaaacaaaaatttatgttttctacttgttttccaatgggaaaacaatgatttttctattatttttcataattaaaattgaataattatttaagaaaatatatactttagaataataaaaaataatcatattattataaaataaatgaatagagcatgtaaaaaaatctttaaaattaaacattttttgttatatttatactgatttatccttttttttaaattcttatgatatattaatactttttttattattattttataaattaaaaactttttttctaatattaataagtgaacagattttttcattttttcccacatttctcctagaaaatgaagactggagtttcctcaataaattgaaaataataaactgttctctacaaataaacataccccaaagttttggtttttaacgtacaagagattgagattgaactgttcaagtgttaagaaacagagttttggtggaattttcacattttgaatatgtctgcattttatgtgaaagctgtatatcagatattatttttggttctatccctgtcatttaaaataaatgtttgggaaagctttgaagtttgaacttatgaggttcaagttaaatagttggaattcatttgcttgtttaatgtggaagtgtaatcttgatagttgatgctaaatcgattttgctagagctttatgaggccaatggattttactacaaatagcatttctctttttttgcaaaaggcagaggatgatgtatggagtaagaatcaaggttctaataggaaggtgcctagagcatagagtattctgaaagggagaaatttttggattttacatccattggcagatgaacattgaggcagttatttattcagggatatttttggatatttctttaaaaaaaataaagcaacttttgtttatccaggtttgtatgatgcctatgttctagcacttggaatgtttgattcacacattttaagactgcccgtcgtgcttttgtgataatgttacattctttaaaaatcaaatgtagtgggttatcttattttacttctggtggatggtactaagattcttgtacattgaagttgttatttggcaaacaccatggtgggtttcaaatatttcagttatcatctagagagatattatgtaagttgagattacagtcttatgtcacaagtaagaatgcagaagaaaatcattgctgagagagaaacttcattgttgatacactggctaaaaggatctttgttgtcttcttaggcgagattggcagattgctgatctcttgttttctctctattgattcctcttggatcttagttaaatttgaagtgcattttcatctaagaagttctttcctgaatatcaaaagaatatttggcataatgtagtggatttatccagttcttcttttgttgttaactgtgtggaaatttattggcttctggtagatttgaattattgccaggtctgtctttccttcctttctcaccttaatgatacttttgttccattttgcagaatatgtgattctcttgcctttcttttgcagcttttccatcaatccacaggcttcctcat

SEQ ID NO: 5894 - DNA, 1676 bp, Manihot esculenta
  Intron number 2 from transcript cassava4.1_000107m (locus cassava4.1_000107m.g) derived from phytozome v7.0 (chr-ID scaffold11998; pos 812012 to 813687 reverse strand)
gcttcaagagaatcttacaggtaccagttttggatttctgtcctcatttacaaatccccacatgttgagttgatggatatcgagtctaatttgtgaggctatactgttgtataaaagcagttgactacagattcagtcatgctgaaacactgagttgaattatgatgataaatggtaatgatagaaattggtcaattgtttaatcaaatgaacggttatgtccctgtgtgtatggcagcatgaaaatgcttaggttgtctgtagaagggagaaatttagtaaatgactatccgctttccttcttaatcatcctgaaaaggcaattacaatcttacatcctaattggtttggattttgatattctgcagttttttatcgtttcgttctttatttggtgcaaaaagggctgtggctagttacatttactgaactaagagagtggtctggctatcttggaaagcttcataaccaaaaacactaacataatgcctctgttatttacttgaataaattatcttcatccaaaaaaaggaaaaaataagatcttcttcttactgttagcagacagagattgacagttagaatgtgtaagcacctactaacacctactttgcgactggccatgaaaaaaaaacaaaagtaaagaaatctaataagttggatgaaactggctaaaacacttaaaaatagtgtgaaacatagcttcaaaactttaaacatggaaatacattatcatttttctagatgttattggaagctaccttttttgaagtctaaacatcccatgagcttaaatatgtaattctctttcttttgtggatagtatatcttcatgtttacttgctcagatatatggatgattttggccacacatctggtattaaaataggaggaattgaatgagtaacccatagctgatgtgatttttattgtatccttttttttatttgttgtcagcttctgttcgtgtttaccattgttctttcagttgataggttatgtctggtgtctcatctattaaattttcatttagtgcagatagaattttgaagcttattactatgcggcatagcttccttcccttctttcttttattctccctgtatttgggcaagtgtcctattttggtaaagtaacctaatttttagagaagaataatccatgagatgatgcacctttttttttcttcccatttttattaatataagagggaagtcatttaataagttctaataagttctttgttacatgtgcgacagtcctagtctgcagggagggtttctattccattctgcatcaactctgaattatttcagtaatgcagttaagggtttctgcagtttataactcggcctgataaccatattcattttctaaaactacgagcataactgttcagtctgccttccaatttatgaatagtttgcggtttgaaaaaagttgcaaattaataaaaccaagaggcatgttttttgtaagtaataaaatattcaaattcacaggctagcacatggtaactttggatttctccaggtccaagaagctaaattgccagtatttaacagatttcttcattttgttttttacttgtagttctttttctgcttcatttaattgtagcattgatgcttactcattctccccccataatacaataatcttctgtttgaacagat

SEQ ID NO: 5895 - DNA, 707 bp, Manihot esculenta
  Intron number 3 from transcript cassava4.1_006366m (locus cassava4.1_006366m.g) derived from phytozome v7.0 (chr-ID scaffold07520; pos 966995 to 967701 reverse strand)
aggtacacattaatgatttcgtttgcttgaaatgaaatgggatagttatttctatgatagagatttacttagttaaaagcatgcatatatcattctgttgccttcaatatataattcgtaagattccaggagtcgctccacctctacttaacctagattacttttcattactttgggaggatccacttagaagattgttaatggacttcttgttgaagattctactgtaagattgtattggattctgaaatcgttaaatttcttcacaaacgtttagttgaatctcaactttctaattgggttggttaatgttattactattataatttggtcttttttatctgtagatattgttaaatttcttcacgaacctttagttgaacctcaactttctaattgggttggttattgttattactaatataatttggtctttttatccgttgattgtggaataatatatgcaactttaatcatttttgttcagtaatattattttttctagtatttgttagctaaatgctgagggagtatcattttatgatccactattcattttatgatccactatccaataactctaaatatgacttccaaagctattgccgaaatagggccaagaattcagctgctgcttaattgtataaatttttgtcctacctttccctgcaggccaaatttctaaaagcctgtggcactttacctga

SEQ ID NO: 5896 - DNA, 4422 bp, Manihot esculenta
  Intron number 4 from transcript cassava4.1_013131m (locus cassava4.1_013131m.g) derived from phytozome v7.0 (chr-ID scaffold05255; pos 96349 to 100770)
agggctattactggtccagtttgccgtctagataggtaagtgttttcttatcatgtaacaaccgttactctttttcaaaattaaaggtgctactttcatttcttcttctcaaattataggcttaggggaggatattgacttccttatagccaaagtttgcaaaacatcattgaaactctttaagtcctagagtcataaacgagctgagtctgcttttgaattagttcattcagatgtttgggacccatgtctagttggatctaagactgaattcagatattttatcacttttgtggatgattactctagaatgaattagatttagtttatgacacatcgttcggaagtattttctcatttttctgcattttgtactgaaatcaagactcaatttaatgtttctgtgcaaattttgcggagcgataatgctaaagaatatatgtcagaattattccaggcttatatgactcaacatgatattcttcaccaatcatcatgtgttgatacacttgctcaaaatggaatagctgaaaggaagaattgacatcttcttgaaattgctcgagctttgttgtttcaaatgcaagttcctaagcaattttgggccgatgcggtctctactgcatgctttctcattaatcgcttgccctctacagtactaaatagtaatactccttataatgtgctctttcctaagaagctattattttctctcgaaccacgactatttggcagcacttgctatgttcgggatgtcagacctcatgtgactaaacttgatcctaaagctttgaaatgtatttttttgggatattctcgccttcagaaagggtatcggtgttactctctagacctcaacaaatatctggtctcaacaaatgtagcattttccgagcaaattcctttttatcctgttgcacaaacctctcatgatcaagaggaggacgatgagtgactcatttatagaatcatatctgatggtgggacttcttcgagtatgccttctgttgtacaatctgatggtaacattccttctagtactcagtctcctgttaaacagtcagttgttcaagtttactatcgaagaccagtacctgatgatacatatcctgcaccggaatcttcttcgccatcggatccaccaccgagtgaccttgacctccccattagtcttcgtaaaggtaaacgatagtgtaaatctacctattctattgctaactttctgtcttatgatcacctgtctccttcctctacctccttaattgtctctctagattctatttctttgcctaagacagttaaagaggtcctgcctcattctggatggcgtcatgcaatgtttgaagagatcaaggctctagatgaaaatcatacttgagaactagttgatttaccttctggcaagaaggctgtgggctgtaaatgggtttttgacatcaaagtcaatccagatggttccatagcgaggcttaagactcatcttgtcgccaaaagttatgcccaaacctatggcgttgaccattctgacactttttcttctatggcaaagatgacctcagtttgcttattcatccttagctgcttctcagctttggcctttacactaattgaatatcaagaatgtatttttacatggtgacctccaagaggaggtgtatatggagcaactaccagcgtttgttgctcagggggagagtatggaaaattttgccatttgaagaaatctttgtatggtttaaagcagagtcccgtgcatggttttgcaagttcagtgaaattgttcaaaaatttagattgaaaaaaagcaagtgtgaccattcagtattctataaaaattcagatactggtattattctccttgttgtatatgttgatgatattgtcattatagggaatgatagtacatagatctcttctctcaaaaactacttccatgcgagttttcatactaaagacttgggtcagcttaagtatttcttaggagtcgaagtcttgaggagtaaaagggaattttcctgtctcaaaggaagtatgtccttgacttgcttatagaaactgggaagatgagagctcaaccatgtagcacaccaatgattcttaatatatgtcttacaaaggatgacagaaacccttatgatgatccagagaggtacaggaggttgcttggaaagctaaactacctttggtgatgactcggccaaatattacttttgcggtaagtgttgtaagtcagtttatgtcttcaccttcggtgaaacattggaccgctctagaacaaattctatgttatctaaaagggactcatggacttggtatactctacagtgatcatggacatactgcacttgagtatttttctaatgttgactgggagggatccaaaagtgatagaaggtcgactagaggctactgtgtatttgttggaggaaacctagtgacttgaaaaagtaagaagcaaaatgtgatatccagatccagtgccgagtcaaaatacagggctatggctcaatccacttgtgaattctatggataaaacatctgctgaaggaagttggtattgatgttgcgtcacccgtgaaactttagtatgataatcagactgctctttacattgcttccaatccaatatactacgaacggactaagcatattgaaagttgattgtcatttcatccgtgagaagattcaagaaaatttaatctccaccagttatgtgaagacaggagagcaactgagtgatctattcactaaagctttaaatgggtctcgaatagaatatctttctaacaagttgggcatgataaatatttatgatccaacccccgtgttagagtgtgaacataatctgtacattatcataggagattacataattatagactaattgattgatagagaattcttaggagccgccttaacaaggccttataatctgtataagataaggaataattaggtaattttccgtatatttctccatggaaataagtgtgtatatatacagtagcctctagtctataattaggtaataaccattgctttccgttgctttctagttctatctatatatatcctgtgaaatagttgtcatccatgatttttcaaaatttgacatcttaatgtcaggattaaataccttgcttatagtgttgaggttgttgcattgtagttctatataaccgttatgttagaactaaccgttatataacatacataaacacacacacatgttatatatatatatatatatatatatatatgtatgtatatgtatacacacacatacacatatatgtatgtatatgtgtgtatatgtataagtatacacatgcacaccacacaattgttgtattatgtagcttgcttatagctttgaggttgttgcattgtagttctataaaaatgtttgagtatctatgtatacgtgaaatagctgtggtccttaattttgaaaatctgacatgccttgatgtcaacattaaataacttgcttatagctttgaggttgttgctttgtagttctctataatcgtggcattgaaatatgggaggcctctcatattaagatttgcattatatttgaattttgaaaggtttatttttattgaaaaagtttatctaatatggaacttaccatcagaattttgtaattttttttttgccaaagaagggattcctaagatggagtcttccattatattagttattaacctgcattaaaatattgcaaagtgttgtattatattagttattaacctgcattaaaatattgcaaagtgttgttaatgacatttacattttattatgaggttgttgctttgtagttctatataatcgtggcagtgaaatgtaggaggctgctcatattaagagttgcattacatttgaattttgaaaggtttatttatttttattgaaaaagtttatctaatatggaacttaccattagaattttgtaactttttttggccaatgatgggattcctaagatggagtcttccaatatattagttattaacttgcataaaaatattgcaaagtgttgttaattacatttacattttattatgataattccttgattgatatgtgaagccaataatgtcatgataacaattaactaaaatcaatatgacaaatatcattttcattcacgagtttatgatcattagtttagcaaaatataaatatgagcggttccattttatgtgcatgtagtgactaagaaatctctattgacagttatggattacctttttgcaatatatcttttccccactttgcatcattttgtctgcccaattagttggattcttattcatgaatagacccctatttgttatgacagctgtagcttgattttatcatttcagtgcattaactaaacattatctttgatgatgcagttggcatcttctagtg

SEQ ID NO: 5897 - DNA, 1589 bp, Manihot esculenta
  Intron number 10 from transcript cassava4.1_008230m (locus cassava4.1_008230m.g) derived from phytozome v7.0 (chr-ID scaffold01543; pos 39965 to 41553)
tcattgaagagcttttacaggtatttatggcattttaccaattttactttatctttcaaataatttctaatggaatggacatgaatcaagtgggtttggagcctttattagaagggattcttatggttggaatggagatgtattcttctttacaaacatctttgaatttggatgcagaggataaggtcattgcaaataggagttcaaaataaccaccgaacataattaatttggaaatttggtttggttttgttttgttttaacttttaaaaaattcggttatttcgattgagttcggttttgatcaatcggttttgataaaaaaaaaaaatttgatcaagccgaactgaactaattagttagcaatagcaatattatatcattttgataatataaggagatggactctaattaagattgaaatgaaccatattcaaataataaggcttaaaaaataagtttattaaaaaaccgaaccaaattgaactagattggttcgtatcaaatcaatttctcctctaattcagttcggtttgattttataaatactcaaatttcagtttttaatttaatcggtttgattttgaatcaaatctactaaatgttcaatcctaagtgcaaaggctcccacttatgttattactttttgaaaaatttactatttagtctcatagtttaatgaaatgaattactcagtttctgtatttaaaaatacactgaataattcatgtctattatgtgtgtaatgtttctgtttaatatctaaaatttcaaaatataaatatttagtcttgtaatttcaaaataacaactttttggtcaccataattaatgggaaggactaaatagttaatgattggaaaagatatggacgatctatttagcgtatttctaaaaacaaagagagtaactagttaattttaatatactacaaggattaaataataatttctttttttttgcttagaagtcttgggtagaaattaatgattaatgaagtgcttggaagtgttctcactctagccaagcataaagggatgttttatataacctcttcattttccttctttttttaaaaagaaaaaagaggcgatgatttgtatggttctaatgtgaggtctgcatactagtgaaaaattactacttagtctttaaggtaagaaaaaattcactagttagttctttagttttgaaaaatatgtgaaaacattcctgatgttttaaaaagtctattagttaatttttttttaatttttccattaagtattttactatttagtttctgtagttttgaaaaacttagtaattgatctcttagatttttaaaaaatttactatttaattccttcgtgttagggacattttaaactttttaataatacttaaaaattaaaactaacggagggactaactagtacactttttaaaacgttaaggacgttttaatgtaatttttaaaattgaatgatcaactagtgagtttttacgtattatacgaactaaataataatttttcttttagtaaaaaacaaatttgatagggtgggttttatcctaaccttcgttttacactatgtaggaggagatct

SEQ ID NO: 5898 - DNA, 3295 bp, Manihot esculenta
  Intron number 4 from transcript cassava4.1_012658m (locus cassava4.1_012461m.g) derived from phytozome v7.0 (chr-ID scaffold08494; pos 537584 to 540878 reverse strand)
tgttaagtgttcaatgctcttttgcctgccatatttcctttctaagttatagtagcttgttcttttgcatgtgaggtggaggctagtaattggttggacttttctgttaagcaccatcaaaccgccggtattatgatttgctttttcctaaagtaaatgcttaaacaagccttcataggttgactagtgagctagagtcacatggggggtcatttatttaaaaatgggttatcagcatctttgccagctccaaactcatcatgcctttatcactacctattaataacttgtcttttattttttttataattggaaatctttgtagatggtgtcttaatctaatacatgaactgtcaaaagtgttgggtagtgctctcttacctaccaacacacaacacaatacaaaaattaagaatttgtatggtgagatcagatcagatcagatttgcccaacacctacaatcctcaggggcagaggatcaccacatcagccttcccaagaaggcttctaagctcatcaagcttctttaccagaccattaccattgtgaatagatcatcaattctgattaactgggaatcctttcctttctttcatattttctttttggccaatgccgcatagtttatccatgtagatttttataatttttaactccatcatattgccaaaaaaaaaaatcatatttttgaattttttttagatatcaaagttgattcttttaaattttctatgattatagtcaatttttaaaattaattttacgtaatttttttatataattttatcattttaattctacattatcaatttagttaactccattaagaggtaacctaaaaaccatttactcgttaaagctttcaaattactaaattactaaatttcaacctctaaaattacaaaaacctcctcaaaacatcttcaaatttgtaaaaacaattcttaaatttaacaatcacctcaaaatttacgatttagccccatcaaatgcgagcccttagacgtcataaaagatgagccactacctactatctatgatatgggacagccaactatgctaaagactacctactatctatgatatgggacagccaactatgctaaaggttatatgggcttacaaatttatttaggaattaaagtttcttttggtcaaaaattattttatatattaaatataattgtgaaaaaatgaaaaaatgaaaatttatttaattaaaaaaacatgtctgtgttttaaaaatattttttttattttttaaaaaattaagaaacatgtttattttaacttttctactctaattgaaaaataaaagataattattttttaaattttataatgaaaatgaaaaacaataaaataattatttttcatattttctcattttattaaaaaattaaaaaatacaattttttaaaatgaaatttaatatacagatagattttacataaataaaatatgatttttaataattatatttatatatttaactatacataaaaaatcatttttattttaaattaatataaaatgcatgataattaagcatattttttaatttttcaaattgaaaatattttttaatattatatgaaatgaatatattttttttaatattttagaaaaaaacaaacagaaaataaaataaaattagagatagaaaatagaaaattattttttataattaaacatacccttatcttttttatccaaaattaaaaagtgagagcatagtccgtaaaaaaacgtaaaaatttagccgccttatctttgataatgtaaaattaaaaatttttaaaaatttagccgcgattcgatgatcaaattaatttcgagtattaactataatcatgataaaattaattaaaagaatagattctattaacataatcgtaaaaaaatacaaagaattgatttttttttttttattcaatagccttgctataaaaataatatgtatccagtactctcttattctggagagagtttctttgatttctttctgcggcacagtctgcttctcatgttgccgtgagtgcagctgtcctctgcctctctaggtgggaattctcctctggaaaagccaggtgtggtgtaatagacaaataaaaattgttttgttggttttcgggtagaagtgcatttaagaaaacatgaagtaatacaatccgctcaagaccagacgacaccaacgagcgtcatctctttcctaaggtttttgggcttttcatctattttcttcctctgacaatctgtcgacttccccatccagtaagtctcaaaaagcggcattggtggggccttccctttcgagtttgcacatatatgcaactagggttagaaagaacatggcttggctataggcttcatgggcttaagcactgtcgggtttatttttaagcttgttgctgggcctggaaactttttttctcggcctaggtgcttgtatcgattgggcttttggcctttatgactatttaccttctaaccaaagaaagagaaaaatagcctcaatctagactttttgtagaagactagttttcactacattttagtcattttaacatgtatatttaaaacaaccttggtcaaagcgaattgtataaaacaaaaaaacaagatattagattttccgtccacggaaaaaggataaattgtttatttagacattcataccgattctttaaacattaaaattttataaatatatcttatcttcaaaaagcacacatctccatgattcttttctatttggttgatgattgatggttcagatgctcctacaattcaatttggtctccccaatatatacttctatgacaaatctaatctgatccgatccgatctgacgaaagagcagatctcaccatacaaattcttaatttttgtatcgtgttggtaggtaagagagcactagccaacaccttttacagttcatggattagattaagaccatcaacaaagataacatccaactataaaagactaaataaagtaactaatagatagcgataaaggcatgatgagtttggagctggcaaagatgctcataacccatttttaaataaatgacccccatgtgaatagaccagtagtcaacttatgagggcttgttcaagcatttacttgtaggaaaaacatagcggcagtttgatggtgcttaacagaacagcccaacaaattaatagcctccacctcacatgcaaaaacaagctactataatacttgaaaggaaaaatggcaggcaaaagagtagtgtacactatcacatcaataaaagatccacagaga

SEQ ID NO: 5899 - DNA, 3915 bp, Manihot esculenta
  Intron number 5 from transcript cassava4.1_013622m (locus cassava4.1_013643m.g) derived from phytozome v7.0 (chr-ID scaffold05875; pos 402173 to 406087 reverse strand)
gaaaagttgttacttttgccaccttatcctgttcaatatctcagtaggcaagaagtgtctttcattatcgtgtgcctgccaaccagtagccttttatctgaatacgtcattagttattccaaactgattttaggattatattgttgctttgctttaattggtcgacaccctgatttccattttacatccaacatattatcataatctggattctggaatgttgcagctctatatttgtatgcttgcctctttactactataatgtatgttgctcttttcagtcttgcttcaccgaggtattggactttctacttttttggaagctgaatgtttcttagatggtttcttcttctcttttcaatggtttaagtccacctttataatttagtggtggacatgtatggaaatataagctttctctctttactgtggaacaagttttgcctcttaccttcttcattgtgaggtggccttataatattcaaggcgagctgtgtaacaatgcatgtagccatgcagctgatgcaatctctaagttcaggccttcaggcaattcttttgttcagcaagatttcatgatgttggttatgggtgtcttaggttgtatttatacaaaattgaatttttatgaagttctataggcgagtgaatttggtgattgttgtacatgctgcaaggatatagttctgggagcttgttattaatgctgcttatttacgttccaggaggatatctgttgtattcttttgtcatgttattctgtatgagatgagtactagaatgagaaaattgcattctgtaggataatagcattcatttttggaacaacacgatcaaacaacttagtttatatggaatggaagttaccttaactggaaataccgtcactccgtcgctacttagtgacagatattataggatacatactctaatcatgtggcatgggagaaaactactggattgcgcatattaacataaatataagtgcttcagaatacatacttgtctaatgaagttggatattctaatcttaacgttccttcaggtgattacaaaggaagacgtgatgaagtcttcaggttattgttattgataggagttatcttgaaccgtcttttacgtgtttttatatgtcctttttgcttgagctgcacgtttctactgcctgaagtattctatgatggaaatgtatcaatgggccctgcaattcactatgaagtgcgtagctttagagatacctataaagtggtacattgaagagtggagttgaggattggggtgtgttttaggaattggagtgatgttagatactcctgttatggggtggtgttgttcaatgattgaacattgagaatttactgaagataattggttttgacttctatggcttgtgattggtgctattgtggatgaacggaacaaatgctaatctagttgaagctcgtgccattgccttcagggattagattttggagtttgtttctagtagttgctaacatgtgcaggtgggcatttgtttctgtgtataaactgttggattatgtggtttgagaactacttataccctatttgaccataattagactgtagttgattttagcttattattaagtggtacaaggctggatcatccctcccttagttctgaggcacattcataaaaaatttggttgttacctccagtgactgtttggttggattgattgacaggcagtgggcgggtaggtggttgaaatagaagtgttgctagcggaaatggtgtaaagatatatctgagctttgtttcaacacttcaaattgtatctggagatcacagtagctatctaacgcttgcatgttgtagtgaaataatagcctctcttttttttttctcgaccaaatcacttagttctcctgcccatctatactggtggtgatgcaatagccaaacaactgtaactcgaacgatgcttttaagtcttctcttgatttctcctgcaacatcattcagtagtcaaggtataaacaatgaccacctgcatgtatccctgctgctgctttcatgcatcaaaatgactgttaaattctgaaggacaatgggcatgctgtgacaagaggcggactgctaatacttcttaggcaagtattctgtctctgtaatatggtttcatggatctaaatggtcttttcctttaagctaaactaatgaacattctattatgtttatttcctgttctcatattgatgattaattactagactaggtccgtatatataataggtagtgcgctgtaggtgcataagttctctcatcagggaccagatattcccttgctttcatctttgcccagttaatcactagttttcctggctgctttgatagattataggtcattagttctgcagctgagcaagtacggaatatttatagttatctaccatcttttcaacactgtgcaagtggattatgtgcattactgcagaagaatcacataccagtctaaattatactcatgttattcccgactcttataaaccaacctaaattttttctctatgctaatatccatcaatgtactcgtcgagaataacataagatggcattggttaggatctacttttgtgtagttgggacaatttggaagtcgttatgattatcatcaaatccttattgacacatctacaagtctaggaaggacttatgaaatattagacatatttagtctttttcttgtagagaatatgcaaatggaatggtccatgaggcagacttgacaagggtctcgagctgtctaattggttcaattgatgtgttctgaactctgaagtacattttctctacagagccttgagatagttactagaaagtgggaaagcttctggttgaatgctgtatcatgtcctttctgaatgagatgagggttaagggaatgttgattctggaagtaatatggcataaggtgttgcaaaggacatgattaatatggactggacagtggattttttctctttatcaagatgcgcagtccaatcacattagcggattaggtagttgattttgaggaagatgctgagcattttgcgagttaatagctgattatccttctgtcatctgttttttaggcatttatcaatagaaggtcaacttgaaaagagctagactatcttgatgacttatgatctgtggacgcctgtggtgaagggctacaaatcaatagataaaagaatcccttgtgaatctacggtccagtcttattgtgaaggttggcatgcatttggttttgtgaactaaaggctgcattactgctgattaaccttcttttggaagtcgatggccaatttatctttttactatttttgtccatcagctttgaaagatattctcctcaaagtgtgaactagtctcagttgcaaaggtcagcttagtttttctccagcgaaaaaatggttccgttactttcagggtggtcattcctgctaagaaatgatagtgagatgctttgtcacacaagtccaaataaaagtcagattccttgctgcagaaattcaagttctttggttctccagagctggtacattttgcccatggaactacttatttattggatgatatgaggatgaaccaagacaaggctgtggttcggtttctaatttatgtgtcgatgcaatgtaacctttggatcatctgagatcatgtaggctcagttatatgagtatttgaccttgtacataaagaaagcctctatatgattatataagcagaagcaagctcatgatttctgaggcagactgtgttttatttatatctttttgggacttctgttagatagattatggatgatatgttatgcaatatgcttgtttctagcgtttttgtgttgtaaatggaacttgcaatttctggagtttttctaacttttctttaatgttctgcag

SEQ ID NO: 5900 - DNA, 1644 bp, Manihot esculenta
  Intron number 10 from transcript cassava4.1_011200m (locus cassava4.1_011200m.g) derived from phytozome v7.0 (chr-ID scaffold07520; pos 177265 to 178908 reverse strand)
caagctcagcagcaagcgtggcttcaaaagaggaggtaaagcatgcttcgtatgaactttttggctcttatgttgttctccttttaaattatgcaagtcatataacactttatttgggagcaaaacaagagtaataataaaactgaaggcaatgatactacaaagtatatttgatgaaattaaaagctacatggactaaaaatgatgagcctgatggtaaaaaaggattcattattgcattggaaacagatgatgaaagggtgggcatagagtgaaagccaaatagaaagaaaggttatttggatgaccctaactagcttggaattgaggcttagttggattctagctgttcttgatatgtaatttagtctaatctcaattgatacctcatcattgctcagaggaagtatcaggctgatcccagcttctgctgttttcgtttctaggattgatttttagtaaatttagaagctatagttagatattcaatagacaaacgaggctgaccttaggtgactaaatctcatagctagttgtaggatttattatgagagtagttccaggcttcacacttagaattctgcatgcacacagccaagttttcctgtattgtggagaggatgggtctcattttctataattcgggttccttgttgagctgagaagggcaatttacttaattaacactattgtcagcatcattttggttggacaagtatctcttggcttggtgtggctgaaacttctaatggtactggtttgggaattggttttcattctctccttttggattgatattaatttgtggttaggcctttcctgatctgcttaagaaaaggcaatgtgatgtaggagcatatgaaggcctatttggttctggattttatttagttctcttttcagttatggattatattgattttcttttccttttatttaggtttctttgaataggtttttatcctacatagtataaataggatgctgataaacattcagcagcttttcctccagaattttatcaagaggttttatgtaacctaattttatatctttgttacaacctcaatcaaccctattttagtgtgattgttgagatctagttgtcttaaactcttccgcagcgtcacaatagcctttggatctgctttccttggcttgataattgtatgacaagaaggatgagatggaggagtattaatgatgttgagggattcatttgcatacttccagcatgaaataatctcctacttctaggatggcaatctgttgtcaatactaattaaatttctagagattcttctcaaaagaacctcactaggagcttctctctctctctctctctctttctcaatagttttgagttataaggatggtcaaaacttttcttcagtggcaagaaaaacagttgagaccttatgagggttgaggggcataattagatatccgtggaggggaaactgcttcttcagctagctcataacgtagctattttttaactgttttacaatttgaaaattcttatactgagtttattcttttccactgttgccacttggtgccaatttttattattatttggttcgtaatttgaatatttattagctctatattggattatataatgaacataggtcagagaac

SEQ ID NO: 5901 - DNA, 1011 bp, Manihot esculenta
  Intron number 28 from transcript cassava4.1_000089m (locus cassava4.1_000089m.g) derived from phytozome v7.0 (chr-ID scaffold01237; pos 348332 to 349342)
caggtaatttgttgaactgaatgcttgcaacagaaagaaatggtgaaatttctaaattctttaataaaacaggcatgataataaagataaactcctaagccttgtaaccaattatttatattatgatgtcctaagtatctgttaagttgtcatcaactcaaagctgttaagtcggcaaatgagattgggatctactaactgttagattaatctttcattttttaagtttctttttaattttttattctgctaatttgatgtagaagtggattatggtgtttgaaagttgcaaacagtctgaacttcagtaataacaagtttatttgctatgcagatatgttgttattctttgtacatcaaactcattattcgatactattagataaataacttgatagttgattatttactttatatgatgcaatgttggacatttaaattttaatgatttcattaatatttcaaaggaaaacaaatagtttttccttttgattaatttaaaatttagtctatatggtatagggaaatgtattagttggttcttcaattttgaagcatacaataaaatgtctcttaaggttttaaaagattaactaattagtctttttattagttttattcgttaagtggtttctatttagtctctatgtgtagttagtttctctgataattttagccgtcaaacagtgaaaaaaaaaggaataatctaaattgccctcaatgcgtaaaaattaataagtagattttttaaaatctcatgaacattttaatatatttttcaaaactgtagaactaactattgagatttcctatactacaaggactaaatagtaatgttcttattttaaataaattattttctttgtattactatttgaataacattggttccttttttatgtatatcttattataaatatgattttgtaaatcaaagaatgatggtggcactcttattttctatttttaactaatacttaattgaatccttgcaggcccttgtggctagaa

SEQ ID NO: 5902 - DNA, 1000 bp, Manihot esculenta
  Intron number 2 from transcript cassava4.1_016784m (locus cassava4.1_016784m.g) derived from phytozome v7.0 (chr-ID scaffold00847; pos 1473740 to 1474739)
gacatttctgttgttgctggtattgtattaaagcttcttctctttccctctctatgtttcttctctcattacatttactagtaattggtaaactacctgaacaaaggaagcctattattattaattatttttttattttggttttgaattttacgatattttttcaaatcgccttttaaaattcagaattttgctaattgtagcttgtgctccttcaagattgattgtccacatatggaaagatgatgcatttgctgcagtgctttgacaaatttatgcctgtttctttgaaaagtaaaagtattatgaattccatgtgagctgtgacagcaggagaaaaggaaaaagaatagggtaaactggggagtttctataaacacagacacagtgctatttaaacctgcacttttattctacaatatcctctctgtttattttcctgaaaagcactgaaattggtataattctcaataaaaaagggaaattatttgggtttatttagctgcattcttagattccatattaagactcgtatttatgtattgcatacacattctgttattttatttctgagccaagcattcattttattcaatgctgagaatgatcatattgcttccaaggcatattggttaatctgctgcctagtactcttttgagtctcaagcctgaattccatgccttgatattgttataggcttatagcaatggtttgctaaaactgattgagaccttcaattccagtgtttatataaattgtgagcaaaactggtcatctggcacatatgccagttccataagtgttttggtagatatgttggagggtgcttaagaattagtgtaaagattctattttaccttttaggatttgatgattagctaaagatggtgtcttaatgatttatcatctaattccattagatttgttctgtacttccttagtcaagcaattgattttttttcctatttttaatatgtaggtgttgaagctagaggattc

SEQ ID NO: 5903 - DNA, 1458 bp, Manihot esculenta
  Intron number 10 from transcript cassava4.1_023996m (locus cassava4.1_023996m.g) derived from phytozome v7.0 (chr-ID scaffold08265; pos 223364 to 224821)
atattgcactagctttagtggaagctctaaataaggtgattgtatggtataaaatttagtccttataaatctcactttcttttatgtttcaagcttcctgtctgagtaacaagcaattttaattgctgttgataggaaaagttgatggaaatgcaagtaaggatcttagagtctctgaatgaatgtatggaggtctgtagcattcctttttttttccttgcccttcgtctatttagtgaagctattttattattttgcactataccataagatttgctgcttttttagtacttgttttttctttacaaattttctggatcttacagtcaataaatggtaatatgctgctacttatttggcgtgcttctcaagttgaggctttaagtttaggttgtgtttgttaggatgtaatggaagaaatgaaatttaatcaaagatgtggtgtaatgaaaaatgcaatggatttatcattctatttccacgtttgatttcaagaagtgaacattaatgtaatgcaatgcaacacaatgattttattgttacattttagtctattagacgatggttgtattggcagtaggtgttgtcataaatagatttatttgatttgtacagctaccatatttgtatctttctataaatattttgtaccgttacgattgctagaaatcagccttagatcttgctagaaattagccctttaattgctgtaaactcatctatttattcactggaattatgtataggggcaagccatttcatcaaattctatgaattcaaaagttatcagtaggtagcaaaaggtggcggactggtgctaatggctgtggcggttgtggtgttggtgggtgctagtaggggggtagaagcagaaataaggaacaaaataccaaaaaacaaagaatcatatttttcaaaatgttgcatgcaaggggaattacgtcagtcaaagcaagcaatgatcattacacaatttaatagtcattgcattaggttagattttttttttttataattttttttctgtaagtgaacaaagtaatgctaggtaaaatgtacttaagattacactacaattctggttacttcctgccaaacataggtttattgcttcacgttggatatgtgatcttagtttcaggtattcaacatctcgacactaattaaaagaaaaataataataataaaatccaatctctgctccattgccaaaaacccatagtggattagacaagcaagctcatttggagtagctatttgtatgaatatgcagtttcttacatgcttgtccttttatctcctatgatgcttatacattttttcatcttacaaataaatgtggtttcaatgattatgaagtttctgtagccgttctgcgttacgcagaaaccatcccttctttgaataatatcttctcttgcagatctctggagctacactgaacacagaacagatcaa

SEQ ID NO: 5904 - DNA, 2347 bp, Manihot esculenta
  Intron number 13 from transcript cassava4.1_000214m (locus cassava4.1_000214m.g) derived from phytozome v7.0 (chr-ID scaffold08100; pos 87053 to 89399)
taacaattgaacaggctcaaaagaacttctgcaaggtttgtacattgttgagacacaaattattttctttttggcccttaggtgtagtctctattcttgttattgttttatgcttatttgggtggtaattattctgtgtggtgtaggctgaaatatttgtctcctctacaagcaatttgaacttaatggaaaaaaaaaagtggaataccatacatctgggttaaacctctgatactccgactcttcattttaccatgtatccgtgtcgacatgacacttcatgggatatgagtatacaacatggaatatgtgtccgacacttatttgtgcactcgaacacttaagagagttgagtgatatattcatgcatagttaatagggtattcttttccctcaagataaagagcatgtatttagataaaattagttatttagtggtattttggatgatatatttgattgaaattgattatctatgtagactgtaattgttgatatatgactttctatttttttattctagtttattttatataacataacatatccaagcactcaagtctaaacttagatccatatcctgtattttccatttagaaagttgacaagtcaaatatagggatatacacccattttggacacctatatccaagtccaagtaacatagggttcaacttgaggattctaaatttctaatagtatgttagcaaaaggaaaagagtacgaaaaagaagaccatgatgttgaccttagtttttgcttaggatttctgtagagattgccatgagcttaaatctaaggcttaaacctttttgatgacttggaaagacttgaccaagttctgctaggagaattctaacaaaaaattagggcaactattcatgaagaaagttcagaaaaacaagaaaaaattagcaaaaagaattttgatttgctagtatgttatagatgtattgcacaaaaaaaatttattggcacaaaagaaattttgctgatgtattgcacaaaagctagtatgttacagagattacagttatttattggcttttattgcttttacatgtatgatctgggaaatcctattatgcggtggtggaaatgtaatgtctttttgaacttgcattatataacataacaagatgacctttttcctttttaggtagcagtgggtttacttttacttatgtagtgaatgtaatgcatgaagtttctaagtcttcccaatgaaagccaaacgtcgagaattgctcataagattaaaactgctttagttgctgcatagatttgaatcatgttgcagttgtgtgtaatggatactggcctttcacggctgcaacaaaatggttgtcgcctgttgtttacctcctcctttctcttcttttatttatttattcttttggtagcagttgcaaaatgcaaataagtaaacagagtctttcaatgtcattaaaatttagaaatggaactgactaataagcatgaatacttcaaaaatagatattgaatctactactatgtattttgttattatcaatcaactacagtaattagtgtaaaacaaatggagagcaagtgtctaacctcattgcccaacaaaaagaatgtctaagagggtcttgagtctcttggctggatttttttgctttattacaaagtgaaatcaagctaacatttctggagcaagagatttgatggatttaggttgaatatggctaaaaggatgcccgctggtgggtattctgggaaatgagaactggataaggcgaaaaagctccttttttctactagtatgtttgtaaattgtaactgttggcaatcattatccatggaattaattttttctccctgcagtacatagtcttgatagcataggggatccatgatctgttcagcataacaaagcttattttaaaccatgattcagttttaatgaataacaatatttctttagcgttcttgttttgttaaagttcagcgctgagtacatctatgcagtttttgataattagttaataagtttgggctttggactttggaggctatatgaacgacagaagttcaacactcttccattgtagctctcttgttttgctgattgttgatataatgtggaacaatgagttatctagatggtaatagagagtttattagtatttgggaaacattctttagcccctagccaataaagtttgatagtcttgagagaaacatgtttccttctccaaaaatgtcccaaaatgtcccaaaatgtcattgaactttgcattaacatcaatatatgtggtgtggctgattgttgtttgttattccaggcagttaaatctggtcttctgaaaatcctttcaaa

SEQ ID NO: 5905 - DNA, 2395 bp, Manihot esculenta
  Intron number 1 from transcript cassava4.1_017511m (locus cassava4.1_017511m.g) derived from phytozome v7.0 (chr-ID scaffold07660; pos 9966 to 12360)
tccaagtccctgacgaagacggttcttctctctctctctctctctctagatatatagggcttgtgaagtgaactgtgtcttggatttgtgtggttctgtgatgatttattggtatgctttcgtggatttttgagtgaaattttgaatctgttgttattttgtgcaactaatttgtgtgagcagaagaatctggagatttatgtagatagattactggcattttcaatgttattgttttgattttttgctctatttggttgctgagaacatgaaaaaaggggaaaacggtaatcgttatttgttatgggtgctggtgctggtgccagatatataaaataattcgtgctagttaaatcttgtactgtttgctggcaactaaaacatggaatgttaaaagaactagaggagcagttgggttgtaggaatttcttcaatggattttatggaaacgtgaaattgttttgattaggtttcctctttgatttagtttcattgacaaagaaatactaagatttttgtatagagtagcatatatatactcctctaaagtgagttgtgatgtgggtgtttgattagttaattgagttaaaattggcaggtgttatacctttggttgaacattaagtaagtaatcatttgttgtgtgtttctttgtagtccataaatactgcaagtgatttgctttgtgcctgccaattatgggaagatcatgcagatcaactattctatacccaaacttccattagttaaagtttgtttcagttttcctgcaaaaggaacaaattaattatgtgaaaaaaataacattataggatgatattatataacaatcttgcattaaatattttatccacggtataaacctgaattcttaacacttaaattctttaatctccaatttttatcgaataaaggaaagtaattttaatacaaattaacaaatcattttctaaaacttatataatttttattttatatatatattaacgttgataaatgtatgaaataaaaaaaaaacagaatacaagcgctgaaattaaattagttaccttatagaaaatatttaatgcaatattgttataaaaaatttaaaagaaattggagatcaaagaatctgagagttgagggtttatgttaataaaaaattactgcgtgtcaaacaagaagtaagattttcatttttttttatcttactttttttttaaaaaaagttactggattattttttttaattattttagtttcttataagtgtatacacatacttttatatataattcgcccttaccgcaggtcaaacctgcggtaaatagttattttataattattttttttaaaaaaaaaagagacaaatgattgatatttttaaacactgctgtatcttgtagattcagtaatggggccctgtagccatgtttacactgatttggaaattttctttcccaaaccattatatgagattattattattattattattattattattactattattattattattatttgccttgaattggcaaaaagcccaaagtgagctggtgcaacaataagattgctccattttgacactccagattccatggatcttgtaatagagaaggttcatagatgttaataacctttattcatttagtaattctgtaattttttttatgatattaatcttcttttaagatgctgattagacaagccttttatatttttggtagttgagaaacacataaattcatttctgtctatccagtttagttctgccaggtaggtgagataaatagatgcaactttcagcattgtttggacactgttgattaattgatggcatatgattaagttcgtataagtttggattcttgtatatggatcctcttggcactattgatgcatcagacttatcaagtatagaaaggtgtctggtaaaatatgtttgacatggtggtcccataaatgtaaacaagctccattaaattgtaagccagttgttttttatattttctccatttgcactctccttcacatgaatccctttagcaacacactacagctggtgtattatcttgtttttaacatggtttgctcactttacatgagttggctgatgtgcagtggacatttttgtagaaatatgaagcaaaatatttcctatatcttgaagtaactatgttttctgttatcatcattattccaagtgtgaaacccgttgggtatgtttggaattttgatacttgagtatcagttcttttgaaaatgtcaatttctggatattccaatcatatgaataactctcaccttgtgttcttgtcactttcctgcatccacatttgttgctgtaatgcatctaatttgaaaaagtcgcttgatactagtttcttgttctttctactaggttttg

SEQ ID NO: 5906 - DNA, 2006 bp, Manihot esculenta
  Intron number 8 from transcript cassava4.1_010287m (locus cassava4.1_010287m.g) derived from phytozome v7.0 (chr-ID scaffold00506; pos 477717 to 479722 reverse strand)
aagctcttgcagttggggaagctttggaaggaaaggtcagtgactgattgtgcgcaatgagaatttttttttcccattcttagatgagctctttgaagtaattgtcacttgacactttgctaatcctatacctaacttctattcttctttctttttcctctccattgaaagtgaggtagagtgtggagagagaggtgtggtggtatagtgggatggacgagtgagaaaggagaaacagtttgtatatcaaaacactgtttttcctgtttgaacatgattcagattgcaattttatattcagttatgaacttgtaatatttgtttattaagtttcacttctgttacatgatatttgctatttattgtgttttcattagtacttccccttttttaaagtttaaaagaaaaacctggtatgacattcagcattatatttgtggttttccagctgccctctgttacggaaagttgaatctatttaatataggatttgtatttctaaataggtagaataattatgtctatatattcctatgatcatgggttttgatatattcctattacagttggataatccttcatttatggtaccatatatgtcttgaatcttccattataaatagagaaccctttgtattagtgagatatccaatttaataaaaatgtagccctttgagatcttgtgtttgtagatgtaggctctgtaaatcttcttgtgttattgtcttctctcttttattattctaaatttaacatagtatatgagttttcaattttttttttacgtattttgtttgggtagtgttcatggacactattcattagtacttattatggacactgttcatacctacttttgcgttcgattggtgtggttgttcaatcctatgagttgttttgtattgatgttttctcgctggtattactttggagagaagttttgtgttgatattttctcactggtattatttttggtgaggaattttgtgtttatgttttcttaccgatattgcctttggagagggaagtgcaagtctaaggattgttttgaattttgatattttgtgtgagtgcttttgtgctaagtagttttgaatgtgctcatgagttgctggatggaagctattacgaggaagtttttggcttttacatagaatctcatcaaggggagtgttagaattgatgaaattccattcctaaataaatagaataattatgtctatatatttctatgatcatgggttttgatatattcctattatagttggagaatccttcgtttatgatatcacacatatatgttttggatcttccattataaatagggaactctttgtatcagtgagacaagccaattcaataaaaatgtagccctttgaggtttttgtgtccttggatgtaggctctcatggccgaaccatgtaaatcttcttgtgttatcctcttctatctcttttattattctaaatttaacatcctcattcttgcatgctgaccattggaaaaactttacaatatgcaattgtttattgtttagtctttagataggctctagaaaatataaaatagtagagggtccagcgtgggaatgcaatgatcattagaaaatcactaattagagataatataatgtactctctcccaaaactttccatttttccaacccactgattttgatttcttttcctattagaaaatagttttgtcatggttttagaccccctcacctcctgcagcgcctctctctcagttttcctccaatggctaggctacaaatcagtggcagccctccgcttttcctaaaccctcttattctaggtcctttcaagatttgatcttaggttgttgaagttgaacacagtaccatgagattttgtcagctaagctacctagcatacgtgctgtgcccataaatacaactagttcacaaatatttgatattacatgtcacttctgtgaaatctttcaaatatgattgttctatgttgcagcgggtggaagttttc

SEQ ID NO: 5907 - DNA, 1100 bp, Manihot esculenta
  Intron number 2 from transcript cassava4.1_019225m (locus cassava4.1_017731m.g) derived from phytozome v7.0 (chr-ID scaffold04269; pos 27082 to 28181 reverse strand)
tcgtaggtctccctgctgtccgctctactagaactgtaagagccaacactctctgcttcatttctgtaatgaaaagaaagcttatttatggacaatcagttcgacactaacaatcatctgagtgcttgatagcaaagtaggaaactgttatgtatatatatatgagaatgatgcaatgaagggaaatttattaaaaaaaaaaaagaaattgaaaccttgtttgtgataattaatttgacacggacagtatcatctgaaacatgcaaactgttctagatttagaatttatcttgttgaagcttttgcttgaaatttcaacttatgattggggacttggggtttgggtcatttggaattttataagcaaagcatgctgttgagagttgcacatctaaagaatacatagaatccaagggttctgtaagggtcttgggtcaaactaactaattggttagttgaaaccttttagcaatggtggtaagtaagcgcagtcttactcatagacttttgcctctaagcccagtataaaacgtgaaagagaattctagaatttgagggaaaagtgtgtctctattatttgctgaatggaaaaatgagaagtgagttgtctttacatcaagggcagcctatttatagtctcagccaagaagtaaaagattaaagtcctaactacttacagcagtaaaagattaaaataaaataaataacctatacatttctacacattcattcaagttcacccttgaattcaaaattataatacatgcgcatagttacaccgtgcctgctaaaactaattcttcatgattcttactgaactcctttaacagtggcaaaaatggttctgtgttactgctgaaccaacttcatgttatgttatttggcttctggtgaagttggaattcacttctctcagtaccaggatgtgctcaaagtggcagcttaactgtgcctaaatgatcacttcatgattgcaatattgagttatggaatattggccagagctgcttttttgtttgtgtatgttcgtgagtattatggcctaataccctcatatttcactttggatcatttgtaggtttttggatcccttaattgct

SEQ ID NO: 5908 - DNA, 394 bp, Manihot esculenta
  Intron number 2 from transcript cassava4.1_028808m (locus cassava4.1_028808m.g) derived from phytozome v7.0 (chr-ID scaffold08316; pos 52466 to 52859 reverse strand)
ttagctggccatgtcagtaaaaacttcctaatcatattaagcttgatttagaatttctctccagttttctgtctccttaagatattcatcatcacttgaaattgtgtatgagttaggaatattatgtataatagctagcgtaaaataatttaggttaactattttgtgtcaattgaaaaatggaaataagtctaattaattctctgtacttgtatttttgttaatattattttttcaataataaaacattattttttataatttaaaatattatattttaaattatatgtctacagatcttatatatgtaggttgaaactttactaccttaaacaagctcattctcttcatgtaaacaggtttcaggagcttgctggtaccttttatcaattga

SEQ ID NO: 5909 - DNA, 1672 bp, Manihot esculenta
  Intron number 1 from transcript cassava4.1_022911m (locus cassava4.1_022911m.g) derived from phytozome v7.0 (chr-ID scaffold11998; pos 1763787 to 1765458 reverse strand)
cagacgctctccgtggctacaatctactcttggcggtgaaaggattttctaatcaatctcttttttctttccttttatttatatctgattttctcgttctcgtttgagttcttccttttttgtgcgggttctggaaaagatgggtcactttctcttgattcttgaccatttggtaattaggagtatgtgtttttaaagatctccaaggttttgatcgtttccttatacaaccttttttattaaaaagaaaaaaaacaaattcctttcttttcagtgaaattctagtgaggaattgacttacaaggaattagctagtaaagaatggttgttaccttttgtgggggagaggggtagacgacttctaacatatattagattttaagatgtgtacttgtccagaactgttagcatattctgcaccttcatggactctttgagaaaccgtagtcgtgaaaaaaatcgggaaaatagtattattcagaaagtttagtaagaagaaattccaagaaatagtcgtcttctctttgttgtgtaggaaagatacgcttgtggtgttagaggaaggtcttgccaaggacggtgtgatattttatcatgccccttttcgttcttttccttggttcttttggttggatataacaaaagaggaatagacctctatttgcagcgttaccatttgagtgccagggtaactaactagcagtaatgttcacatcatttctcaaattgttgagagaaaagaagagctgatattggaggggtccacattgtaaactggtagtattaaatgagagggatagcaatagcaattgagaccacaattatatatattgacatggagaacctcaagttcattaccctgaggatcataacttatctcattgccgctacttctgaggatgatctatggcaagtgatttggtaattacgaatgaacttttaatgtgagtgagaatgctggttttatgcctagtggtccttaatatagagatatagaggtcacaggaagctgcgccagctgttgttatctttatgtagaaagttttaggaatgatatctgaagattcattcgtttttttaagttctaaaaggctctcgttatagcctaataatgtgccaaacgcatttgtatttagttaaatgtaaagcaacccatctcaagcacaaaatgtagactccataaggacccacattattcctttgccagcatggacccttttgataaactaaataatgcttctttttctttcttttttttccccttaattttttttattcttgctaaatcaacctgggatattgatggttggataaaactggataagaattttttttccgcatgatacttgaagtagttatgagttgtaaccgtaaataacagggatattttggtatcagcgactttgaaggattgaatttgcagttggtagcacccttaattgtagacaactataataatattctaaattagttgctcttgcattttattacaacgcaaccttccatggcatcaattgtgaactcttgggatttgatctcttgcagttcagttgttctgggatttactaattttctgaatttttgtgatcttctatttctagctatatgattgatttgggtagttaacaatctattttctgccatgtcagagctggacaggaagacaaaggca

SEQ ID NO: 5910 - DNA, 1961 bp, Manihot esculenta
  Intron number 4 from transcript cassava4.1_017091m (locus cassava4.1_017091m.g) derived from phytozome v7.0 (chr-ID scaffold11635; pos 285689 to 287649 reverse strand)
aaaataagaggtcacgaacaagtgagtttaagattcttaaaaagatatttacatatgaactctatttgttgtttattattttacttgctatgtaactttgtaatatccttcagatgtgaaaaaaatttgaaccttctatattctgtgaaaaattgaataattccatatctaaggaccactctagaaagggaacgtgacccctggccttcataacaactgtacacttaacttggatgttcgttttttctcacaagcttgaggttgagaagagcctatttgtgtgcggattggcggcagcatggttttaaatcgcagtcccggccatgtttgcagtcatgtatagtggaaacagacctacaacagccgtaacgtaatggtaacagcctagtactttacaaatttttcaaaacaaattgcaaagttcataaaaatgaattaatattaataaatataagtcagaataatatatacaattatataaatagacataaatatatcaaatatagactatacaacttaaattaaatatcattataataaattaatgaaatgaaattaagtgctacatagcaaatcaattacataaacataatttttattaatcaaaatttatttaactttttaaccctaaacctatatcttaattttcatttataataactaacacggatattaaatttataacttgtcccaaatagtgaactacaattataaataaataacatagatattaaataaaaaaagcaaattataaaataaaagcaaaaagtagaaaaataaactcatcttttaaaacaaagaaactaagaaatagagtggtttatgatggatctaagtttatattataaaattatagaaaaaatgagttgtttaagagaaaagaaaaaaaaagtttgaaagaaaggagctttgaaactgttgtaactcattggaagctcaaaatatattttgtttggtttgtctaatttaaggattgaattattggcaacggctattaccattacataatgttcggttaccgttatgtaatgattataacggtcgttatgcatacaaatcagggaagacctttaaataatggggtaaggggtaacgacctccccatttcctgttacacaacggccatattatttaaaaccatgggtggcagtgcattttcagtttggcagcgctcaacgcataaatcttttcttgttttaattggaacatgaaatttggaactattatagaatatgggagaacaaactttctgttttctttatcaatttcctggttcgtttggcaattgccacctggaagaaattgctgaaaatgacatgtttcagatttgagtgttaaatttcatttactcttcttgatcttggctttagtccagttctgggtgcgtgactggaggtgggaataacaaagtttccaataaaaagaatctatacatgaggctaggattttaaaggaagagaggggaaggatgtgttagaaccgagtctgatgtcgtatcaactttgaactaataggttctgttttacatgacaatgctagagtgtctgatggcccaaagtgtaatgatgacttttgtcttatagaggggttcaaagaattttagatagaggaaaattaatgcattgattgttgtccctccaaaataggaccttgttatgatctactttaattaagagctgaggttaaacataaagaactacaatcagcagaagccttcttttttctcggtgtacacacatactattttgcatatctaatagcaaagcatactttatcgattgaatcttttgcacttaaatctatggaaaggaaatacgcaccttgcaaaacaaggaaatgtatcatgtgcctcccccacctacccctctttttttctgtagttcttgcttttcttctcctcgtttaatttgttcttcaaatttttacaatacttctcaagttttcaatgttaaattgaagga

SEQ ID NO: 5911 - DNA, 1186 bp, Manihot esculenta
  Intron number 1 from transcript cassava4.1_022866m (locus cassava4.1_022866m.g) derived from phytozome v7.0 (chr-ID scaffold12146; pos 173573 to 174758)
gtctgaactggatctcagccttaatcaacttgaaggtattattattgcgttatgcttccttttttttttttaacttcctcccttatctgtatctcttagctgtggggaatgggtgtagaacattcctagaaacaaaaagatatacataatgctttagaaaccactactttttatatgcatcaattgattgaactacaaatatctatcacaagttcaaaccatagtaatacagataacactacattttgtacaatttttttatattgattatatgcttgaatcccagctttcttttaagaacatcatttttaagaacagtgggtaagacattttacatctgtaattgccattcatggaaatcaatatgcaaagactcccttttttatggtttgtaaaattaatcctttatcattttgtaggtaactataaaattaaattagtctgttcgtgcttgattgaattacattcactattaatggaaatggaaagatgagtagacatgcaattcaagagttttcaatatattactaaagatgataaggaataatgaagcatgatatagagagacaaaagaataaaagaaatgattaattactttagtgtatgtgaaaattttgaggcgccacacggacgaaagcaatctcacattattcaaaaaagtttcacttgacagctttttatgaatcctttttacatagctcactttataatatttatatagatatatagaagtgaatgtcaaacctctctgcgtgatatatttctgcattcctttgattgtattcaattatattaattataacatttaggaggtcttgtaatgtttaaaataagaaaatataggctcctgatatttgtgtttaacatgtgaggtgaacttaaagcacacagaatagatcataatcatctcaaatgcaatttccacaatagtttgaaaatcaatccatgtcaaataggtctttatgctctcagaaatctattcatgacataattgaattctctttttccattgctgtgcaggtgttttttattatttttttatgttggttgatttagtcattagctcctgacagttgcatcttctttgaattttagtttctcattctcataatttctttaactgtaattttaaagattaacatctttggcaggtccattgagaagtatcacttctgcaactctcaag

SEQ ID NO: 5912 - DNA, 3870 bp, Manihot esculenta
  Intron number 1 from transcript cassava4.1_014400m (locus cassava4.1_014400m.g) derived from phytozome v7.0 (chr-ID scaffold07960; pos 32997 to 36866 reverse strand)
cacatattcggttatcttgctggcttgttgtgagtttattgaagaccctctaatctagatatgttgttgcagtctgtctcctaatgcacatttgtacacatactcatgcaaaaatggagggggggaattttacttgtaaaatgaaaatttatgtccatagttcaagtgcacaatgagcctaggcttatgagcataatgccttgaagctctctaggtgagcaaatttcttctggcaagcctaggcagctgaggcacaaggcatgcccagctagaccaggctcaaaaaccttttcttagggaagaaaaatggagtggtctcccatgtggatcaaaccaatttcattccatcaaaagacatgtttttagtaagggatatgctatgtggcaatatacttgaaggattataacccttcatcaaaatcttaggaaacttcatatatgtgttcaaagccaaatctattaatctcacatatatgaatgcacaaaagttactaaggtagtgccaccacaccaattctaaatgggaaagtggtaataaagggaagtttgaaaaaggctttgggtcttagtatttgaaggctcatttaatcaagtgtgtcgaatattttggttctgcaaataagctacacatttaaactatgaaacccttaatgtaatccacgttaaatacatatgattatattagagattagtgatgttaatgatagtcctaggatataatacaaaaacatggattacaatccatgtattcgtttatgagtttcttcattgatatctgagttctaatatttgttttctagccttctttatgtgtttaacatagtattaaattgaattaaattgatttcataaagtttttagtgaaatttctgaaatttaatactatgatcatatgttctgcttaaggtttatctctctttgtgattagtttcttgatgcataattgatattgttagaaaggaaagatgtcaagttttctaatgatgtattatatgcttaatttcgttgagaaatgagagagaaacgactcaaattttgaaaaataatgtaaaattatacccttaaagaaagctcattggaaaattcctcactaaaattttctcaaaaatcatttgatgataaaaaggctgcacggaagtcgcacatcaaggacaaacatgacacatcctattatttcataaagaaaagtgtcttttcaattaaaatatgttatttcaattgaaatgatgtgtcgtttcattagaagtggcatgtcggttcagctgaagtaacatattatttccatcgaaaagacgtgttattccaatcaaaaagaggtataaattcaaccaaaaagaaaacatgtgttgtttggtcctcatatgcatggttttaaataaaggctgttatgtttatttataggtttttgattctcctgttgtcattacacccgtttatttaaacggcaaggaaaaattattatagtaacggccgttgtggatgttatttatcattaagtaatggtaacaatccattacctttttttttaaccatatgggagcaataagtcattttctttttcttagattcagaagttttatgctgttatatttgtctttgctcaattttcatcaaaagttaactatctatctacaaatgtctcacttcttttctcttaagctaagatcatcaactatctttctaattctgcacatttatactttgtaaattttgagttatttatcctttttctttttgaacttatttgttaaagaaaatgacattggataccaaattctttttgtcaaatttagagtatgaaggattgttcttcactctctgttatgtacattattatttattgttaaagatgtaaacaatgatggattgaggtgttaagagctccctttaataagctcctttcccatctatcatcctctgatgcgatccactacttgagactgtaatagaaactctaaaagttataagtaatcttcgtctcactgtaccctcacaactctaataagtttctttataatttatttaatttttgttaccttaaacttgttgtcaatggattatgaatgatttgacctggagggacatttttaaaaaacaaattaaattaagataaagataatcatgagaagaggtagttatttgtatatcacattaatatgtatgtgttggttgaccaattattattattttttagatataaacacaattatgaacataaaattattgaaaaaagattgagagatgtgattgtgatgcactgcatattgaatctactctaagctttatcatctgagatacgatattattataacaaataaatagcaattgagctctcaaagtatacattgtctcagtgtttagttgtgaagtatgaaaattgcatagtttgaaatgaggttaacctattatgtgtaagtggtagatgatggaaattggaggggatcatccatgtagttcaacctgatttcattccatcaaaaaacatgtccaacatgtccttgctaagggacatatcctttggctatatatatgaagagtaacaaccttcaacgtaaccttagtaaattatatatatgtgttaaatgccaaatctacgagtctcacttatatgagtggaaaaaagtttttgaagtatttcaatcatgcaatttcaaatggaaaaagagataatcgaaagaagtgaaaaaggactttgttgttggtatttgaagaatcttattcaatcaagtctgtggaacattatggttctgcaaataagatgcacatttagactgtgaaaccattaatataattcatgttaaatatatgcgattaaattagagactagtaatgcaaatgatggtcataagagattatgtataaacatggtttatgatccatgcattggttttgatttttctgcacttaggtctctctaacctactgcaactagcagcaagctcatcatgaagcagaagaagaagaatgtaaggcatgcatcgcttttctgttgatctagcctctaactctggcagaagaaaatctctaaattattttttcccttctctctttcttcttgtctttctgcttcttgaagacgtgatatggttgggttttttctgaatcttactgaagacgtgatcttgcttcttttcgtggcagtttttgttcttttgtttttcctgttgagtagctttactgtgtgctattttctttttctttttctgctgtgtaggttttttgttttatcttattaataatattctaatatatctaatattaaattattttcagtattgataaattaaaatatatagtagattgaacaatagaaaattaaaattgttagtttaatataatatttgataaaaaataacattataattcacttcaataaataattttcactcgtatatgtaatttaattaacaatggttatagtagtagtgcaataaaataaaataagtaatgcataaataatattttacctatattggttatagtagtagtgcaataaaataaaaataagtaatgaataaataatattttacctatatttctgtatgtaataaatattatattacttaaatttatagtgcatatactttttattttatgattcttttttgtgcctcagctcgctcaagggcaagcgcattggtgctctttggagctttaataactatattcatgtcaacctcttacatatgctacacacctccattaatgaacattataaaccatttttctgtttgatattgaagaacttgtgcaaattgtctctttatcatgaatttgttgtccgtgggaacatgtcagacattccactaattcttagacttcttcttgatttcagcttctacgtagcagcacctttgtcgcttagtagtg

SEQ ID NO: 5913 - DNA, 3959 bp, Manihot esculenta
  Intron number 4 from transcript cassava4.1_009413m (locus cassava4.1_009413m.g) derived from phytozome v7.0 (chr-ID scaffold06261; pos 23294 to 27252 reverse strand)
gtggtaacttctatttgacttgggaaccaggacaggtgagttgctctttccctttgatgggatgtgtttgctctgaacctcctcatgtgggtcatactgcaaatatccttttcgatgtaccgttgaaaattttgaatccaagatatctagtaatagtaatgactggcaatttattttagtgcttatttagacgataggttgctctcaaaataataagttggtgaatttggttgcatattgcatgggggagatagtgcatgtcattttttaaagatggggtttaggcatcttttactttgtcattaaaaaacaaaagaaaaagaacttctcatttgataaattagacatcttttacattttctttttcaaagaaaaaagaaaaaagtcctcatttgataaatacaattgcagatttctgatgataactaccaatttatatgctgacaatagcttaaaatgaggctgctccagatgtagcaaattgatgaatttgattgcatatttgtactgaggtttgatgtgtgctgccttttccctctgtcctcgttttgaaaaaaaaattcctttccatgttacgtatcaaaaactacagatgaccaaaaggttatgttctgaatgactcaagacagatatcaaagaggttatttgttccaataatactggctgtgtgacacatatgacgtgtgtgtgtgcccttttgcttttcctccagccactgcccacacccatcctttttcatacatatctagtgccattctcatagtgagcagcgagggttgttttctttaggcacgtgccttgccctcttccaaatgttgcatctctttttgatggacttgagaaattacagatttagggattattttgagttaactttggtaatagctcggccataactgacccaaataactttagagctcagtttttacttggttcaaaatggttaacccaagttacttaatagtttttgctaacaatttataaatctatcaattttcctgtaaacaatcaacgtgggatactaatgaatatgggacactataatctgtaaacaatcaacgtgagatactaatgaatatgggacactataatctcccccactcaattttgcgaccttgtctcacacgggtagcccgccctttcctcacaaagctctgcacaattttcttacttgggtagctctagtactaattgtaatagttcggtccaaacaaatccaaataattttggagtccaattttcacttggcacttggcccaaatggttaacccaaactgaccttatctatttataaacccattaatttttgggtaaacaatcgatgtaggacatgcaacttttaattgtgaaattaaaaccttaattaagatttcatagttcaattaggaagttttggtttttatatttagggattctattactattaagaaaatttaacaagttctattagacttaccctccgtttggaatttaaaattcaactcaattaatttgttttctaacaattctcttatttgaaataaaagaattttattcttttaacttaaagaattttaattttaaaagaagttgaaaaacttgcatgattttgcaagaattcatttaaattattttcttgcaaaatgaataatgccaaacgtaaggttagtatttcctaattagtaatagtgttttcctattttgggattcctaatcttagtggtagtagttgtaaaattaatattaatctatatatatacctatgtaacttaatggattaggtatttttctagagaatttattattactgatattgacaactgagaattaatagaattggagagtttattccttttcccctttgagtgttgtttgtgattctacatcacttcttccttctaatgttaacaaggaaattttgtagtctaaattattgaatatgccttgaaaatcatatcttgtaatgtaggttaatgatttctgaatatacagttttaatacaattaggtgagaattttttatggatcttaaaaacagtagacagctcaatcattttcaccataagaaggaaaagaaagtaaaatgcaaaaagatagattcaaatgttgagtatttatttcgaatgactgaaggtacaactgatgggcattaatatttttccttctcctgctcacatgaaaaaataatcatgactacggcagacacagtatattttggaaattggagagtaattaaaaaagccaatgcttctactgcattgttgttcagagcagatatgactgttgcatggagaccagctggtttttcatattcaggtttgaagtgcttagcatgaaactcattccttattccctaatttccctataaaagtagtttttacacttccctttgcaactttgcaagagtagcctttcgtgtgtgaacttaatggttctcttagataatgaacttaaatttgaggataacaccacaatcttttgattgtcattattttaatataatggaaatatagaatagattaaagaactatttgcaaagagtgcaacgtgagcagtgcacattggcagaatcagaaggaattagggtggataccgttggacttgggcacttaataggttatccttgttacttttattggtaatacactgttgaaaaagtttacttggcatgcatttgatccaacactgagagtaagccttggtgggatggtaaggttgctcttcctcaattgtgactggaggtcgcctgcaatgctgaaagccttttacactgggaggactttttttggttggcctaaagggagctcatttaagggtttttgacccctaattgctaagattaatggctgatttcatttggaggaatgggaatattttcttggaatcctaggttttctccctgttgcatttttgggaattgatatccattttctaagtttgttttatttaggaaggatgagagcggaagttgaagataagattatgttgtaggtctctactagtatgagatgtgaggtttaatttttatttcaggaacttgaagcaaacatttgatagtaaacagtctatagaaaaataatttcttgtggttttatggtggatggtaataacaactgactagtcctttcagtcaatggacaggataatctgtgctttcgtttttcagttgtaaggaacatgagaattggtaatagtttgtggtgggtggcttatgcctacttcagtattgtagaagttggaaaatactagaggatactcaagcatagtaatggaattctatgctgaatactactgccgcaacttactgcagattgtagtatgagaagaataggcatgagaaggattggagtttccaatggaaagccttcaatgccatgttcttcagtgcctttttctggtggatgcattgagattctttataccatctctttattaattatgagtgagaatatataattaaataaggttttgccacgactgatgagattattctatttcagcgagagagtccaccagctatggaagtttcaagttagctggccgttactggaatcctgttcctcattcttaaccagattgtctcacaatgtaaaattatcagtaaaattttgacatcctgaagcataacattgtacagaatctaagttcttttttttttttctcttcctttcgtttttctttgaattccttgtcactttctcactttcttgtgtgctagaagctattcgaccttgcaggtattgtttttgtgcttcttcattccagtttatttattatcaagaaatattgacctgccaaaaaattttcattttatggaacgaaataaaggaccatgtacctgttggtatttgttatgaaattagtatggtgtatagtaatctctgccaatcaaatattttaagtgttctactatcaacttggattcattgctttgcactatttgcagccattctggcagccacataatagagcagttgcaag

SEQ ID NO: 5914 - DNA, 730 bp, Manihot esculenta
  Intron number 1 from transcript cassava4.1_030703m (locus cassava4.1_030703m.g) derived from phytozome v7.0 (chr-ID scaffold03743; pos 142047 to 142776)
tgtcactgtcacgcctgggaagccccaggtatcccgcgtttttttccctttttgttttttggattattattattattattattattatgatttttggtgttatgagcttagttaagcatttatgttaacgaggattagaggaaattgtttccttttttggtttgtaggataatctttttggataattgtggtagttgtaatgtcttctatctgaactttttttttctttccctcttctgtaaatctggttattgactatgttacaatgcgctgtgctttgtctctttacttcaacattaaaagttggattcttgagaggtcatcacttattaatgagtataattaattactgaatttggattctgattctggttgtgtgttacatattctagttgagagggctcatatttcgttttattaaatcttgaagaaaaatacagataaactttttccaagaataaagtttgtctgcatgactaaaatatggttttgagtttcatattctctgattttctaagtttcagggtattaatattgtatgtacagcttctctgcatagcagagaacagtgtgcttaatcctacctagagcccgcaaatgtgggattgcttcgtgcactgggtcacccccttatgtactactggtatcatcatgcatatacgaaatatgacattggtttttttgttatgattcaggtgcagatcggtgcacattcttttacatttgacaa

SEQ ID NO: 5915 - DNA, 2257 bp, Manihot esculenta
  Intron number 2 from transcript cassava4.1_012871m (locus cassava4.1_012871m.g) derived from phytozome v7.0 (chr-ID scaffold00847; pos 2264599 to 2266855)
cgcccgtgagcggtggtggtctcaggttaaaccttttaatattttatcaacccttgcttagatctatagacgtttttgtttgatccttttgtttactattgtctttggtttaatcctctaaatgtttcttttataatttacacggttctgttatgtgtatttgtcaattatgttgtctgttttcatgatttatttgtatgctttttttttttttccttttgcttcagcttgcttgttgattaccattcatgctgtgtccaattttgtgaatttgtcaaataataatgacgattacttgctgtgattggtactatgttggttgtgtcaacaccattcttaattggtttattaactttatcaagtcactgtatttgtttggaaagaggccatcctaatatgggttatatctaaagcttaagattatcattaattttggtagctttagagaagattcttgttattttgtttcttcactaagatcgaattttgcagtaatcttaatctgattggctgtgggtgctaatattttcttagaaggaaaatataagatattaatggaaagaatagagaaaaggaattgaatggttggtggtatgctgtcggattttgttgttagtgcttctgcaaataaatactgaaatctatatgcatgtggggcttactaattatcgtatgaagttccaaaggtctacgttattatgattctttgcttctattatcagttggaaatctctcggatgtcgttttctatactttggcaatgtgcaaaacgagagaaagtagactctaaatcacttttttttttgttggttgttgaacttcctcttgcaaggtaacttgttagttgttgttgctgtgttctttgtcggatttgattttattagatttttcgtgtggatacacgccaatgttgctcttatagaatgacttctcattcttttccttggacttgactttgcaaatccaactcgtggatggaggattcatgtgtcttaaaatgtcattttaaacccgtgaatttgagtaacattattgcattggaaaaaaaattatgtattatttttacgataaacttttattctcaagcttcttaaggttatatgctttagatggaaatatttaagcagtctttatgtaactatcgcaaaagtaatatttgtaaggttaagtgttttgggtgtatacttccttttatgcaagatgcatcttgttattttgttaacttggaagttaacaatttgtcatattgctttaaagactgataaaattttcgaggggcttccagcgactttttatcatttcaaaattcagatgggattaaataattgtattagtttaaagcattattatctctctttgatgtggttggaatcagattatcaatgtttcaattcgctgttctcatagccaccgttgttcattgaaactagtttgatggatttgttgcatactgcagtacacaacaagatctgcatctttctttctcttattttcctttgtattttctttttaatgtctacctgttgtcagaaccttttatcttgagtgaatttatttattttagtacttgcccctacttcagcttctttgttcaaatatgacagtagctttagaacggttggctcacaactaaataaaagccaaacataggtgagtaatggaaccttcatttatgtcaatcttgatgtgaaatctaattgttgatagtcctagtttaacatgtcagcctgtttaatctcaatataaactttaattgaatatacttgtctaattctgtctgaaataataaaaagttgtacgaagctattctcaaaatttaatcacagccttcaatgcatgatgacagctcatcttagattaacatccctcgtccttgtcgttgtctagtttgaactttttttccctaatatcaacatgttacctgttgtttttatgaagttctctattatatgctttctcaaagtcagtggagtatccatgctgaactatttatttgtctttgtgtacttttatacattcatttactttgttggtgtgcttttttaattattttttatgaatttggtagaacatgtttgtctgcctacttggagtagaggcctcatctagttcgtcattgctttgaagaaattttattttaattttataagtacttcaatcttttatgctgacaaagatgtaatgtttctagtgtctcatttggagttcatgggacttgtctaacaataaattttacgtgttttctgcaacagtcaga

SEQ ID NO: 5916 - DNA, 1011 bp, Manihot esculenta
  Intron number 3 from transcript cassava4.1_004193m (locus cassava4.1_004193m.g) derived from phytozome v7.0 (chr-ID scaffold06916; pos 990355 to 991365 reverse strand)
aaagagaggttagaaccgactttgttcggttccaggtaaaacaaaagcttttaattgctctagtatttgatataatatcagtaaaaaatgcttattcttaggactaataactcaaaaaatccaagtgatttcaaataattcttttagtattggcattattgacctaatggttgcaatgttctccaattgatcaaattggtcaaaattgaaatcaaataaatatcaattcattaaaatatttttcggttttcttttattttctctctcctctctctctctctcttatttagtcaattttcttttttattttttcattaaaatcaattttttaatgaataaaatattttttatttcattttttatcacttcgtcggatgaaattgcaaagttttagaaattggcttcaatggagattgtattagattgcaaattcgtgcaaatgttttgcttttggtagttttcctctttcttcaactcttgtaaatatttattgaataagttatttgtttatcgatttaccattcaaaatctttaaactgtctgattttggtcaataatggtcacgttcacattttctgtcatttccttttacctcctaaaatttggattcttatatcaagagaagacgatgcttaaaagtttgaattttgctgtgaagtatttatatggccacattttttttctagtatatatgggcatacataataacctttttttatatgaatagtttcttttttctatataaaatagtaatatagccttctatagcataagtgttgtctccatgttgttaggaaggcggtgggccctggagcatgtatgtagccctcactgtcttagaaaccagcttttttttcctcatcttgtatgctagtttagcactaaccttgctagcaaatagtcaatagttgctacttctttaggcttcaggcaagtgatgcataaaatgcttctcagtaattaccctgactgactaaggaggttaactcattcaggagtggctgcagcagc

SEQ ID NO: 5917 - DNA, 4548 bp, Manihot esculenta
  Intron number 2 from transcript cassava4.1_009348m (locus cassava4.1_009348m.g) derived from phytozome v7.0 (chr-ID scaffold06140; pos 107760 to 112307 reverse strand)
atttcctcagttgagtccatcgcattcttgtaaaggtattttattttttaattttattttacatagtttcttgttgtacttggtctcagtgcttcattctgttttctgttagaaggttttgtaagcgtctgataacattcaacaaggtaaatcacactctgaatatatataacaactggggccacccctatgagctcttcatattctcaaaatttctttcaacttctctgttcaattcctagctggagggttagtcacattggacaagaagctgcaaagtgtagtatatttcttgtttatgacttaagcatagtgtttacattgacaatattcattatgtgatcattggttcaaccaaatgctgtagttaggaagcagttccgatggatcaaagtggtgcgatttggagtgtcctgtctcattactatacacaccttgtccattgaaacttgtattactgtcacctccctctagtccttattaagctgtcccattttgaaaagatcagacttttagagatcacaactaaagcattatgatcatcacttctgctttcacctttgactatatcaaccactggactatagcttgtcttaaatatggaatttatggcatggtgaaaggtcctagcagttgtaaagtaaacttaatttatatatctagaatatgaatagttaagtattggtgggtgtcgaatctaacaaaaataaatcttatacttttcaacaattatgaacggtagatacggtgagtaggatcgaatccacagagaacgggttaactactgtatgtttgtgttgtgagagtagatgtggaaggaagtgaatgatgttttcacaatctgtctaataactgatctgtcaacttggtgacctatcaatgaccttataactgaccacttagtggctttcttccaacgaattgatgacttgttgagcacacaacttcacaactaagcaaaataaaactgcaaaaataaaaaggagggtttgagttgagtagatttaaccatatgcaaaagtaaattaataaagagcaaataattaaagagattaatcatagtaagaaaacatttagtttcaagaatatctcaatgttaattcttggaattgatcacagatgcaagaatgttcgactcactttctagtcagccagttatagctgttgatacagtttaacaacctaatcttcccttagataaaagaccgaaaaggatcagctcactaatcaacccctaattaacaaacaaaccacatatgagatttaatttgataacaaaattaaaaactagaaaaacctgactccgactaagaagctcgatcagtgtaactgtgaaatcagaatatgttattccacaataaattattgcttggcacaaggataaactctctagtgattacaaacttaatgaatctgaatgactgtatactattcatttaattgaacaattggccagactgcatcaactaaacaaattataatctcaagaataaaagaaatgacatagaaacaagagatgagaaggaaaaattaagcttgagttgatatcacaatccttgtgaattacattttgaaaattttctagcaagataaaggagtttagctactgaatctcataatataactccaaaattctaactcaaaacactctaaaaaactctgaaaatctgaatgtccaatacaaagacctttctttttttaaaggggtaaccttaaactaaaacgaagaaaataaaatatttctttaaaagggaaagtgacaatccctaattttttttatctttctgaaatcatttcttttcaaattggtcttcttcaatcatatctggaaatcatatttcataagtcgtgcccatgggctgctttgcacgaggtctgcttgacaactccacgtctgatttctgcttaaatctttcaattaggagcttttttttttaaagagtacagaatctgtcaatatcgcaacaagaaaagaaatattcgtaattcagcataatcaactccaattttataagaaagaatatgcaataaataggcaaaatatacaccctatcaagtatatgagataggtaagtaaagatgatagtttgttgcttatatacatgtgaagtagataattaagagagttgatgtataaaaggtcttccaagaattagagaggttgtgagaaaaatacaagagttagataaagtaaaatatgacatataataatgggatattgcatataataataggatgttgcttatgcgacaatttccatgaagccaagatgaagcaaaatatgagataaaaggactaaatatcacttatggaagcctacaaaactatgttttgatgaagccattggcaggtttaatgaattgaagggaaaattgaaaggaaaaaaaagatgagaaaaaagtaattaagatggaccgcgtatttgtgaatcaagaataagatttgtgtttgttcatgatttttctcatagttgcggatcactaaccattatcaagaaatgaaaaaagtaacaaggaaaattaagtttaccgggattttggaatgtaaaacttaattcatgatcttgaaatatgaatagtcgagtctagagataggcgagtttaagtaagtgtgagttccttaggagtatgagtgaagtatttaacaaggagagatgcatggatgatttatgctatatatataatacacctatttaagatagtgttatgtggagtggaatggtctaagtatttctataatgctatttgagttgcaacgactcctaatggttcctcatttatcttatgcatcattcccctccatcccaacaaagcggtatcaaatcttaaacaattctcaggttgggaaacatgtgttaacttttcttttgacttcctagcatggatatcattaaatggagcaaccagaaattcaagggtacactttatggtgggcttgtgagattatagcttaacttattcatgtgttctaatacttgagaagcaaatgtgaagctgaagtttggttctgctgctttttgatagtagctaattgaacttttcgctcttcgtttttgtagatgattataaggtaaactgcaatttaatctttgtaatttggtgaaccttatagtttagtgtttgaattttttaaaactcatctatttaatccttgacgtttgaatagccctataaatcttctacaattaagtttttgttaattttagtaaaaatgaccaaatgctctttcttatatttttaagttttgaaacaacttagtgaaatacaatttagtcccttaatttaaattttatatttatttaaaattccttactaaaaatattatgtatttatccggaaatattataattattacaaataaaatttataattaatgttatacttgtttacaaataagtacttatattattgcaaattgattcttaaatattctaaatatttaaaggtaagcactataaaaaatccagccttaaacattacagttattaataaataagtcctacacttttacattttaattctaaatattattgttgagatactttctgtaaatagtctagatttatagtgattgtgtatacaattaaggatatgattatgtgatatgattgaaatatgattaggctatggttagagaattaatttattttcttactagtatctattcttgtaaatagtatatataccccaattggcttgaggggaatcatcaagcatttttctctcaaaacttctgcttcattcttctttttcatcattgttttcaattataattatttatgaataaggtcttatatttttataattgattcctaactttttatagctatttatgaataaacccgtatttccttataaattgatttctaaatattataattatttatgatgaagcccttatattgtacaaattgatctataaatggaatgcatcagactaactcctaacgaaaatgattataatggaaaataaaggactcaattttttctcagattccttgactccacttggatgcacttagtcaagatcttttgcaactaattttaggatttggatagaaattatgtgcttaaaatggattttttgcagtaaattgaattagaatgtaagtatgaaatagggggttgatttgctgtaaatttaattagaatgtaaatatgaaacaggaattgattcataaaacatatggtttattcgtaaataattataataattattcttcaataaatttataaaatatttaactttggtcttaatggcaaggactaatttgcaggtctatttgaatgttaaggactaaatcagtggtttttaaaaatacatgactaaattgtgggtttcactaaattgtaattagccctaattatatatttcattaaccatttctgcttataggtgctgtccataagacattattcataaggagcagcagagaaaactaatttggatcactgtacttgtgattgccagtcctagtctttgaactgtcatttttttttactttttatttgtttgtttcttttcttgtagaaccagaaaaaactatcc

SEQ ID NO: 5918 - DNA, 2798 bp, Manihot esculenta
  Intron number 1 from transcript cassava4.1_015771m (locus cassava4.1_015771m.g) derived from phytozome v7.0 (chr-ID scaffold06485; pos 67085 to 69882 reverse strand)
tcaaaggtatgcttgttgtgctttagttttggagtttaatctaatgtttgtgggagaatttattaggtgacttctgtagcaaaagttcctcctttttaactttctggatttggtaactatgagaagctgacttaaattcaaattatagagagaggatgtgggagggagaggaaaaaagtttcctaattagaaattaaatccgattttcacttttagttgtcaaatagcaacttagtacgctaattcagtaagtaatgccataatggcgacgaggatagtgagcgtagaaatagtttggcaattttattacctgttttacaccatgaaatttctgttcattgccaatgtgtggaatatacaaaattcaactaaaactaaagttgatgttatcacatagaaaagtttgaactaatgctatttgtgataagatgtaatgcaatggattatgtaattgaatcaaagttgtaatatgttaagcatcacattgttttgtttggaagtacaaaagtgcaatgtggatggaaattctattaacctgtttgtttagatgtatttatgaaatgcaatcaaatttatattagtgatagaagcaatgagagcgaacttgaagatttgtaggagaaaaagatgtgatgagtaagtggatttgcaaaaggtttgttgaaaaaaaaaatggcactgggaaagtggttttattgtaatcacaattacatcatgtctgatttgtaatgagaactaaatcagcacagatgaatgagaaaaaaaaagggtaatatctcttacattagaaaaaaattacttaaccgaacacagtaactaaacaagcaactgtctttatttaaagcagcatagattacagtgatttgagttattcccatgttttttcatgaaatgaactaagtttgaaggttgcagacattgaagtagaatattatcacggtgatggtaaaattttaggtaaaaaattgggagatggttgactagtgactcatgaattataagtgttggagtgattagcatggagatctcatgtaaccacttggaaaccaaaagcagatctttctcttaacccttctggactcatatagcagcctgaactgacaaatcatggttccttttttgggtatgtgtgtttgtttggatgcctagaactgaataataaagcgggaatttgttttcattcttttcattcggagctcaataccattccttatattggggagattagagttgacttgatgctgctatgtggcctgaactaacaaattacaagtttctttatatatgtttgaaacagtccggcccaaactgatccaaataacttttgggcccactttccacttgatccaaaatggttaatccaagttatttagtagttttgtgctagctattatatacaattcaatttttttcaaatctaccgatgtgggacggaacagctgccgcagatccgcaagtaggcagctgatcgttacactcggtccactaaatttgcgacgtccttgttgcaactgattcggttacaattgctaaccaggaccggacccttggatattgtggttcgctagtactttgggcagctccaccttgtctctcatgggtagctctttcctcgcaggccctctagctccgcacaatttatatgactcagggtggctctaataacaattgaaacagcccggcccaaactgacccaaataaatttgggccaagtggacttttgggcccactttccacttggcccaaaatggttaatccaagttatttagtagtttatacaattcaatctttttcaaatctaccgatgtgggacggaacagctgctgcaaatccgcaagcagacagctgatcgttacaacgtttatcagaatgtctggaactaaataatgagatgtgaaattgtgaatttgttttcaatctttttatttggagcttaataccattccttatattggcaagattaaaagttaatttattagtaaaatgggctttaattcattttactagattcatctccaaggctaagaggtcgcaagttcaaagcccctagatggagccaattgtactaaacaaaaagatgaaaagttaatttcatgttgctatgtggcctgaactaatggatttgggttccttttttggtatatatgtttgttagatcatggatggcttgtaacaatgaatttttgaacattgtgtttgtgctgcattgtgaatttgtgcggagcaagcataattgtgaacaaagtagcatgagcaagaaccttaatgttaatctttgacagttatagagtgcattcgattttgatagctgtagcggatggtattgaagagatttaaacattaatagtcatggatgagggtaatggggacagcgttatttaaaacctttgttattatgagctcatcaccacttttgttgcatgtcattctatcttatgtccttcagaaaatggtgatgagtgtagaaaatcaattgaattcacaggttgatgacatcattcttttagaattctgcattttggtttggcatgatgttattcaactcaaagtcattgataatgcgaacatctcaatataataatcctgtatagaagaacatcagaatggcgccaacgctgattgtctttttctacacattttggtattgccatgtgtctttttatatgtctagcttaagcagaacttggtgaacagttttcttgcttgctttgtttcttggaatttaatttgttgatgtttgatgataatggagctttcttcctcatggaacttaattgcagttagtggttcaccttcgc

SEQ ID NO: 5919 - DNA, 846 bp, Manihot esculenta
  Intron number 5 from transcript cassava4.1_004758m (locus cassava4.1_004758m.g) derived from phytozome v7.0 (chr-ID scaffold06754; pos 33728 to 34573)
ttgaagacaacagaaaggtttgtcttggatttgaaaaccttaaggtctttttcttatattttaacactggtgccttctgtgaaacaatatttgctgatgtgctgaagattgaaaattgagcaactcttttttgctcctactttgaatttctttgtttaagacactagcttatctatcaccttcatctcattatgaagtaagttgtcagggttttcagaggttgtagtccctaaatctgtatgacattgaagttaatgacaaagaaaacctcttgccatgttgactttggtagttacttgctaataatgctttgacaacttgtcattatttccaatcatagttgtagataaatgttataatgcatttcagtctggatttctttttttgtcacacattctattctgctatcttttcttaaactcaagaaagaagagctgttaatctctttttcctcggttgctttttagaaaatgttgatatagcatctatctatttatgtaaacttattaatatctcagtgtcacttccaatcatggggaagtaccctcctaacctttttcctctgatatagtcagcattaaagtccttattgtaggataattcgggtttaatattatgggaactgagcttatatttggaagcaaattatgagtctcatggagaagagcaattttataagtattacattcctagaatgattttcctgcattttacatttgaaaacatctaaaatgaatgccagttttttcttcgttttatgtttcttgtgcttctaaatgtttttgtttcatgcattttttgttgtctacttttagaccaagtggtgtcctgctccagggtgtgagt

SEQ ID NO: 5920 - DNA, 628 bp, Manihot esculenta
  Intron number 4 from transcript cassava4.1_012239m (locus cassava4.1_012239m.g) derived from phytozome v7.0 (chr-ID scaffold10878; pos 568175 to 568802)
tgggtgaagccaccggaggttagcactctctctctctctctctctctctctttctctaagcatttcatttgcgagaaaaatattaaggcatcataacaggtttgtagctcccaaacaaaactattagagtactagacaaaatatatagacaaagaaaatgcataaaagtattcagtatcacatatgacaagctttaatgtttaagaatgtaaagcagtaaaatataagctcaagttaccagtttgcaacaccaacgtgcagccaaaattatcctcaatttagcatatactggttggcgctaactcaattaccttgtctttaactgagatataatgtcaaacaagaaaaaatgtcacaatcttgtgaaaaagcaaaaactaacttaataaaaatgaaagcaaccagaatctatataaaattttcagaaatgttccaccaaagttgttagttaatttgtctagcctggagacagatagaagtaatgactcagcaactaaggaagacatatcgactatctttctttttgctttgcaggccataaaatgttgatcatatgcaaatactaataacaagactcctttttcctctggcaggtcctggctcgtgacagattgctgggctcttacaa

SEQ ID NO: 5921 - DNA, 410 bp, Manihot esculenta
  Intron number 1 from transcript cassava4.1_011114m (locus cassava4.1_011083m.g) derived from phytozome v7.0 (chr-ID scaffold07991; pos 310780 to 311189 reverse strand)
tcattcgtcgattgaaagattatttgcatcggcaggtgaatcgagccctttgtctaaaagtttccgttaatctctcttttgcttgatcaatttgttcggtcctctttattctaaaaaattcaagatgcctctttgatcgttgtcttgcaattcctgttttgagctgatttaattgaagtttaggtgattgattcaaagtttatttcgtagattttaatttgctattgcgtgaatctacaaattggaaaccctaggtttgttttcgagtcagggtcaagttttcgatatttactcgttcgattgatcgatttgaaaatttcaatcttcagcctattttggttgttggtattttgattgggaacccaatttgatactctattcttgctccagttcgatctccagaattcaag

SEQ ID NO: 5922 - DNA, 1889 bp, Manihot esculenta
  Intron number 2 from transcript cassava4.1_011917m (locus cassava4.1_011917m.g) derived from phytozome v7.0 (chr-ID scaffold05494; pos 177041 to 178929 reverse strand)
tctcatccaaggtactctttagtctggctctgaagtgttcttcagttttggtttggatttatgcatgtgtttatgtgcatcaaatatgatatacatgtactttatatttcaactaaggtacaaaaaggaaggtaccactttgtgttatttagcttactagtacaactttgcaaacagtacataaggctaagttttgtgaggaacatatttatgtgatataggaatcctacagatactaggactactttattttagggaaaaaaatgttagtagtttatttaagtagttttatttgatttacgattcctaattataattggattagggtttataattagggcctatgttacttggactcagatatgggtgtcggaaatgggtgcatattcttatgtctgatttgtcaactttataaatagaaaatacatggaaatagattgtcaactttataaatagaaaatacatggatatagatctatgtttagatatggatgcttgaatacattatgttatataaaataaactagaataaataaaatataaagttatgtagtaacaattatagtctaaataaatggtcgagtacaaccaaatacatcatctaaaatacaactaataactatttttatcttgagagaaaagaatgttctatttactatatgcatgaatatatcgctaaagggccttaagtgcatgaatacgtgtcagacacagatttcatgttgtatcccatgaagtgttatgttgacatgggtatgacatgcaaaatgaagagtcggagtatcaaaattagggctagaaaacattataaatagggcttagtttctttacttcttttatagaacttattatgattattgactattgagttcagcaaataaagttgagaattagtgtttttccaaattgagaatttgtttctcatcttaaatccctaagtacttattatttttacttcattcctatccagaaatccctcattcctatcccagaaaccttagcctctgtgcactctctaactctttttaccttcatcacacacatgtatatgtaaaatctaaaaaatatttcttcactgttgggttagggtatccctcagatgagctagtttgtgtgttccagacattttgtttattaaaccaagcagaataaacaaaaaggattaatgtaggtaagatggaaaacactcccaacttttccagagctgaagctgctgaacatggctagttgtagttggctggttttctggaattgaaaaatttgacaggacatccgtgttcaaaaagatctagaccttgtttttactattttttttccatagaacttccagagtttttaagttgaaaaatccatgtaaacatgtttcaccacatccacaactgccatataaactccactgcaaatctataatgtcacatgatcacatcaaaccatcactactactagtacattcctttgctgtcatcactcatcagtgccgttggattgcccctattctatgatatagaagattaattaatgaagttgttctgttctttcccactgaccactcatctaagaaacctgattttccattaaccctttatggtctgatatctgataaggtttggcaagtgttgaattcatttgctcctttgattgttaaagcaattcaaaggataagataaatttaagcatttggcgcacttacatttccttgcatatccatttacatgggtttgtgtagaaggacatgggatgtgttttactagtaatattttctactttttcttggttgtcttcttccaatggttatggttgagtgctcagatgttgatgttaatgctactaactgcttgatcaaatgattgtcaggtactgctgggcctttcaggagttgttcttgtcat

SEQ ID NO: 5923 - DNA, 1603 bp, Manihot esculenta
  Intron number 2 from transcript cassava4.1_008700m (locus cassava4.1_008358m.g) derived from phytozome v7.0 (chr-ID scaffold06700; pos 99357 to 100959)
ctctctatcaccctggacttctcgctcctcctcaggttatttcactctattttatattcctcaatttctcagcttctcgaatcattgatggaatttcgtttccgctttgaattttatgtgcttgattttcattgttttcgaggtttttgttttactatgtgtttgattgggttgctcgagctaggtttaggttttggtagctaagagatttggtttgtttgtgattctggagcatttgcggtttttagttcttcggtttaggttttttattggtatattcattgtaatgttagggttttgaatttggtatagctcttgaaatttttatagtacccccccccccctccgaccccccctaaaaaaaaaaaaaaaacccacccaactctctctctctctgtgggtatggggttgttttaacaaatgaatgggaagataactttgccatgatacccaatatgttagttgggctttgccataaggtgccattagagaatggttaaaccggtttaattttgttcacttcttttatattcctacactggtagtgatacggactactgtttgatgacaacaaggtttgttttctcctattttgctatattgcttaaattagtactctgctggtctttaatttgtttcttgatcctcactgaaatttattgacataatttgttgggcattgttgtggtgccttgtctcagtctcacactttgtccatgcttgtccaaatacttatgagcaagtgcagtccatgtcaaaatgaaataatgattggtgtatactccattattacattagtccaagtttaattatcagtcttgagtacttcacaactaatatcactgattttccacgttcctctcaagaaaatgtaaaacttagttcctttttcttttccctccttggtgcttacaacatttaaaatctgtggtggctttttgattacatggaaagtgtataatttctcagtcataagtaacttgttgaaaccagactaagccttgtttttttttggcaattatcttgctaacttctctgccgtaaataactaaaaaagtgcgattttgatctttgccttctggtagttatttaagaaaagcacaagacaatttgcttactttgtgttggattaaggatctgaagattgagttccatcaatcaatgggttctttttacattttgtgctcttaactcgaccaatgaattgaacagtttacaagtgaaaaaaaagaatactggagcgtaatcatttacaacttaaaagaatatagattttgtatgtgtgtgtcttctacaagttatgagccattcaggccataatttagatttactatgagaaccatgtatcatatcctttttaggtttgtttaacacacataattttctgtaggactgggggatttttttttttggataagtttgcaacgtagtcattaatgcttcataaacttctgtttttggttaaacttagatttgggtagatgatggagggaattcttctttatttaattcattttctttcttttctttttttttggtcttttcgtttttacattttcattttgcagattgagccaattcccagcggaaatctgcctcctgg

SEQ ID NO: 5924 - DNA, 2242 bp, Manihot esculenta
  Intron number 5 from transcript cassava4.1_011171m (locus cassava4.1_011171m.g) derived from phytozome v7.0 (chr-ID scaffold09880; pos 35819 to 38060 reverse strand)
aacttctacatcaggttagcgtatttgggtacattttatgtctactgtttgagtagtgatgttcatgggtttagagctcaggatatgtttggtaggttataagggattggtatgtaattagtgaaatgtattggtcattctctccttgatgtagttgcaaaaataaaatgtatgtaatgtaattttttatacagtagtggcagcactaaacaaagtaatcatgattacataagtttttagctgtaaggacattacatcagctaaaataatgactaatgtaaagtacattttttttttatgatgattacataagtttttagttgtatggacatcacattagttaaaatattgattagtgtcaatttcattttttttctaactgataaaaaaatgggacttgtaatataattgtgattgtatatttgtattggtcttacaaaacattaccttgttgtctttacacataccgggaccaagcaaatttgtgaatcagtcttttggcctcagactctttttaacttctaagtaattgttggttttgtatcagattcatgattgctatttgtaattatggttgaaaggcaagggcctgtatagaggtcagcagcttaaaagatgctggctatttggggtgcaattatgcatttgacaaatataattttttgaaaatttctttttaaggctttgagcttgtcttatagaatagtataagagcttcaaagtgatctagacctggataatataaaggagcctcgccctcaagggaccaaaatacttacttcaaattctgaattgataaatggagtgaaatataaatttcatggacaggttctaagtaaacaagaaaaaaagctcatttgggaatccatgaacagcagcaggctgatatgtgaggctcattttctgatcatgttgagggaaggggtggcctctttataggaaggagtcctttgtccaattctccttcacttgtattcacaagtctcttattaatagatgttttagtttaggaacaagatggaatccatgagcaggagaaacattcataaacatagttgtcaaatccagatttaaatcaagaattgacatattcattttgtcaattgatgatcgcgaatgattcataaaaatttttcaaaattaattaaaaatgatttgtgttctacaaaatagtaaagaatgtcacaataacatatcttgataaatatagaattatcatttagctaattagaagtatgtttcataataaaacaatatattgtgttatatagttttatattataaaaagtcttgagttgtagacaatggttattattgtatatgtgttgaagcttccatttaaatttgattaaatagttaaataataaataagaataattggttaaattaaaaggtcagaatatagtaatataaaaaatatcaaaatttgataagtataattagagaaataatttaaaaaaaagaaaagaaaaagagaaacaagggagaggaaaaagaatgattggtggaagaaagataactaaaaaaggttttatatatactttttatagtaaaaatgaagtgaaatcttaaatttttaagctatagggtgacgggtctaataatcttctagaaaaagaacggaccgaattggccagttacattgattcacttgatttcctgttgattcttccgatttggtcatgattcacacacattttttgttcactctatagattcgaatcgatagattggggaactgaatcaaatacaaattgcaggattcatacaaaaatagattcaccccatagattcaaattgattggatggggacttgaatagaatcaaaatgtatgaatcaattcaagaatcctaagattctaataacagtgttcataagcaatttcctacgactaattttgctgtcaagctggctgagcctgtaagctgaatgttgtaggtgcttgagtttatctcttgatttttttagcaagctccaattttcttctcaatttaagctaagattaaggggaataatgacatttgcttctctttattatatttgagaagttttttttcccatgtgttgattgtgagtcttctgtacgaatgtttcaaggctcctacttctgagatgttgcttctctgtttcctgtggatatttaagaggttgtgagtttgaacttggctgcattcggtgacctcttggtgtgtatgtccatgtccaggtatttgcggctgcaaatatccccatcaaacaagg

SEQ ID NO: 5925 - DNA, 951 bp, Manihot esculenta
  Intron number 4 from transcript cassava4.1_008519m (locus cassava4.1_008519m.g) derived from phytozome v7.0 (chr-ID scaffold02610; pos 152318 to 153268 reverse strand)
tgtgggactgttggtcaaagccttatattgaagaagtgagttcgatctggttcttatatgttgtataaactcttttacattctaggtatcatgacttaaggatcatggagatttctccatttaatagttcaacaaattattttgtcttgttacaggataatttgtagatgacaccatgcagagtattgcaaatagcaaataaagaatttaggcttcacaattaacttccatagaatttaggcttcactccgtaggcatcacatgtagggtataatctcatcacacaatttgagaggcaaaatttcaagattttttattggcttataagtagacatcacgaatataggtatgttgtcgtaaaattaatcctaaaaattatagaaattagacctcataacgggtcctacatctcttaaagatttagaccccgtggaagaactaaaagaaataatatcatcctaaaccaacaacgaatcaaaataagatttaaatattaaagagaaaagactcttgaagacatctagacaggttttccagtaaagctggaaatcacaaaattacccccgagtcttagaaggggtaaattatttgaatgaccaatgagtatgacatggtatccttttaagttttgaatttctttggttatttgggtcagttagaaagaaaaaattacagggaaaaagcaatgtcaatgatttggttggttatcaaggtatcttttcttgggtttcaaaagttgtgaatatgataagattattttgtctggacaaataaaatgttatgcatgaatgtcctattaccttctaaggattaccttatcttttggttttgacagaaatggcatcataagtttacaaaaatactggatgtggaattgcattttatgctgtgttagtttaactatatattggcatttccgaaattgcagatagtccgtatagtaaaaagtaa

SEQ ID NO: 5926 - DNA, 182 bp, Manihot esculenta
  Intron number 1 from transcript cassava4.1_008173m (locus cassava4.1_008173m.g) derived from phytozome v7.0 (chr-ID scaffold03735; pos 365622 to 365803 reverse strand)
gcgtcccgatcacttttcttcgctctacgacggtaatctctaacccaaagttctgattattcatctgatttgttgttgagaaagttctgaaatttcataactacttatccgaatttgctattctgtgcaataaaccataatcaacagcaaatttggatctccgtgtaccctagagaaaggga

SEQ ID NO: 5927 - DNA, 2677 bp, Manihot esculenta
  Intron number 2 from transcript cassava4.1_033225m (locus cassava4.1_033225m.g) derived from phytozome v7.0 (chr-ID scaffold05531; pos 15341 to 18017 reverse strand)
cgcctttcagactgcacatgtaagttctattgctacagttttttaatttactaattacttctgttagggaagaagagagttactgtactttcttagtttagagtttggtgtttcaattaactcggtaatgggttcatatggaatccattagctacggaaaaagacatgctcaagctctgggattttcctcccttcctgctatctcaacttttttcttgctgatgcttcagttttcacaaggcactactactaggccttgtctttctagtttttttttcttcttcttgatatacccaaagtactaataaactagatagctttctaatttgctctggggagctgaatataaattttataaattaaacataaatggtcccacaacactaatttcccaaggaaaaaacatgtgccttccaaagcctccattcattatttaaatctgcacttcaaaactggtaattttcctaaggagcatcaattatatttttatacttcttgtgaatcattagtggcaattaattcattaaaaaaagttaataaaaacagattcatgtcttagcaattaataataattgcaagcacatcagtttctctttcacggtctgagtactgactctgtctgctactgtcatagagccataatgccataaatggagttaatttgatctgtcagaaaccctccgcatagtttcatcatcatttattgagtcattatgacatgtattcagcaacatatactggttatgtttttgcaagatactagttggttgtcccacataatatggctaggaagtgcaagactgcttgaacatgctccgatctagagattcttgattcctttcatagtagttattttctgttatagatgacatagtaatcattcccactgtttttagaatctaacaattcattagttgattcgtataactcgatctgatttccaccctagaaatttgaaactatggggtaaatcttaaatgtacctgaatatgatcaaatcatgtgatttgaaactgaatcttacaatttgatatggatctatctatttcgccgattctttttctattctagagggtttttttagaacttttagcttcaaaatttaatatttgactttatttatatggtgaaaagagagcataaaacttttcctttagcatttttttttcactggccaattttccttcttgcttttttctttttcttttcgttttctagttttgttaatgtacttctctagtcatagttgtcaaattaggacattttgtattaatatattgtaactccttaatataaccattatcatttttttgttatttaattatttgattaaatttaaatgagagtttcaacatgcacaatgatactagattgtttacaatccaagacataaaacaaacacaaaataataagaatatattgttttattataaagcatcagtagttaaatgataattctatatctatcaaatatatgattgtgatatgtttttatttatttttaaaagataaatcatttttaattaattttgagattttttttatggaaccttacaattcgattcttgatcttgatttgagaaatattcaattaatgtcttttgaaagctgtttccaaatgcaagtagcaagtagaagggtctccacaaatcattttcttcatgtttgtgcttttttgtccttttttggcataaattcatgtttgaactcttgaatcattttttaatttataaaatttgtgctctttgtttttgggtgtaaaatcaatatcaggtttaaaagtgcagatacaagaaaatacactatattgaactgtcatttatgaactgcttaaatattcttagtttaggaaaccatcatttaaatttgctaggtacttgggagttttggggagttctatagttcatggttcagctaaatcatttcttaagttgctctctcttgctttctcaaaaacacaagcgcaaacaaaaatacacacaaaggtttgcaagaaagttcatggccaacatttttttatttccatttcctcctctaaaatagctttaaattgttgttaagaagcattctttgggccatatagtaaacacgaacaatgccttttcctttgtcagtcttctattttatcagttactttgttttgtgattgatgggcaaccaaacaaaaattttaagctaataggtgggcatgcccatactgtatgtaaggaagtaatgagacttatttttgaatgatatggtattactcaatgccacttcttgtatacttaatatatccacacttcactcagtacacttcacaaccataaaatagcaacaatgggccggtctttacattggcaaacaacaataacaaaagaaacaaataccaacataacaactagctctgatgcaatgttggagtatgaatccgtagatttaaattagtagacggagttgcttaagctatatacaaagtcgtatcaaaactgttatgggattactttttgatgattagaccaaccttttagttatagaagatttctttgattttgatcctcacttttcaacttagctctattattctgttaattcatatttgctttagacaaagatagaatgagtattttgcagttaatggagattgtatgcttatatgcttttgctttttccccttctccatttttgcagtgccaag

SEQ ID NO: 5928 - DNA, 652 bp, Manihot esculenta
  Intron number 11 from transcript cassava4.1_001560m (locus cassava4.1_001533m.g) derived from phytozome v7.0 (chr-ID scaffold09876; pos 159999 to 160650)
tgcttgggaaatcaactggtattggacatactacggtgagtcaactttccatattcttggttcactgatgtgaataacaataatcttaatttgaaaagatattctatatttgtaattgtttaaccaagttacatgccatgccattttaagttccaactcacagcatgatctgctcatatatggtagctttagtgtgagtgttgctctcttggttgatagcgtccaattcaaggtttaggcttgtcctgggacctttaattagacatatgcagaataccagctacattgcaagctttgaagcatgggctgctgaaacttgtttataatatcatatagatcgggaatcttccaagcatacccgaatgggccaaatcccaatggacttttcccatcaaatttcactggcagtacacattaggctgggtatttactcacatggctttgcatgccatctttctccttcttgttattgaaattccaccatgacagggaaagacttctcaatctagttttattgttgtttgacgctagatacgcatacagtggatttattatgcacacgacaattgacatgatttggtttggtgttataatttgaaactacaaatatgacgtgggtaaaaattacttatgatttttcaggttattaaaa

SEQ ID NO: 5929 - DNA, 2563 bp, Manihot esculenta
  Intron number 1 from transcript cassava4.1_015763m (locus cassava4.1_015763m.g) derived from phytozome v7.0 (chr-ID scaffold06631; pos 759865 to 762427 reverse strand)
cccagcggcggaagcttgcacagtatcaacaaaaggttatactctttcactttaatttttggatttctttttaaggattaattaggtttttcaatttgttggtttttcgaatgttgaattttttggtttatttgtttattatttgcttggttgttgtctttggagaaattggagttaattgaatagaaagaggaatgaaatgtgatcatttgtggtaaacctttcttatgctctttttgtttattttgcatgttcttcagttctattcagagtatagagaggttaagatgattaaagcagaggaattttggagttttgggcgactttatcaactggagatgtggatttagagagtttcttcttttttgttttttttctcaggattactaacctgtctagtgaggaatatgtagatgtggaagcttacaagattatcataattccagtcaattatgggaattctgagctatgaaatctttggtaggggctgaggattaatgtattataggaaatattttcttattactactggcctattatgatgatgaaaaaaaggagagggaagcagaagctttgggagaaaaatgcttggtaattcccctcaagccaattgggtatatatactacttataagaatacatactaggtaagactataaattaattcctaattatagtataatcatattccaatcatatcacataatcatatccctaattatgtgcacaatcacgacaaatctaggccacagaaagtatttcaacacactgcttataagagttctgcaaggtagagatcagtcttacctagttcatagttccctttggttcatgtgacgggtatgggtacaagatacaattctttcccacgaatgggatatgtagggggtaggcttatttggaaccctatttggggtcgcagtacagtagattacattaattaggattgttagtttactgtatatatcagaaattagttgagcaatagaatgcaaagtatttgtctttaaaaaaagagcagaatacaacttacatggaaaaactttaagtaaacagaaacctatgttaattaaataaacttggctgaatatatatttgcacccctatactaattgagatcacctattgaacacctgaaccaaaaattgtaacctattcaacacttgaaattataaaaataaaaataaaaaaattaaatacaaattagtcatgttattgataatttatcagagaaaagtaaaaattgattatgcatattgtttttgctaactatactattaatttttataaattgatagtgttagacaagtatactttattgttttgtgaaatttagagtctagtcaataaaattttgagtacagttaacaataagatgaactatttttgactttttttttcttttataaatcatcaatgatatggttagtttgtaattgttacaattttttgtaagtttaggggttcaataagttataattttagttcaggtgtttaataaactaatatgaaatagtacaggggtataagtatatatttggcgaaataaactttgtagataaacatatagagttggggtaactataatccataaatcattaactaaatttcctatttaaataaaataagcgtattgcagagataaaaatttggactggtaatttctcatgttttggtacacaaatgtaccccatgttctggattgtgcattctggaataccatttggagggggttcaacctattaggtaacattggtagagacaaaataaaaggtagatcaaagagtatgcttgtctatatgagtaatttttatatgagtggcatgaggattcttgcatatcaaacttgccttgtctatgcttccattcactttgggttttccttgacccagcttgtgctccagacagagtttgaggggggaaaaccctaatttggattttacagcatttcttgattccattgtcgaaacttgaaagcttcaaagaagtttgaagtctcaacaatagctacattgcacctttcatatgtcttggtggtttggatttaaatactagcaaattgagtcgatttccttgacagaaattgaagaagaatatagtgaccttcctcatcttgctaatttcaaaaggcattctcatatacctaaatgtccctgtggatgacaatcttgtttttcttcaacttgtaaattctataacctttagagtaatttctgtagaaagctccattccaaccccttcccaaaaattatctccaatgaaatacatttagatctggtgtctggaagaagataagtcatgatgaaaaggttttctggcataaagctatgtcacatgctacagatggaaaaatattcggtaaagtggcaaaatcttgatgattcaaggtttgcatgaatgcttgctttcaagatctaaacaagtcatgatattttattataacagttggtcctcaaggattcattctttctaattattgcaatatgtaacatatcatgctaatgcttctatcttctctactttttccagcttgaagaagttattgaagcagaaaagcaagctgc

SEQ ID NO: 5930 - DNA, 1843 bp, Manihot esculenta
  Intron number 7 from transcript cassava4.1_008235m (locus cassava4.1_008235m.g) derived from phytozome v7.0 (chr-ID scaffold06512; pos 694927 to 696769 reverse strand)
ttgttgaagcaaagaaggctggagaggatttagtggtataccttactttcttttcttgacattattctttttaggctaaactgtaaactctctcaaccatttgacaaaatgtgcacttgaattttgtcttttttaaatagcgatttttttggtccttgacagttcaaatccactacccatttcattttctcaattatgcttcaatttctcattttaaaattgttgaatccccacatcggttgtggaaaggggtaatgtaccccttgtatgggcaataggcaatcctcctcctagagctagcttttggggtgagtcaggcctgacccaaatttaacatggtatcagagcctccccatccgatgttggacctcccataaatatgtccatgcaccagtaaaattctgagcgtgaggggtgtgttgaatcccacatcggttgtggaaaggggcaatgtgccccttatatgggcaataggcaatcctcctcctagagctagcttttggggtgagttagggctgacccaaatttaataaaaatgaaataacgttttaatacttgagttctcatacattatatataagtttacatatgtcattcactttagtctgaactgaagtggattataagagtaacctacataaaacatagggatcaaaaggttgtttcatttaaatgttcatgggctagaaggttattccatctaagaaatcagggacagatatttacatttttagcagaagaattgaagtgtaagaaatttgaacaatggtggagtgcttgccttatgatacagcaggaaaaggggttcacaccttcacaatttcctttccttttgaaaacttgctatgtaccaaaaaaaaattgtgtaaaagatttgaaaagttggagcgtagaatacactctcagaaaaaagactacctaagtgtataactgaatattttggcaagtaacagggttttttttttataaatcaacctattctttaaaaagtgactaagagcattactttggagcaccttcaccaatcagcttcctatttattgctcatcagcaatgacccatcaagggcttggttctagtttcttgcatattgtttcttaggtagaagttgagcattgtgccactcttggtgctggggttgggtaaattaatctccgagttgcaatgatagtttgcatatggcattatatcatatattattggtgtgtgccacttgagaaataaattactgattagatcatcagtattgggcaattaattgatcatgcagtgaattaagtgattcttgctatagtctggtgcattcgttgcatcattctttaaatgtggtctttacacctgtttagctgctgtaaaaagtgatgatttccaacttatttccatcttggcatcaaatatatcatgtatgttccaatgctcaaaatggattaatcgattctataatcttcagaatatttaatctactaaagatattttcttggattaaattatttgattgccatggcaatggctaaataataactgcatgttgataggatataatcaattaaaaacttaaatagaacagtggaatattttttagattatattacattcattttcgttataccaaaaatgcactaaaggatgaggtggaaattagggaataggataggtttgtgaattactagtttctatctgcgctgcttgtaatttctagtataaataggattatatcatctttctcatttcctcttttaacatcacaatctatttattggtgaataatgatgccatctttctttaattattgaacatgtttctattgtcaaattgaatcaacaattctatttgcaggaagctt

SEQ ID NO: 5931 - DNA, 1221 bp, Manihot esculenta
  Intron number 12 from transcript cassava4.1_003311m (locus cassava4.1_003311m.g) derived from phytozome v7.0 (chr-ID scaffold02431; pos 389342 to 390562 reverse strand)
acagtggcggtaagagtagtctgactctatccattgatcaggatgatgaatgggaccccaatgactagaaacattctttgcaaatgatacgacttaattgtgaagttggtttttgctttttggcaatatcttcttcaatcagaaattgtggggaagagatggcattcgaagatcattttcaaatcaaagctccaacttcgattttttgagggaaataaattcagatttattctttattagtagattgaggactcgttcagttacagaaaaagcaaaaacatttgtataccttcacacaacagactttgtgaacactacagcagcgagaatgatcgatgtggtccagaccagttgattgcagcccatattcaaaggcatcttacatcatcgaagatgtttcatagtggggaagttgcaatggatgttgtattgtggcagcttgcagtcagttccacttgatctttttgagtactgatttgttctgtttcttgccatgaatgtaaagttgttctaaaggaaatcaattaatcatatagtttttcattatattatattaattgtagtacttttccatcgttgattgttttattcagattttttcatatgcaagagttgtaatattgattttggcaaattcaattggttgaacaaaatgcagttggaatatgatgaaaaaaagatgagacccacttcatccgagatcagtaacctgttgttttttcagaattatagtaggttttatttgtcaaattggatgtgtacccgaactttgtcattctagttttgattttatgcatcattgacggcctgcttaaatctaagacttttgtaagaattctccataattgatttattatttgtcaactcttttgttggaatggaatgataaaattctttgtaacttccaaaaaaaacattattttaaaagaaatataactcatgcataatcatttgattttttttttctatataaaataaattgttacaaatttttttttaccaagaagagtgagcaaatccagaagtgcataacggcgtatgttgcttggacagcagggctgctctgagaacagctctcccatttcattaatggccattctttgttctggtattagaatggcgcagtagttaattcaacaaaccaactgttgtattgccctcaatttatatttctatatgctgtcagccactcagcaggcaaattccatctccaaaattcca

SEQ ID NO: 5932 - DNA, 3431 bp, Manihot esculenta
  Intron number 4 from transcript cassava4.1_004228m (locus cassava4.1_004228m.g) derived from phytozome v7.0 (chr-ID scaffold02572; pos 408270 to 411700 reverse strand)
aattttacctgtctcggctagtctggactctgttggtatgtgcagatggtagtttgtaagtttaacatattctgatgtgtggtaccatataactgtacaaatgaaagctaagaatgatgtttctggttcttgttccgtttttgtttgaggtcaagagatagatgactgtattgactgacctattctttgttatggtaacacataatattaattgattttagattgttgtgaaaatcttaacttttgtccttttgaagaagaaagctaaattgctttctaatttgcttcaccttcttggctatatgctcttgcctcttataatgcattgataaaagtacagcatagatctatcttgagcattattttggattcaggtgggaagtaggaacttcacattttacctaaagtcttctaatttaatttgatctacccactatacttgggagtcgggttgatatttgacaagccaaattctcctaggttcttctggatttaaactttttgaatcctaggacaaataagggtctgacattttttaaggagaaaaataattgtcttctttaaccaaatccttaaaggcatatatgaaatgacactttagttgtaggtattcatatttggatttcttaccttcaaacaaaattttaattgacatagtcatgaccttaaatctactttcaatgagtctaaccaattgaagaaaatctatggccttgtttagtgaaaacatacttatttattgggaaattattcagtgggagtacaatatttagtgtttgattcactttcctttttctggaagtgcaatactattttctttgtttcacttacctactttgtatgatgtatattgcaaaatacagtaaaatattttccatctttatatcaatttaggaaagaattcaaatattacttttgtccacatgggaacttgaacttaataacccctttcctttctactgtgaagtcaagtggtcaaagggaagttctacttctccttgattttgttatccttggcaaaccaaagacaatagttttgcctacttctcatgaggttttgacatcctaagcacacttccaatgaataaacaagttcaatatgcaataagcacttggagagttaagagtagcataaatacaagtcatcttcattctaaattctcacccatccaaacatacctttagattaattttatctattatactcttttgttcgaaacaatcattttgtcattttgtaactcaagctgaattgcacctatagtggatatggctatgagactatggaggcataaattgctttgacatgttagtgtacgcaaataaacttctatggattagtttattggggaccttaggagcagcctcagttttgaaagttatacagtttatagaaatccatgaattggttcgtagattatagaatccatgaattgttctgtgtcgtgtgtaatatcttccccaagattgcagaacatatcattcaatatagggtttgggaataggaaaagtacattttgtcttcccttgagcttatttgatttaagcaatctcatcccctgaactatttgagaagtctgttacaagttacaaccctaaatatgtaaactttcataacaattaagcacaattttaccctatcaacaatgtgcatgacataaagctattttctcataccttcaaaatatacatccatttcttatgattccttagtaacctaccatagcaaagaatggaagaaaatgcaaccgagcctaacaaccatcttctttgccttttccattccatggaaacaatgctagcaaccatcttccctatcaatacccaagcctcaatgatggaactggcaccaacccaacaaacatagcaagttagtgcggaggaggtgggtgctactgctgatggctactttcaaattgcaagaattaggggttaggtttttcatttggcctcttttaaatttcttctactggcaacgtttgctcattatagaaaagaactattggcaaaaaatttctaggccaaatcttggagctcagaacacccgttaaagaaggaattgggtgagtgccttagtaggtactgatgggtagagcaagctcatgacaaccaccgtatgcttggaagctacactagaagcaaccctggaagggctatggaattgctagttacaaaggttgtagatgttggtcttcctcttccttttctaatattctctgacaataaattcaaaagcaaagaataatgtgattttgtaaatgggtttaaaatgtttgatgtgatttcttttaaaatgtgcatctctttaatagaagtgatggttgtggtgaggagaagagggggagagtggttagtcttgggctacaggtcattttgaacaatcatgaagaaaggggaacttggaattgttctttccttgacctattgcacctagttgtcatctccaaaaggagctctaactttgcaagcttaatgagggagctactagcttttgcaaaagaaaggaattatgatctgaaaatttgcatatctagtacaaactacaggcggtctggggttggcttaatctaatgtaatccttggattgataagaataagttagtgataaactcttgtaattagaaaacccattatcttgtgtaagatcttccccaatcatgttgtttcctgttctaacaagccatcctacttttgctactttgtccaaatggtcgttcatcctcacattttgttctaaaacatccttgtactatgccatctaacatcttttcacttggttcacctcccttcaacttggtcgattgattccctacctaggtttgtattagacattcttccacttggtcatccaaacttcttttactcactcgaccttcgttcaacctggtctattagtctcccttgctaggtctgtatcagataggagaaacagaaagagtgaggggacagagaggggtaggagagaggagaccatggagaaaggagaatggaggctacaaaagacatttccaaataggagtgaattttctctagagtttcttggagaagattgatagagaggagagaggaaatgtagagtgatgatatggatggctgagattgcacacttatttggaaaagagcataattgtgtttagttctaatgaaatttgggtgttcagggtgtcataggttcctcgtagtttaggttaaatcgaaaaagttcgggggtaaaaggatgtatttggtcatttggaattagaacatgtactaattcataatatatttcaactcaagtggtgttaaatttattgttttcaaatgggtggtgttatttttgtttgtattgtcccttttaaacacgtcaatttggatagttgagaattctggaactattctacactgtttcccttagcttatagtgatggctatctgtaataatttttttcagg

SEQ ID NO: 5933 - DNA, 1015 bp, Manihot esculenta
  Intron number 1 from transcript cassava4.1_008308m (locus cassava4.1_008308m.g) derived from phytozome v7.0 (chr-ID scaffold03834; pos 263146 to 264160 reverse strand)
attccaatcaagtcctttctcttcttatccaatccgtaagtccctgcccttcgttattattcacttctcttattttatttttttttcttcttattattcttctttctttcttttttttttttaatttttttttctcatgctttgtctctttctctctttctttctctcttcgtttcctatcctttatgtgtgactaatgaactgtaaacagatctaattcaatgcttttctgttctcttaagaaatgtttacttgctagatatttgaacttaaaaagagaaattttcctgttgcgtttcatttgcttttgagatctgggcgcttctgtacagaagtagtttaatcctgaattctcgttttttttttggagggaccttttttccaatttgtttttttggggggagggatcttgttcttgtttatcgggaatggtctaccatttccaaattgaaaattcgatttggaagtttggtttcttacgcttttattggatcgttcattcattggattcagatcgcttaacgtttctaattttcagctaaaagaaagcataggttcattctatttaagtgttcttcatttcgggtttctgggttcaatttctatcattgaaaccaaagaccggcatataacatttctacattttcatttctgtttctgcaaagaaaaaaaaaaatctttgctttaccctcttgaatttatatagcgaaaacttcataatttcttctttggctttcctgggtttcatttggtccacaaaatcggtcataaatacacacagaattttggatacatttttttttggttctgaaagagagcttagcaatcaatcctctttgaatacaaatctcttttacttctatatgaacacgtctgattctgtatattgactgctgcttttggggtcttcaggtgcttggatttctcgattttgattattgttttgtaaatgcaacggaaggattggggctgttgagtttgattttattgcttcaactggccaaattacagagac

SEQ ID NO: 5934 - DNA, 1457 bp, Manihot esculenta
  Intron number 7 from transcript cassava4.1_004879m (locus cassava4.1_004879m.g) derived from phytozome v7.0 (chr-ID scaffold00341; pos 607241 to 608697 reverse strand)
aactgaagagaaaaaagtgagaacagcaagttcaggtgataagaagtcttagatgattgcttaattgctgttgttcatatttaaactagttgcattgcccactccttgcatggactatttatagatcttattctgtattactatttttttttatctttataaaatttgaattctatgttaatgaatatgtccaagaatatatattttaaaattaaaaatattataattttttttagttacaaaatattttagatcaattcagagtagaggagataaattaaaatttaaaggtttccatcttaaatggcctaagagtaataaatcattgttattcttctggtttcatttatatagaacacttccattagatgctaactctgtgcaactctgtattatctaaatagaaaattttatttggtagaattaatgttagattttcatttaaattatataaatacgatttaaagttatataggcaataaaagtatttcttaatcaaaatttttaagtaactactatcatactccttaactagtctttaggatgaaaaaacatcatatttatgaatccaatttttgtcttatgaataaactgtatgttgatcaggctatatagcatgagaagagaattttttataaaaaagaaatgcttatttgattgtatctaatgcattaaaaaacaaacttgtagaaaaataattttttggcaaatggaaaccaaattgccaaatgttaaaatattcttaagccaattggcagtttataattaatctctattaaacacattatattgaattcttgttaaacaaatgtaaacttatggtggatttttatatggtcttctcctttcataaatatttgtgtgtgtgtgaatatgactggatttatttccatatatatgggtatgacaaaacaaatatccagtaagattgttggaagaattgacgaatatttgcctagagatgaataaaaaagaattgcattgtagtacgatgagttgacttcatgtattggtacataagatgctggtttctatgttgattaaatgatttggtcagtgctgaggcccaaattaggaatcctcttaatcttaattcatcgtattccatctagccagagcattactttactctaaacaatatgaggttcagattgacaaaaaaacatttaatcggtgttgtagctttctaactggaagatgtctttctcagattatctgataattatctattattagaagtggaggatgttttgttagttgtgactcacctggcagtgtattttcttcatcttagtttatgtatatatattgttacagattgttttagtgttttgtttaaagaaaaagaagaagaaatcctcttcactgcccctttttatgcaactccccagctatttgcctgtgtcaatgttgataataacaaacttttgcagttccattgtcggtgaattccattt

SEQ ID NO: 5935 - DNA, 1037 bp, Manihot esculenta
  Intron number 4 from transcript cassava4.1_019545m (locus cassava4.1_019153m.g) derived from phytozome v7.0 (chr-ID scaffold06582; pos 179636 to 180672 reverse strand)
tagtcagattttatccacagaagcccgagaaagacgtcagttcacatctgaaattacttttataaattctatatgtagacatgttttttgtgttagccactttttagcagatgcattcttgttaatttgttgctttatacttgcattcatgaaaagcatattacttgcttgatttttacttcagttaatggattttatagtggatgtaagttggtttatttttgtgctgtattctttgtttgtgaagcaataatgttgcatgataacattgagcattacgtctcattgaaacctatgtggttaagaaatattgtacgtcattgaattgctacatagagtaactagattctagagtgataactaaaatgcatttgatgaacttcttcactaggaagaactttatgatacccttttcttcctcttcaaactttcatcatgtgccattgtggttttgtcagtttgatcttcatctaatcctgtatcccatttgtgactgcttaatgaattccagcagtctgctgatgttggcctcttttatttatactaagttttgtttttgatcatttactcttcttcctccacctctctttgtatgagatttggtgttgaactgtgatgaatctgggaatattccctaatcaagtgtggtcgatgggtgttgacatgctgattagatttgtctgaaccacttttggatgaatgattctgaattggtgctaagttaaacaatcagatgtgcactaacttttgggaagtcagacataagaagttgaaaggcaatgcatatctaggcactgaagtatctctttgaattttgtagcagaggttcaatatttttgtgagtgcagaagaatagctcagtttttattttgtcctttcctttgtcacataaatattggaaccatttctataattaactctgttttgtttttttgcattttcttttgtcctgtaaattattggaacaatcttgtttcctatgcaatgatacaatctctgcagttgcccgcattgctttagttaaacctgaaaaggca

SEQ ID NO: 5936 - DNA, 2495 bp, Manihot esculenta
  Intron number 3 from transcript cassava4.1_013983m (locus cassava4.1_013983m.g) derived from phytozome v7.0 (chr-ID scaffold03175; pos 367827 to 370321)
ttctttcagttgaagccatattatacagacgccaggtaacttacccttgacttgaatttgacatagttgtagttcaccagtgtcttggaaacaaggtctactcacttatgtggcaaacttgtagagcgcaagccataatcagtataaaacatgttggataaaagtcatctgctttaattatggttgttatgttctttctgcaatgggctttaatgcaggaaatagcggaagctttccaatggaattagtaatgttggaaaactaattatgtaggaagtgtgaatataggttgtatgatactgaagacttcaaattcttttgcacttacttgaattggaagcagggttttaaatattggaaatagtgtaaccaaattggattgtattagtctgaaatgaactggatattcgctgattctgtgaattttttttttttttaaaagcttagaagagatgattttaaataatggaatcggaaatattattattgaatcagtctgaaatggcttgtatttagaactttaattggcaacggattaagaagtgtgttttgaattgtgtgattcctttgtgttcctttgtggaaccactcttcaagtgcaataacatatagtttctttcaaactgaaaaacaccactttttctgggatacttccaaacagatggttttatttgatctttctagtctacaaatctggattaatatggattgaccgtgtggttgtcgaaaccggtcaaaaataacatttttggttatcaacaattttacaactgtagatagtggcaaaaggatcgaatccacggggaattgatatttacctattttccttatcaagaccaagcaaacaaactgaaagtaaataaattgaaagtaaaataaaaaaaaggggggttttgaaattgattgagttaaactaatactgaaagcaataaaataaagcaaataattaaagtaaaggaattcaaatatgataaaagttctagatgaagaattggatccacttcagttgttgggattgattattcaaatttaggtttttttgtttgattcaataaattagttatggagatggaagacgcttttcaccaccatatttttcattaagcataaattagttagggaacatcctctaactaacctctaatcaacaagttgccaaggaacgtccttgggtctttggcatctaacaactgtcaattgcattaagaaatagagacctaattctagctacccaaaggtatagtgatatcgctagatcatgcaatttccttagtttttacaccaagtgttcttgtgtttgaataatccaagcaattacggactcaaaactatccaaactaacaaattattactttgcaatcaagaatcaacgtagatctaaataacaaagcaacaatggaattaagcatgaaattgcataaatactaaaaaacaaaagataaacaatgtgtgttcagaacttccaatccataaaacaactaaagtttcacctaatcttcaactagaaaaaaaaaagtttcagccactcatggctgaaacaaaacagaaaataaaagaaaggaagaaggagaaccaattagcggcttgcttggagaaggagaggcgttcggccacttgtggaagagagatggggcgtgcggcttaagatggatttataggctgaatgttgccctaagtttccttgtgaggttgagccttcttttgaatttcaaattttgaatcttgactacttgggaggcaagtatgtcttcttgagatttggcttcctaaacaagctaaattttgaattttgaattttgaatgtgtatcttcttgagatttggcttcttgaataaggggaaagacttcttgaagatttgaaatttgaatttcaaattattttgttgaatgtactttccttatttagcactttccttatttatctccacttcagctgtaacttgacttgggcaacaagtttgttctcctttatccctttttaggcggttttaagaatattttctccaaattacccttttataccattttctacaaaatataatcaaaattacaaaattaagcagaaaaagtgtaaattaacattaataacaacataataaaatggtctaaatttggactgatcatggatcaattcatatggcctcgtgtaagagtacatgtatcataaattatgaactctatgaaataatgttgcaaagatgtgttcataagctactgaaatctgttgtatggttttccttaccgaatagataatttggttttgcacttgccgttaaatcttcttatatgtagtagacaattctaaacaatatgtcataaaaagttaaagcatttctagttgagacgatgaaccaaccattttcagtttttaattaattagtctcatatgttgatgtgtacgctacataattaataataagttggtgatgttcatgacttctctttttactcttcaatggagcagtagccatctccccccatcttcgcaggagtac

SEQ ID NO: 5937 - DNA, 1258 bp, Manihot esculenta
  Intron number 2 from transcript cassava4.1_018288m (locus cassava4.1_018288m.g) derived from phytozome v7.0 (chr-ID scaffold02196; pos 269824 to 271081 reverse strand)
acttcgagagattccaatcacacgataccgatcaagtaagaatgtctccctgtgtgttaggcaacagcctaagagaattttgtcatatatttttttcttaaaatttctttttattccctcattcttcctttgtgatattccttttgaggaatacagtttattccagttgttgaggaagttactagccttgatctatacttttgttttatgtgatcttttgttgcccaagcaatcaacataatatgccatgtgtcatgcagctgatgtttgtgttgtggcctcagggctgtaagtaaattgagctattttaagttggttaggtgcatttgcatgataagactcattttaagtattatttagtgagtgagctgagtgcaagcctcctttttaggttgtcaaattggaataagacatggttcaagtgttcacaggggcatgctgcagaaagtatttaatcttcatttttactaatgtctctttaatctttttggcagtgcgtgctgtttattgtgttcttttaaaaattattttcatcttttttcttgctttagagtcttatgtatattggaagaatttcttgacaatgttttaatttggatattgttgctaactttcatggaaatcaagcaatgcatttgtttatagttttttgaaatttcatttcaatcttttattctgatttcttggttctttaactgtgatgtatttttttgttgaaggtgataataactgtttatcacattttagatggtttgcaaagttatgcttcaggataaagttttcattgtgtacattctgttgctttgtagtttacttacttgggtctgagtgagtggaatgttgttcattcttgaagtttgtattttcttattcatgtagatataaatatgttgcacatgatatgataatttcattgcttctttttttttaataaaaaaaggaaaaacttttaacaattctactctagtgatctatgattcttttttttctttttttttaaaaaaatttgtttattgggagggctcattgggctttgggatacatgttgtgggattgtcttccctcactcaagccattttattaaaagctactaggatgacaaaccatttgaaagcgtttgataatagaatcttaattctctggagcacttaggcttgaggggtggacaatgaactactaggccaatggtcaattttatgagtttcagtttcttttataaaaggaacgatgtttctaatcatagaatatttccatgcag

SEQ ID NO: 5938 - DNA, 530 bp, Manihot esculenta
  Intron number 1 from transcript cassava4.1_017765m (locus cassava4.1_017765m.g) derived from phytozome v7.0 (chr-ID scaffold03104; pos 93640 to 94169 reverse strand)
gaagtatgtgtttttaagtttttgacaagatagtttcccattttgaatatctcactagtgctcccctgattaatctgcactggtgattcttctccgttggatgtatattttactacatggatgtggagaatttcagatctagttattattggttaatgtattagtagaataaagacaatgcactactattttccctttctattaaatcctcctctcctttctttcctctgctttttttccttggtattgtagctcaccctctctcagaaaatattccaatgaattgcatcatttctggatcttatatttgagtggtacatcaaaatatttctttggattctgtgtattggagtttgcaaacagaattcttgttatctaaatcatattgactagagctattatttattattgtttggattaacactatacctctctctattattttttttaaatctctaaaatatttaatgtaaatgtccttaacttggtccttagggcagctggaaccccaaaggttaaggtaggggttg

SEQ ID NO: 5939 - DNA, 1098 bp, Manihot esculenta
  Intron number 6 from transcript cassava4.1_003090m (locus cassava4.1_003090m.g) derived from phytozome v7.0 (chr-ID scaffold05421; pos 102425 to 103522)
cccttagacacatttaaggtaatttatttttttcctttatcattgcaagtcacacaagaaatttacctttcatgagctattatctcctatccctattttgatctaaactccttacctcaatatttgtccttgtgaattactattatattgtgttatgcaagaggcaaattaagatttacattcgaaggtcattttttttaactatatgttctatatcaaatcaatttaaatggatgttataatgtagacatggatataaaatgattttgctgtactcggttttttgagataggacatcttcagaagatgccaaagattatttgaatgcagaacaggagaaattagcaattaagttctattagccttttgtcccttgtgcccacaacctaccaaccaatgaaaagaaattatagattacttttttcaagaattcattacctaatcctcattagtacaattaaaatattaaagaataattaagggaatgctcacggaggatttgactgaagatataacttaagtcggtcattaactattcgaatgttcactgttctaaccactattaatatttctagaagtagaatcttatgatcttggatttgagaaagttacaacatcataaaaagaaaagacaaaatacaggaggaatatgtgcacagaagaaaaacatgagatgggtctaggctgcagaatctcatgtcggtagatttagtggtggaattaaggttccaccagtcattggaaattttccctctttagaactgctcttccactttacagaaaatgtttctatttttgaaaataatcaaatccttctctgaaaaaagagtaatgttttttagaatgtatctaaactctctgaaaatgtacctaattttatgaatgttaggaaatggaatttccaaatatgggcaaataagatttgaactttaactccaggtttgactcagatttccaatgtctgatgacttatagaggctattggagataaaactatgaatctgctactccttcatggataatttcttttcttgtcatgaagataaacctagcattattttctagttatttaagcaattttcatcttgtcacaggggc

SEQ ID NO: 5940 - DNA, 998 bp, Manihot esculenta
  Intron number 1 from transcript cassava4.1_013064m (locus cassava4.1_013064m.g) derived from phytozome v7.0 (chr-ID scaffold00935; pos 97482 to 98479)
cgtcgtcagtacttttcagtgaggagtgaagtgaggtgagctttctaattaaaacttgaaatttattcgtcgactatacttttaatttcgtagaatgctgcgaagatgattgaaacctttgattgtgattctttctctgttgcttgaatatctgctagaattatgctttccttaatggattttctgactagcgttttgttgattggcgctgcgtcgtcctaggccaataagttaataatgctgttacttgttcatagtcgttgttgtctgcttcagtttgatggatctacttttacctagttcctatctagtaccaaaatcaccatcatattatcatgtcagacgttttggtttgttttatacctgtatgtaggagagatttgcctctggtatctatttgtattatttatttctgtaaaatacatgatttatttaatgaacttggagttatagtgcaagtataatttagaaacgctatgtatgttagttcgaatttattcatgatttatttgatttcctagacttggatacacacgcatacacactagttcttctgatcaagtacccaactctttcccctttattagaatttccatcaaaaaaaggagaaaacaaatggatttgataaagagatttgtgtagatttaaggtagtatgcaggtaacaaggattcagatttggtgtggacatgggtagcaaggtgtgaataactgattattggtaatgggtacagtttgcgtggatgttaatggcttgggtgcatatagaaattttggaggtaacctacctgcttttcattcctttgacctctgcacctcttgggtataaagcttgctgcattttcaagcagcacaaataaaggcagtgctttaacatatatgaaatagctttcattgaagctatagtctatttgttttatgatagtataacttgttcttttgacttaaaatgtgtaagctaaggtcttctgtatttctcctttgtttaatatagttcag

SEQ ID NO: 5941 - DNA, 1852 bp, Manihot esculenta
  Intron number 2 from transcript cassava4.1_012401m (locus cassava4.1_012401m.g) derived from phytozome v7.0 (chr-ID scaffold12865; pos 406455 to 408306)
tactggcgaagcacttcacttcatattacaagcaggtaaatactgaagaaattgaatattttttaacatatgcaaaaaaggtatgatgagtttatgctatgttattggactaaaaaatacttaaggtacaaatgaaccagaaagcttgattttgacatagtaataataatttactcagaatagcttgactaagacatttaactgcaccaagctatttcagttccatgaatattggccaaaaccaaattatgatattttgagtccaaaactattacataaaaacgtatgttgtgttcaaatcagctttttagatcaattaatacaggccaaactttatcagctggctggtagaactttcttttcacttttacttgaaaagaacatgggtcaatctataccagatgcctaacaaacttccaaaaatattcatgttggacttggagtcctagactgccagaatattaataagtgacaatgagagacactagttctgcttttctctatttttctcagtgtcttccgccttttcctaaaatctcgtgcttccaagctgttgctctttatgacttcatctatctagaactttgaaagaatttattctattgccacaaatctttccccgctttcccctttggccccaagcacactgcgtgccttcttgtaactgtcacaaactactacatctctctgaaatcatactggtctcttttagataccaactctggtgttcataattgatgccacttcccttatggccaaattatttcccacttattcttattatagtttatatttggtatctggttctctcaacagactgaaaggttctttttttttcttttttcattttttgttttgttttgtagaggcatccaactcaacaaatatttgatagtaagtttgcagtttcacactggagaaagcactccgccaccccatgttacttcaccttgcatatatataacaaatacttacatattcttgcagaacattgcaaatatagcaaccatgcaatactaaattgaccaagctccaatgtggttagcatgattttcattgagttgtctatttttggctttctaatgtttcattttccatgaacctctgacctgagaattgaattactctatttgatgcttcgaactatcaaatcattatcaccaaacctaccaacccttcgtggcactaaaattatctcaaacctaaccttaaaatccaactgaactctttgactcttggaatcagcacgagacttaccttgaaaaaacaaaattatgccagagtaatagtgaaacacttgatcccactagaggacatggaaatttgtcatgggtccatcctgtcatgtttgactgcacggcttgggtttctgatcagccctacattgacttatagaaacttacatgtacgttctgcatttggaattggtgcaactctggaaaagagagtgctttaattaaatgcattttaaggcctttgaatgaagcttggtcctggtgtagttaactttaagtgcatggtcaagcagtaggctccttcatcattttctgagatttaggatccaatgcacttgatattgttggagcttaggaattctcgaacagaaattctaatcatcgatgaagagcttgtcttcatttcattaatctagtgattatggttgaagagtttctttatggatgaagctgaagttacaatgacttgattgatttgcttcaaaatccctagttttaaattgtattgagtttcgccttttgtccttctggcatttacccaataagatttttgtataattaaaaatgtttagtcatcaattaatttataccttatttttaaaaatttttgtaggtaa

SEQ ID NO: 5942 - DNA, 829 bp, Manihot esculenta
  Intron number 5 from transcript cassava4.1_004022m (locus cassava4.1_004022m.g) derived from phytozome v7.0 (chr-ID scaffold09876; pos 671319 to 672147 reverse strand)
tgggatactgcattaaagaacttcataagcgccaggtcattcttttctccacatgtaatccttatcatgctttcagtagttgaatacatgcaccttgtatcccattaatgtgtttggaaacttgttgtttactactgtataattgaatggaattagttgtatttaccctaattctgatatttagtttccttttaagtggtagacttcaatttgcggggatagaaaagagtgattatgcaaattatgcaaagaaaagggaaaaggtagaagaagatataatttcttagcatttgatctacgggtcaagtttggttcaacagcaaaagcagtaacaccctttgaacacttctatctcctaattcctaaattgaggatatatgaggaaccatatatttacttcactttccatttatttaagcaacagatttcaccttattagaatttattcttcatatgtgaattcttattataaatcaagtaagttaaattcatgcatgcttgttgcggacagagtgattgtgtttttcctttgtattttcatttgtcctattgtgattattcactttaaataatgaacattatgtctgtatcatagacaatgatcctattttctgattaagttaccataatacaaggaagaatgatgttggacctgattttaacataagtagtaatgttgatttttatggcatttagttgggacctctggattgcttctttcacttccagtatggcttacggcccttcaacagtggcaagctacagttgctcttgtttaattaaatattattgttgactaaattgattaatgttttatacagagctgtgt

SEQ ID NO: 5943 - DNA, 2650 bp, Manihot esculenta
  Intron number 1 from transcript cassava4.1_021141m (locus cassava4.1_021141m.g) derived from phytozome v7.0 (chr-ID scaffold11341; pos 708913 to 711562)
ttgataaagaggaagacttcattatccgttttcaggttcttttttgcaatcactatacttgttgattgacatggctacatattgtcttatatatctgctttgcgtatgtgggtttctgattttcgtacatatatttactggttaattcaatttattccaattttgatgtgagataactgtgggattgtaatgatattttcctctgacttaagtggaggcgtataccataatcattaacatgagtctagaaaaatcccagctcattgataagcttttgggtttttgtgccttcctagaatctttaacttcttcggataatcagggtataaagtattggacatgaatgcgaatttattggatgtttggaactaagacaagtagtgaaggaatcaagaatagcaaggcaagtggtatgcagaggattaggaagcatcgtctctagttctaaattcaataaggtgttttttttcttcttcctcttcttcttcttcttcttcttcttcttcttcttctctctctctctcccccagccataagacagtaagagtggaaaccgaagaggctttgcccatagcattacaagaggatgaatgaagttaggaatgctgttctggtttttgggtatctgctgaatcagagcaaatatacaaagcattgttttgaaaccaataattgtcaatttgtcatagatgctcaatggttatattgttggacaatcaaattcacaaggctggaatgagaatgttagttataatgcctggctagtttatttataaaaaagtgcttttatgggaaaaaatgattttaggcaattagattagatgattttgccatgttaatttggggaaataatacaccagatatgagaagcattgcattttgaattttctctgaggctgagcaaatcacaagtgataaagtgtgaaaggcatggcattgcaagaaaatatctggttgggattcgtagatataccaatagttgggaattatgagtttttactacttgttattctcaaaatggaatctctgaaatggaaatttcatatttcagcatgtctttgagattacctgcctcccaatatgtattcaaccaggttaaccgtcgatcatgttgcatgaactcctgcaaagatgcaaactttaggatacttatctagcttaataatggtcaagtagtggcccataaaatttccattcctgatgcttcaatttgcaaagccgctatggcctttttcaagttagccttttctagcatagcagtaacatgtattctcaaagttttccttagattttattgatgccaataggtctccaggcaaaataataaatccttaatcagaatatcctggacatctggcaaagctagttcaattttaggatcaatcattcaatgttatggagttttataataggaggttcttgtcttgccattgattattttgaaggcatggtttattcctcaaagaaacttctataccagggaccaagtatttggtgtttggtacatgaatatagatgctcctcggaaaattattagataatctcggaaattattagatacttcggtgaatcggaaattattagatactttggtgaatcacctcatcatgttgaggtggtacacgaaaccaatagtattcaaataagtaactaaaataatttaaattaaatttaacttccatataagcaggaatttttagtgtcagtattagtttagtgagtatttctaattctttttaattatttcattcgttccataatttttgtccatctttccttttctagttatcctaaaattattatccattttttttatactaaagtaacatataaattgactttataactttatttaattttatcttattttcaagaaatctctcaaaatctctcttagtatttagtaaaatttaatgtctttaagatgggtacaactgaaaagttattaacaaaaaatttgttttttcttaatacgtgtgaaaaagcaaagtggacaaaaattataggatggagggagtacttgttacgatgctattggcttggtggaccagcttagcatggtgaggtggtacatctggagtacccaataattcttcatgctcctttcactaatcttctttatatgctcatagaagcttctttcaattagtcaagtttgctgtactctattaattgcttggctagaaatattttgagcattaaatagtgagtgagaaattctgtgcacttatttttcatattacattcatattcagtacagcaagttgctattctgttaaggtatcttgactctttgttgtacagtatgactttgttatattgttttctccaaccctaatgtaaaaattctctatcaaaatggtgtgagcccttaggtgtttgttgagcatcctggtcagatcagatgcagttggaattagggttgtgaggcttgtaaagcaacttttgttctctaatttttacattgaattatattttaacatctgaacaaatgtctattgatcaaaccgttgcttgcttttttcttacgaaggaaaacaaaattcctaactgtaattttaacacaaattacctcaacttttttttttaaattttcatatttgcaattatatcaggaactgaaggaaagaattgagagtctaaaggaaca

SEQ ID NO: 5944 - DNA, 4211 bp, Manihot esculenta
  Intron number 1 from transcript cassava4.1_019142m (locus cassava4.1_019142m.g) derived from phytozome v7.0 (chr-ID scaffold06700; pos 48608 to 52818)
ttacctttctacttctcttgctagctatcttgacagtaagttctccccttttgtgacttgttacgttctttgtgctcctgggattgatatcttgtgctggatgtttctatgttaaaattttttaatgtaatttgtcacaggaattgatattgtttaggagttgctgttgtattaataaaataaaaatatcgcaaatttccaaatgtggtatgggttccttcaatttttgtaccatgttctttaagagacttcttctggcttgagcaacactgtgctgtgccgatgttgctgttattctataccgaaattaacggagtgaatgatttcattgggttggaagacatgctctcaaaggattaatttttattacatttatttatgctattttattcttttggagctattgtatggaataattgctcagttagaatatatctggtagtcattcatatgattgttgtgtactggcgttatattgataggtcatctactgaagatgtcaaagatcgacctgatcttttagtttattggctacatgctgtttttagctgataactaatgtgtttttttttaattaattagtcatgaatgtgctaaaattttttaactaaaacaaaaatgtaattgtgctactttgcagttcaaattttgatggttctaggatcaaaaactgatttgcaacatctgaaatgttgcttgataaagatcattcaaatcatgcgcttttggtttcctgttgtagaccaacataaaaggttcctaattagaagaattcatatttttgtgaacctaattagacttgattatagagattttattcttatcgtaaatatttctaacttaggttgattccttgtgtataaatactcaaaccttgtaaagataaattcaattcaatttggaatagaataaaaaatttctctcaaaactcttcacggtatcagagcattttccttattttggggttgaaattcaatttttcctctttagcgtttcctgattttagagttgaaatccttcatggcatcagaccctatctaggggccttttcacatcccaccgctggccccaagaggatcgtcataccgtctgcctagctctagctctgatgtaatgcgcgtgaggctcatgcgccgccatagcttctgcgtcttcttccacgcttcggtgtgtgagctttcgtccgacatcctttttcatcgccgcttctttccggcatatcgcgtctctaatcggcttctcctttgggtttttaaggtgctttaatagtaacttggtcgtttctatctttttgtattgttggcccttttttacctttaaaatgtcatataagaaaggcattaatggaggtgatgtatgtgtttgtgatactactccatggattattaattctggtgcaaatagacatatgatgggttcttctaaaagcttctttaattacctttcgtgtctacaaaagagtaagaatagttgatggctcttttttttctctctggaaccggatcgattgtttgcacttctaatattaagccatcctctgttctccatgttcctcgttttcctgttaatcttttatttgtcagtgctcttaccaaaactcttaactgtaaaatttagtttttgtgatgtttgtgatttgtcctaatttatcctgatttattttccaaggctcaacatagttctttaatttgtgatatttgtgagcatgctaagcatacaagaacctcttatccctccaataatagtaggagtatgatgccttttgtgaccacccattctgacatttggagacctactcaaactatctggtaatcgatgatttgttacttttattgattgctgcactcatatgatttgggtttatttgataaaggaaaagggtgatgtgttttcttgctttcaatcttttcacagaatggtttgtactcaatttgattttaaaaataaaagttttgagaattgataatggcacagagtatggacgcttttttacttacctggagtgcaatgagatacttcatcaaattagttgtccttatactagtgttcaaaatagtattgctgaaagaaaaaataggcatctgttggaagtagctctatttatccttttcaccatgaaccttccaaaaacctattggagagatgcagttttagccgcagtttatctcattaatagaatgccttaaagctcttgcgtttaaaagccctttagaggtgctacaagggaaaaatgctatactgttccaccaaaggtgctgtttggatgtacgtgttttgttcatattaggacagatgggaatcttgattcgagggctcttaaatgtgtatttgttcgttactctcctacacaaaaggattacaagtgttacctccctccatctcgaaaatactttgtcagtatggatatcacatttaaagagattgaaccttactcagtactactccatcacctgttcagggggagaacaatgagagagaagaggttattcctagtcttataactgtagagcgttttactttagaggagattattatacaggaggagataatgatgatcatgaaaagttaataattggacgtttggataaaccagatttaaggagatactcaagaagagacacaacagaagcagaaaaagtcattttgttgtctactcagtatcatgaatcttccttttccctatctgatgtttggtgagtcattctaaacattgagcccattgatgatctagataaatcaattactcaaaaaaaaaaaggagttagatcttgcacaaagtattttatttataactcccttatgattctttatctctatcgtatagtctttgtcttgtctattttctctgtatttattccatgagattggaagaaagctctcaaagattcaaattggaagggggcaatgattgaagtaatgaaagccttgtatggtaaccatactctatttatcaagaggaaaattactcttctcatagtctatgttgatgacacagtaatgacagatgattacactgacactgagagatgactcggctgaaaaagtttttggtttaggagttcaaaattaaaaattttggaaaagttcaatattttccgggaatgaggttgccaaatcaaagaagggaatttttatttcttagagaaaatatgttctagattttttggaataaactggtatgttaggctgcaaaccagctgaaactcccattgagagcgatcacaaactacaagcagggatttgtgaatttgtggatattggcatatcagaggttgataggcagactgatttatctttcgtatactcgaccaaacatagcatatgcagtcagcttagtcagtcgtttacctcctattctctaaatatggtcatctctacatacacgcattcacagttacagattggtttggatcccttgatgataagaggtcgactaatagttactgcacacttgttggaggaaactttgtcatttggagaagcaaaaagtaaagtgttgttgctcgatcaagtgctgaggcggagtatagagcgatgacacaaggtgtttgtggactcctatggttgcagagattattggaggaattgaaactgatggagaggaacaaacttctcttatgctgtgacaacaaagctgccattagtatggctcataattcggttcaacataaccaaacaaagcacatagagattactgattctttgttaaagagaagttaataaatggtgacctgagattaaattatatgacttccgatgaacagctagctaatgtgtttactaaagagtttcgcaataaggtccatgacactttgctaactaaggtgggcatgtgtgatatttatgcatcaacttgaggggagtgttgaccaacataaaaggtttctaattaggaggattcagatctttgggatcctaattaggtttgatattctttgtgtataaatattcaaatcttataaaaatcaattcaatttggaatagaataaaaaattcctcccaaaattctttacttttaaatggtctaatctccttcacaactgtttcacttatgagagtaaaatagatgacttttactctatagtttagcagatgatttttgcatgttattcagatacaatttattgaaacattgtaggtttctttgctctaacttgttcagtcttgttcttttatttttgcctcagagaagctactagtgcttttacgag

SEQ ID NO: 5945 - DNA, 755 bp, Manihot esculenta
  Intron number 4 from transcript cassava4.1_026291m (locus cassava4.1_026291m.g) derived from phytozome v7.0 (chr-ID scaffold12794; pos 136667 to 137421 reverse strand)
gaggaggtagttacatatacctcccataaatgtgtgattttaagttttaaggaagtttcgatttcacatctttgaacatgtttgatagaagactatgtttctttcctttatattgtggtattagtggtagatccaaagaaaaaagtttgtcctggtaggggggatgcatgtatatatatatatatattgtacaacaaaatatcattaatttaaatagataaatatttaaattgggttagggaatacacatatatattgataaaccaaaaaattataattatttgcttcaaacatgcttatttatttattaataatttttttttttgggggttgggggttgggggcaattcaatagaaatgaaaaatatacatgaaaattttatatggagcgcaggggctattagactaattgcatgaggcaattccttggaattaaagattttatataatttgggtaagtagagagtttcttgctatacgcaaaaagaaattgttgcgattttttatgatcatgttatatccatttgatataagttctgatctgaccatttgcaacaaaatagcttctctgtacatttttcatttattaatattgcagttttatttttcagaaaaaaaagaaaatgacttttgttcctggaaagttgaaggttctattgttgtttagatgttattaggtttttgtactgttgaacataacttttggtctgtgatacccagttgcgaagaattaaaaaagttggggaagacatacc

SEQ ID NO: 5946 - DNA, 4727 bp, Manihot esculenta; identical to SEQ ID NO: 5584
  Intron number 2 from transcript cassava4.1_014735m (locus cassava4.1_014123m.g) derived from phytozome v7.0 (chr-ID scaffold06582; pos 660643 to 665369 reverse strand)

SEQ ID NO: 5947 - DNA, 2975 bp, Manihot esculenta
  Intron number 9 from transcript cassava4.1_025058m (locus cassava4.1_025058m.g) derived from phytozome v7.0 (chr-ID scaffold02538; pos 162655 to 165629)
ggaagcataaagaaaatcgttacaatcctcagaaggtctgttgtttttccatcctcttttggttttctgattttttgtttaaattctttaaaagataatgattaatgatagttgttttcaagtatttaatgtatttccacaaagagcacggtcctttatataatttcagcgcacaaaaattttactttttgtctgtatgacctatactaggagagttgctatgtcttagataatgaattatactatcttaatggacatgtatgtgagagcttagatattgcgtagtaggtatactaggagccatagtctcattatacaatgtttaaaagtcttggtacaggcattggctttagtcttgagagcagcacttaatgtaaaattttgacagccagactttttttctacatatcctttatcaggaccttactgctggagaatcataagaatggttcataatcataccaccaacaacaggtagtttatttgaaagtcaacatggaggtaatgaacatatagagttgttttagtagcttgccattacttcagttgaaaatgagcagatggttacgagtcaattgttggaattgcaaatggcatgctgtgaggtggtttataattttttatgagtggacatgcagagctcagggaacacaaaaattgaccatcttatgacaggttcaaccatctgacaaatgaggcttttattgtggacaaatctcaagtaataacgagttttaggggtatggtggtgagcgaagtcttattagagtaagaaaaggagaaaattcggtaggtgctgtgaacagattactgttgcaggcaacctttaaaagataggaacaaggaaaaggaagagagagagaaagaaaggaaatcagaccaggaaacatgcctttgaaaactgtaggaataaacttatgttaaggtaataactattggcagaattccatatcaataaaaaggaacatttgctcttttaacgattgaaatttaagggaggagagaatactattgtctaggatactgtattcttatagtctaaccagaacaaatctataaacagcaaagcaaacaaactgaaagccgtctaattatgctgaactagaaattccatgaagcagaagcccttaagcgaaggaaaccattgagaaaactttgaggttttacaagaaaacctgcgttattgaagctagcaaatatttaaaaatgattgttaatgttctacttccttgatgtccctgtccttgtcattaaatactctgtatgaagctttttttttccctttatttgtcctagatccatgctattgtaagaactctgtatggtcctgtttataaatgcacaaattaacaaaaatgtaaagaggtatagtccaaactttttgtttgaatcttgattattattgttattttttaataaaattcattgatatactaaagtacttgaaaatgaaagcggtaatatttcaaggttatgtgaattgttttagtttataggctccactgaaaatcatatattattaggttcaccaattctagatagctgcatatcatcttttccatttaatcctgtgagctaacatgtaatgcttctggcacaagcaatgacaactttttcagttactgggatttttgtttttcttcacttggaaattatgttaataattttctttttctccgctgttctaaaagttaagaaagaaacagaatgacataatgctgtccaaactccaaactgaaaaccttaggcctgagacctttgctctttcctagaggtctttatactttctctagggttatagaaagtcaactatgtagttatgcatgtgatatgccgataattgatattcttttcctaaattaggtagcataattgcagggatttattcttatttaggattcacactcttgtatacaaattgtatctttgttcagaatgaatacacacagaaaatattcttcaataacatggtatcaaagccttcggttctttaggatttagatacaatgcatgggcactattcatagacactgttcacacctaagtttctatcttttatttgtgttttgtgcaactctatgagttgttttgcaatgtttccttgcagcatcatctttggagagggactttggtttggggtgatgtttctttgttcacattaccttggagagggattttgtgttgatgttttcttgttggcattgtctttggaggggggaagtgcaattctcaaggttgttttatcttttgtgctttgtgtgggtgcctttgtgtgagtatttatgagtctgcttatgagctactagttgtaatctgttgtaagaaagttttttggcttctacatagaatctcatcaaggggagtgttggaattgatgagattccatactataattaagggaaatattatgaaaagttatttccagttagtgtaggataatatttctaaataggtagaataatttatgtacatatattcctattagagggatttgctttattactatttcgttggagaatcccttactttgtggtatcagaccatttatattttggattttccattataaataagcaagcctttatattatgagattgagaatccgattaaataaagatgtagccctttgaggctttgtttctgtggatgtaggctcactccaacctgtgtgattatgtgtgtgattatgtaattattcttttcctaaattaggtggcataattatagggatttattcctagttaggcttcacactcttttaaataaattatacatttgttcaaaatgtatacgcatagaaaatgttcttcaataagatcaaggttcaaatgagcctttttattattagttatatatatatatgtatatatatagatgtcatctctgaggtcctatagactttgttccagttcattatttaactgttggtggtggtgtctaagcagttttattgtttgttttagaaattaacaagc

SEQ ID NO: 5948 - DNA, 2211 bp, Manihot esculenta
  Intron number 2 from transcript cassava4.1_006209m (locus cassava4.1_006209m.g) derived from phytozome v7.0 (chr-ID scaffold03170; pos 1270 to 3480)
ttcaggatccacaaccgcttttctcgtttagaaaggtatgagcctcagtccacttttccttttcatatcttaaaaaaaatttggtattattttgtatataagtaatattttcaaatgtcagttcttataatcacatgtaagcatgaaacttattatacactaaagctaagctaaatagagcattatatttattatacactggggttgaatttgttttacacatctacgggaatgtttggcgaaaaatagaaaaataatgtgtttatattcatttatttaatacactttgaaagaaatatatatcataatacaatttgtccaaaagagtaatttattatttaatttttataatataaagaaactcaatagttagtgcattgattttacaatttgtactttaaatttttataatatagttttgaagttaatgaccattaaattgtgataaagatttagtgcaagtgaggagagagccattgtaattaaagtgcaaatattgaaatgaagttcagaattagttaatacttaacagtaataataaggttagctcaactagaaaattaaatggtaaaatatgttaaatgaaactggataaagtgtaataatatttcacaatttttcaaaattttgtaaaatattttttaaaaaatttgtcaaattacgctaaaaaaataaatgtttgaattaaattttcaaaatgtgagatgttctgtaattaggcttattgagaattaattataacaagttctgtaaataaaaaacttaattgataaaaaatctcatactatataattttttacaattatactatgtaatttaaaaatagtccatttaaaactgtgtttttaaatttttaaaaattgcacatagccattaagatttcagttaatacggagatgacacatcatctccgtatcattgtcacattttttttaagacgcatatatcatatcattgtaacattgttgtctcatcaatttttattctgattgtattgtttaaaaaattttcatatttgaattccttctcgacccttgctatagaagaagcagcggttagcacgccatattattacaatataatatttaatatgagatgtttatatttatatggtgtttatatttatgaaataattattaaaattaataaaaatttaagtggtaattttatagaataaaaatgtcaaattttcacctaaattatatattgatgccaaaaatttcaaatttaatttttcagtgcaagtttggtaataactattattaaaatattaaataagatcaaatgaattcacgataaaaagaaagacaattaatggtcatatttgatttttaattatagtttatgatcaaatttaaattgacatatgaaatttagtattttgtagattttattttttatccaattttttagtacgtgaatgataatgtcgtatttccattaatgagacaacaataaattaatattttttaatggttggatataattggtagaaattttaaaatataaaattaaattggctatttttaaaatgtggagtaaaattataaaaaattgtaaaatatataatttttttatgattattttgcattatattgcggtgatgatatgacgctgatgtgatatttatgttagtaagttaatagaaattttaatagttaggtataatttttaaaaatttaaatatataagtttaaattgactattttaaaatatacgatagaattataaaaaaattataaaatatagatttttttttacaattaatgcaaaaaaaaattaattgtcgagtaaattaattatcaattttgaactatataattatttaaatgcataaaaattgattgattggtgtatttttttaaaacacgagaagtcaataaataatattaattgtatttagttacatccactctaaaagtcttttcatcttataatatactaaggctaagagacaattaataattaatgaaagtaattatagaagtttacaatatagttataatatgttgaaatttgtgattacaatatagttatagtttaaatatgggttgtaatttaaatatgggttgtaatgattcttttttgagtgtaaaatagttatttcttctatatctgcaaacttttaggcgcaacatgaatgttcaacatgttttcatttgattgatctttacaggttgtctccaacttggagaagttaactctaacaag

SEQ ID NO: 5949 - DNA, 780 bp, Manihot esculenta
  Intron number 6 from transcript cassava4.1_025897m (locus cassava4.1_025897m.g) derived from phytozome v7.0 (chr-ID scaffold06890; pos 92117 to 92896)
aagaaaggaataccattggatttataccttattttgtaagtaattcactctatggagcttttgacacctgatattttcaatggacataccttttttatttaagccttacctgctagaggtcccatcaactttattcttagctttgcaacctaattttcttagtggatcagtggtatcagtccatttatggggctcttgttataatgcttcctactaaatttaaatcattaattccttcatgtgttctaaacaaaatcctttttcagcatgatgaataatcaatattttctggatttaatagaatccttattaatattacctatttgttttcaacttgcctttaatgatgattgactcagcatgcggatcttcccacttacaaattgccttattttttcatcttcttgtgaatttattaatttttctttattttgtatacaaataaaaatgtatgaaacaagcaacatttttactaggtgaacaatcttaaatgagggggcttctacttgaaaataaatgttacttttttttttctcttttctatttattatgtaattgtttgtgtttttactttcctgggtctagaatttgacgatatttgtgctttgtattatatacattttgttgtttaggtgagatgatgaatatcagaagaaaagtgtgacattgttcagactagtacctttatttattgttcctacttgttttgagcctgattgttaactatatctaattatatcgacaggggagtaaaacaaactgatacagcagccgaaataa

SEQ ID NO: 5950 - DNA, 2637 bp, Manihot esculenta
  Intron number 1 from transcript cassava4.1_013976m (locus cassava4.1_013976m.g) derived from phytozome v7.0 (chr-ID scaffold07827; pos 42261 to 44897)
gcagtaagtgttgcccccccccccccccctttttatttccttttcaaattagtagttatttgtgcttttatgtttctttgatttgggttattttcattgtttgctgtttggttgcttaatttgcagaagagaaaatgtaatatgttcttctggttgttctgaaccaaagactgaatcatatttagtctttgtagattatggtactttgtattgccttgattggcaatgttgtgttttattatcagctgttgattgttatatagttggactggttttgtagtaatctgggtttggttcatttgtcctttcatggttatgaattctagggattagaattagtactgaaattttaactgtgcacttgataataaaaagattagaacttagatgaattccctttttattgtaggtgaaataatatctacactaattattaggtaaattggcagtttgtctgtctcagcttttcttgttctatttagcttgcaagggaatcgtgtaatctctaagtcaacatcagtaacaaatggtagatgaaacataatcatatcaccataatttgggaaagtattaccaattaagtgcttacttgacattaatcctaatctaaaatattttaactgatgagatgtgctgagttctgatttagtttgtgaccatacccgattcactttctgtgttggaccatatcttaatttaaaggaatgttccccccttgggatcttgatgcaatatgagatatgcagattaggagcatatcattgatcaatgagataaatgccttctatgattttgaagttcaagttcacgtgaaacgttattgaacgtgtatgaacttttcttgaacatttgtgtccagatttccttgtttatgatagaaattaatcttgacttatctgaaatgtcattttgttgaagttttatgccagataattgaactgccctttttgtttgcagtttttagttgtctagtatatgctatattgttggaggttaaatgtgttttcctttgggcatgttgggattatcagtttatttaattgcaaatgtgcatgtaagttattattattattttattgcaagatacacctgttcgggtttgttggctatggatctttttcataaatagaactgttaaatttgataattagaagtcttgtatcttcaccttggtgcatggatgatggatgtctgaattcttcaaagagtacaacttctgttggtattaaggagaaaacaagcatgtgttttgtgtaatatcgtttcatgcaactaggtttgtctcttaatatatattgtcaatagctaagagtaagccatttctttgcttttctcttttaacataactgagcagtctagcatgctcctttacttttattagtactcttaagtggagctgagggcctgtttcatttagtgaaaaacagaaggaagaaaatatgccacaaaaggggtttctcttggaaaattatgtattttacttattttatgccctctcttcttcgataacaatgaaagaatatgtaaaagtacagcagagcttgtgttgttgtaccagagtttgggtgttgagcacaagcatggccctcgctcttggtgcactaactaagcctatcttatttggtaaaaggatgatgctttgttttcaggtgacagttgcttgattagtattctctgtgaataccagttaaggaagtctagacgaacaaaatatgtactctggttaacacgcttttcattgtcgtgtcttagttagtgagcattatttgacagttctctttttgtatttgttgcataaggaacatctaaaaaaaaatagtatcttggctttcggaaaatggtattgttgttgtcttccattttgcatttttctatttctgggtattctctggccttttggcagaagctgacaaagattatattattgttttcctcctaaattctatggatatgctgctgctgttatttaatgatagatggttatagatagtctcttactcgtgtacattctacttttgtcttttctgatgcttgtaactccattctagccaagtaccacataaattttactaggtaaaatgttacagtctataaatgtgctaggagaatttatgaattcctgtttctctcacccatattttcctctggaatgagttcatataaaatttcattttgttaagaagataatggataatgcttgagtataatttgagttgtttttatatctgaggcttgtagatctaattttaattcattagttcaaacagaacaaaaggtgaataatgtattgcatcgttggaaagtggcctttatcatctcgtgctctctgaaaataataaggtatatggcagtcatggggttgcaatgcctcctctcccattttcagatatttgaagctactttagatgtgtggatcttgctattgctcctggtttattagcatgccttgatccagcctatctttagcaatgagatgtctttctaactttgtggacatgactctctaatcctgttagatgaacagttacattttcaatgatggaaatgagttgttttcatggatggcattctggtagatgacaatctctggttatttttgcagcaacattcacacgtgccgaagtttggcaattggga

SEQ ID NO: 5951 - DNA, 1100 bp, Manihot esculenta
  Intron number 2 from transcript cassava4.1_032028m (locus cassava4.1_032028m.g) derived from phytozome v7.0 (chr-ID scaffold08265; pos 737682 to 738781 reverse strand)
tccaagttcaagacatcacttttactgtccacaaggtaacttgcaaacacaagttaaacaaaacaaagtcacttctccattgcactattcttgattgtagtcattccagacaatcccattgtaaaactaaaatcctttcctctaggacaaaaaaggcaaaaaattaaaagagtcggcctttccagacctgattattcatcaggccagatcaagtagagttggaaactgagctgataatttgagtcttttgacaagttgatccgtttgagctaaaaaaagacctagtagactccactaacatctgtgccaccaagccttcagcgactgccttatacacaccatgaaaaaagggggaatcccaatttcaaccatttgactgtctccttaaaagatcttcaaattctcttttgttctgaataactacaaggaaaagctgcatcactctctgtatattgtatagaatcttaaatttcattgtcactcttaacaaatatttttctagtgttgtcagtatcttggtagtcttcatatgcatgaaggaatagcttcttctatatagacgacatgagagagttgcctagtgaactgctgaaactacaaagtatttttgcttgagcacttttggagctcatcttagaagattccccaactcccatatggaaattgaattgtgcacctacagtagcttaattcatggaaacaaaaggaaggaaatataatgtttattccacatgcatatccaaaattgaatatacatcataaaatataaatcagtcataacacaaattaacaaaagtacacttcatcattgaatttgttttccttatctatgcatatcttcttattcgtgatttgtctcttttacctctatcaatcaaagtacaaatgtcacataaaaataaacaggaaaattgattctaaatatatgaagctaaagattcttaatcggcagccattgaatcatcaatacacaccaacaaacctaccttctttgttttagactcggaatacagccatattaagtgatatttttgaacagtaaactttcattggtttctcatccattcatttctcctgaaacagtatcccttggtatcaaa

SEQ ID NO: 5952 - DNA, 4030 bp, Manihot esculenta
  Intron number 7 from transcript cassava4.1_003140m (locus cassava4.1_003140m.g) derived from phytozome v7.0 (chr-ID scaffold03693; pos 282130 to 286159 reverse strand)
aagcaaagagtagtacatcttgttaattcaactgtgtaagttccattttttgtccccacctttgattgattatatctacaatggctgcccattcttctgtttttttcccaaacactctttctgtcatggtgtctttgaatgtagatccatgtgtgcttagcgggcatttgggacatattgactcaagcacttgataggcatgcaacatgccataactaacccaaaaaaaaaaagaaagtctatcctgaaatcttatgtttagtaattaaggggaagaaattttaaaaattaatgacatgttagccatgagttttttgtttcaaggaaataaaccaaattaatgccctcctagttcacacagatttgtactatgcaggtggctgcaaacatagtcaccgtcttgattatgatgtttttttatgggcttttaaccttttttggtggagttgaaaaaacttatttactatatggtattgacactaaacttatttatcaaagagtattgagttgaaaagtcaaacagggaattgccacttgaaatcatgatcaaccatttaaaagtttgggataaggctagtggctattttaaatagtgactagcaaaaaatataatttaataatgttgatcgctactataagtagagaccagctactagggaattaaaaaacaagttgttcgctacattacaagtaacgaattgaaaaaaaaaaaggatagatgccaattttcatcttgcttcaaatgcagaaactttcatgtccaaaaaatctcaagaatatctctaataaaaaatatcatttttcataattttctaaagtcaaagcatttttcaatagctgttgaaatagaatgtaataaaataatatttttttaaataaaaaattatttttacataaaaaataaaaactttggtagaaaaactaagaatattatgtggaggccaaagatatttttttaataattttctaattgctacaactatttaaaatatttttgcatgaattttttttgttttcagctttgattttttttatgaaatgaaatttaaacaaatatgatcaggaaattatgaaacaaatattatttggctctagaaaatattcttaattttagtatatttgatataaagattatgttggacttaaaaatattagtttattatattttattcaaaacctgtggaaaattatttttatactttagaaaattatggaaaatttatttttgagttcttcattatattcatgaatttttttgatgtgaaaatttttgtatttgaagcaatatcaacatgggcatctttcaattttttttttaaaatttgttattttccactattttcaaaatgggcaacagatattttggttcataaggtgaatttgggttattttccactattgatcttttggtatattcaaaatacatgtgtagaagttctgcattttatttagtaatttttcaatgattggattggaggaaatggttatttgaatacctggtgtccagatttgtctctgattgtcagggatgctgttttagtataaaatacatagttagaattattggaaaattatgaaatttagcatgaatgattttgggtatgtttaagtcattttgttaaaatttggtgaattttagccttgtagttactgagatataaatttattcataaaggctcccatattaagatttaatttttggaattttcagaatttgaggagttaaatatatattttgtagattctatttgagtttaatatttttattggtgttgtgtctagatatctagagtatgtgattaaaatatgaatttgatcaaaaggtcagaatgttacacattaaattagatatatatgtgctatcaaagtgagggtttgtgctgaaattttggactagtcacggaaatatatatttgtttgttttgtttaaaagtgttgttttggcttgaaaatattgatacattatatttggtatgtttagaagattaaaattatttttttttgtataaaatggagtttttgaaaaattatactgaattttcaagtaaagctactagatttggtattaggattgggatttttttggtacaattagttttgattaggattcgaaccaaagacctcttaccccgggagacaactctaataccaataagctaaattccattagtaagattaggttaagttgcataaattattctagtggaaataataatattttgcaaaaagataatgacatttgttgaataattaattattgtgaaattttttaagcaacaacatatatatatatatattaattggatttttgataatacggatatgttgtaaatattttgattgagacttaggcgatgaaataatgatatcaaatttatagagttatgagttggacatttgagtttattgatattgttatttgagttgtggatttgatttttgtgacaatggttagtccattgttaagaggaaatacatggaaattttattagatttttgatgtggaaatgaaagattgagtaattattagggaaaattactatttagtctcattagtataaagaaaatcattagttgatccctctattttgataaatatattaaaaagtccctaaagttttaagccactaactttttaagctaatgcccttatttttaaagggcagagagaaaattttcctttcaaaatcacccttctctttattaagtgaataatcaaaacaattaagggtattttttagacttttgtccaaccctaaatagctaaaattaacagaaagactaattaatagattttttaaaacctcaaaggtgttttaatatatttttcaaaattaagggaccaactaatgaattttctcataatatagggactaaatagtaattttttttatttattattaatggaccatgttgaatgtgtttttgcatatattttttttaaatttgatcttgatgcttggtgctttaataaaattgcgctcattgatagctgtgaaaacatatttatttatatcttctatttgtcttttaacagagagttagttaaatttgattttatgaattgtactgctagattcgcaatagaaatcttactctttaagtagattattgagtaaatgaataagtttaatttgttgttgaacaacataatgtgattaactattagtagaaaataagttattttagtatgattttatattattagtgattgttaagagctgcgaggatttgatccttcattttgaaacggaggtacatatacaacgttcgaatatggtccatataaagtaaaatatattattttctttatcagtgttttctttaaaatttctcttgttattcccttttatgtttttccagttgaaggcataattgggcctctgtttttttcttcttttctattttctagcaccattgtgtaaataaagtaattatactattgagaatttgtttgtttatttatatttgttttatgtgtttctgtacttactgttaagttttatctattagttccttaagatagttgtattacatatgcttagaaattgtataattcttatagattatacatatattggaaaataaaaatttgtctaaaacctatattatgcaattacatatttgattttttttttttaacaaatcagaaactttatctgtcagtatcttaatatatatttctattataataaattacttgagaagtttgtcttgtagtaaaattttcttatgttcgaccaatgttagcaaagaaattttattgtttgtaatgaggttgtcctatcttatatatggtaaatgaatatgattgttttgcaagttgcttttacttttttacaggttagggatggatgttacgaactatgtagggaatattgtgatatttgaagctatatatttttagttaataatttaatggttttttttgtttggggcccctctgaaatttggggaggaatgcacgtggtgagatctatctcagatatggctcatttttcatctgatgtttcagggacgaatcattgtt

SEQ ID NO: 5953 - DNA, 2230 bp, Manihot esculenta
  Intron number 1 from transcript cassava4.1_003652m (locus cassava4.1_003652m.g) derived from phytozome v7.0 (chr-ID scaffold09360; pos 296029 to 298258)
agggttacccacttttctccttgccgatcgaggaggtgagcttctttacttttgtgtcttcaacggtttgtgcttcacctttgattcctaaatatacatatcgatagataagtgtgattcttttggatggtcttaactttattggaattcgtagtttctatttttacgtcatctttgcttataagttatcatttatttgatttttgctttagtgttagtgttactggttttgtatgattttgtggccatttagttgactgctacactgcttgacagccaattgctcttctaacaaatattctagtaaattttcttgtgtgttttcaattttaagaggatgtatgtggctaaatattcttcaactttaaatttgagcacttttttttttctttgaaaaataaaaaattccccttcacattggtatactgctgatgaaattttggggccttagtgttgtaataaacgtgataaatgattacctattgtaataccattaaattaatagttgtattggttatattaaaaggaaaattttcttcagatactatgaaaatttttaacagaaaaaatgtcctgaaaatgttctgacagcaataattagtaggagaaaaaagaaaaagacaaagataaggggccgtgtaatctaaattgacaaattcatcttgtttatagtattcttattttattctgcaaggataagcggcatcttttcattaagagacgcaaatagtgtacataatcaagtagttctggtaggtgttagtaatattcagcttccagtttaccttttcgttgattgcatgaaatataagcattagcacaacattaacattggaatagaatggcttagtttattatactcatttttctcttggactacattgcaaaatactctttctgtccacttctatctatcactcttgggaagttgatttatctaaaattctctctccttttgagaagattaacgagtattaataattttttccagttttacccttatctctactaaatataatatttgcttttacaattttctaaaacctatcttatcatttacttttctctctcgtaattatcccactcttttgttgatagattaatggagagagaattattgaaatagaagtaattaagtgagataaaggttttttttttttgaaaagtaaagatactttatattaatgaatatcatgagctaatacatcaaaaagaaaagttggttgcaatagctccactcttctcaaactgagatgcaagcagcggctctagcaagagtgtgaccatatatgatcgcagtttcttggtaaacactaatgagactgcagaaatgtcgaatataagagcttggatgttttatacgatttatcccaaataaggccattgtcttttgctgaacataccaactgcaatgaatttgtttccacaattacatgatgcagactattgcttcacgcacagccaaggcttccgcaagcaagggagagaagctaccatcaacatcacacatacctccatgcagaaaacagcctggttcattacagatcagccatcctagagggtgtttggcttaacttatgaaatttagcttataagcatcaagtgcttataagttaatttgagcataagctattttttaaataagggtatatgttgtaattttaaatttttaataaggatactatagtaatttaattggtcaaataagcttatgagcggggtgcatataagcactaagataaaaagccataggaccagcttatttttttgtgcttataagctgcttatattccccctttttttatttttttatttatttttataaactgcttataaacttgatacattgttataaataaacgggtcatttaaattttaaagcttataaaaccccagttccatttgatggcacagctgcatatttgttacatttaagaaaaccgggaggtttagcccaagtaaccaccagtgatgcaacacacatagcagaagcaacaagattaagcttcttagcacaaaaccattatgtataatttatgtgatttaattgttttcttaatcaccatgcaaaaatcttaaatgatggagaaaagtggatggagggagttccaaacattacaaaatttttgccctttcatcattatatggattcatgactgtcttttataattgattgcctgcttattctgaattatctttgtagattgttacttcaccctgaaggcctgga

SEQ ID NO: 5954 - DNA, 1436 bp, Manihot esculenta
  Intron number 5 from transcript cassava4.1_032418m (locus cassava4.1_032418m.g) derived from phytozome v7.0 (chr-ID scaffold03403; pos 299019 to 300454 reverse strand)
tagtattcaatactgcaaaggtaactcatatttacaaatgtcagcattctgataaaacatccaatcactaattccattgtcatataaagttagtttcagtagttgtttggctaggccaggccaggccaaatagtctgaaccattgcctctgcgacatattgaatcaaactcaaaaaactgtataagataaaattgtaaaataaaattcaaaatcctccaaaatcattaatttggcatatatctgaagatatagtcttggtctaggcaggaaaattcaaatattaatgttgcatattaacacaataggtagtgataaggaatagaacacagctcaacctttcaaaagtaagatcaaacttcaaataaaaactctagaaatttgtttgttcaataatgaaggccatagtggcgatggtatattggcatctctctgatcccaagggcacctgagatattaaattgatgagaaaataatcaaaactacacaactataaactgaaaatgggacaaaagattgaaatactttttatttttcaaaataggtggaatagaatgtacagaagctgaaaaagcacaacctaaatgtgagaaaatattgtttactttggaaatgacttaaaccatgtatatcatattcaaggggtcctttgagtaaacttttcattgatacttgaaatgccatctgatttggcataatgattgtttaaaattagggtaggaacttacagtttatgcactatcatttctgcttctaccaatcagcctgatctaggacctcttaacacatgatctacatcatatctggagttctctcacgagggtggaaggcctttaaataatttgaaggttttcatcttaagaatcagcagtcatgaacatcttgaggcatttttacataaagcagtaaattgtagtatttagtgcggcgtttctcatgaccacttctggttgcttcttggttctacatgtgtaacaatgatacatatgatgcttcaactgaaaattgaaatcagacttgactatcagtgcaaatttgttatctgaaatgcatagatgtcagtttttatggaaaggatgagatgctgaaagctagtcccctgttggtatctgtgcattttaatagttacacattttgtttactaaaaggacgatgaaaatgaattcgacagctaaaagaaaactttcagaactctggccatcaatgaccaaatgcgaagtataaagaaaaaaaaatcatcaaattagaagatcaacaacatttcctatcatcatacagacatcaactgacaatttcatggtagtaaatatgattaacatattgtgttgcaataagcagatttgacctctacctcaccttgttatttctttttttgagtttggatttgcacttgcacataatatgtcaacaggtgagttcccagacatctgtagttgaa

SEQ ID NO: 5955 - DNA, 3502 bp, Manihot esculenta
  Intron number 9 from transcript cassava4.1_003393m (locus cassava4.1_003214m.g) derived from phytozome v7.0 (chr-ID scaffold07708; pos 426156 to 429657 reverse strand)
aaactttcaagaaggtatctgtctctcatatttcgcgttcacgaacctataataggttattaagaatttacttgaatgataaatacatttggagtcgaaagcctgttaagtgtgctttttggatgttttatcacacagaacatttcttttcaagctatacacacttgtgtgtgttgtgtactgtacatatatatgtgtgtatgcgcccgcacacacacacacatggaatccaagtgattctaagattttgtcgtaggtgttcttgatttatatatcaacagagtgataaaccaataatgacaagggtgcatgtaggtgtctaagaagtgatgatgttgtttgagtagaactataagcgagtattaagtgtcatttttaggtttttctcaacaagttattgaggattttttttaaaaaacttttgcattattttgctcactatacctttcttgtcttttgatatggatagtttactaacatgtttttgttcatttaaatttttttaaaatctcaggagcaaaaattaattttgattagtgtgttttaggtgggattatttttattgttcgagtttttctaatttcgcttttgttgaaggttgggtgatacaagaatggcctttaacatattcagggggtttctttaggggtttgcgcatgttctcttcctttcgatgcataaatcttttagtgcgagatggttagacagagctttctataagaggatgtctcattttggttctatttggtctgccttttcttttgttgtctagcatctctactagtctgctgagctagctaagagaattgagaatcatagagttttgttttccaattttttttggaataacagagggatattagagggagtttattttgagttaaggatatagcttttggattccaatacgaatggaatattggaagaggattaaaaattatgaattataagtatggtaggattaggaagtatagagttctagttttattatttgggaattctactaatattagatttagaatttgttatttaagaattttagtgtatttagtttttttaaaaaaattaattaggaagtttgttacttactagctttaattattatgattattattgagaataaataaaaattagttgaaaattttctctacagaattttttttcttttgatcttatgttcttcctgttttatatcaattcagtatcagagcttaatatcaatccaaattcccataacttcttgtaaaatatttaaaccttccaacttgtgttctagcctccctttgaaattccttcttagtttagtgtttaagaaaaaaacaccagaaaagtcaagatagaacagaaagcagctttgccaccaccaaatggctatttgcagctcgggaagctgttggtacttgtttggctgccagaagcttctcgcaaaaggagaaacatttaggttgggactcaacatgactctagatccagctggaacttgacctttactgacgattggaccactccaacactttgccatcttctggtgaacctgttgtgctattggagctccaaactggtgcccctagattcctggatccaattgagtcagaagcaactcatgcctcgactagaacttcttagttttcggcatctgacctgcttgagcacttttgcatggaggtttgtgtgcggtgtgtgtgtattattgggtgatgatgggtggaggggggaggaaagggaagggatggtgggaggagagagagagatgggtggaagaaggggggaagagaggggtgggtgtgaaaggagaaggaaagagagagagagagatctttctccatccttctcacactctctctatctctcacctttcactcaccagcccctctctcccccttcctccgccaccttgttctctccctcctccctccattggttcactcagcatcccttctctctcctctccccttaccatcatagtaaaatagtttttattgttattagtgacattttttatgtaaatttataattttaaaaaattatctattttcataaataatttgcatagatacatttaaaaaaaatacatggggagagagagggaaattatatttttagagaaagagaggggggatttttttttcattatgctaagtaaaataaatttgtattgtattaagaaacaaatatcaatttgactgagttaggtcaaaatttagttagtcagccacaaatgaaacaaacttttaaaattgcacatgtggagcacatcattagcttgaactattaggcatcatttacagaacgaaaaccctacagcctataatatgatattagcaagagcaaaacattaataattagtaatctgaacaagaaagacctctgatgagtttgttttattgttcaatggtttgttacatatgctacattattcttcaccacttaaccttatgtcttacttggtctatcttgcattgacctcttactccagtaatttgtatgtgttctattatcctcaagcatcagttatttgtacagtaaaatgatcaaaccatctcattttccgctctcaacttgtactcattgaggtgctaccttattttttttttcctttattattctctcgtccacctctggtattgttctatcacactcaattgcagacttgtcccttcattatccgacatgttctgtcatacaacttgttgatggaattgtggttttgtggaagttttcttataatttagtagcctttatgtttacttgaggtcctgtcatgcctcatacttcttatttattatctttgttatcttcctgtgattctgtgattgacatcttttttcctcatcatccttttgtgttatgaacccatgtattggaaggtgatcactttgtggaacttattctcaacctagtttagctttgcttttctcactcatgcttctgcttttatgattgtgatgtttattttctgtactatttatatttagttgaaatcctgtatcctccataattcctgctgctgattaaccttagaaggtagattaggttttatctattggaaccattgccaaagcaagaaaaaaaaaaatctacacttgggaatcatatttggtaatccatggtcaaaacaaacaataatggctctggactgatctttggtgtaagtcaaccgtgagaggaaattttatgaatccaaaaactccttacaatgtgtataaccccttcataagtatttttctaaacatttatttattgaataacttaagtaaaacaaattatgtagtttgctctgaagattatttgtgatcatttcaaaatgatggggagtatgcaactatcttatttcctcagtttctgttatgtatattttcaacaatcttgttgattgaatatgattcttacaagattaaactctgaaattttcatttgcattataggattaacttcaagtttttatgaacttctctttttccctcattttgctttcacatattgcaggttgttgacaagtttt

SEQ ID NO: 5956 - DNA, 2643 bp, Manihot esculenta
  Intron number 4 from transcript cassava4.1_019266m (locus cassava4.1_015942m.g) derived from phytozome v7.0 (chr-ID scaffold08265; pos 3400266 to 3402908)
tatcttccaaattttgcgcccaataccaggtgagagttggggagttttggtatttgatgcttcctacattcaatctgtgctgtgtatatctgcttcaaattgccatccatttgattagggtaattcactttggctactaataaaagtaaccaataatataagggaaactcatattgctctatttggattttctttgtcattctacaatagcaaatttataactgactgatcaaagcactttgatttgctgtttcctatgtgagaatggtttaattctttagatagtttcaaagtttccatgtctttgcccttcaaatttatggctgtacgcattattcatcaagggggaatccttggtcatggatgacaaagtccttccaagctggccacaatatgtctatttctgttgtttactttcacctggaatgtgaaagaaacacagtcaagcactttgccttcgtcaaaatgctctctaccatactcctttcaggcatgttttttaggatgtggaatgatatatgcgagttgggcccagaactggcccagtcaaactctagatcaggattgatcaatggttcttgagcttgactcaaaccattactgctctggggtcattcctcccccttgaaccatgaaccaccagactggctcggcctcaccatttttggttctgacctgcctaatttatttaaaaataaataaatagataaagagaaacaccccaaagtcaacagtcacttgatcatttaaaagttcatcttatttgctacttttccatttagccatttttcttgcttttttttttttaaaaaaagaaatgtatatgaaatggaatggcaattttacctttgtaaaaccatgtataattagttttaggggaattttggaaagatgaaaaatttagaatttcttataaatatccacccaaaccatttttttttggaccaacattgtctaattctcctaatctctcaattttcatggtctcaattagtttctcttatcctttcaattattttcaactttcattttttttttgtcaaaatctataattttcctaattagttaccctgttcactcaatatttcatccgatttttactctatcatagtcaggcttctctatgtattttctttttcctaatccaagcatttatacaacattttaagtgaaggttcttcaaaacatccaaaaagtgacaagaataaggaaatcattgaggaaactcattttttctttaatctgaattttaatcaatagataccaacaaagtccatgacatgctgcaaaatcaatgaccattcgtccagcctagtcaatttcctacataggagagtcaatatgctgacttggatgaaaatgaaactccaacacaaatggagtgaggaaatgctaaaactcgacatattcaaagtgcatttcctaaatttcatttaggaaatgaaagtaaagtatagtatggtcgattatgcaaattcaaatgaagtggtgggtatggaacatttaaatgtacttgcaaaacaagaggagatgtatgcatctcaattattaaaaagattaagatcaagcctcattattttccctaaaattgtcttatatatatatatatattcatttccctttttttttatcataaccttaattcatcattttttttaaactattgtaacccaacacattttatttaagttaatgcacattctttttctatcaattatttttgtcaccctccattttgtttgtacattaaaaattttaatttgtccaaaaaaacaatgatttggttgattgacaattagaatcaaaagcgaactggccttaattcatgtccgcattggaatcaaacctgaacaatgaggaatgggtccctatggtcctgttcaggtccccccaccccgcatccccccccccccccaaaaaaaaaaaaaaacgactactggaagtggcttgtggctgaccctagtattctctatacttaagactgaggaactatcatttatattgctattgcatcactagatattagttagaaacttattaaatgactggtaggatgggtagctacttaaaatagttaataactgaaatatttactaaaattttgtattaaaatttagaaagagtcagatatttgtgttttaatttggaaaggaaagtttgggtcaatgatatttatgtttttgattccttctgttggaacttggaagggatgttccaaataaaaatttctcaaagtagatagatttatgccaaccttgtgctgttgagaagcgatcagtttatgatctatcttctgaaagctagttttaaggttatgcatcacttaactagctgcagaaagatattaagaatttttttaagataactgtgagaacaaatggatagaagttattcttatgtgtttggacaattgagatggtctctagacttgcatttgtacttgaatattgatcaaggacatgggcctctcactctctctcacacacaagtgtctggttttttgcttattatcttaggtagataagtttgtaaaattttccttggtgcatgaaacacccccaagaagatggttttcctttttctttttccccttttattagctttcacttgtggttattttatttcagagattttgatccttgg

SEQ ID NO: 5957 - DNA, 1423 bp, Manihot esculenta
  Intron number 1 from transcript cassava4.1_006434m (locus cassava4.1_006434m.g) derived from phytozome v7.0 (chr-ID scaffold08265; pos 3715688 to 3717110 reverse strand)
ggctcggccactaccatttcaggtagtttagcaattataatacctacaatatatatatatgtaaatataaatgcttattgtgaagattttttgtattcctgatttagttggtctgacatttccctttggcaattgaatttaattttatcttataatgttgtttcattgcttggtatttctttgcattttctagttggtatgttatcctgtgcaaagacgacgtgagttatccagtttatctgctattatattgcatagagataatgggacattagagtatccaagaaatgttccagggaaactatgtttgctgagtttttcccctagaatgagtttagatccaatggagcaagaaaaagcaagtttgtaatttacttagcaagttgtggtcagcctttaataattccttgtaattcagaaactaataattaattctattgaaacaaggaaaggaaaatgatgccaatgcttgataaagctaataatttttaagcatgtcttcaattaatcctttttttaaaaaaaaaaaaaacccttgtccttatctttcaaaaatacaaatgattgttaggtgttatcaagctattttaatgattttttacatggattcatatggaatatcaattatttaattaggtttgaattgtgtgtgggaagaattttacagaatggcctctgttgtggcaacaaggagatgctcatgtataatgcgcaagtcaagcaaagttttaaattggctcgactataaaagtaggaactgaaatgttttatatgcgattataactttcttcaagttcctctagttgcaattcatagctagtttgcttcttaaaactgagagtacaaagctcatctaacttttaagtctggttaggtaggtatttccttgttttacagcttacctttagtctactattatttattatagttatattgcagattgttcatttaccacatacttatccacttattgccatggagtcagttgcaggcctaacaagctcgatcctattggttccttgaatttgtattagagagtcaggaactctacatccttattcatgtcactttctggtttattggtctcttgcatgggagaaaattatgtgattgaagaaacaacaataattcctcaatgccttgagttgaaatcatagaaatcaagtttggacattttatgctttatagcttgcactatattccgatgagactgacaaaccacttcttttttttttttgtatataatgttttggttgaatgtaaccattagttaactaaatttcctgtctgaattgcactggtttcttgatgggtaattggaagctgtttttgtctgccatttgcagctttggacatctatatatcacctacaacaaaagtttttactgtattttctggcttttttggctgttattatttagaa

SEQ ID NO: 5958 - DNA, 2832 bp, Manihot esculenta
  Intron number 1 from transcript cassava4.1_002749m (locus cassava4.1_002749m.g) derived from phytozome v7.0 (chr-ID scaffold12903; pos 240272 to 243103)
tgctgatacaacaattggactgcggcagaaagaaggtacatgactcgcttcttccatactcgtaaccataggttctttattcgtttttcacttgtgttgatacaccggcgctgatggccgttagcttattctgctaaatccttcatgataatcatacttcttgcatgtgggaaattcttgacggagagaggagacagagggaaaggaaaatatagcatagagaatacaaattattttttatttattaaaaattatttatttattttcttttcacaaccactttttcttaaagaataaaaatctttaatttattgcattatacttttttttcgaaacaacattatactgttatattcccatatttttaatgttctaattaatcgattagcgatacacgttactaattttattttcaattttattaattttatcatttaatttatttcaatcactcttagctttaagttataaaatttaaaaaataattatgttagaaattgtaaaaccagcacaatttatttaagcttatacaaaagttcattgttttatattacaattaaattttaattaataatatttattacatatattattgattaaattatatacttaatagagtatattttttataaaaataattatataaaaatttgatgaattaatgattcaactgttaataagattataataccgtctagtgcttcgtgttaaaacttcgggtggagaaaacattaatgatgaggaacacgcagttggcatgataaccacctcggtcgttgaaagatcgaaaataaagaaataagcgtgtaaaggaggatgccattgagatgggaaaacataggaaaatgctttttttttttttttcttttttttctttcatttaatttaaatttaatatagtataaaaatgaatttaattaattttcaaataaaattttatattaagaattattcaaataatcaaattattattatgagatcgggatattcgaatcatttccttccagtgagtggatcaccatacgtgtcaaaatgatcgttcagaaaattaacaagaggaacagagtgggacgctaccccgcaatgccttcgccgtgattaggcagacgcgcattggttttgactttttttgtgcctttcatttcgttgctgcaatgctgcggtcccaatttctgctttatttctttgtcaatggataatagtaagctagttgttggggaaaattattattattattagcaatataagttgaatttttacacaaaattaagtttaattatgtttaattaaatatttctatttagatttttataaaattaattaaaataacaaataaatcattttaaaacaaaaaattgttagattcatattatataaggttgaagttattgtagctttattcattagaaataacattttttttttgaaattaaacataatttttaatgtataaatatactgtacgtatattattccttaatgaaaagaattagtggtttaatcattggactgctgaaataatcttaaatttacaagtcactaatcaatgtcatcatgataagcgataccactagtatttactgcaaatataatgaaaacaaaatctcataaacaccaatggtaatttattatagtgtaatacaatacaatagtgcgaggacaaggttgaaggttcatctgctcctccccttattcttttacttgttttcttttcaagtgttgatttggtatctgactctgatatgcacagaaattgacaaaagacattctaagtaaactgacttaacagtcatttatttatttatttcacaaaagaaaagttctgataattcttttctattcaagttatattttcatattttatattttacaaatacatattacttactttcaagtaaaaatacattataaaatttaaccaatattcatatttctcaaatttttttattaaatttttatatttttaggtgcataaattgttgatatctgaggataatgatctttaaaatatgaatgaaaaattcaatgctaaaagtaagtggtacaagtaggacatttcacatatgtgatgcgaatgtgctttccgccgttgtgtaaataaacagtcttgagatattattattattattattattattattatgttgactgaatgaggcataattttataaaaaattatatttgtgtacttatttttaaaattaaaatgacaaatatatttatgtatattaattttgtaaaaattcaaaaaattaattttgaattaaatgaaaaataaatctattatttaccattaattttttaaaataattatttaataatataaaattaatatatttattgtttcaaacaattgccaacgcaaaacgcaaagaattatttcaaaaagaaatttattcccaaaaataataaatatattaatatatttttattaaattattatttcaaaaaatattaatgatgaacaatagagtaaagtcattgttaatttattaatataaggtaagatttgtaacttttcaattaattcaaaaaattaaatattggtatttctacaaaaacataaatataattattatttattaacagagtataaaaagagtaagattacattacccagactcaaaataaacctctataatatattattattattgttgttattttttatgtaatataaaggcagggttctattttttcactattattgttgttgatcctttgaagtcatgcataaatcgagtatctttcttccttgtatagatgctaatgaattttcatttgccatgcaatgtaggctgttgaaattggcaagcggctggcaaggaagca

SEQ ID NO: 5959 - DNA, 3272 bp, Manihot esculenta
  Intron number 1 from transcript cassava4.1_002469m (locus cassava4.1_002469m.g) derived from phytozome v7.0 (chr-ID scaffold02853; pos 533111 to 536382)
cctctctgtttaatcctggttcctgtgggcgataggtatgtataatttactgtattggttgtctgatttacttccctgaaataaattcttgatccttgatagtagatccatctattgtaatatagatccttcatccttcccagccagtggcatgctctgctttagtgttttacaagtttgatttctaagccagattgtatatggagttagtgaaagaaaggcatagtgcagcagcgtgttctgtttccattttgtgttttaggttgcagtattcaaattccatttcattcactatgtggaattactgaaagctttttttttaaattactgtgtacccgttactgcacttagttgatatagtgtcagtcccaagctggagataatttggtttagaactccagtgatttttattatttcgtttaacatgttgccttgcgctttaggaatttacagaatatcttatgaagaaaatacatctagataatcatggtggtaattacaatatatgctagttgttgaattttttattggagcaaatggccacgtccagcaatacagcaagttgttaagtactaattagattcattgtttccgtggaatttgagataaaaagggtgcaggcttagtttctgaatactagttactcacagttcaaaagagtcaagaatgcactatacagttttctatctcctaccatttacttcagcttagtgactaaatcaactataaagaatttacgcttttaaatagacccaagaagcaggctggtattcttgcccaaactgagaatttcagttgaattctgctccgtggggcgttttggttagcaatgataggttattctgttattcagtactgtcagtgcagaagtttggaactgaattgaccaaatactcaactctggttgtggacatgagatgagtttgattatgtatattcaacatgaaacatggcccagggtcatgtggatattgaacacttgagcagaaaaaaaaaaactggagccttttttttcaaaaagctgttccattcaattttagaaccattatatcaaagcccaacaatagcggcagaccatatgccctaaacctagatcctctgttgttagggttcactttcagtctcctcatttagaagcaaaaaatttataagttcaaaattgttttcggtttcagtcccaagtttgtatctttttactgtgactcagattcaggcatgtaattcctctatgtctataattcacatattactgttcgttgacttctcaatggattgctgatattgtcttttacaggtctattttttatttttatattttattctgtgacttttattgtacaatttgaactcagattcatctcaaattggacatcatagcaatatgatatttggaattgctgattccaacatttttttttcagtttctagttcaccaattactacctttataatagaacccaaagtttaatttttaattctaatgaattttgaaaaatctgatgctggatgaatttgtattgcctacaatgttaaattttaatgaacttattgaatgattttccaatttcattcaataaaaaggaactgagcacaaccctatggaggtgaaaccctgaaatgttgcattatatctacttctattacattatttactatcaaatattttaaccttagtataaaaataagagcttttcttcgggcaactcctacttctgaaaatccctgttagaagctatttgggaatgatgtttcattactttcttgtgctctcgtacctgaactactaactactaatcaagagaatggtgctaaagagcagaaagttgatattaaccattttttttcttttcggttaagatgtatcttttgccattctaaaggtggtcatttcttttagataacggatttttcttctcatcttagctactatgttggaatgttgtggttttttctgttttattataaaaaaacacatgctggaagttctgaaatccataacagattaaagtggtgaatatatatggtatttcccttgtttttggttcttctgaattttttagaccaaaattgtaattgagagagcttgtgaagaagtcctgtttgatggttttggaaagcagtgtaaaacagtttcaggaacagagctccatctgttatcaatgttattctgtttctttctcatttttgtgattatctttctgaattagagtttggtttcaacaatataactatgaaagtcttgtctttctttcttttccccctttccggtgtgcgtgtctgtgtgtgtgcccacactcacatgcatgcatgtgagttgtggactctatttgttcactttttctttggacttccaacagttggcatgtgttggtcacagagtgagccacctattttcttagacaactacccaataactctttaatatatatatattttttaatataagctctttttttttaatgcaaagaactcaaaaagaacaaagtaattcttattgaaatgtccaattttttgcttcatacctgtcaccagaaaaagctcataggacaagatatcccaagaactattgaattgctcatgggatttgaatttataaggggagttatataattgtcttgcacatggaagatgtaagatgttaagacatgctatgcatgatctgacttcaatttttgcctgtgatattgtatgtccttttaagaaaaaagtggtgattttgtcttttttaaaattaaaaggtgcaattgatgggttcatggggtcatctgtcggtgttttgttaaaactattatttggtgtttgtaatggcaaatgctttccttctttccttcatagaacacataaatttggaggttcttaagatggatgatttatatcctttagtgagatttagttttttttttttttttggttgttgaagtgcatcatatgttgtttctgataccaagactatgtatagaagactcttagtatattgttacttcttgcactaattgttttggccgtaaaacactgaatttggatttgtgctgtttgtgttttcttttatgtttatgctttaccttcatatttatgttgaaaaattgtaattgaagggcacaaattaatctgcatatagtttgcacaaattaattttcatattgtaagtacaataatgacaggtcgaaactatgtctttctggtttttattatggtaggattatgtggaataatacaagtgtagtttgtttttttccctccagatttatattttgcaaaggacaacttctaca

SEQ ID NO: 5960 - DNA, 1521 bp, Manihot esculenta
  Intron number 11 from transcript cassava4.1_000909m (locus cassava4.1_000909m.g) derived from phytozome v7.0 (chr-ID scaffold05875; pos 1627553 to 1629073)
aggtaaatgtagaagaactttatggttaagcacttatttgtgatttgatgatgtatttatttattttatggtgtatatattataataagttcagttctttttccccagttatttgatccttaataatatatacatatattaagaagggcatcatttccccttgctttatgaagttcatatttaatagcaaagggtattgaattaagcattaattgcctattgcaaatatttcctaccttgtggagtaatttgtttgcttaagaggcatatatcctatcctatgtgatttggttttagtacttgaatgtagtcaaatacttggacttgaggcaatgaactactaagttgatagctggatttagtaacaattttaccaaggtacaaattgctgctatttagcaaaaagtaaataaatttaaatatttgtcaagctgggttgaaagggttttctttacttcaaaaacaattgcatacaaaatatcaagtaaacatttaaagatgcatgaacaaaggcatgcatgagaagaggttaaaccatctttcattctcacagctgtttctttataatggactaatgttctaagccgtcaaggttgaatttgtttttagttactttcagcaagtgctttccttaaagactttttgttggcatgaacacaagatgcaactgcttcttttcatggtacatgtgaaatacaatcctaattagtgcctggttgatgcatctgcttatcaacttacatgatcgaattgagattctgtggaagctatcataagaaatagagtagctctcagtcaaacgttgtcccaccattgttttttctttcattttattgtaagttttttttctgtgtttcttctctatttatcaactaatatgatccaactaagatcctgtgaaacctgccataaaatttgaaaaagtgaaacctatttttgtttgtttgttccttttctctgtatattattgcaagtggtgtcttttcttttgggtctttggtttctcttccccacccactcctatcttaaggtttagctttttagcgtaaatgtttggatttttttgtccaataccccttatttttaatggtagactacaaatttctgtgtgttttctaatgtcagttttggactttcttatatatctataatgaaactcaagcttcttgatttagaaaagaaagagtaatgaatcaggctgttttaaattttgcttcacggatagatggattgattatgcgttgtgggtcattttgtgtgtttgaattatttctgtaattctcttttcttttgttttctgtttacttttgcagttcgttgaatcttagaataacttattctaatcagtgagatctgatcgtgcttctttaatataattttagatataatgcaagttgagatcataagcccctccccaatccccctctccttttgttttttacttcttttgttccctccgtgtaataatgtgttatgtgaacaaaagtttttgcgctctgtaggtaaggaaattgcaacctc

SEQ ID NO: 5961 - DNA, 4020 bp, Manihot esculenta
  Intron number 5 from transcript cassava4.1_016320m (locus cassava4.1_016320m.g) derived from phytozome v7.0 (chr-ID scaffold02304; pos 36448 to 40467 reverse strand)
cactaccatcaagaggggaaaagaagatccaataggtaagtctctgtttctgctaacaccaacgcccccccccccccacccccaaaccaaaaaaaagtccaaatttcatacttcataccaaggcattctggcatagactcatagtgctaaagaaaatacataggaagacaaaagtcttagactccacaattgatacagaaaaggatgttagtgcatatctccatatggttgatggaaaaaatattaatggtttcttgaatttcagtcagacatggaaaatagaaaaggaaataatgagctaaggggaaacaaattaagagaacaagagtaaagagagaacgggcaaatagaggaccgagagaaagtgataagtggaaaaaaaaaggaataataaaagcaagaaacagggctctttttggagtgtttggaaggagatcgagaggggactggctagagagcacagtggaactctctatgttgttggaagtctctcgctcattctcatatgtattttcaattgaaatacattgcagcactctctctctctctctctcaagaaaataaaaaatataactgttgcctgtcaaaataaacagaggtggtgcttagttatgccttatgcctggaaaaggttgtctgctaagcctatcttgaataactatgagacaaggaatgcatctggtgataaattgcaatttgctaagttcagctaaactctaataaaatttccttttaaattcattaaccctttctttgtttggaaggaaatggagagaaagaaaagggaaatgtgatttctcaaattttctttgtttggatagcaaataaatgagacaagtgaggaaaaatgaagggaaccaattttccttcattaacccaaaacttttcttcccaatttggaatgaaatggaggaaaatggagataattatatattattctatatcaatgttacctacatacacttaacattataaaataacaaaataatactgtggcaattatatacttctattaggagataaattctatctctcctctattttagtaaggtatccaaacaatagagtagaaatttaatctctcttctctctcttctctctccctttttttttattgctcttaaatttctcctcattttctctgcacgatcaaggatccaaaatctgcggtgttatgtttgctttattgaaataaggttgataacctagctggcgtcatatcaatctacttccgtgctgtgtcccagattttcagttaaggaactctgatagtttctattggtttaatttttaattctgcagttgtgaaccttctgtactgttggttggacctttatatcatcactgtcccaaaagaatattgttatggatatgcattatccttctatttgataaattatgatcaaagtgattgtaacaaataagatgagtatcttagcttattatctctaatttgattttttagttgctatctatagtttaatttttaaattttaaatttaaatagaagatacgaagtattttgaattcaaatgttgatgcaatctgaatgtagtcttcactataaaaagacacttgagatcattgaataagacattcgaaaaatattattcatcacttgagatccgagaattctctcaaatgagttcttaatttattttacaataaattcctcaaagaaaagcaaaaatattaataagggaaaatcagtctagagagagaaggattttccagttaatagacagggcccataacaacttggtactagagccggtcattatgggcgatttagtaattttggaagagaagttaaaccctttcatgcaacaaacacaaactgatgcttgattcaacgactttgctcatcaagtttcagagctcattcatgatcattttgaaaggtacatagtgtctagatatacgaaacttgatttttcctcatttgatggatggcttaatcgatgtgaacaattttttcaaaatcaatgaaagcagataaagtcagtataccattttacttgaataggttttacttgaataggaagaacctggaatgacatgtggcaagtgtttacttgaataggaagaacctggaatgacatgtggcaagtgttcaaagataattgcaacttgtgatttggtcctcttttgtgtagcaatctcttcggggaattggtgaatttgaagcaagttggatcagtagaagattataagcgtcaatttcaatccttagtagcaagagcgacaacggttcaaaccaaccaacttttttactgtaggattgtctgagactattcgacttgaggtagaactacaaaaccttcccaatttagtctcaacaatgaattttgctcaaacatttgagaagaaataacaattgggttagaagatgacagtctaagggaattagtaatgcagcatcttcaaatgttggaagcacttttaactccatttattaaaagacttagcaggatagacttagctacaactgtgatgagacatattcttttaaccattagtgcaaaaacttattttgggtggaattaaaggatctagggtctcctattattgaaccagatgactggggacaaacttgaggacaagctttttctccaagaagggggtaatattatatagatatgcattatccttctatttgatagattctaatcaaagtaattgcaacaaataagatcagtatcttagattgttatctctaatttgattttttagttactatctttagtttaatttttaaattttaaatttaaatagaagatataaagtattttgaattcaaatgttgatgcaatcagaatgtagccttcactataaaaagacactaaagatcattaaataagacatttagaaaatattattcatcagtttataagattcgagaattctttcaaagagttctcaatttatttcacaataggtttctcaaagaaaagtaaaaacattaaccaggaaaaatcagtctagccagaggaggattttccagatcctatttacgggcccataacaaatatcatgacatactgattgattttacatcttgctttctacttgagcaagtgggtttttttagcacatctatatcagatgactttcatgaatattctccatggaaaattagtccattattagcatcttgatgaatttgaccatgtatagcataccaaacactaaatacgctatcaattcatcaatgggtatgctttattatgttattctgctcctgctggtactagccaatttgtttgtccatcagtaagtaggaccttctattgaaagcatatttgtaattatcttccaaagacattagatcagtttaaatcctgcatgtggggatattgtgacatctgatccagagttttgtgaaacgtctacaaattttatttaatcaatctatactttctgttaaaaggtctttagcatagatagttatttagatgcacttgtttttaatattgttgtgttgcctagcatttctcttttgatttgtgacttgtgaactccattctcttttataagcaccttactttggcatattggttactctatttttaagcttgtttcatgcaacaataactggcattattctttttttattttttaatttccgttatgtattttcttctgcataaatacataaatattgagaaaccaagttggactttgttcttatcctgtttttctcatcaacatcgagtagcagctagtatttttataattgcgtgtaagtatgctttggatggcatattttatcattaatttcacattcactaattgatttatggggaaattgcatgtgtaactatcttgaaaaaacatatattatatttgtttaggtccagttgttttacacgtattcttttggtctttggttccctctctttttgttattttactcctgctactgtttttacaaatgtggatactgtgggactagctgaaggatttaacattcattttggtacagggttccaagtagttcagcaaagtgtgactagggat

SEQ ID NO: 5962 - DNA, 3549 bp, Manihot esculenta
  Intron number 3 from transcript cassava4.1_014314m (locus cassava4.1_014314m.g) derived from phytozome v7.0 (chr-ID scaffold03268; pos 234506 to 238054)
gatcaaggtaattttgctttcctgttgcttttttcatacctgatatattagtgacatggtctgataagcattgttatcctatttcctcccttttttgaggtttatgttaggtgcatagggcatggtggataaagaactaatgactaagtagaattcccctgttctctctctctctctctaactcttaatttttggactctggcaattttgtcatctgttatttgattgagacatctgggatgatcttttataggaaaaaaagctaggtattctacctgcgttttgtacttggtttgatgtaaaaactgcatgatccattttgtttttgatatggtatgtaaattattcaatattacctttcttaattctcattcataatagtaacactttaggattaaataaagtctgatttcaagtgccaaaattacagtcaattattgctatgttttaaaatattgcaatcctagtcaagcctctaatatgcattcttaatggctactgccattaacttcccacacccccatcccaccaaaaaccgagagagagagagagagagagagagagagagagagagagaggagggataggaaacggaaaaaaaaacccttgtaaataaggagatgagcttagctaacatgagagggtagagtgctggagacgctgattggatttgagaataggagtttgaaggggaaaaagaggtcagttattctgttaaaagttaggttatcttgttacacattagtaccggactatatagaataaatagaggaatattgtaattgaggcattctagaaattaataactaatgcagacttctccctttctcttcttctattccttctctcctttcttgctctatttcctccctatttcaattcttttctgtgactgagaatcctgctccataattagtggtatcagagcaagattctgggagggcctaacttcaacgtaggtcggtgtgtcaaaatctcagatttctacttcttctgttgttctaccttcttcctttctctatttcttattttcctaccctgatatttcttcccaataattcttgtttcttcttcccctgaaatttctttgcttctttccctttatttccttctttcttctaggcagaaccagttcctcttcttcttcttcttcttatattgttctttcttcaaatccataattctctctgtatatttctttcctccttttctaattctctgcaatatcttctttctcttttcctcgatttatctcctttcccaagaaccctaaaattagggtttgtttcttgaaattcttggatttcttaccttgagattgtttcaagtctgatactatctgtttcaggtctgttttaggcagttttatatctgatactgagtttctgattcttcaacacttttactcaatcttctgagaaataaatcttttccttctgtttctttttaccctagccattttaccttaggtgtggaactacaactttggcaacaatgggatcattaatggaaaaagttttagaagccgattcaagttgcagaaactggcaaccatggaattgagatgtcttggggcaatggcagtgaattggggaagagcaaggagagcatgattaagaagactgtctcctttaatggcacggtttatgggagagataagaggttgttgattcagaaggagcaaccagaatttcaaattcaaactcttgaagattcgattcagccgagttttgaaagcaaagctaatggtgcaaatgatgagaacaattagggttttgagtacagcaacaattctgaagtttccgttataaatttaagttctcaagaattggagcttggaaacatttcaaaagctgtccatataaattaaagcagcctagttcaatgcgaccatgatcttgcaattttatgggcaaaacatccaaggttgaaaaagaagaagcagcagctattgttttactgaattcgacattggaagtgatcttgactggatagataaattagatatagggtaatttacagtcaagtccatcacatttagtaaaacccaaaatttaatcctgttttaagtaacaatttaatctttaaattttacttttattaacaaattggtctctgttaaaatggatcctaatttatcgttaattatctataaagcatcaaaactaccctttgtcataaatcaaatttgttattgttttcccttatgggaaaccaaagagagaaattctctctccttcatggatcaacctaactttctctgctgatgatagtcttcaaggttgttagccactaagaaaccttgcagtagatgcaataatataatttataggaacaatgacccagatgaaatacctttgactgaaagcccaagcaattaacaagatcaaatggagaccaattaagttgtaaatgtgaaagaaaatatgggttcaagattgcagaatcacagtaataacatataaataaataaaaacttaaaagaaaaggctctgcaaaaatctgtggactgttagtggaaatataaatatccagatagactaacaacaactactgcttataaagtatcccataatgtgggtttctatttcatatttgtagctattaactcctttttctttgaatttagatagtttatgataatttagatttagataaggtcagaactcaaaatgggcatcatccaagaaatgatcagctttttgcctccagtcaagaatttcaaaggctttttggtcattaaaaaaaattaaaagctcggttcattactaacagcagattggtactatttttaactaaggaccaacttgttaaaagaaatataaacttaaggacttaactgttacgcaaacataaaacagggactactctgtgggctatgataaatgtcagggacctggctataatttacccttttatatattggacaactgactcatctcaagagaaaaccatgtgaagagggtggtttctccaggaaaagatgtcagattttgctctgttagtcaaagtaatgctgcaggagaagatataaaagtttatggagaagatagggtcttgggtgtgttggggataatgtagttgagctaagatcatgtaggcgtataatactcaaagagaattactctgaaatgtagaggaggcaagggaagaaaatccaattttgtcaacatggatgagctgacttgagagggtgaagtgcctgagatgctgaatggatttgagaataggagtttggaggggaaaaagggggcagttattctgttaattgggtggttatcatgttacaatttggtactagtataaatagagggaaatacctgtaaatgagacattccagaaatgaataacaaatgcataattcttccttctctcatctaatcctttttcctttctttctctatttcctccctaatttctaatttttctatgtgattgagaatcctcatttagttgcgtccattttcagtaactttgttagaatcctcagttattgtttagtcttgtttggcagctggtcccagcttttggagacccttcctcttccaa

SEQ ID NO: 5963 - DNA, 902 bp, Manihot esculenta
  Intron number 14 from transcript cassava4.1_002826m (locus cassava4.1_002826m.g) derived from phytozome v7.0 (chr-ID scaffold08359; pos 1845918 to 1846819)
gaaaaaaataaacagcaaggtatttcctattcatttataagtagttgctgttcagtttaactaactcatatcacttgtatttagtggaatgacaattggcactttgatgacttgaattgtctttttcagacaagttgataactgacctgcacagtattatgttgctagctttattaaatacttctcttttgggaatggggatctcattgatcagccacttgccagacagttttgttggctttgctactgtgtaactagttcttcttgtagaattccatgccattataatgttcatgttctatatacctcgatgaattagatccagttgatgtaactgctctgtcttactattattaacattagaagatatatttagcattatagttgataatatttgccaaaattttcattaacagcagaagttcggtgaagaaagactaatgatctgatatcaaataataaaaccttaaaatattatggttacaagtacaattggtgtttgtatgtgtgtgtgtatatatatatatgcatgcatgcatgcattttgaatgaatatcaaagaatttcaaaaacttaaaaatttcggtaactacacactattgtactttttataatgattttagtactcagtagcaccaaattaaatagttaaaggatccaaaatagatctttaaatgaagggcttagcagcaaaaacacaaaaccttgaagggcttttgtttaggtttttgcctaaataagattacaccaaactttgacttctcataaaatgctgaaactcttatatcaaacataatagctgttacataagactaggacacaatcttaaataatctgactattgtaattaattttgacttgttgccttttcagaacttccacagttaagaagtgtgaattca

SEQ ID NO: 5964 - DNA, 1600 bp, Manihot esculenta
  Intron number 1 from transcript cassava4.1_016736m (locus cassava4.1_016354m.g) derived from phytozome v7.0 (chr-ID scaffold12794; pos 356621 to 358220 reverse strand)
cctctctgctttacaagctgccacttacaactctggtaatcgcttcatttctcgaaaatgctttgatcttttttgcttgttttaaagttctgttttgttttttgagaagccagaatctatttgtgaggttctgtaatctggttgtgttttgagtgaatctttgtctagttggcatgtctgaagagctttcttttattattattattattttctttaaaaaattttatatataataaattgtctgggataatcttttgtttttatttttttttgagggatttcaggagaatcatgggtttgggaagtagtgtcgtattttttcttttttgtgctctggtgttgttgtatgagctagagcgagtttgagtctcatctatctcagattagtacacaagttgagacaaaactaattacttggtagaagcatgtgattagactcgtagattctccttgacggctgtggaattttgttactgggtctttggaatcttgggaatttttatttgatccgttaattatatactggaattgttaagggtctttcagattgatttaaatatgtcaaagctccagaggactttattctatgaacttgatgcattaaagttgttgtttggttttccaaggagaaaagatcaaagctttcaaatgcaaaatagaaactttcaagccaaaatcaaaccttttgatcaagtcatctggttccttgaatttaaacaggacagtgatgtaacttattttgtgttgtatattatgctaatagcgaagaagaattttaccatgatgaatcagaagatgaaataagttttgggaaggtgggaggtctaacatttcgcttgagtagcctagtcagcgtgcattaaaaggatgaatttcagggaattttgagtagaagctttagaaggggaatagttccataagagattcagtttgaattggttcatcagtcttcatagattcagtttatttaaatatttactgctcatttgagtactttttctaggattgtttattgaaggttcagaggttgagatcattaaggttttagtttaaagcaaagtggttgaagtttatggctatttactttttagagatttgcttggttagagcatacccatgatttgtggatttataagtatctgcatgagctcattcctccgactagaattacttgagatatatttgtagatactattacctttatgggaaattcttgtttagatcctgtctacattgacctaaagtgcagttatatagatcccattttcttttatgtcggtccaatgttattgtcttttagattcatgtagactaggttgaagtaagtattttccgattagtgcaacaattgttttgaaaaggatattttccttctccttttttctttcacttccattcttttgatttgcatttatagaattggtgtttagtggaatcctagctgtaccttgctttcgaaaccattgtatactctttttgtccttactggtcacaactactgctagattgatgaatatgtcattcatataactctttcttttttgcttccatccattttgtaatctgtcaacagataatcatttggcaattgatgattcag

SEQ ID NO: 5965 - DNA, 1438 bp, Manihot esculenta
  Intron number 2 from transcript cassava4.1_015957m (locus cassava4.1_015957m.g) derived from phytozome v7.0 (chr-ID scaffold03403; pos 167966 to 169403 reverse strand)
tagtattcaatactgcaaaggtaactcatatttacaaatgtcagcattctgataaaacatccaatcactaattccattgtcatataaagttattttcagtagttgtttggctaggccaggccaaatagtctgaaccattgccactgcgacatattgaatcaaactcaaaaaactgtatgcgacaaaattgtaaaataaaatttaaaatcctccaaaatcattactttggcatatatctgaagatatagtcttggcctaggtaggaaaattcaaatattaatgttgcatattaacacaataggtagtgataaggaatagaacacagctcaacctttcaaaagtaagatcaaacttcgaataaaaactctagaaatttgtttgttcaataatgaaggccatagtggcgatggtatattggcatctctctgattccaagggcacctgagatattaaattgatgagaaaataatcaaaactacacaactacaaactgaaaatgggacaaaagattgaaatactttttatttttcaaaataggtggaatagaatgtacagaagctgaaaaagcacaacctaaatgtgcgaaaatattgtttactttggaaatgacttaaaccatgtgtaccatattcaaggggtcctttgagtaaacttttcattgatacttgaaatgccatctgatttggcataatgattgtttaaaattagggtaggaacttacagtttatgcactatcatttctgcttctaccaatcagcctgatctaggacctctttacacatgatctacatcatatctggtgttctctcacgagggtggaaggcctttaaataatttgatcttgaaggttttcatcttaagaatcagcagtcgtgaacatcttgaggaatttttacataaagcagtaaattgtagtatttagtgccgtgtttctcatgaccacttctggttgcttcttggttctacatgtgtaacaatgatacatatgatgcttcaactgaaaactgaaatcagacttgactatcagtgcaaatttgttatctgaaatgcatagatgtcagtttttatggaaaggatgagatgctgaaagcaagtcccctgttggtatctgtgcattttattagttacatattttgtttactaaaaggacgatgaaaatgaattcaacagctaaaagaaaactttcagaactctggccatcaatgaccaaatgcgaagtataaagaaaaaaaaaatacatcaaatagaagatcaacaacatttcctatcatcatacagacatcaactgacaatttcatggtagcaaatatgattaacatattgtgttgcaataagcagatttgacccctacctcaccttgttatttctttttttgagtttggatttgcacttgcacataatatgtcaacaggtgagttcccagacatctgtagttgaa

SEQ ID NO: 5966 - DNA, 3010 bp, Manihot esculenta
  Intron number 1 from transcript cassava4.1_020327m (locus cassava4.1_020327m.g) derived from phytozome v7.0 (chr-ID scaffold10015; pos 293640 to 296649 reverse strand)
cttggctggggcctttggcggtctccttttcttcagtcagtttctttctctttaatctcgtttggttgcctagaaaatatatgttttcctttctgcttcaaattttgcttttcttattcgattatcttatcaatgttttaactaccattctttttatgaggattggtatgggcacgagtacaaatgtgttgatattaactgggcttgttcaatatgctgcaatgcaaattcattattctctcattcaacctagaattttgatgcaaggtgtattttgaataaaaaaaatgtcaaggaaataggtgcaatgtctgttcatagaaatcttattttgaatataaagaatttttagataatgtagcagtggaagcttctctttgcaacataaattcatttaaatatttctattatacgaacattttcgtttgattatgtgtgagatgtttgtctattcaagattaattctctagatcatgagttgtaaaattttttaggggcccatgcctgcaagaataataattttcaaatacaattgtgtacccaatgatcgattcactaattgtgagtattacatatattttagaagaagcatctaagcttggattaccacctatgtttcttaaaatcttatcttattaaattttaaaggtttgtaatctttaggagggaacaaaataaattatgtttatgaatttattatctttgtactatgaaatattatttttgtcctacatatggagtttgagagaagaaaataactaaaagtttaaatgtcctattattttttgggtgatgaataattatatataattatatacatacatatattttttcctcgctatttgcatatattgaacataattttgcaaggggtgggatggtggggagaggtgatgctcccttttgtcccccctcccatctcccctgtgtcatgttattctgcagaagcaatgctaaaagtttgagagtttcattgttaaaagaggcaagttttcacctagcactatatttcagcattgtccctcaattttaattttgtagttaaaaatactaaatgcaataaggatcatttttgcggatttgacaaacttttctgtggaattttaatgtagaagttgcattaggtgaaatctgatggtttgctacatttttgtcattagagtgaaggaaacattttaagatttcattacgaggtgatggattgaatgcggtgccacattaacattctgtggagagttcgctggatgctaatgatagtgacctttattgcattgacttaagaaggtgattttaagttacaaattgaagttgagagatagtgcaatatagtgagaagtttggagattagggtgaaatttaccccaattgtaagaggtcaattgaaattaacaatatagtgttaagctcctcttaatattgatagttttttggggcggtgatggttattactccttctgttcacttttctatcacttttgataagttgatttgtcaaaaaattatcatttgctttgaaaatattaatgtgtatgaattattatttttttttcaaatctctactaaatacaataattacttttataattttctaaaatctatatgatgatttacccccttctctctctctctctctctctctctctctctctcttaattatcccactttttaattggtaaattaatggagagagaattatttttgtagtaattagttgatgtaaatgataatttagttacattagtgatattttgctaaaatttaggtgatttaattgtttgcttaatattgtgcaaaaactaaattgatggatcaaagtgggcaggggagtatttgatttcctaatatatgaattgtcatccccactgaaaagaagaggaaatggtaccatgaaaaggtgctttatgtaatgccttccaaatctactaagaaatgcttcatcaacttgaacaagcaaaatttctatattgtagtgttttgatttggacaattatattgctaatattgcacatcaggcttggttatgtttatgggctggttataggattcaattttgaagctgtgacatagaataatagctacagtttgtgttatgggcccttaaataggatctcgtcacaggtcgattaactggaaagtcctcctcttgccagactgattttcccttgttgatctttttgtttttctttgaggaatctattttgaaataaattgagaactggtttgagagaattctcggatctcataaactgatgaataatgttttctgaatgtcatattcaatgacctcaagtgcctttttatagtgaaggctacattcagattgtattaacatttgaattcaaaatatttcctatcttctatttaaatttaaaatttaaaaattaaattaaatatagcaactaaaaaattaaattagagataacaagctaagatattgatcttatttgttgcaaccactttgatcagaatctataatcaaatagaaggataatgcatatcgataatagtttggctaattcttcaaggcacaaaattttatcatgtggtccaacatctgtaaacatagaataatagctgtcagtacagttttgtctaattcttcaaggacagaatcttatcatgtgatccaacatctgtaatgagtatatgtgagcatgtgcattatacacacacacacacacacacacacacatcccccataggctagcagtttctcaagagtagagatggctgaagcataatttattttttggaaggtaaaaacttaaactatattattgcttcttctatttttcttttattgatacaggtctaatgtttttagaatgtgattttgaatgttcatctatgacgtctttaattattttagcactttatttgtacatggtggtgtagcctttgtattaagagttccaagttcatgcactctatttataatcatgggttgatcaatactttcttctttgcaaactagggactccggcaactcgttgggcatctgcggctttt

SEQ ID NO: 5967 - DNA, 1756 bp, Manihot esculenta
  Intron number 2 from transcript cassava4.1_028937m (locus cassava4.1_028937m.g) derived from phytozome v7.0 (chr-ID scaffold08085; pos 166869 to 168624)
tcagtttgcataggtgaagcaccaagcagtcagtcgtaagtttagcaattctctttgcaactacttccatgaagctcttctatttttgtgatcttggttgtcttttcagcatcagcattaatatttatctatatctccagtattgtcttttcagtatcagcagcaatgtttatttatatctcaagtatttttcacatgttttattaacccttatttaataattttcttatgatgaagtcataaattgccaccaagttttttctcaggtagttgagtagtgcatgcttgggtgagatgccaggttggagcttttaatctgttgcaatagggaaacgaagtgtgatatcttgaataacttaggttgtgaaaagagataaagaagtatggacggaaaacaattggaaatgagcctccttaagcactaagatgtgtggttccataatcttgattacgcctgattgagcttcattgcatgtggcattttagaaacaatgttcagttgtctttgtcagcttgttatgatatcttggtgataacctttctatgtgtttaccacatatttctttccccgtttgaattgctaatataatttacattttatctacttggaattaattactcattatagatggttaagttttaattgatgggaatagaaaggagaatgcctagaaatttcaaagaaactcagtagtttataatgcctataaaaattgggtacactgaataaaatgctagataagaaaaaacttatatgacgataagatgatggatagtaataagagtagttacatttgtgtatgccatttatgaacttggattatctccaaactacaatagtggtggtagtttagctgttggtcagattttccatactttacctggttgcaaatacataccaaaactcttaaatatgcgcccacttttaatttgttcattcttgaaattgtttgattttaatctcatcttctatactttcaaatctaattcaaacattgcccactaaaaagttgttattttgcacataaatttggttcttatagcatataagctgagtcactataatacaaccacattgatttgcaaatgtattaacatgtgatccattgtgttcccccagagttctgcagtgtgacttacatggatgtctaggtaaggaaagtgaaaagatgagaggtagactcgatatgggatgaattggttagaaaggatttagcatcaatagacctttaaattaagcagaatggaggaagatccatatagctgccccacttagataggattaaggcttaggtgagttgcatattttggcatgtaagtaaagaaaaaaaattgacaatgtgagttgcttatggataatagatatcaaggaaaatgacaaactctattgatccttcttgtttccttagtctttatcacatttctttagcgaaatttaagttattccctattctagaaaaaaaaatactgtagatatttttggttctcttaaactacacttcatgtcttgttcattaaacattgccttcatatatatccaatagtggtagttttctaatattaaattcccatagcctcttcacaaattgccatttatatccttttctcctttgcttaaagcactctctttctcttcacatatttcgttgtgttttacattatatatttggatgggaaaagcaatatggtgcttgaacaggaaacatatctatgtttgactttgaattgcatttcaataggtacttgttgattccaa

SEQ ID NO: 5968 - DNA, 1003 bp, Manihot esculenta
  Intron number 10 from transcript cassava4.1_004588m (locus cassava4.1_004588m.g) derived from phytozome v7.0 (chr-ID scaffold11998; pos 478291 to 479293 reverse strand)
cgctcacttttaaaggcaagtcttcacgcacacacactcggacacaaaaaaaaaaaatccttacgttactttagtatttccagtagagtaatgcttgttgaccaacagaaacctctaatacacgaatttttgctgcaaaatacagtgaaatgtcatcaagatacagtggcaaagtaaatgtatgaatattggcatgattgaaaaatgccttcctttcagaatgtaattctctcatatgccctttattacaattgcctgtttaattaggttaactacaaagcttaactcaatttgaagattaaatcagaagttgcctttcatactagagtgatgggggattgctgttccaggtttacatactttcatgtttatcaactctttaccatctaaacgaataacatgtacttatgttgtttgtttgatggacatacaacaatttggacagtatcttttgtgtgctatgaggtacccaatgggttgattattatgccactttttgtaggcataatttatttcaactagatcactaaaggtcaaccttttccaattttagcaccagttcccattttgcttacaattcagtcatcactgacagaatggcaaacattctgataaattatctctgacaaattcaggaaatttatttggaattggttcctggtatttaagtcaaaaccatttgaatataacacgttattaattatacccaaacaggcaataaaacaagtatacgtttcaattcactaaatcttcacaatgccatattatatgtaaaaaaattagaagtatggggatgaaattgaaacaagttgatctagtattttgcttgaattagcttaaaattcagtgaccaattgagcaaattgcttcttgtaggttgtgttattttataatagattttcatattttaattctcttggtttcttcattgattgagcttatgcttttattgctttatttaaatttggaagttttatttttatgttttgcattttaacagtcg

SEQ ID NO: 5969 - DNA, 3885 bp, Manihot esculenta
  Intron number 2 from transcript cassava4.1_008260m (locus cassava4.1_008260m.g) derived from phytozome v7.0 (chr-ID scaffold00935; pos 62341 to 66225)
gcaggtaattcaacttaagtggagaaaggataaagtgttctgcattttgaattcctgtgcatttcaactcatcttagattgcattttttatctttttacttaaatgggagagtaggggatttgtcgcgttcagtaactggtttaactaattatacatgaattgtaaagttggagctaaatcagttcaaaagatatgtttaaaccccatcttcattttccacttttaagcattcttaactgaagaggtcagagatattgaaggagctccctttttctcaaagttttctgcatagttgtctttcattgaattttaatttcctgggttgtggtcaggctcttttcaacacaatgttgaaggccagcaaactctatgctctttagtccgtaatttttttggtatcaattattattgaagaaacaaataacaaagagaacactcataaattgtataccttgtgagcctgactgaggtgtagatcaattgacaacaattgaagcatagtcacttcatcaattttctgcccttgtggtggtgtcaatataaagtgttactgcattagtctctctttcatgcacacgttaacaaattgagtggaaaattttgggaggaatttagtgtatttatttcaattttaattgacctttacaaggtttggctatttatatacaaagaataaatctaattacaaatatttacaacacactaattaggaatatttataataaaggtaaaaaataaaatccgtataatcaaacataattatagagatcctctacattggtcaatccttcctcccaagttagtgcatagacgtcacacatgcttaacttacaaaccatgttgagacttttggtaaatacaacagctagcttgtctctcgaaagtgatgtgatctaatctcaagacactgtttgtttgcttctctctaataaagtgccgatcgatctctatgtacttcgttcggtcatattgaaccggattgtgagctatactaatagcaactttattgttgcagtataagagcagtttgtcccttttcaatagtttcaattcctccaacaatctttgcaactataaaagttcacacacactttgtgtcattgctctatactcaatttcagcactcaatcgagcaacaacactttgcttcttgtttctctaagtgacaagatttcctcccataagtgtgcaataaccagtagtcaacctcctataatcaaggaatccaacttaatctgcatatgtaaatgcgtgtatgcaaagatgactatatttagagactaggagaccttttccaggagcagacttcaagtattgcaaaatacgaaaaataacttgtatgttaggatcacgttggagacaaaaaatcacaagagaaaaaaattagaaatagagtgctttgtgcaagatctaactcttttctttgaacaattggtttatttagattatcaatgggcacaaggtttagggatgactcacgagatggagaagaggaagattcatgacacttagtaggctgtacaatcgctttttttgcttctattttgtttcttcttgagtatctctttaaatctgatttatctaaacgctcaatctgatcaccaatagtctccccctgtatagtagtctcctcctgagtaaattgctctagagttataggactaagaatcatccttctttctcattaatcttcccccaaagaggtgatggggtagtattgaagtaaggttcagtctctctaaacataacatccatactaacaaggtattttctaaatgaaggagtaacacttgtaacccttctgtgtgggagggtacttaacaaacatgcatttaagatctcttggatttatctttctacctgtcctagtatgaacaaaacatatgcacccaaatacctttggtagaatagtataagcattttttccttatagcacctttaaaggacttttaaaggtaagattttttagaggcattctattaatgagataaactgcggctaagattgtatatttcttataggtttttgaaagattcatggtgaaaagaagagatctggctacttccaacatatgcttatttttctttgagcaacactattttgagcatcagtgtaaggacaactaatttgatataatatcccattagactccaaatagatagaaaaatgaatattcatatactctgtcccattattagttctcaaaacttttatcttagcatcaaattgagtacaaaccattttatgaaaagattgaaaacaaaaaaacacttcacttttcatttttatcaaataaacctaagtcatgcgaatgcaacaatcaataaaagtaataaccaacgactaccagacagtgagacagtatgagtaggtccccaaacattagaatggatagtcacagaagaaatcggattcctattgttacttgagggataagaggtttttgtatgcttagcatactcgcaagcatcacagaataaaaaactaaactgagttttggaaaataaatcaagataaaatttttgtaaaacataaaaggatggatgctctaatcgtctatgtcactgtatgatttcttagttgacatccgtattatctctaaaaaaggcctgagatgaactagaactcaggttcccttccaatatatgaaacccatcgtacagtctaccattgttaatcctcttttcgatttgaaaatcctgaatagcacaataattaggaaaaaaactcaatttcgcagttaaggacattggtaagagcattaactgataaaatattaaaagaaaaatgagaaatatggagaatagaagataacttaatatttggagtacaactaacataatatttggagtacaactaacagaatcgattccagagataggagtggaagaactatgctattttgacactatccttgtttagacatggaaggtaattagagaagcctttagaagagtccgtcatgtgcctatttacaccagaatcaataatccatggagcattaccaagagacaaagcattatgagaagcaattaattactctcattagtcgctttcatgtctactatgctcagacttggaataaaacaacaaatctaagtagaaaaggagactgcccaaatgaaagacctgtaaaaaaatccaatagaagtgcaaacaccaaaaagacctaatctaacaccaagacaaccaagaatcaggagaaagtgctggaaataagccgaggaggaggtcgccggcatctgaacaagtcaaatttgtcgagacagaaggggatatgccaacacaggtggtgcgtgagggctacgcgcttggaggacggctgccagaacgtgaggactagccgacagtgcaatgacgctgctggtaccggcagtgagaagaaaggaggctcctaggtataatagtaccaattttaagggttagggttcttgaaaccctaagattgaagttcttcaaattgaaaccctaaaatcagatgtagggctctgataccatggagaattttggaagaaattttatgtgtttatttcaattttaattgatctttacaaggtttggctatttatacacaaaaaatcaacctaattaggataatttacaacacacctatatgaatatttacaataaagtagaaaataaaatccgtataatcaaacataattatagggattctctacgttgatcaacattgagacacgcatgcttgtgcacatagataactataggcacatgcacacttgtagtagtattgatgtttccttttttcacaattagccgaaactttattgtcatttagatgtttgtaaaaaattgtttagttttgaatgtgtcaacttgttgttgcagtcagagatacatttcttgggaaggctctctcatcc

SEQ ID NO: 5970 - DNA, 939 bp, Manihot esculenta
  Intron number 1 from transcript cassava4.1_004183m (locus cassava4.1_004183m.g) derived from phytozome v7.0 (chr-ID scaffold03718; pos 478454 to 479392)
aggtacagtctgctaaacatactatgtgccttctcttgaattgtttaattatttatgtttcttctataggcctgcctattccggcgttttagtgtgttggtagtttttatattttagtttatggcaatgtggtaggtttttggtggtgagatgggctgctagctctgagtttgggattgaaggtttgagaattgggtttcagtagaagtgaatatatcttctttttggatctaaggatttagaccttttaaatagtaagttctgggcacatttaaaaatgcaatagatgaccgagttcatttaagcctctgaagttgctgaagctgacgctagtctccatagaggggcttaaattagagtagttgagcttgggccaacagcaactccagttaaacttgatgtcttctgctcaatcggtcaatccaggcttagacatgcaaatctatactagggcggtttctttgtgctatatctcacattttcctccctgggtagtaaatgagcccttgtcatcatacttgatgatttcttggggtaattcttattttgtatttagttacactatggacaattttttcaaatactgttttttaaaattctatatagaatcttgcataagtaccccgtctaggattcaaaagcttagaatgttgaagtatatattgctgaacattgtctggagttgcattaaatattaaagaatcagatttgttgtttgactgatctcaagttgttggtcatgatggtgaggtggttgagggtattttggtcttatagaaaaagagtttcaaatattaaatattaatagctaatttatgtggtgcaatagattgaaatgctcaataaatagcattggcattttcttatttgtagctgttaaccatgaaatagtggttacctaaagttattctcatttacttctcatggtggtcactgcag

SEQ ID NO: 5971 - DNA, 2079 bp, Manihot esculenta
  Intron number 4 from transcript cassava4.1_015142m (locus cassava4.1_015142m.g) derived from phytozome v7.0 (chr-ID scaffold08477; pos 117622 to 119700)
gaactaagtgctgggcatttttcaaagtcaggaaggtatgttctattttcttatattttaaaagctagtagctttccacttcccaatttagaggtaggatttctcccctcttctttgttgcatggggtcatgtgcactgcccattcagatagtttcttgaagtgttcttctaaatgtgcttgggtgtgaagttttgggttcttagggaaaaagagaagctgtaaagatggagcatttaaatggggctggttgcattgtctttgtattattttcggcggcattttgtcaatttaggttgaaaattaaaaaaatttgtcaatttaggttcaaaagataaaatatttgtggagataaaatattttttaagaatggcgtggcgcggctatgatttaattttttttatcttttaattattaaaatattataattatattaattaattaatatattatttttatattatattaatttaataattttatttatattatattttttattatgataaattttttataatatattttattaattttaatatattattataataatattataattaaataatactaattataattttatttattggttataaatttattgatatgtaattattatattttatatattttattatttttaatatataaaaattaatgaaaaagaaaactgcaaaaaaaaatatttagaattataatattattctgttattaaatatatagcactgaattaaataattaataaaaaaatagattaattaattaattaattaattaatataaatttttaaaattataagaattaaatttattttttattggattgttattgtgcagtattacataattacataataatattaattttatgacactaaaattatataaggtttaataatatttttaatttatatataaatattaaaattataagaattaaatttcatatataatcatagaataatattaattttatggcactctacataaaatagaataatattaattttatgacactgaaattatataaggttaataatatttttaatttaaataacattatgctgtgattagatgtgggatgcaatcacttgatcttttatagacaatatatttaattaatttattttttttgataaattataaataatttagtattctcatataacatttgatagtaagataatataataattataaatattatatgaaaattaagtaattaattcaatgaagtgatttggtatacgtttgatagcaaaataatattataattttaaatatttttgtatgtagtcattttgctattaacatttataacactcttatatattaaaaatatttttataaaatataataactatttataattgcaactgaattgtttttataattgcaacataatattaattttataactttgaaattatataatatcaataattttttatttaaatattaataataaaatctattaaatattaatgtattaaaattataaaaacatttattattgtaaacatataatataaataatattattaaattaataaataatattattataatatattaataattaaaaaaagaaaaaattctggcgcttttataggcccctttagcgacagggatcattttttacctgactcttggcagtcaaacttcagatctacaaatattttgtctttgattttaaattgataattttttttttattttcaaccttaaattgacaaaaagtcctgcttttttcattttcagctcgtctcataaattgttttgatttaattgctccactaccttggtcaacgatgttttcttgctgtccaattcttttaaaaccacttcagatgccatttttacgcacttctggtagccccaatagatgtggaaaaaactagaaagaactcatccaagttttaacttgcgatgatgatattgctttataatgatgctaacacattttcaacgactataattatacttgtgatgctagcagtaactacttgcagatattcttaatcacttctgatgcgacaattttttgtgtacagatttgagaagcttcaagaag

SEQ ID NO: 5972 - DNA, 4826 bp, Manihot esculenta
  Intron number 10 from transcript cassava4.1_000055m (locus cassava4.1_000055m.g) derived from phytozome v7.0 (chr-ID scaffold11581; pos 512363 to 517188 reverse strand)
tgagttacacggagcttgcatctggtgaaggtaatattttcttcactgaaaaactggtggaggtgcatgattaatggatcaacgcaatgttggcatctgtgcatgtaaaaatctttggagaatccttctgatgagtgtagaaactctgctttgcatgcatgactgttaagggtaatgccatgtggtcatagcaggaatttgattttcgtcctgattgtatataccctctaaaactggaatcttaaattggctgattgttgcattattgccaaggttgtcaaactcgctttttcaacctagtatcagtggaagggctgtaaaatcatattgtaggatcaaatgcttaaatcttaaggttttacaatttgtttaaactacctttttaaaaaatacagttatatttatttaattaggtaaatgagtttttgtagactttgagaggaattttttattttattctgattaaattaatttttataagatttgagtatttatatacaaagaatcaaactaaattagaaatatttacaataagaataaaattccttaaatcaaacctaattagaatcccaaagattttaatccttttaattaggaaccttttatgttggtcaacactccccctcaagttgatgcattgatatcgcacataccccacttgcaaatcaaggtctgataggtagccctttggtaaacacattagctagctggtcatcggaagttatatgatataacctcaagacaccatttattaacttctctttaataaaatatcgatcaatttctatgtactttattcggttatgttgaaccggattgtaaactatactgatgacagctttgttgtcaaagtacagggggagtttgtctctctccaagaatttcaattccttctacaatctctgcaatcataagagttcacaaacgcctttgtgccattgctctatatttcgtctcagcacttgatcgagtaacaacactttgctttttacttctccaagcgacaaggtttcctcccacaagtgtacagtaaccactagtcgtctttttatcatcaaggtatccagcccaatttgcatctatgaatgaatgtatgcgaaaatgaccgtgtttagagaatagatctttttcagaagtagacttcaagtattgcaaaatgcgaaaaacagcttgcatgtgagattcacgaggatcatgcataaattgactgactaagctgactgcatatactatatctgtgtctggtggagtatgcgaaagataaatcaatctgcctaccaatctctgatatctgcccatatctactgattcaccgatttctccgtgtagcttgtgattgctctcaatggaagtttctgctggtttgccatctaacataccggttttttctaaaaggtccagaatgtattttctctgagaaataaagattctcttttttgacttggcaacctccattctcagaaaatattgcaatttttctagatttttagttttgaactcctgggccaattttttcagtcgagtcatcttttcagtattatctcctgtcattactatgttatcaacatagactataaggagagtaattttacccttgtgatgtctgataaatagggtatggtcaacattgctctactaatagccgaaggaaatcataactctactgaattgatcaaactaagctctgggtgactgcttcaactcatgcaaggccttctttaacctgcacacttttccttatgtttttttcatttgcaaatctaggaggattttcatatatatttccttctccaagtctccatagagaaatgcttttttcacatcttatgtttttttcatttgcaaatctaggaggattttcatatatatttccttctccaagtctccatggagaaatgcttttttcacattaagttgatggagatctcggtcaaggttgacagcgcaagatagcaatactctaattgaggtcattttggcaacatggacaaatgtctcttggtaattcgctccataggtttgagtgtatcccttgaccactagtctagccttgaatctttctattgatctatctgctttgtgtttcacaatgaacactcatttgtagccaataaatttcttttcagatgggagagtgataagctcctaggtctcattttttgccaatgttttcatctcttcaatcattgctcatttccacttaggatctgtaagagcttccttctaatcctatagaatagacacagaggaaatagaaaggcaaaggctctataggattgagataaagaatcacaagagagagttagaaatagagtgttttgtgcaagatctaattcattttttttttagcaattggtttatttagatcattaaagggctcaaggggatagtttgatatttggagtacaaacaatagaacgagttctagacacaggattggaagaactatatgcaattctgacagtgtctttttgtggacatggaaggtaattaaggaagctttcaggggagtctttcatatgtctatttgcaccagaatcaataatccatatagcagaatcaagagacgaaacaaaagcattatcaaagtccttacattatcttcacaagttactgccatttcaagaaaacacctctctttttctatcaaaaaaagtgaaaaattattattaagaaagaattactgttcataggtgaaaaatgcacgggtccagcagatcagaggtgcgacttgaaggcgagtctgccggaaaggatcactgccggaaaaaaccactagagtaccaatggaattagtagatcaagagacaatttctaagtgatagaatatccaaacagtagctgccaaagccaaatccaaagctactaaggataatcactttaatcggagtacgaaacctcaaaacatcacccaattctgcaatatccaagctgaatcgatgctagaagaggagatgaagctgccggatcttgccggaaaaggtcacacgctccgacacgtggctttggagcgaagagaggaaggcgcgtgtgggctacacacacttcgtcttgtcgctgaaattggacaagaggcctatctcgggttgcgattttgatcagtagggggtggtgatacaaacaactcaccctaaacaggtgatttagagacgacagatttggacccaagaagctgttgtaaaataaattttaaatcgacagaccgaagctacagatttaagaatctggttttaataccatgtcaaatttggatcaggtctaactcacctcaaaagttagtttaagggggtagttcccatggctcacataaggggcacattaccccttcccaaacgatgtggaattcaacacacctcctcaggactacaccggagcatgacacattcatgggaggtccaatatcagtggaaggctctgataccacgtagaatttgagaggaatttttgatgctattttgattaacttgatctttacaagttttgagtatttatactcaaagaataacctaaattacgaatatttttaataagaataaaatctcttaaatcaagtttaattagaatctcaaagatttgaatcctcctaattaggaatcttctatgttggtcaacagtttcgtatactttttaagcataaaagttatgaagagaaaaaaaatctttttaatatatcgttaagtgtaatattcaaattatttaattttagatataatattttcttcaccaagttaacaatttgagggtgagttatttaataatttaatattatgacacacacactctttacatttgaaagcatatttccaagtttgcaattttaacatattgaaatgcgaagaatagaaatatttgattaatataaaaagattataatcttgcatgatgattgcagttgcataaacaatagttattgctatatttaataactgaaagaaatctagaaatgatgtttaagaaaatgacaatttttggtaaattataatataaaattttaaaatttcaaatatacaaagacctgtaaaattgtgttattttgttaaattcagttctcactatttagaattgtgattttagtttattctgattttacatatgtttgattcattttagtgattctaacttgaaaaatcaaacctaaaaaaaagggtaaatttctatgagtcgactggcgattttaagtttttaacaactatgattgttgccaaattattttgttggattatggcttgtaggaacaagtctaacgatggcaaagtgtgaaaaaaaaataaagagcatataagttaaggcaaattgaaccaaaatggcctaagccaatttagtcatgggaatccctgttcagcatggacgcatgtctgtttgatacaccacacttctgggcccatgatttataacacttcatagttatgcaattttcacttgctgatggaggaaaaaaatatgaaagggtggaggacaagctagccatggcattttcctacagtattgtgatatagataggatccagtagtgtcttcagtgaagcgtatttgtcatgtttgcctgcaactcagatgtgtatagctgttgtgctttgaagagagagtataaggatatatctagtcaatttcattattaattttggcactgcttagttgcaactacttttcccctaaagtttgtcctcatacaaggaggattagaaaaatagaaaaagggggaatctaatagtattggaatttgttgcttttattgtgtgcatgtattgaaattgataattcagttatttatctgtttgattttattcggcagcctcagaaaagctaaaggagtgggttccactcaaa

SEQ ID NO: 5973 - DNA, 4559 bp, Manihot esculenta
  Intron number 1 from transcript cassava4.1_034079m (locus cassava4.1_034079m.g) derived from phytozome v7.0 (chr-ID scaffold08839; pos 47638 to 52196 reverse strand)
acgtaaatgaaatttataatttccttgttattgtagtttctagtctaaagttattctgggaggcgaatttttaaatcaatttatttatttattataagtattttttggctgttattttgagtattactatttgtaaatctggtttctcttttcttccaatcttttctgtttttgttctcgggcaagtcatttgaatttacaagctaattgtattaaatgtgatacttatgacctttctggaattttcaacatactggcatgtgttttttggttaatctgcaccccctggggcttaggcaagtcatttgaatttacaagttaaattgtatcaaatgggatatcacctttctggttacagggttaggatgacttggaggatagaatgaccaggaattcactaggacaactgggattttgaaacagtttgaatatcaagcaaaataacacaagataggcagcagctatactttttagggccaggttgtgactgttgattttgaagctagaaaaagtagggattcatgtgaactacagtttataaacaggtaatatttggaatcaaaatataacaagaaagtacaggtaataggggttggcaagaaagtacaggtattaggtacagataatagttttgcagcttccctcatgaatctaagttctgaagaattggagcttgaagatttcagaagctggccatgtaacttcaaccaacctgattcattataaccatgatattgcaattcttatggcaaagcagccgagtgaggttgatgaagaagaaaaagctactgttttaccaagtttgacatttggtggaggtggtcttgacttgatagatatattggataccaacttatctcaagggaaaaacatgtgaagatggtgttttctcttgggagagagattaggtttttgttatggtcctaggtcaaggattgcatcgcatgatgatggacaggaaggagctcattagagggagttaacacctcaagactcaagaaaggagggagtacttgataataggttatacaatagcatgggaattcttaaaattttagaagtcctacggtacttgataatagttggaaagtttatcttaatctaaacaattttaaagattgataataactagaaagtttatcttaatctaaataataataaaaattgataataactagaaaattgatcctaattaaacaataataaaaaaggctatcctaatctaaattgtaactaagattgattgattttgaaaagattttctcaatatttggattctattgaagaatgaatttggtctatccattattcataacagttttgctttgtaaagagaaataattctgctggagaagatataaaagttatgaagagatagaggtagaaagaactcttggagtatatatgatactctaaaagaatgactttgaaatgtggaggaggcaaaagaagaaaatccaattttgtcaatgtaggattttggcattgacaatatggtggaattgccaacaatgatgacaataatacttcttatatcctatttttcttttcaaagatttaatgcagatctacattgattcagcgagcatgtaagagttggcttattttttattttttatttttttcattcttgaggacaatgatgtgaagaggtggaaatattatgaatgaggagatgggatgagctgatttgagagggttgagtgacagatgctgagtggattcgagaataggccttgggcttggagggaaaaaggggcagttattctgttaatatggtggttatcttgttacacaatacacactggtactgttgtaaataaagggaatacttgtaattgaggcattcctgaaatcaacaacaaatggaaaattcttctctccttcttttctctccggatattctgcttctttcaatatctactcttccatagtgctctataattcctctcctctttctatttctttagtcaacctattctgttctatctctatctccctaatttctctatttcagtaattgctgcaagtctgcaacatgctaatttttgttgataattttcccttggagttgctgcttttctaatatatggggcttttttttttggacattcccttacaatttgtgttaaatgacctttctttatatacttcatgatgtcaagaggacgaattggcctttaaacagcagctgtcttactgaaagttctctctcccaatattgtttgcatcttggccagattgccagggtcaatcaagaaggatgtagttatttactttactccaatacaaaatcaacacaaacatcctgttcagaagaaatagggcagtggcaaggtagtggtttatttaagtaatttattaaagccatagtagaatagtgagttgttttttgaagctagcttatattttttatggtgcaatgtgaagcatggaataaggatcagaacaaatatataatgaatatgatattcagaattcaagtatgcctatcctaattcaggcatcaccctttccattcttatcctcaagcactcgtacagatcttcctccacagaaatcttgcctaatcctcgtaaattcttcaacaatgtcactcatgtcttgtttcccacatctactgcaaagccccttctcaaatggcctcccaagaattgcatccatctgtaatccaattttgggcatcaatcatttctatcaaaaactggccagctatagtcactctctgtgccttttgcacattgtaaacctcaaagtatttttcatatttctggatccaagatcttggatctttcccctcaaaagttactaatcctattttaggcaacattttagaggtacactcagctttagatgcagattgaaaggttacttttaccttttggattagaccacagtcccctgcacattccagacccttgccgccctctgacagtaaattcttcctttattccccaataaatgagttattaaggattgcaactctagtattgcgtctttattgtcctttgcaacctgttccatttcatctctcagatcctgaagctttcttgtgtgtccaaagcagttctccaaagattcttcttggagaatcccctgctgattctccacttccgccaacttcacagcttagtagtgattctgagtccaaccagctaggaatgaaatctcaccttactcgttccaagctctgataccaattattaaggattgcaaaactctaacagagtaattgagaagaaagggaatagttgagaggaaaatttagagggaagaaagtagatctacatttctgaaaattctggaatgaaattacaggaaaaataccttctccttttatagtctaatacagtaactgtcgatccagctactgtaattctatttgactctcctcctgctacaactatttccacggactccccggctaattaacgactctagatgcttctggagaattcctcagcccttagcacttcaattaactgctacagatgtttttagagaattcctttgccctttcccttttgaatgtctttgtctgatgtatgacacagttacctagtctttattttaaaaacactgttcatgaatagtgctcacagataacacttacaaatctccagtgtaaactgtaaacagctccaggtttcttccttttttttttcaaatctatctactaatcagagtcccaactcaagtattagcttgtagatgaactcaaacaggcaaacttggttctcagtagtttaacttgctagcagtcatgcatctttcatggtgtttctattacaattggaaacccagaatgtggctgtgattaattgaagaccacttgcattaattatttgtatgttagagagaacccacaagctttgcttctttagctatcaaaccaaaaatgtgatgcttttagggagtgcgggcttaattttttctttaaaagttttttaataccctttcctaattccaacttccaagtaaattgcaatattcagtttcagttctcttttgctaaatattaatcagttacctcaaaattttctctccaaacactgttcattggtagtgtgaagggtaccataactacagtgtaaacatctccttaagtctgtccttttttctatatattttaaatttttttcttctaattatacccacaaacttaagttttttacttacagtttgttgatcaacacaatctggcaaactcaccactaaatagtttgacttgctagcagtcctgcatctttcacagtgtttttatcaattggaaacttacaatgtggctattgattaaatggaggcaggtcacatgaagaattatttgtttgttaactatagctatgtgcatgatcttcaatcaagtttaatgcttgagatctttcttttattctcattttagagaagttttcttagttctcgttcctccaaaaggcattttaactatttgtagccactttgataattgttgttgtccattcagatattaaattgtgacatttgaattgatatttggacttacaggttcgtgtgaaggctgcactaaacaagcaatccaa

SEQ ID NO: 5974 - DNA, 1050 bp, Manihot esculenta
  Intron number 4 from transcript cassava4.1_019331m (locus cassava4.1_019153m.g) derived from phytozome v7.0 (chr-ID scaffold06582; pos 179623 to 180672 reverse strand)
tagtcagattttatccacagaagcccgagaaagacgtcagttcacatctgaaattacttttataaattctatatgtagacatgttttttgtgttagccactttttagcagatgcattcttgttaatttgttgctttatacttgcattcatgaaaagcatattacttgcttgatttttacttcagttaatggattttatagtggatgtaagttggtttatttttgtgctgtattctttgtttgtgaagcaataatgttgcatgataacattgagcattacgtctcattgaaacctatgtggttaagaaatattgtacgtcattgaattgctacatagagtaactagattctagagtgataactaaaatgcatttgatgaacttcttcactaggaagaactttatgatacccttttcttcctcttcaaactttcatcatgtgccattgtggttttgtcagtttgatcttcatctaatcctgtatcccatttgtgactgcttaatgaattccagcagtctgctgatgttggcctcttttatttatactaagttttgtttttgatcatttactcttcttcctccacctctctttgtatgagatttggtgttgaactgtgatgaatctgggaatattccctaatcaagtgtggtcgatgggtgttgacatgctgattagatttgtctgaaccacttttggatgaatgattctgaattggtgctaagttaaacaatcagatgtgcactaacttttgggaagtcagacataagaagttgaaaggcaatgcatatctaggcactgaagtatctctttgaattttgtagcagaggttcaatatttttgtgagtgcagaagaatagctcagtttttattttgtcctttcctttgtcacataaatattggaaccatttctataattaactctgttttgtttttttgcattttcttttgtcctgtaaattattggaacaatcttgtttcctatgcaatgatacaatctctgcagttgcccgcattgctttagttaaacctgaaaaggcaaggggcgttgaag

SEQ ID NO: 5975 - DNA, 930 bp, Manihot esculenta
  Intron number 7 from transcript cassava4.1_008118m (locus cassava4.1_008118m.g) derived from phytozome v7.0 (chr-ID scaffold01701; pos 53578 to 54507)
gagtctggtaagaagattcttctttctagttatttggttattctgagacaaactatgaatatgcactaatctgttttataatgtttatttatgtcatatagaaaggtttagatctatgttgctttacatattttcatcaaacagagatacttgataaaaaaaaattggaagaaaagggagaatgaattggattatggcatggttcagcgcccctagcaattgtgtttgataatatgttcacttaaacagatagttatggaatttgtgtgggcacatgtgacaaaattacaagtgctaggtagatttacaagacgcaattatgctgcatgatttgttttggatctttaagggtttgtgtagagttggaaattttatgtggctgaatatatacttgtactctcgtgctagttgcaattaacccattgaatacctgaattaaaaatataacctattgaacacctgaggttataaaaatcataacaattaaatacaaattagcaacattatcgataatttattttaaaaaagtaaaaaattgttcgcacacactgttgactatatctaaattctgcggactttgctctacatttgtgtaaattgaaaaagttagacgagagtaattttatcattttatgaaaacttagagtgcaattagtaaaatttagagtatagttagtagtaagtgaatattttttacttcttttgacaattcacaaatatcatggttaattttgtctttaaatgttatgatttttgtaagtttaggtgtttaatcggttacaattttagttcaggtgtttaatggattaatagcaaatagaataagggtgtaaatacatatttcactattcttatgtatattaggtttcaccttcttaacatcttttgatgaattttcgtgaatatattttgtggcaggtgtatctgaag

SEQ ID NO: 5976 - DNA, 1813 bp, Manihot esculenta
  Intron number 2 from transcript cassava4.1_016753m (locus cassava4.1_015606m.g) derived from phytozome v7.0 (chr-ID scaffold06512; pos 279578 to 281390 reverse strand)
catcttctacactgttgtgttttccattctttcaggtaattctgcttcccgtttcgtttgacattgccatgaactgagattatatgtattctattatattttaccctgtggctgctttagcttggtagttgtttaattttaatcaagaaactattaggaattatattgttattgtcattgctatagaggaagataaaagatcaccactcttgttataactaattaagttagtactcttgtttaataggttggccatatgaatagaggcagtagaattgtgtaggatctacaaaattaaagaatttctctttctagagtcttttatctctctacccatttgttttctctcttctctgccttaaccctgctcttagctttctcttctttcttagctaatcttattttcttcaaaccaaacaataatgtttggcctgaatttttcagttcataacagaaattccatgagaacttgagtagtcaatgcagccttgcagacttgcagtatcttcttcttcttcttcttcttcttcttcttcttctttgtcttttcttttttccccctctttttgggaacaagcatcaatctaaattgataatttgacagaatggattagcagacagtgttcaccttgtgattgcataagaatcaaggttgataaacgggtaatagacagatagattctgtcatattgcactagaataattaagtcagatagtatggtttgctagagtgatgtctcatttcgtcaatatcatatgtgctaatagtggcatttaaaatcttggaagaatacatgttttttcatatagttcgtgaaaagaaaatggaaaaggcatttagttttaacatttgaacacaacaagggttaatagacaaggtaatctttgtttcttcttgttcagtaactgcttgctggtacacatatttccgcttgtctgtattcagttagatttaggaaagaaccagatttacttcttcatcaataaatagtaaatagtttaactgtaatgattctattactgatacatacttcttgctgctatttatgctgttgcagttacagaatggtttggagtaaatgagtatacattaatcataaattctttcaccttagcattgggctcatattttgtaagtatcacattgtcactcatactatagcataccttatagcttgtgggcataactaattttttgttctttgtaagaggaataatgttgaatctcacatcggtttgagatagggtaactcttataggggtaactcttataagggacttagacactctttctcttgagctaacttttgggctgagttagacctaatccaaatttaatatggtatcagagtctcccattgatattgggtctttcgtaaatatgtcacgctcgagtataattcttcattctgagcgtgaaggagtgtgttgaattccacatcggtttgagataggtgtaatgtgcttaacttaggcactccttcctcttgatttactcttgatttagattttgagatgaattagatctggttcaaatttaacaaataattataaccgaatataataatggcttacaagttactgaaacagaagaaaattttgtgtatcctgagcctgtgaactagtcttaagagattctacattcttcagaacagtaaagacaattggttaactaactgagcttatgacaatataagactcctgaattgattttccttgtagttgatgttggtttacaaaatgtatccttcgtgtgctaagtgagaatggacaggttgctgatgttcatttctattatctgtttcttgtagtc

SEQ ID NO: 5977 - DNA, 3261 bp, Manihot esculenta
  Intron number 4 from transcript cassava4.1_024604m (locus cassava4.1_024604m.g) derived from phytozome v7.0 (chr-ID scaffold06792; pos 230397 to 233657)
ttacagtgatcttcaagtttgcaaagaatttgtgggtaagtcctgtgtctcaagtttttttgatcgattgaaagtctctgcagttgatgacaactgccagctatttggctttcagaattctttttgttttgtcttggataaaatttctctgttttgatttttatggagctacttataagatcacttttggtatgccatagtttaattatatttcttagttaccttctcaacttgtaatggaagaacaaatatagaaaaaacatatttcaagtgatatagtgattgtttaattacaaaagatagtaaataaaaataatgagaagataatcagcatgaatgaacaactccagtgacattggttccatatcagtgaaaaatcttgtgatcatattaaaaaaattacaatcatgattttcccttaaaatacatttatatattattcttcttttcctgctgccacccttttgaagaatgagtactaagcatgctgagcaatgcattattgtttctagttgattcataatgtagatatggaggatgaagtagtatgatcattttgatgaaatttagacatttcatcatatagtgggatttatgaaactttagagaagttcacttgcaatttttactaatgtttcatttgcaaatatgtaatgcaccagttgattgcttgcgtttatgtgtgtttggattgggaaactatgcttgtacatttcattgtaggaatttgttgattattagtaggttttgttgaaggggatgtctggaattagaatcgaggggtatatgattttttaaagaaaataaaaggtcttattccaatccacatatgattgcatggcccatgattagctactcgattagttttgttctcttttagtatgatatagtaattagtagtctaacttctagaaggtattaaggattaggtgatggagaatcaaaacgtcaaccaataataaacaaaaaaataaggagaagagaatatggagaggaatgtctgtgattgtattaatcaaaatggaattacagcagttagggaaagctgagaatggacaaaagataaagataatgactggtgtaagccagccctcaggacaagcctaagcagaggaaattctgaggaaattctgctgatacaatggattacaaaagatgccctcctctctcatacatactatttatactgacatttcctaactaacttggtggtgatgtgtcccttcctttttcttgattctcaagggtgattctcttggcagctttacctcttcccgtgtatacccaatatacccctggagttgtagctggattcctatcattaggatttaggagtcgatatcctgggtttgaagttatttggagtttatatatgcctgtgcttgtatccttcaaagacagattctatctataaggttagggaggatgtccagctactttgcttcttcggactatttgatgcaattctaccttagatgtgatgcttatggaagcctaattatagttttgggttgattctaatgctagaatcatatcaattttcttttggtttcacaaggtaatcacattttaattcccttcaattcaactcaaacaaatgatcgtcttaaagttatcgtgtcatgtctcaaccctggattgccaacaattgctaaaatttccatacattattttgctttgtaagggtactctttcacaagctaatgagtgcaaattcttaatctttctggctcctataccaacccaaaaccatttctattcaatcatctattgtcttgcattggatataccttcttagtgtcatttaatttgttcctgttggaatttgctgatgggccccgtccaagtctgagagtggagagagtgctgggtctcaaaatggggcttgattggatttgttgtggtggccttctccaaaatgcccttagccattttggattggccccatttcactttattaacttttcctttctcattctttttaccgacatgggattcccacttctcctacactcccctggcccagttgtgacttaccttcgtttttgctcatcttgggcttgtgttcttttgagtctaagaggtcttaagtctctctctctctttttttttcctggacttgtattcctctctcatcttgggcttgtgttctttgagtctcagaggccttaggtctctcttctaatttttttttcctagattcgtattcctctcgaacatcagaggccacaggtcttccaaaattttgaactggatcttcttcgttgagccttcattcttgggcttcggtcttcaatatgcttgggtcttcctcgttgagccttcatctttgggcttcaaatcttaggccgcaggtgttgaatattttttatcttcatgggtcgtgaggccattgggtgttgataccatgttaaaatttactgatgggcccggtctaagtctgagagcggagagagtgttgggtcccaaaatggggcttgattgggcttattgtggtggcctttggattggcctcattcgctttatgaactcttcctttctcattctttttaccaatgtaggattctcatttctctaacatgttgaatcccacgtcaatttggaatagagataatatgcccttataagggtttttggcatttttttctctagagctaactttgaggtgagttagacttgacccaaatttaacatagtataagaacctcctcatcgatgttgggtctctcgtaaatatttcaaactccagtagtactggatgtgagaggtgtgttgaattccacgtcggtttggaatagggtaatatgtccgagttaggcctggcccaaatttaacagttccatgtgctatttttttttataacttctattggtataaaaattatataactagattgacctttaatttttctttttccctcaactgttgaggttttgttgaaaaattttgaatatttctatgcattcttgataatgggttagttcagaaagaacctcaatggccatttgtagatatgtttgaagagttgacttctagtatcagtaacagtaggacatgatgatgagtatctatgcctttgccttctttctttttcttctgctttcttttttttttttttttggtaaaaaaaaacattgtttcttaatggttgcatattagtatttataataatatggatttccatttggcttctcttaaaaatgtgtcatttgatctttataaacaggaaaagccctttccaagcctggagagactccaaaa

SEQ ID NO: 5978 - DNA, 1877 bp, Manihot esculenta
  Intron number 10 from transcript cassava4.1_004033m (locus cassava4.1_004033m.g) derived from phytozome v7.0 (chr-ID scaffold03693; pos 28021 to 29897)
cagttgagcatctccttgctgctgctgacatacaggtatgatacacaaaaattgttgtgttcattctgaagcttcagaaaagaaacagaataaatatgttacacctgaaaggtgcacaagtcgaataactacatttttgaaacaccataaagaaaagaaagaaacataaacaattaagattaagtgtttggctgtggcgtgttgtttatttactggtattagcttagagtgtgttagtgtacattgtggctttctgttttttgtcttttatatgataaaaaaatatgtagcttatttggttgttagtgttgtgtttttattattactacttattagaaaacgtttttgaaataaaaaaagccaaaactgaaaaactacaaatattggttttcttgttacagattttatcgaaccattatttttcttagcaacttctattagattatcattaataatttcaagattttatttctatcaatcaaattcatttattttctttagattgattccaaaaaaaaatatttttctttaaatacatgttcattcaattaattttaaaatacatctttattttattatgagggaaatttactatttagtttctgtgatatgcgaaaactcattagttgatttctcgattttgcaaaatacattaaaatgttaaatttgggtcaggcctaagtcatcccaaaagctagctcaaaggggaggattgcctatggtccatataaggggcacattacccctttccacaaccgatgtgggattcaacacaccccctcacgcccagaatttttactggtgcgtggcacatttatggggtgtccaacatcggatgagaggctctgataccatgttaaatttgggccaggcctaactcaccccaaaagttagctcaaaggggaggattgcctatggcccatataagaggcacattacctctttccacaaccgatgtgggattcaacataaaacattcttcaaatttataaaaaatctactaattagaccttcaattacttttagctattaaatattttattatttagttcttttggtatgaaaaaaactcattagttggtctcttaattttgtaaaaatgtcttttattccctctgtattgagagaattttagacttttttataatgcataatggttaaattaatgggaggactaattagtagatttttagaactttaatgacattttaatatatttttcaaaatcgagagattaactaataagtttttctgtattacatggatcaaatagtaattttttcttattataatgttatagactttgtaaaaataatttacaattcatttttgtgcggaatcatttataaaattatttatatccttattttattattaaatatcatatttcaaaaaaaattaattttacttatttattgtaaaatttataaacttatttttgtacacagttttttaaaaaataattttgagaagtaaataatataagtcaaaagactatttttagttttgaaaaaaaaaaaaagaaaatcctagggttaccggacacaccagttggaatggtatatttccattttaatttggtcaattatgttaagtaatctgattataatcctcagaatgtcagtggtatcaactgttcacagttaagtgcatttttaaaaatggaaataatttgattttcattgtaatcagaatccaaaagaggtgggaaaccatgcattctgccttcttgatatgtgcccttatgtacatctctaacatatacttacgtacaacctagaaaattcgtttacatcaggagttgagatgttctttttacctcatttgactagtccattctttggatttacagaagctgatctttttagacactgttg

SEQ ID NO: 5979 - DNA, 287 bp, Manihot esculenta
  Intron number 1 from transcript cassava4.1_015496m (locus cassava4.1_015496m.g) derived from phytozome v7.0 (chr-ID scaffold05162; pos 268389 to 268675)
ccgtttactactccgccactcccttgtacgccgtcttcttcctcactctctcgcttgaacatcatagcttgtattaatttacagatctgtttctccgattggattctactgttttaaatccatctccgattcgcaaattacctaaactttggttccaattcgcctttgtaaagcaataaaaagcattgaatttggaatgagtttatggatttctggtagttgtatatgatttctgtgtagggagttgattgttgtgcaatttatctttgctattcgcaggtccgagt

SEQ ID NO: 5980 - DNA, 4142 bp, Manihot esculenta
  Intron number 5 from transcript cassava4.1_013644m (locus cassava4.1_013654m.g) derived from phytozome v7.0 (chr-ID scaffold12525; pos 673863 to 678004)
ccaaacaatagtcttttatctgaatacattgttagttattctaaactgacttgaatgtggttattttttgctttgctaattgctagacaatggtttcatttttatctccaattatagtaatctctattgtgatatatttcagctccaccttttctgcttgccttgcctctttacctccgtttgttactctttccagtctcgcatcacttgccaagttatgtgattttctactttcatagacccggaatatttcttaaatagaatcttcttctctttttggtggttggaatcgtggactataattttgtgctggacatgcatggagaatataaactttctgcctttaagtgttgaatacattctgtctcttctggctttgctgtgaggggacctaaaatacttttgcttaatattaatagcaaggggagcaatgtgacaatggcagcaggcatccagctgatgctatccctattagttcgggctattcttttgttaagcaaaatgtgtgtgaccttggttatgggtgtcttaggggataatttttgtaaatggaatctgtatgaagttttattggctaacaaatttggtgagcactgtatatgttgcaagaatttaattccttggagcttgttattagtgctgcagcaactgctgcttcatttacatcgcaggagggcatttgctgtattcttaacgcatatcgttctgtacgagatgaataggatgagaaattatgttgggacgataggcattagttttcagtaaaaggaactactctgtttctttgggaagttaccttaactgaaaatagcattaatccttcgctagtttacagtaacatacatttcaggatacatacttcaatcatgtagcatgggagaaagctactggacttagtatgttgagataaaaacaagtgacagagaataagtacttgtctaatagaactatgattaaaagttggaatgctctgatcttgatattcctagatgtgatgaatagttgaggttcttgttatttgtaggagttctctttgtgcgtactttacatgtttgggagaaaactactggacttagtacattgacataaaaacaagtgcaatagaattaacacttgtctaatagagctaggatcaaaagttggaagcttctgatcttaacattcgtagatgtgatgaatagttcaggttcttgttacccataggagttctctttgagcattctttacgtgtttgcatctgcccttattgcttgagctgcacttttgttatgctggaagcatgttggttcattctgtggtggaaacttatcaatgggtacctgcaattcactatgaagtgcttagctataaaggttctaaaaaatggcatttgaggagtggaagtattggagagttggggtatgttgtagcgattcactggaatgattccaaatattcctgtccatatattatgtttgcagggccatgatgttcaatgcttgaatatggagaatttactgaagaggattagcatttgacttttatggcttgtcattggtgctattctggattaacgaaaagtaataacctaggctatacttcctgccattgcctttaggatttagattttggagttagtttctaaagttgtgtacatgttcaggtggatatttagctcaattctctatgtataaactgttagactatgtgattcgatgactactcatgcttgattgaagtatatttggactgtaggagattttagctatgctggatcatccttccctcagtttttcagtgtgtataatttaaagatttggttatgacctccagttgagtgtttggttggatttgaccgactcacagttggtgggtgggtgattgaaatagaagaagtactaggcaaagccgattcactgatttaagctgatggttggaagagcgcttctcatatccctgacacagtgttcaaggggatgtgggaagcccctcctaaatctactggtctcatagaatactagtaaagcaagatatatgagttcttggacggacttattacagattttcattgtattgtttcaacgcttcaaaatgtctgtggagatcatataggaacaccctaacacttgcaggtcagaatgaaacaataaccatttcctctttgacaaaatttcacttaggtcttcggcccatctatggtaaagtaatggccatacaaccttaactccatttcacactttctaattcttcacttgattgttctacaacatcattcagtagtcaagacagagaatatgaccatgtacaactacaagtatccaagctgcttgatacgtcaaaatgaccccagaattctgaaggacaatgggcatgctgtttgacgtgagggtgactgctaatacttcttaggcaagtattctatctctgttatttgggtttcatggatctaaaacttctttttctttaaggtaattttaatgaatgatctattgtgtttatttccttctcttattggtgattaatgactagtctagatctatatattcataggtagttcgccataggtgcataacttctcatatacgctaccaaacaatctgttactttcgtccttgctaagttattcatcagctttcctggctgctttgattgtctataggttattagcatcacagctaagcaagtgcagttacagttaactaccatcttttcaacaacatctgttttgctttgtacaactatacattaatgttcaaggatcgcatgaaatggtgtagggcaaagctctgttgttgtgttgttggataataggaggttcagatgattgtcttttgatgcttacttactgatgctctctacaaggactattaagagtatgtatttatgatggataagaacatattttaggtgttattttttggtgaggaatatgcaaatggaacagtccatgaggcagacttgaaaaggtctcaagttatctaagtggtaaatttgatgttaatatcttctaaagttcgccattcatttgtagagccatgaggtagttatttgaacgtgggaaagccttggtttgaaatttaaattctgtttaagggtatctatggatgagaaagggggggcgagtaatggattgattctggtagttatatagaatgatatgattaatttggactggagaatgtttgttctttttcccctttatcagggtgcccactctaatcaaattcggtttattcggtttttaatgtgtagcaacttattaggtatttactgttagagttctggctcgagaaagatgctaaggttttgctagttaatagctgatttatccttctgttattgttctttggatttttcttttgtaactataatttgctctggtagttagtctcttcttgaaaagcactaggatattgttgatggcatatgattttggacatcattggagaagggatacaaatcaatagaaatcctgaagggcgaagttggattgcaatcttatttgaactttgaaggtcaccatgcttttgtttttgtaataggatggctgcataatagctgattaacctcctttgaaagttatgggttgacttatctttaacctttttgattaccaggctttgataaaaattctcctgtagtgtgaactagtgcctcagtataatgtgaaggatgtcatggttttcgtccagtgaaattttgactgcattactttcaggatggtcattcctgctacaaattagatgaggagatggtttgttaagtcaaagaagttatttaagttgccaactaagctattcttattgaacaatgcaaggatgaacaaagataaagttatgattcactatctaatgtttgttttgatacaggtgtaaccttagagagttcatcagagttcatataggttgagttatataattatttgacacataaataaaacagctacacgattatataagcagaagcaagatcatgactcctgaggcagtgtatttaattttatcaacttacatacgataaattaagaacagataggacacaatatttctagcttgtcatcttgtctttgattattgaagttgcattttcgagatttcttttaactatgttttctttaattttttacagattgataactgggtgtgaaggcaggcgaaactcag

SEQ ID NO: 5981 - DNA, 3793 bp, Manihot esculenta
  Intron number 7 from transcript cassava4.1_004228m (locus cassava4.1_004228m.g) derived from phytozome v7.0 (chr-ID scaffold02572; pos 401912 to 405704 reverse strand)
cgtgcagccattgactcacttctgaaggtaacatttgtggttagttgtggaattgccattattacctgcttatgatttattaataacattttgtgtatgtgcgtgtgttgggggggggggggaggggagtgcatgtgctcgtgttgtgttgcttatttgaccacagatgatccagcatctaatctattaatatatataaaagtgggaagagtggagggaagggggaggaaaaagaggagggggtggaggaagtaatgggattgccaaaaatacctaaggttgagtttgataattataaacttttctttattgtggtttgatacatgcacacgcaattatgttaaagtctatattattgtttgcattttaattaacttcaaataagtacttgaaattttctacttttgttaaaaagaggtaacatgttagagtctttagaaatggatcgagttatgggtctgttgctagaattttctggaatggaactgaaattttcttttttggaatctatgttgcaatgaaacatgctctttaaagaatacctgaaagtcttttgagttgactacttaaacactttagaaaattttctcatcccttttattttatttagttgctgcaatttaaatacaatagagagatataatgatctcttacataacgatctctttaaaacagagaactactaagcaatatgaaggatcaccttttaccactaagaaaaagcaaaaactaacttgcactatccacattatgggttaaccactaagaatatggcttaactactaagaacatggattaaccattaaaattatggcttaaccactaagaatatggctcttgaaaataggacaacaattaacaacttaagaaaatggcaattgaaacctggttttgctaacattactctccacttccattattcacttgtcctcaagtgcaaatttaggaaatttctgggaactattcagctagtagctagtccgttgcgacatctcctgggtcattatctgctagatccgaccataatagtttcttgcattggtgtccttgaacaaagagtacatccatcgtcgttgctccatctcatcgcggttcaattgcctagaatgacttgcaacatatatcgaccaatttttccatttatagagtctttatatgttcatggcttactagatttgttggttggtgaagttctacctccatagtaatatattctataatccactaagataaagctttattttttttatcctgggtgaggcttccaatttgagaaacaagaacctcaaattgggtttagtagtcagcaataagtcctttctactttaattttgctagctctgtcaatttgttattagggattggtgactcaaaacgaagattgtattggtgcttaaaatcttcccaagtcaaattaggcaataaccacaattgagttgtaccttccaaatgaaaagaagtcgagctaacctcctaatgaatcttcttgaccattgaaacgagagaaatctaatttaatgaattttgaaacaatcgtatcattacctgaattatctgaacccgttgatcctactggctactactcccttgcctatggatgcacgatagtggcttctttcctttgtcataggtgctaggttagagttggtaatgtcacaggctagagattccaacttagcacttaattcttcttggtgagccttgttggccgctctcttccacaatgcaagaattcaatcaagttgctattggattgagtcgcctataacttctagctctgataccaaaatgttagggttcttaaaaattgattgagttatgcgtctgttgctggagacaaaattttctttttgtgacttgtggttgcattggaacatactctttagagagaatccaaaactctcttgagttgaagtactttcgaaattttctcattctttttttattgagttgctgcactttaaatataagagagacacataaaaatcttcttaaaaacaggaaaccactaagtaacgtggaggatcaccctcctgcaactaagtaacttgcactatcaacattatggattaactactaagaatatggcttaagcactaaaaacatgactctttgaaaataggacaacaattaactacttaagaaaatgacaattgaaaatttggtctgctaacattactcccttccactattcgcttgtcctcaaccgctaactcaggaaatttttgacaactgtgcagtcagtagctggtccattgcaacatctccgggtcattatctgctagatccaacttgaatagtttcttgcattggtgtcctcgaacaaatagttcatcattgttaaaacaaagtcatttccatcatcgttcatcgctgttcaagtgtgtggtttgagtgcataattatttggatatcttttgcttttagttgaatgacttgcaacatatattgaccaatttttccattcatggaatcttgacatgctcatggctgactaggtttgttggttggtgaagttccacctccatagcaatatattctttccatccactaagataaagctttatttttttttcatcctgttgaggcttccagctcgagtgacaagaacctcaaattgggtttggtagtcagcaattggtcctatttgttttaattttgctagctctccaaattattacttcggattggtggcacaaaacaaaaattgcattggtgtttgaactcttcccaagtcaagttaggaaaatctggcattaacggcaagaaccacaattgagttgaacctttcaaatgaaaagaagtttggctaaccttttcctttgaaaaggtttactggtgtcgaaagaagtgctcacacctattcagccatcctaatgaatcttcttgaccattgaaacgacgaaaatctaatttggtgaattttgaaacaatcataccattacctgaattatctgaattcactgatcctactactgccttgcctttggatgcatgagaagggctgcttcccactgtcacatatgcttggatagagttgtaacgtcatgggcaagagattccaacttagcacttatttcttcttggcgagctttgttggcagcttgctcttccacaaggcaagaattcttgctgttggattgagttgcccataacccttgactttgatactaaaatgttaaggtccttagaaatggatcgagttatgggtccgttgctggaattttttagagattttctttgtgacttatggttgcaatggaacaagtccctagggagaactccttacggagaacttgaaactctctatagaaatttttctcatctttttttattgagttgctgcactttaaatacaagagacataaacatctccttaaaaaaaggaaccgctaagcaacatggaggatcacctcttaccactagtgaaaagcaaaaactaacttgcactatccaagttatgggttaactactaacaacatggcttaaacatgactcttgaaaataggacaataattaacaacttaagcaaatggcaattgaaacctaggtctactaataaaatcttgatcttgtgatgaatatttgatctgacagtttaaatttttgtttatttatttatttatctttgtgactcatatgactcaggcacactcctgcacttgtgcctgtaacaactgtgccctatatgatgtagcaaatccttctctagtcatttgattggttatatggaactgacatattaataatgcttctcgaaaatataatatcttatttaatttttggattcagg

SEQ ID NO: 5982 - DNA, 1756 bp, Manihot esculenta
  Intron number 5 from transcript cassava4.1_001266m (locus cassava4.1_001267m.g) derived from phytozome v7.0 (chr-ID scaffold04209; pos 600606 to 602361)
gtggaagttcaggtaacttgaattgtttttcaggttccttaatttctatatatattagctaagatttggggaacaactttaagctgatttccactattttttctttacagcaatgtttctgttttctaattgttttccaaataaaaaacaatgactcttctataacaaaaattatgttatagcattttcataattaaaattaaataattatttaaaaatatttatttataattctaaattaattatattattataaataaaaataaataatacaaggtaaaaatttttaaatataaaaaatgaagttttttgaatacatctttaaatgattatttttcaattataaaagttatgattttttggattagaaaatgattttttttattattgcaaatgaactcattttccatgtttttccttattttctgtgaaaaatgaaaactagttttgttagaaaatggaaaatagaaaatgtaaaacagaaaactgttttccataagaaaacacacccttggctgtttgaatttttagcttgtgcaggataatagtatgaagtattacttcggatttatattctcttatagtgcccttacttgagcaataataatggaagataaatagatttattgaacatacaatatttttcaagaaattttagcctattatagtggaatttaaattttaaagtttaagtggtagaatgcaacttaaacaggcaaacaagaaacctattctaattaattaaactttgtggataaagatggcatgttttggctatttcatgttctgagatgtgaatgtaccactttttggaccatgtgttttggaatgccatttggagggcgtgggggggccaacaaattaggtaacactgagctggacgtgttcaatattagccaaatttgcaaatgtgtacaacctgtttcttgcttctgtcccactatcacactatttgaacctctcttttcaatttcaatatgggtaattgttacttaataaatgtataaaacaagtaatacgttgatatgttataaatattgtaatttttagcttagctgtagaacaatcatagttacggttcagtcaagaaactgttataaatgaagattagtcattcatctgttgatgtcattattgatgtaagattgaaggtgtagaaaaatttcacttattgagccattgttgctggtgtttcattttccaggttacaaaatgaagctgtcatcatcttttagtctctttgttccttcttttcagtattctcttattttctgtatgtcctaattaattaggcttatgatttttagctttgtccattatgcattaaataaattttaaggtattttggttattaaggtctatggtatcatttcatttttttcctttatatgatgctatggcttgtatttgtaatttattaattgttcattgctacttccatgttgagtcttcttttattgaaaatgttgaacctaaattcaacaattatgtatcatttgcatttaaatattcttcgaaatgatttaccttaaatgttgactttcacttgcttcaaatcttagagatgagatgactacagaaattgactatcgaaatgaagctacttgctttactcttatgggtgtctctagtgatgatagcatactttatcttatggatatgttgacaagttatgtctttatttatttatttatttttagtagccatcaccgtggttttcttttctaatgatagggtgacaagattcggagacgtg

SEQ ID NO: 5983 - DNA, 1925 bp, Manihot esculenta
  Intron number 1 from transcript cassava4.1_000354m (locus cassava4.1_000354m.g) derived from phytozome v7.0 (chr-ID scaffold09870; pos 313029 to 314953)
gcaaacttatcttgctctcattactgcctcaagaggtagcgcgttctgtttttgctttccttttcggtttcattgtcgaaaactttctggaatttatgtgttctgatgtgctttttgtttaatcttttgaagtggattagagtttataatttttcatttgattataatagaagttaattcgcatttttcatcgctgagaaacccgaggaaaaaagttgattatattatcaggttgtgaataccgaaactgaattgaattttgaatttatattaatttcgtaaagcatttttttttttataaaaaatttcttatacatagattgggaggagggagaatgtgactctttacctttaccaattatgctatgcataaaccatgagctcgtttgggaatttaaaagtgctgaaatcttcactcttagtgtgactttttgtattttgaaacatttaagtcatgagccttggacatgcatagatgattgaatagtagcaaacgtggagtgatagaaatatgcttttgtctgttgaaacaagaatttgaataccttttatctttatttgggaggaacagtaccccgaaaggtgtggcaacattttagctttacatgcactacttcaatcatctattattgttgcctgctaccttgaagttttttttgtacttgcagagtcatatgtgctcatgttgaatgcttgagcatagttgtcaaatcaagatttgaatcaagaagtaaaattcgataaagttctaaaaataaaaaattaagttaaaaaattcttataatatgttttgctaaatatataattatcatttataaattataaagattctttataatagaataatatgtattttctatattatatagttttatgctacaaattataatttttaaattgtagaaaatagtaatcatcataaacttgctaaatttttctttaaatttgatcaaataattaaatagtaaaaaaggataacaaattttaatattattaatataaattgtcataacttgacaactataattagttaagtaaattaactaaaaagaaaagaaaaagaaagaagagggagaaggaaaagaatggatggtgaaagaaaaatagttaaggaactgctttatgtacatcttttatggtaaaaataaatgagatcttatattttaaaaatataaaatatgatagaccctttataaataattgattgaaatcgggtgaagactcggttgattcatattgattcacttgattcattattgattcttgcaatttagtcacatttaggcatattagcaatttactctatatatttgaattgctaggatgtagaatcgaatcgaggatcataagattcaacaatcttaagattcaagttaagaatcataagattttggtacatttaagatttaccctatagattcgaattgatttgttataaaattgatttgaattgatttgttataaaattgattcgaattgtacgattctgataatggtgtgcttgagattaaatgaattttctgttaacttgattgtattacttaatgcctatgtagcctagtccatctttcagtatttgcttgcaaaatatactttactttatcaattaaacaaacacctagtttgagggcgaaagaagttgggcgcagtgcaaataaatgaaaatctaacatagagaatattatgacaaaatttttcctctacattatactatgtgcgcaactgcattaaagcttttttgactccttaagaaaggtgttgaaatattcacatttctgagatgtcctacaattgcacatgcacacatcaaaaagaaaggaaaaaggaaagaaaagcggaagaagaacaagaagtgagaaattagtgacttgtatgctgctagtgttgcaggttgcactagtgtacagcgtatagtagctgatctc

SEQ ID NO: 5984 - DNA, 1752 bp, Manihot esculenta
  Intron number 2 from transcript cassava4.1_008913m (locus cassava4.1_008913m.g) derived from phytozome v7.0 (chr-ID scaffold03283; pos 194528 to 196279 reverse strand)
tcaagctacaagggagcagaggttcctgaaaacaggtttgttctttatcagtacaggacaagattggtgcaaatttgctcttttctatttagttataaatcttgatagtatctctctttactgagaagttgcaagctgtcccacttgcaggtttgtttgggctggcaatagcttaaactccaacctgctctagggttggacctaattttgtgactttataaccgtgattctgatcttactccactgtgttgatttagatttttgctaagccaacctttttttccttacttggattagaggttttattttgaatagaatcattactaagtcaacttgctgattacataacctagaaaaattttcacagccatatttaaactttagcatattgaatgaaaataaagtgtactgttgtacgagtgcgtgtggtgtggctggctaaaagtggcattactttagttagtatagggcttagcagggtggttcctgacatacttttttttttttcagttattggttaaaaaaaatccatttggttagtttaataaaaaaggataaccaactaatctgaatcatgtcctatgctgtgaaattttagctgcctttatattagaatccctgatttcttttcacgccctcctgcatgcctcagttcttcttcactactcgtcccttcatgcctccatcatacctcagttttgtttcttaattccttttggatgactggattcaattctatttcaaacctttttgtcctctctccctcttgcggtgtttcagttgcttgcctcctggttcatggccccctctttgtcctcattgtcttctttcctccttttgtttctttctgttgcttgcctccctggtctcattctcctcctggatctcaactttttcctcacttctcaagtgttcaggttcactgcatcagcttcccttgctcttcttctctcctgcacgtccaagtctctgatgaagatgctactctttctctgtagatatatttatatttaggattatgaagtgagctatgtctggattgtgtgattctgtgatgatttagtgaaatgtaaatgtgggttttaaatgaaatttctatttccatgtgtaattgtgtatctaatttgcgaaattgcagaataatatgcagatttatttagatggaattgtaactggagttaaaagttaatagttctctcttcacttattctcttatttggattctgtatttcgtgaactttgtgttgatgatgaattatatctttttttttaggttatacatttgcaataaaaaaatgagagaaatttcacttttgcaactgttgagatatgtagaaagaacagaatcaaactgaatttttcttcgattcagttttactgtatagtttggttcggttcaacttcgtgctattatctctttttggttattgtagtttggtttagtttggaactgaactgaccaattgcacaactattggtagtcaccaaaatcttttctttttacttgctgattggcttgttatatttacgatcactgattgatgctatggcaattcttctgtacccatggtggtaatttatttgtcaactgatctgagttactatccttcgtttttagacttggttaagcttttttcagaggcaggggacattagcttcctttgttatcagacaatatttgtttgtcctttgatcacttatctgtgtctactttgttacctttttgaaggaatctgaaagaagtggaccttg

SEQ ID NO: 5985 - DNA, 3154 bp, Manihot esculenta
  Intron number 1 from transcript cassava4.1_018681m (locus cassava4.1_018681m.g) derived from phytozome v7.0 (chr-ID scaffold02023; pos 91515 to 94668 reverse strand)
aagaagaggtcaatcctttctcggtaaatttcttttccatccttgtccctctcagatctatctaggattgaatttggttttcggtattagtgtcataaggtttaggtttattgatctggatataaaatacatttaacgttttcaatttttaaatttgattaacatgatttattaaggtggaatttggtgtggattcctcttaatttgtttttcccaacttcttggaatgtgatataaattgattaaggtgaaaatgctcatagtttcaataataatataatttatattttcctcaaccaattttaaattttttgaaggattttttgagtcagactttggcccagggtgacaatggttgcaataaataatttaatgtcctttaaacacaatattgatacattctgaggaatctatatctctattaagtgagagagcaaactaaatatcgcttctttacaactgctttattattcttatttttgggttcctcttgttatatttgttgtgatatgtactttttccctagctgcaaattttcaagataagtgccaggggattattttggctttgtaaagctttatgcctgcttatgcttcactgaaatttttatgagacttgcaatttggtcccttttcttttcaaattcaatgcttatactgtaagatcttagttcttacaatgtttgttcccttgctttaaatagtcacctttcctttttgtaatgcttctgcaccataatcttttctttttttgaaaaaaaaaactcagtgtccctattttgtttgacttagtatttcatttttttttcatagttgatgtatagacatggcatttttgcgtggaggataaattataaatttattcttatatataagagaggtggagtctatagcactattctatgttctcttttatttgaactgcccagagaaggttctctaagatattagatttatacgtcctttatacaatgaaatccactaggaaacttctttactacttttattgctttgttcagattcaatgcaaaatttgccatccatttggcagcctttttacttagagatctttgtatttttcctttctttccatttgtaataaatgggtagcaattagttgaccctgatgaaaggggaaggggaagggaaggagaggcaatcctttacttcttcgtgcttgggacttgggaagctaaaaataagataagaagggaaagaaagggaattgactaatttttttttaataaatgggaagaaatgaaactttaatagtaaaacacaactaaatttttagcatttaagttatgtttagatcgtctataaaaagataagggtaaacagacaagagaaagattagattcttcccacccattagccatttaggtaatttttataggtcctacattggtctgtaaaacattttatcactattgttagaatcttatgattttttattcaaatctatttcctactatattgattcaaatctgtagggtgaaatcttaaatgtatttggaccttacgattcttgattcgaatcttacgattttttatttgattccacatcttagcaatttgcatctatgttgcccaactatagtttagaaactggaatagggtgtttggcgtcattttcttctagtgttgatgctaagggttcctcagggataggactacctatttcacccctctgttgtttagctctagatttctagtcttaagaactcaatgttcctcgtgaactatttatgtgtctcagaagtatggtcaatgtgaagctggagtggcatagactatttttctccttcatctcattcctgcaatgataaaaaattaatcatattattgtcaaataaatggacaacacatgccaataagaaatttgaaagtaaagtaagttttttaaatatgttttttaatgattcattttcttaattatgaaagacataaataatttttaaagacttttgaatgaggaaattattgtctactattgacaagtgttgcgtttttcaattttccattgctttacattacacaagagttttcttagaaaatgaaagtaagagctgtttttcataagttattggcactatctatctactatattgattgaattttgaaagtgtcagttgggtccacatgtcccatacaagcaaaatggattaccaaaggtcatgaagttagtatgttgagataattaatgtcattttctgagactcttatttagtttagaaattgaataaagctttattgaatgcagatggtttgaatcttggaagggcatattttgcctaaaggtcatgggctaatttgaaaagagaaatgccactagaatgccttagctaattttaatttggtactaggttgattttgatcttgtgaactaatttttatgaatgttgcaaaaactgatggtatactcaatactgaatctgactgtaggctgacttttgtcttcaatatgccattgattagacctgagcatgggtcggtttgaaactggaccgggactagactgggtcaatggttttaattcataaccagcttgagaccaagttatagaaactggcccccccctctcgcccctcttgaatatgaattagaacttgtcctagaaccgttggtttaaaccaaaccagtccaactcaaaaaattattcttgtttgcagaatttatattcattcctttttgttttattttatttttgtgtattagaaaataaatatgtgatttcttataaacctataaattatacatttatatcttataatatatagaatattatatggaggtgcttcttaaaagttccaaattggtccgaacaagataccaaactgctttgaacctggaactataacaaaccaaaatcatgttgaacttgaatcattatgaactggaattgtttcaaaatgaaactggtccaagctgtggagccagccgaactggtggcccatggccaggtcttacattgatgagattgcatcttcctcaaccatagcttactgtttctgtagtagttgtagtttatatgcatatgggtgtgtattggcacacctgagctgtgttagcaagcctgagcttatatcctctacagttctactgttcatgtttcattgtgctcagtggtgccacttactgagggtctttgcagc

SEQ ID NO: 5986 - DNA, 1513 bp, Manihot esculenta
  Intron number 1 from transcript cassava4.1_001104m (locus cassava4.1_001104m.g) derived from phytozome v7.0 (chr-ID scaffold03874; pos 174547 to 176059)
agataaaaaacgagtccgttgatctggtattctcacttttgctattattattatcttaatgttgttttcacttcctcaatttcaaaactcagctcaaatccatttttaacactcaaaaaagctaaaaccctgattaaaacggtttaggactttggagttgggacgctcagacgacgagttttactttttccttcttggttatgtgatgtgctctctcctcacatttttgtttaactaagctttcagttacaccatctgtgtttggccatttctctctgagaactttgagaccttgtgacagtaaaatttttcttcgctgaagacaatttgtttcttttttcttttctggtaattatatacttccatttcgaggaactaaaagcccttttcaaaagataaaagaaacgattctttttttttcaaatttttataatctttttatcaatatataaattgtatttttttgatacatcaacatgtaatcatattttttttgcgtatattttatttaatatcaatagattttttttttcgtaatttatttattcaaactacaaaagactagtgagagaatttgatttccgtctgtaacttcttctccgatgatatagtcgaaaatcgtggtaactttccgggaatagtaaaaaggcttgagctgattgggagcatgacttttagttggccttttgtgatactgagtactgaccttttttttctctcgtgcttccgtttcttcttccattgacggaagtacgtgataatcttgctcgggcgtgattgtcgcgtccctcatccttatcagatgaaacaagcgtaattatgacgcgcgcatcttcaaaattacgtcgaggataagggtatttgatttagagaatcatgccctcagactctttccttttttcaaaaaagaaaaaagaaaatctttccacgtactgttttggagccttccttttatgattttttatttttaaattgcttttctgatttttatttccatatgactgagaaatgtattggggccgggaatacttcagtgttacttaattctcactatttgttcaacattccatgttatactaattaacaagtgagggtagagggggaaaatatttgacattgagaaatttcgattgacttgttcagctacaccaactgctttaataattttgttccgcattaaagcatacgcatagcatagtacaataaatttttgccgatcgagaataatattatacattaaaattaattttggcatacgcatcgttacaccaactgctttaattgtaacccctttattttcacttgggtaattttatatccaatccaattacgtgaatcgttgatcttcagctggaacaacttgagagttaagcttttaaaaccgtattgtcgattagacaatccgtcaatttactcctattagtaggtttgtgtgaggccggaggagacttctataaacaatcatattttgattgcaggaacggattcccatagaggaagtttttgagcagct

SEQ ID NO: 5987 - DNA, 4371 bp, Manihot esculenta
  Intron number 4 from transcript cassava4.1_018528m (locus cassava4.1_018528m.g) derived from phytozome v7.0 (chr-ID scaffold01301; pos 56312 to 60682 reverse strand)
ggccattggttgatcactggtgccagttcttgcaggtagctttttaaagccattttctattattctttgtgagttattcaaaatttttatgaattatggtgagtgatgatatggttcttacctgcattcatatgcaaacttgtgataactgatgactgcctttctgtgatttgtcccattgatatcttacatgttgaaacatgggtagcaaattagcaatatattcacatttaattgcaaaatcttgtttgcaaagtaaagttcgtattttgctcttaaatcttattctattatggtactgatgtaaagggcactcaaaaagggaaaaacgtacaccaaaaattggaatcatctgctctctctcacgggcacacatttacttgcttgtaatcttctctgtttctctggtttcttccctctttctttaatttacatggatgccaaagttctattttgctttggtacaacttgttgcagagaaattctgcaactgtgtttgggaatcaagaaaatagaagaaaatgagagaaagagggaggaatcaaggaaacagagagaagggagagagtagaagtttacagggcaagagtaggattttcgttgtgaattgacacaacttgcaagaagtgattcttccccttctatagctgcctaactactcatttaaccacaactccctttttttcccatatgatgttgcatagtgattcctgcaactagtttggcatccaagaaaataagagaaagagggaggaaaacagagaaatagatagagcagaagtttatgcggaaagtgagatgatttctttatcaatcaacatggcatacaagaagtgaaccttaaccttatatagctactaacctagtcacatgacagcaactcccatattttcccatacatcatcacatacataatgatactaattagctagggattttattacactctttgttaaagagatgaacataaatcaatagttggaatgtggcttatttggacaagttccagattaaaaaaattaaagggcttatgaagtacaaaccaaataaaagtagcatagggtattttggcgaggggaagcaaaatttcaagccaagttcagtatagaggcctgtctctttgatgattgatagagttaggaacatgaatatttttcaatagaataaatatggaagagaaattgtataaattaccaagagcagtaaataatataaagcaatctttctcaatcacaatccctcaaggaatatcctggcattattttctggaaacatgaaatcaattaagaagcttctaattagctagagaatctaactctgttgccccgttatactgccaaaacaataacagaatactgcatgcccttttcccttctcctcactctatttatagattcttcaactgttcaatctgtcagaaggatctccaggtgggatctcctcaatcctctccaattgatttggctcctctatcctctttccttccagctcaatgattccagaacctgttgtttcccatcttctttcttctaaaatagactctgtgccttcctgggcttataacattctctgctgagtccatcttttcatcttgattcatatcaatgatctgcattcctgtgcttgtaattctgaacagaatatgcttgtcactcttaagtttatgttgaacaaaatgattgatttatggtgttgcagctagtcttccatggtattcggttccattttggcttgtagaacagtgttattaagttgagagatgacagagtcttctatcgcctttttgagaaaggcaataaaaccaaaatttttttatataaaatttaaatatatatgtatatataatatacattatagtttatacattttaatctaaagtccgtcttttcatcttaattcttatcaatgatctgcattcctgtgctcataattctcaacagaatatgctcgtcactctaaagtttatgttgaacaaaatgatggatttctggtgttgcaactagtcttccacggtattcaattccattttggcttgtagttgatacggtattatcaagtcgggaggtgatagagtcttctatcgcctttttgaaaaaggcgacaaagccaataatttttttatataaattttaaatatataaaatatagttggtgataaattatacctatataatgtgtagaagattaatattaatttttttaaatatatataaataaattaatatataaataaaaattataattattataatatataaataattaaataataaaaaattaataattgataaataataatattaactaaaaataaaataatatataattttttaaattatataaattatatatactatataattgaataatataatagaataatttgtataacattatttgatacaaaatataaatatagaatgtaattataaatataaaaaatagaataataatataatgtagaataaaaaataaaatatataaatataagtaaagaaattaatgttaattttctataaataaatattatttacaaataaataaatattatttattatatattactaatgtcgatattaatattttattttcatattactaatgcctactaatactaaggaaaaaagcaaaaaaagaagaaaagtcaaaagattcccatgccttttcttcttccaaggaaaagagtgacatttaaatattagtaaaaccactttctcttccaagttccaatatgaccaccttcttccttctcttctttctctgcttcttcttctctctgttttttgttttactgttgaaaaaaagttgtttttggctccaggcctacctagtgccttttaacaaccgtgagttgatgtgaccaaatagttgggtaaggtgtattcttcttgtcagttggtgagattgtttacaacctaagtcaaacagtagctggtttcttttcagtctagtacatggtgataggtgcttgaaattaaagctttggattgctgagtaaactgatgtcatcttctttagtgtgatcgtagttgatgcagaattcatgatcaacttctaataaaaaaatctcgtcacacaattttaatggcaaaagatgctaaatatatctttcaaaggttgttctaccacaactctaatcaatcaatgtaactagaaacaaaagataatggagcaataaaatccaaattaaaatgccataagaaagatcattaaaaagtaactaaacatggaggcacaaaatattaatcatgttttccacggataaaaggattaaagttttaagaataaatttacattattaaaaatataacactctccatatgtacaaataaatgctatttataggaaaatatcttctaatcctgacaaataaaacaagtcctaattgaaatacaaagcaaatcatagttgaaaataggaaacaaaataaatcttaattgaaataggataataaaataaatcttatttgaaggaggaaaactaaatttcatcctaacagtacaaggataacattactaattcttgtaaaatgataaaaacaattagctaatcctactaatataagaaaatcctacctaaactaggaaagtaagcctaatccaactaaaacaagttaagtaatcgtactctagtaatatggacgaatttacatcataatggcctaaaaatactcaataacattgaagctcaaaataactcaaatcccaaactcactacaatagaaaatatgggcaagcataataaaatatgggtttaagcctttagctacccaaagtgatcttgatgcattttgttgaatcatgctgcaaatatccttttatgattgctcccatgctttccaagcataattttgattccgaatgccttgatcctcctaaaattatttgattccatgtgattccgaggctgtcattgaaattcagagtgagtttgaagaatactggtgctcttttaagttttgtattgttaaaaagtaatgtatgtatcaatagtaccctgcatcataagatgagcatgtcatgttgagtggtgtggatgtcccagaacctcattgctacaaaaggaatgtatggctagaataatctgaaactttgtttctatggtatttcctcattaggcattaagttctaggtcatgattttcttccatgcttgatgatctatgctgtctgtttcaccagaattttatatggataggaacttgtcaaattaataaattctggtcggatcctgtgaactaaagaagcactttctattgactatttataatttataattttgtgcttgatttatattccttttttcttttccttatgctttagtggctttcatttcaggctcggcacaataaagcaatctctaaggacacttg

SEQ ID NO: 5988 - DNA, 1286 bp, Manihot esculenta
  Intron number 1 from transcript cassava4.1_025690m (locus cassava4.1_025690m.g) derived from phytozome v7.0 (chr-ID scaffold02538; pos 307015 to 308300)
tccaaggaagagagcctcgcgccacagaggaaaaggtttctaattcttgttttaatctcattattgctgaagctttttaaatttatatttggccttacataatatgcattcgttgatttttttgaagtcatgcattgattgttttcattatcagtaatcgatgttgcctaaattgcttcttgtttagttttgatcatattatggtgtttttttagtattagcgaactctatggttaatgttgtcttctgttttttggatgtaaaaatagggcttttgattaaagaaattcatgtatagtttgtccttttgtatgtcatttcttccttggcatgaaaaatctcaggactttttgtactttctcacttgtagaaaactggagtaatttttgggaataatgttctaagtaaattggaaaataaagttttgtgtgcatatgtatcaattttccaatctgagaattgaaaattttgtttttcaattttctaaacttaactaagatttggaaatcagctttatgttttttcctcgttatttttctttataacaaaagttctattttcaactgttttcctctaatgactaaaattattctataacttttaatcattaagtttggaaaaaacatttatttacagtaatgaaaactaactatattattataagataaaacaattgacacatttaaaaaaatagatgtaaaatatatttatcatgactctttctattacgaatggatacaaataatttttaaaaaatttttaagatacaaaactattttctgtcatacacaattgaacttgctttccatcttttcctttgttttctttataaaatgaaaactacagtcttctaattcttcgaaggttgaaaagaaaaactgttttctacaagtaaataggtccttgatatttcaataataacctcttttctgactgcatgagttgtgggtagatagatggcctatgcctagccttggtagttggtttgttattataaatgaattattcgcacttcctaacagttctagattttaatacaagcatttttttgttttcataaagagtgtcatcttactatgttgcttccttagttttagtgtttgcattgatttgtttcagtgccttgcaattaaatttatgtcagtatttgttaatgttgatttattactcacttgtgagttgtttatattgactatttttgcaatttgcatattggttagtgttgtgcaattgttgattttttttacgcttttctgtgatgtttacagtgaaggcattccccaaag

SEQ ID NO: 5989 - DNA, 1483 bp, Manihot esculenta
  Intron number 4 from transcript cassava4.1_014221m (locus cassava4.1_014221m.g) derived from phytozome v7.0 (chr-ID scaffold12004; pos 401644 to 403126)
gtcaggtaagttgtggtatcatattttagtgtctaaattctattagtagcatcagtttgctgtttgtctaagttggtatgctggacatctaatgaaacaaaaaataaagttagtttagcatgctttttttttgtggctaaatatatgtttgcatcctgaattttaccaaaaaagttttgtggcatccaaactttgaagacgtcccatgacatactgagctatttaaaagtgtaattaagatgattttgcgttcttagtacaaggtagcattaactacaaatgcacagtgtatatctataagccccaaatcaatggccaagtttaccgttaacagtccataacctaataataatactcatatataatttcaaagttttacaattaaatctcacttcatattttctacagtcaaagaatctcctctacaaattcaaattgctctaggaatgctttagaagatttatgctacttactaattgtgattgtgaagttattttaattccatttttaaacatttcaggcgaattatagggtatcttcaaagtagggtgtcacaatacttatgtaataaagtttaaggttgtaaatatgtattttgccttttccagttcaagtttatttatttgacttgtctgtggttgattgtgccgtgatcaaattcatggctgcataaaaaatgaaaagagtttatctgcagtttaaaataggatttgtgaatgtctaatttagttcagcactttctgttctgtttctaatctgtcaatatggctgtaaatatgttatacttgttttggaaaagggatatgctttcatatcaagattcattcagtagacttaaccataggatatgtccatattttttgctgatacatctctagtctatagtctggtacgaccatttgtgtataaaaacatcagtctttaattagtttgaacctgcacttgatgattttcctatatcttgtacttgtgttcttatgtacgttcatgcaactactttttgtgttttacttctcaaaaatagcaaaatgaagacaaattttaaaaggacgccacaattgctttcatgttcttgatgagctttaatgatttgctgttgtactttttaggttcctcatattgatatattctttggaaactatcatgctagtctttctactattattgcttcatcaattacaaccaagtcagcactttgttgcaagagtagcattttaaattgtagcattgtgatctttggattcatgtttccaaccgttgtgtatttttgattagttgctgacaagcatagattaggtgtggaagcatcttttcaaacttaaaaagagagcattcctttttgatctaatggttttaagattgcaaattatattttaaagtattttcatgtgatgactagctggttctacattctatattaacactttgcttcaactcctttgttgcagttgacagttctgaacacgggaatttgtagtgggaa

SEQ ID NO: 5990 - DNA, 1403 bp, Manihot esculenta
  Intron number 3 from transcript cassava4.1_009146m (locus cassava4.1_006126m.g) derived from phytozome v7.0 (chr-ID scaffold09980; pos 52246 to 53648 reverse strand)
ctcaatattatcagtttataaggcttggttttgaggtaaactttcagcattatacgcgacaagaaatatatgttagaagaagattcatctactaatattatttttatgtatttgtttacattgtcatttctgtgaaaattgatctatgttttattacttcccaatagatcccattatattattttcccaattgttcgagatgaaaaatagtaggtattcagtaatggagtttggttttaattctaagttgggagacttaattcctaataggaagtataagtagggaatggaaagcatctagttgatatgatgggtggtgcattgtgaaaagaacctatgtttgtgagcagcatcaattaaatacacatacttccataaaacatattgtaaaaactagaggcatcctagaagtgaatacccttgggaagatgtttagttagatatgacatctagcttatactctcacctaataatttaagttggccaaatcaccttgacaaatacaaaaattatggatacccttaaatcttacccaatcttgtcaattataccaatcatatcctcttgtattcgactttatttagacatcttaatataggtggccctgatccgacatgctaaattatgctaacctgttatacgactcaaaaccaacatgcatctttaggattttttaagtagtaggcttgggtcaacattttgtaacatctgttacaatttttaatattattttcttttgcccccctccaattttttattattgcaagttcatcaggtactttaggatgccttccatatcagtatgttggattgcattatctgtctaaattatcataaattagaccatataaatttttaaggagtggtaacctaatatggaggtaacctcttaatttgatcaagtgatgggtcaatatttagtcttactgtcaagccagtaggaggggtgttagagactcagaattttgcctgtgattaagaagattcttcaaaattaagacatgatcttgcatattttcctgacagcagaagtatttattgttccacatcactttcttccttttgataatcaagattttatttatgtaaggtcttttgttcaaatcttgattcaagtatgcgcagtataagtaaaactgatcacaatgatggcttgaattctctcacattgtcgtgctacctgttatcttttactgctgcaaatggcctgtgaattgaattattggaaattatccctttgaaaaaggacagtttgagcaaagataatgcaaatagagggaggagagatgctgcctgttatgatatatatttgcaatttagggtgctttgatcttttttttttcctttttatctaatttattttggacttgtacaagggttataagaaagttattgaaaactgt

SEQ ID NO: 5991 - DNA, 2155 bp, Manihot esculenta
  Intron number 6 from transcript cassava4.1_008931m (locus cassava4.1_008931m.g) derived from phytozome v7.0 (chr-ID scaffold08686; pos 248119 to 250273 reverse strand)
ctaaggtatgttatggaaaatgctaggttgagatactaattgggtttatgctttgtttgatttccatttcttaaatttaatcattatgcaactctgcttttttccagctttattctttgtaagatgaactcttcctaaaaaaatgtttcatgttgcgtagagagacaagtgaagcaatggaaatacatattaaagatgctttttttccatgttgaggcatgatgaattggatttatgagtgttctgtttgtatttgcatttgcatttgcatgtcattgaaaatgtttagattttgagtcagctttagtagattattagctctggagttgttctgttgggacacaagtgaagtggcttgttcaaaaatttaaaatcgtttatcacctcaaatggagggctagccatggcttatgtcagtgtgaatcaagttgtgcaagttaaatgggttcaatcaagttggaaatgtactcggcggtcaaccctacccttcattgtaatgttagtatatttgttatgaaaaattattagcacctagtattacctttgctgtttgtcttattggattcaattcagttttgtccttgagtagaaaggtggacttggtctatggacttctccggaaaattgaaaattctcttttaaattcctcctttccttacttgtcctctgcctttcaactcacccaataaaatatggagagtgtaagcattgctcaaagttgaggtaagggcttttcagaaaaggtggtgtaatgaagctttatctctcctgattacaaattttatgtgataaaagcatggtgagtttcagtcacttgttgtgggtggcttgggcattttggaaatgtccttttgacatctttgaggagcttttggtttgtctagaatctttagagatttgtttttttgaagtggaaaggttttggtggtaggataaatgccaagttcttaggaattatgctctttattgttttgttttgaaactttgaatccatagaaatgcatatgttgttgacaatcaagtattttgtcaaaattttctgttggacatggtggtgcttttggtttttgaataggcttatatttgcagagcttttaggggtttcagttttcttggtgtgttctcgaacttggttgggggatgttacttttttagcctgtatttttatgaacttggttatagttgtctattgattttataggaggtttttattgtccttttctcattaaaatgtttgcatgtacgaaaaagaagcacataatatgcaacagatgcatgccttggactgtcacgactcatgatagtgaatgtgcatgtccttttgatggaatagttttatcaaagatctcgcgtgactgtttgtgctgcaaactatttgtttatattttgaaaatctttttgcttccttattgtatagacaattgtggcttattgtatacaacagtggttgaagagaatcttgaatctctagtatatacagaagtatacatgtctgcttctttttttctcattcacatgctcgctcaaggtgctaccctgatcctatattgaacatccagaagtagtcagggtcctctgggattctccaatcattgaaaatgtacagaataaattgagctctagataagcaactagcgcccatatcctttgcttaggatgcaatgtaagaaagcccttttttatggacatgccttagcaaggcagaataaaatgagctctagataagcaactagcgcccttatcctttgcttaggatgcaatgcaagaaagcccttttttatggacctagctcccctttttagtttttaatgtcttagctattagataagtttgttttgcatctttgaaaagctaatggtgatgcagatgaatgtgttaagcgttctctttgcttatgatctgctttattggctattgcgaagtgtagttcaatattgaatctcttttcatgagaccctgttattccactgcctctaaaattctataaagaaatcacagtcaatgaaatgagaaaaaataaaatccaattttcctttgcttgcatggaagtgtatgcttgatgtacacttggcgtgctgagcttgttgttccagcgttagtagctgatctctattatgtttcaatcctatctttcaggtttattcagttgaagaca

SEQ ID NO: 5992 - DNA, 1474 bp, Manihot esculenta
  Intron number 1 from transcript cassava4.1_005876m (locus cassava4.1_005876m.g) derived from phytozome v7.0 (chr-ID scaffold01945; pos 610491 to 611964)
gtcacgaagcaggttcgttgaatagttgagttttttactgaatgggtttctagagtggtttgctgaaatgggtttctctctcccacggtctccatatgtctttgaataattgttctgtcgctgaattagtgtgtatgtatttattggccgcgcttttgtgcactaatatattgctgaaatcagaattgcgaaaaggggttttcgcaaatcttaacacaaaccacaaaacatactttatctgttattaattgctaattttgattaagaaaatgatgggtttgttattgttgagacccataacctataacttattaactcaattttgtatttccaatcaacttaaaatgattgcagaatcgttagaagcacccatgcaacttggctaataacgaattctaatgtttgtctaggctactatataggaatagcagcttcttcttttgtttatgggttcttatggatgagtatgcggcgttatagacataggctaaatttaactttgattattttttaataatttggtttgggttcagagtttttaactggtaaatatattttgtgattatcatttcagcagaatagttaaaaagttattcaggtattagcatttcatttactttcagacggatgtggttagtgaaatatattttctaaaggtatatgggacgggtttgggtactatagatattaacgggttcattttttagtatcttgaattttgcgatatcctacctcatcttggtctgatactgtgatctttttgtgatctccatcatggcattttgttttagtttttcgatccaacacttgtttgttgtcgtgtacatgggtatctgaagctttctagcttatttggttcaatttagtggtttttctttctctttcagtcttccatttgaatgggtgattctaatagaactatttccttgtttcctaatgaatttactctttgcaacagtttgtttctagtagttggagtctagtaacagtgtggaatgcctcttattttagatgtaaaaagtagcaaaatttcatgttatgtgttttaagaatatgttattgatcgatggcttttagaaacttttaagaatttgttgctagctgattggattttaatatcaagtgacagtttatttcatgctggtgatttgttttttcttgtcattatctcgtccatctatacatcttattgcacattagtttttcctttgtaggctctgattgtcttccttagctggtctagtagtctagttattcgtttttatgcaatatagatcttcttacattgatttgggtcttgagtagttggccttgctcgcctgaaagattttgtaatttactttaaaggaaagttgtcaatttatggctttctttggatagtccagatgttcaccacataaattttattttttcactatgaagttccaactgaatcttctaactatactttccttctttattcttctctagctta

SEQ ID NO: 5993 - DNA, 2938 bp, Manihot esculenta
  Intron number 17 from transcript cassava4.1_004573m (locus cassava4.1_004573m.g) derived from phytozome v7.0 (chr-ID scaffold03777; pos 43557 to 46494 reverse strand)
aaggtaaattgcttattgatataaacttgtgcaaatttatcatgtaaaattttgttgttataccatgatgcatttaacgaatttgatatactcactcagcaggtcagcgtaaaaaaaggcttagtactaattaaatcgtgggaagtttctgaacaaactttaaattcaacttgagagaaaactgatttattcgctgaaaaaattgcacacgtagcatggaaatagaagtgcaaaaatgggaaaatgctgaaacagacttgagaagtggcatgttctgaaacagacacggggaactgtgtcaatacaaaaatatagtgccatatttttagattttaatttttaataagaatttactgaattttataagtttcatttttttgtataaatatatcggatattgttgaccaacgcaatcttgctatttaggaaaattcagctactaaatgggcagattctttgaattctaattaagcttgattgtagggattttattaactaccatattgtaaatattcctaaattaggtctattgtagaaattcctaattaggttgattctttgtgtataattactcaaaacttgtaaaaatcaagacaattaaaataaacacagaaaattcgtccaaaattcttcatatataaattttgatttttattaaaagtattgttatatatttataaattaaaattttatacaataaaaattttatgcataaacgcctacagataaaaaggcctaaatctaaagacaccttcaatgcacttcactccctagcaagccattcatgagtgtggggtttctctgtggccttctatgaattagtctcttttggtaatcccattcttcaacaataatcagatgcaaatcctttgttcttaaagctgtggcttcttgaagggaccttttgttttttacgcaagggatgagagacagtgttgttttctatttcgattcttttaggtatttactatctaatccacaggtactgccttattaacactttcctccctcaatttttgaaaatagcttagaacatccttggctgttcacaaaatggtccatctttatttaccttcagtcattaatgaaaactctaaactaccttacttttaaaaaggtaagttactattttgttctttgattttgctattattacgtcgtccatttttctattttggaaaatagattaaaagggacatttactattcaatccctagattttgtcactaataatgatttgatccctgaattagtcttagattttgcttctgttacatgcttagatccttccatccattttgccactagtattttatgacaaattgctatttaatcgctagaaattaaattatttatagtttcatacctgaattttcaaattatctcttcatctctcgtctcccaaataagagaagatgaagagatgaatatgagggatgaaattgtaattaattataaaattgagaggaaacagtaaatagttgcaatattcaatgcttaaacagtaattttatttaaaactaacagcaaaactgttcgaatgacctaaatgtgtgatgaaagtaaaatgtctacaagatgtggttcatctacaaatggtcattttatcattttttagcccacttaactgtttttgcatcatattcatctaattttaaaccaaaatcaaatatgaagatttgaaacttcggtactctaaggtttccatgctttttaatcaaatatttaatagggaagcctgttacttgaaatgaaggtcctaaactaacgaggaatttgaccaaaataacataaaatcctgtcttgtaaaccaaagagaaataggaaagaaaaaggaaatgactttttggctgtcccgagtcctaaactagctctgtatatttatggataacgtacattgatgttaatttggcatggtcatatccaccggaaagtgcatgtaacaatcattgcagataaaatgaaatagtgtcgattaagatggtttggtcatgtccaactaagagaatcaaatactccttacagaagtccgataaattactagtagaacagagcgagaaagaaaagagaaatctaaaatgacagaaaggtaaaagagaaatataaaatgacagaaaggtaagtaataacataagatttacaatttttgaaatgttgatgtgtgattgatcactaacaatctgaaagacaaaaaatgatctatatagcagactccaattaatttgggattaaggcatggttattgtagtaatagaataaatatagaatattacattgggactaattgaaccaaatatgctctctccgtttcataatttatgtccatattttctttttttggttgtctcggaattattgtccactttcattttttacatcttggttataaatttactattataaccctatttaattttatcttattttcaatataacctctcattaattgttatttttttaaataagtattctaaacatcttatagtattcaataaaatttaatgtctttaatatagctataattgaaaagttaataaaaaaaaattatgtttcttaatacgtgtgaaaaagctaagtgaacttatgggacagagggagtatataattctttagctataaatttaagagtgtttctgaagatatatactctccaaattttccttctgtcaacctcactttgtttctcaattaatctccgttacaagttgaaattttaaggtaaaatcgtgcttcattggtcactatttgttcttgaccaaccttgagcattttcaggcatatatgattgattgtccaattaaaagccctagttcttgttcaagttcatgaatatatagcaagtgttttcacaggctcttttcatttttcttttcttgttcatgggttcattcattgttttgcagtatctggagaaggaacttggggtggaggccttgaa

SEQ ID NO: 5994 - DNA, 2535 bp, Manihot esculenta
  Intron number 6 from transcript cassava4.1_028261m (locus cassava4.1_028261m.g) derived from phytozome v7.0 (chr-ID scaffold12865; pos 552705 to 555239)
gtcgactaatttctttcaagggtatcattttgaaacatatctgcctcacatgattggtgtttaacttatatttttagtatttgttgttttgtacatatgttaatatgtatggctttttaagtttttgcaccatggtgttccacacctggtttgagtgaccaattgatggtttccacctaacttgtgaggaatggcaggtttttttgattgagtaagcggcatttaatttgcagcatttatttgaattatttttcttagttccatgattagaaagtgatttatttcgagttatttcatcttaaaactaagaagtttaagtttctattatttaggaaatttagttaggaacagtattttaattattgtaaaattaaaatgtttagaatttctagttattgttggatgttggtttatattcctcagtagtactggttctgtaatttcttattttaggattcttaatcctagatcctagtactagtaggaccatttattacactataaatacctatatcatctaagtactctagtaaagcttattattattgatattgacaattaagaattaaataaatttaagagattcgttattttccttttgttttgttctattcgttttaaatcaatttggtatcaaattgggttcaatcaagattttcaatctctccctgtggccttttttcatttagcaggtgcatccagttggttaatgtttgttgatttcttggaacccaatcccatgattttactgccattagttaatatgtttttcaatttgcaaaggatcaactttcctattcaaatgcagtcactttgcaagtaaaagacaccaataaagctttcctagtcagaaacaattgcaaactcaagatgacattagagaaaatgcaaccagattaatggtgacattaagttgggccactcgacaaggaccagaaaaagttaatatacatgtaaatcactattttttatcattgttaacattctggtccctatatttcaaaataataggctatttagtcgtttagttacacttccttcacaaacataggtctttttgtccattttgcccgttaataatttagtatttaagataaattactatttaaccacttgatattgcaattacttatagttttatccaacagattttgcaatcatgtactttttcttttcttctctctatctcttctccgcttctcctcattgttgtctttttgtcctatctctctgtctctcacccatttatttctctctctccccttgtttctctcttttctcctttctctctcactctctctcttgacctcgtctctttctgttgagagagagacagaaacaagagatagagaaacaagtgaaagagggggagagacataaatgggagaaggggagaaacataatagattcagcaagaacaacatgttctccatcctgtagtgttggcatttctttgactatttagcactgcaaaactcaagatctagtttgcaatcaagtgagaatgatataggtaacaaaaactagttttggaattaatttaatttaatttttcattttaaaattaagaagcttaggcttctactatttaggaaacttaccctttgtttgggaggaggttttttaaggtaatagaaggttttccaaggattaaaaaccttgaaactatgtctgagagagtgggggatttttaaaataaagtttttggaagttttttaaaatctcccagaacctacaattccaaccaccaaattggtgggttgagaaagttttctcttgaaaacttccaaattctctaaagaatcttttgttgttccaaacaataaaaaattattaaaatttaaaaactatgaaaaagcttaccttattatctcatactttagaaaaccttacattactttaccacatcccaaacagagtgttaatgaggaagtaattttaattacttaaggatcctgtttttttagaatatgctagctagtgttagttttgtatttctaattagtgttgatttagtgttttcttatttttggattccaagtattagtcctagtaggaccagttgttgtattataactaccagtctcatctaggtattttaatggagcttataaatattgatcttgaaaattgagaattaaataaaattttgtgagctttgttatttgcttttgggtttgttctattggttgtacattagaaatttttgtgaacagatattgacatgatgatttacaatttgtatttcatcatttacaagtttgttgtatacctctctttcattatttcttttgaccatcccctttttggttgtagaaagacaatggaaattatcttctcaatcttattttactttttagttttttttttcttcatttctttttttaatgttctttcatattttaacattttgagaatattaatataaaattcatttgtactaagtaatgccaagtgttatatgttaggatttttctgattatggtttttgaactaattttgtgacaggaaagttgattcatagtctaaataaaa

SEQ ID NO: 5995 - DNA, 1612 bp, Manihot esculenta
  Intron number 7 from transcript cassava4.1_033334m (locus cassava4.1_033334m.g) derived from phytozome v7.0 (chr-ID scaffold03802; pos 94807 to 96418)
caagagaagtgagtaaattggaagaactgacttgggtaagtgggacttcacttctcggaattcaatttgtactagtctttcatttcattgtttcaagtaagatctgcaatcttatcaagcaagaaaatgtcaggtttgcagtaatctaaaaacttttgcaagaaaacttattattgttagaaggaagtcaagggaagagaaaaaattgtttttttcacttaactttttccagttttgacaaaatgtaagttaggatgaaaggttgtctttctagattagggacttccattgaaaaattagaatttaaggatgatagcctgctggccagacttttagatccgtcagtagtgtatttattaccctctccatcttataattatttttctattttataattttatctattttattttttcaaatatatatatattttgaaaagaatgatttttattaattttctaattatatctattttaaaaagattaaattttattaaatattaagagatgttttaataaatttttaaaaataaaataaattaaataggctataaaagtcaatccaccctttattatatttatatatttcaaaagattttagagtcgttgaattttaaagttattaaatattttatagtagttaaaaattttatgagttgaaaattttatttataaaatttttttattatttcagatttgatatttaaatttaatattaaatctgactgttacgattttattatataatctcaaaatttttataaccgcttataataactatttttttccattataaatattttccatcaaacaattctctatattttctgcttgaccagtatccaatccgattcagattttattttattttattattttattttttcaaatgaataataatttttaaataactaaaaaaatgaatagaaatttttaaatggagttttttttggccaagtagtatatttgaatttgatagaatagttcattaacaatctgcgtagggtatagtgggtttctgtagagactagaaatattggataaccttattaaaggtgagtcctcttgtaagaggcaagcgccttatgcttggcttaagatttgaggcaaggtaaggcgtcattctcttgaaaatgtgcatgtttttttaaaagaataattaaattctaatctatagtttcttttgaagtaacagtttgtaaaattaaattttaagtagtaattagaggatatattctataattatgcttattaattaaaattttttattttataattaggcaaattaactagtgatgtatatccatataattatgtcagctaattaggaaaggaataatgtaatatctacttagttagctttcaatattaagtatatttcataaacaattgatttttacaattcaaaattcatacaaacaattgatttttacaatttaaaattcatacaaattatgcatgtagaaattaaatagttataattttataaagattaatttgttgataattcgttgacattgataatttgttgacaatagttcgtacaattcaaagttgatagtttgttgaaatatattgtgaagtcaattttcatgaaaatttcttgcaggatt

SEQ ID NO: 5996 - DNA, 1451 bp, Manihot esculenta
  Intron number 9 from transcript cassava4.1_005711m (locus cassava4.1_005711m.g) derived from phytozome v7.0 (chr-ID scaffold12525; pos 729948 to 731398)
actctcaaggtttggacttttatatttcaattcatttcgatcacatttgtggttgatcatgcagtaccatatttatatgagcatcagcctataatgcggtagcaaagattcatagacaaattggtgttgatttttggacttttgtgatgggaaaaaacattgtcttttgctacgtgatcatgaccaaaattaccacctctgcttgtagccattttggtaaaagaacttatctgattgcttgctattatgttgttttaaaatgaaaattgttggatcatgaagagagtgtatatttatgatacttaccatgttagtgttgtaacattgggactgctgttagagttgaatgctttcgctgggcacatctggttcttgcatgaccatatttatttgttcctgacctgcctaggctaagatggttgagactaatttttctctgtgacaatattttaaatgtgcgtgtggcttttgcgttttgcatcccatgcatattgaagttactcgtattcgatggggttattattctttgcctttttacttgggtataaaaccatatagatcttattttctaagtatctatgacaataaagtgaatatgattaaatagaatcaactcttacaaggtgaatggcatataccatatggtgttctaaacccaaagtgaagttggctgccttccaatgatattgattgtttagagtaccaacaaaaaggcaagttcttttttttttggtgctactctattggaaattatagatgaggaaggaacgagtttaaagaagatggatgaaaagaaacaagacagctgatgatgatctttaatgtgatgataagcacttctattttttcccagaatggctcatggagtatatttcaagttgctgttgatctttgtgggagtatgtcttttgatggttgctattgttgtttttgcaaaataatcttagtagttggcagttgtcttccttgctatttaatttaccttgaaggcagttttgtttgggatgatttctttgtactcggtcacttatggtgagctgttttagttgttgatcttcttttagtattcatgttttgttaagtaccttttttaatgcctccttaagcaaattattagtgtttataaagtagtataattatacaagttctattagatttatttttagatgagttggatccttatacctacctgcgctctgaaaacctttggcaaccatgagattcactaaatgttctaatcttaaaagataatggatttattaagaatttgtttgaaattttcggattgtgaaatattccatgcatttggaagagtttgttaatgaatattctttgcattctagaatctagataccacaaggaattgatgtttgcagacatgttctgaggttgagttgggatcttagattgttttcctggtttctcatttctgtgttttcacattgttagtt

SEQ ID NO: 5997 - DNA, 205 bp, Manihot esculenta
  Intron number 2 from transcript cassava4.1_019518m (locus cassava4.1_019518m.g) derived from phytozome v7.0 (chr-ID scaffold05875; pos 900968 to 901172)
gatctatgtgagttttacgttcctcgcttgattctttttttttttttcttttatgtggactttttcctgtttaagtttgatttttgttttccccctgtatgtataaagggatttttgttgtagttattattaatggtgatttgattgtgttcattatttggtatggctaggcattgagtgccaagcgaatcaagcaagtgctacc

SEQ ID NO: 5998 - DNA, 3064 bp, Manihot esculenta
  Intron number 1 from transcript cassava4.1_020272m (locus cassava4.1_020272m.g) derived from phytozome v7.0 (chr-ID scaffold00977; pos 296281 to 299344 reverse strand)
agctcgcccaggcttacgctcaggagttccttgaggtttctttattagcatttacattttattttgtgcaacttcagattcatttttttttcgactcaatcgtcttcttggactgggtttgggttttgccttggttattgatttcaatacgtgtctgattttatttcatccatgtacaaaagataaattgattttagtgagcaattttcaaagcttataaagttacttttattctttttatttctctgctgcgctcaaggtacaatcatcacactcttacgagacgcttcccttgatgccacttgtttcatctattgataattttcgagttattgaaatcttttagtccttttctcaatcgagtcaaaaagttactccctttcttgataagctgttagtgaagtagaataactagattagcgattccattataacttaagtgttacaagcagcaaccacgtggagaaggagaagtattgatcaactaacagaattgggtttctccacaaccttcctctgttgcttctattctctctttcctcccctcttctctgtttccatttcctttctctctttctttctgttacccttactttccttatgttcctcgctagccgaactcaccttgtagactccaagcgactcattttcttagctttataattcacgtattcaagatttgccgtactgagaccttgtggcatattttattctgtgccctttgaggaacaaagtatttagtgctagggaggcagcaatgagttactatgcagccaggacattgtttcaacatcccaaataacttgtttgattacaaacattaagctacagaatgtttcaattatatcttgtgttattaatagatgccaatgtgttggataagcttttgtcttgaaggtgcagttactgggatatagacgagtcctaggtaaataaacaattggagcatggtcttctctactgtttttgtatttatatgtaagtgagggtctctattaccttccatgtgctcactttggcttgctgttagcagactcttactaatatacaagagattcacacatagagaaagaaaaatattgaaatgcaagatcctgtcaaaaccattaaacggggtagtttgaaaattcttgtttttcttgcaacatgattaagttgctgtcatattctgtgggtttagttcatccatgttctccatttaattagttgttgctttcaatttcttaattgtaggagctaggagggtgatcctctatgtttagttaatgctgataatgcttttgagttccttgtttgtttgtaggaagaggttatctcttctttttgctatttaagcgcaataaattaataaatgagacatgatcagaattttagcaaaagttgttgagtacttaaagagattttcaagttctctcttaacgaagttgtacaaatttcatcataggtagaaaaaaaaatcaggttccttccctttcatccactactcccataaatctgcctaattgccccataactagatcccttacctaaggtactaactatttggtatcaaagccacaagtttaggagatttaatccaacagcaactcaatagaattttagccttatttcttgaagaacataccgccaataaatcccgacagaaggaactcaatgcaaaattggagaacttcacaagagttgttgctagtgccaaacagtctgcatccatcttagatggcagtacctaaagtcgtgcttcaaaatcaaaagggattgccaattcaacttatgcaggatttgatttgtccactagtgctcctatggtctttaaattcactaaattggattttccacgatttaataagcaagaagatcctctggattggttaactcgttgtgaacattttttttttctgtcatcaacaaacgggaaacaatgagaaggtaagtttggctttatttcacttgggagacattgcataattttggatcattcaattactaaatgattatccagattcatcttggaaaattaccactcagttgaaataacaatttcttgctctcgtgcttaaagacaagcaccttaacatatgggggagtaatgttagtagacccttactaatatacaagagattcatacggggagaaagaaaaatattaaaatgtaagaccaagtcaaaatcattaaacaagcatttgagaaattcttgtttttcttgcaacatgattgagttgctgccatattttgtcggttaagcgaactgaattgaattgacttggatcttattctccacttaattagttgttgcttataattccttaattgtaggaggatgatcctccatttttagttcatgcttttgagttcccttgtttgtaggaagagattatctcctccctttgctatttaagtgctttaaattaataaaggagacatgaccaaaattttgccaaaagatgttgagtacttaatttgtgagattttcaagttctttcttaatgaacttgtacaaccttcatcatagatagaaaaaataaacgggttcctgccccttcatccactacacccataaatctgcctaatcccttacccaaggtactaacacttgcatacattattgaaaattatattacgtactatgggtgttttgggacccaatttttcccttattggtgtaaaaattcactatactatccaaaatcttaatggatttttcttacactttcacttcaatagctcaatgaccagatgatgtgatgtactcctagaagcaaaccatgattgcttgcttgaactcttgtttgggaagagggtacccaattttttccttattggtgtagaaattcactatattatccaaaatttaatggattttcgtacactttcacttcaatagctcaatgaccacatgatgtgatgcatcttctagaagtaaaccataattgcttacttgaatcttgtttaggaagtgggtgcatatatgtgtatttgaccatattgtaacatctatttatgcgcatagctttgtctagttcacttaattttgtttttgtgccccttgcagactgttagggggaa

SEQ ID NO: 5999 - DNA, 1541 bp, Manihot esculenta
  Intron number 17 from transcript cassava4.1_000700m (locus cassava4.1_000700m.g) derived from phytozome v7.0 (chr-ID scaffold08265; pos 3897161 to 3898701 reverse strand)
tccgagtaacagaaactgcccgacttgctttggaggttgtaaatatgatctatctcttttgctttctatactgatggtcttagcatgttcgattttgggtagtagtactcttacacaatgaaattgctggagtttttaaaggctctggttatcctttgagctttgcaaaaacagtaaaacactgaagtgatgtcaaggaataacttattttataaaaaaattattttccttattaatgtttaacaaataacaaactgttgaataagaataataaatagaaaaaaaatatgattaaaaatctctccaatctacatttgtaatactaaaatatcaggctcacatatgtttaacaaaattatttcttattactatttttaaaaatactgatcagttcagctgaaatgacattcttgtcttttatatgctgtattgcatagaattaatatgtatatagtttaatttcagccaatcgaatgctaatattataatataatatatattattaatttactatactgcattgaattacataattaatcataaaagaaattattgtaaaattaagtcataaaagaatatgatagattaatggtagtattagttaaaaaaaataaaactagtagcccatatcataaacataaacatagtacatcatactaataatgttggtagattagtagtcaaaatggtttttgcacattgttttgaaattttctttcattgttaaaaaaggatgcgagcatcctgattatataagatttaaggtaaatcaaatttaattattattacaattatcagctatgaataagggtgcaatttataaatgttgatatgtgaactaaaatttatattattataaaacagtcaatataaacaaaaataactattagcaccattatagcaattagtttttaaataagtttgtaaacaattgaaatagacagaataaaaattaatttgaattattatataatcatacttaggttgaggaattagaatgaactgaagttaaaaaaagcaagaaatacttaaaaggaaggtactttattatttattattttttttttgggggggggggatgtgggggttactgcagggcggaggcctggtgtgggaagtggcactgggctagctggctgcgcactcttttgccaaaaggttaaacaattcttgtaaaagggcacttggcccaattgtaggaacaatatcagaggagtcagttttagtaataataatattagcaggtctggtcctctttttaatctttcataaaactgtttctcatgaacaaaccaagttcctcgtgcagaatgattggagagctttaaaactatatatcagagagaagttaaaatcatatttattggggaaaaagttaaaaaaaaaagaaaaaaaaaacaatggaagagctcttagaaatgttgggggggaagactatatgttacattcatttggttacccaaatacctgtgctttacactacttttatttcgtatgtcatgttagattctctctgaagatttgccagttaccatcagtaa

SEQ ID NO: 6000 - DNA, 2296 bp, Manihot esculenta
  Intron number 1 from transcript cassava4.1_018791m (locus cassava4.1_018791m.g) derived from phytozome v7.0 (chr-ID scaffold07991; pos 54023 to 56318)
tttggcctgtcgcgaaggtctcaaaatttttcctggtaagcatgcatgtaatgcaaattgttttttgactttgacctagttgatgatctttttgatttttaaatatttgatctgcaatttctgcaaagatgctgtaactagggatgtttgatatttgttaagattctctgtattttatttgtttgtatttgtaggatttatttgtaattttgctttcttctttttgttgctgtttggtatgtttataaacttacagggactgtttagttttttgtcttcagccctgtataaaggactttcaacagttacaaaccaaggagaagttaggtttcatagaaggaaccattttttagaaggtacaatactttactttatggtcatcttggatattgatttcaatatccaaagatctagtagatggcttcatctacactgctttggctcgtgacccttggcttaaaatcaccgaaagattcggaaaatgtaataggcatatatcaattacataggaaaatctctttgattgtgcaagataatgtctttattgtagtctattttacaagactcaagggactatgagacgtgctagggtctatgggaacctatttccttgcatggtgcatcaaaggctattgatgagattaactataggaacaaacttaaggctattgatgagattaactatagaagcaaacttaaggctattgatgagattaacaatagaaacaaatttatacaaatttatgcagtttctcatgggtctaaacgatgcttatggccctgtaagggatcaagtctttggaatggactccttgccttcagttaacaaggcctatttaatggtactcaaatttgagtcccaaaaggaagttttaagaaacataagcagtagcatggattctctagtcctgtttaataaagcacaaggacaatttcaagagaaacaaaagaagcttgagtccaagaaagaacattgctcctactatgacatggatggcctgatagggtaccctgagtggtattagcctaaaaataaggctggaggatagtgttttagacaagatagaaacacaaggaatagagtcaaagatagtggcagccgttgaagatagagttacaatcctcttgaaacatcatatgccactatgaagattgatgagttgagtgccatgctcaattcactccaatagggaggttacgaagttaaccaaaggtaagcagtccttacagctagtaccaaagtatcaaattgctatcctggcagtgcttctcatcctagctacatggactttacaggtacttttaaattgaaaactatttgttatgcatctatttgtgataatgttggttggatactagacactggagttactgacctcgtcatctaataaatctttgtttaaatcagtgcaattacttgataaaactgtctttgtacatctccctaatggaccttcccttaaggtcacccatagaggaacaattactatatctaatcgcattcaatttgacaatgttctctttataccaaaatttaattacaatattatctcagttagtaagttaatctatatacctcttctctaaatctgatcttttgctccaattgttatataatacgggactctcttattaagagagtggtccttgtagaaaggaagaagcatgtctatacaaactgaatcaattaagctttttgtcttctgaaattgaaaattgcttaatttaagcagttcaattgatgcctgctgatttacattcatttgtaaataccatgctttctaagactcccattaataaagaaagcctttctgatatatctaatgtctagatgcatgttgttgatgtgattgatttgcatgatagattaggacatgcttcctttagtaaactcaaacatataacatatcaaaggatccaattcaccggaaacagtgacttcgaatgctatatttgtcctcaggccaaacaaacaaggttgccatttccccttagcatcacaattgctaaaaggccctttatatttgtaggacttgtttgtaattttgctttcttctttttatcctcgtttggtatgtttataaacttatagggactgtttagttttttgtcctatagggcttctcgactgttgtactgactaactttttcattttgtcttgagataataaaattatcaggcgatatttttctcggtgcttcttttcattttcaatttcttttttaatcagacaatctttggtccttgattaatttgtcaggtggaggtccatttgtggatattatcacacgatca

SEQ ID NO: 6001 - DNA, 1262 bp, Manihot esculenta
  Intron number 1 from transcript cassava4.1_019995m (locus cassava4.1_019995m.g) derived from phytozome v7.0 (chr-ID scaffold03332; pos 56403 to 57664 reverse strand)
aatcggctcatatcaatctcaaggtcaaaggacaggtccgatcttcttccccttttcctcttgcttaaatgcattacttggttttcaccccaccttttactagggtttgataagtaccattatgtttttctgttttatactttctttgtgtttagggttttaatttacccaactgcaattttattagggtttctgattctgttcatcaggtcttgttcttttctttcctatatttatatcctcaattatcaatgtgggtttcgtagaatgattagatagtcccaagttttttcctttaaggcgtcactgctgattttgagatggttaaactaaattcggatttagctactttggcgatggttataactcggcttttggaagatgaacaatgaaggcgccttcccaaaatcatagtctggagctagttttacttgtcgactttgacactgcttggttggtaattcactgtagtattttgtgcacttgaagagaaaatggtttggtgtctgatggagttgggaacattgtaatattaaatatttggttgtgaaataagaattctacttggttgaaataaattggcagaatactttttacaatttgtgtagagcaatcacagaacttatttctcttctttactcgcttacaaattctagaatgaaaagggaagaaaaaaaatcacaaacaatggctgcaacctgcccccaggaaagaatccttgtgcagaacgctctgcgcctctataccaggggaaatgccagatttcttaggtgcctctccacagctgaattagctctatatatagattctagttctttccagatggcaatgatcttgtgtattctggcccttgtattttcctctgacaaactaaccatcttgcgtttcataccagctgcctctttgtagaaccttctccttccattcttctcttttctattctgggctctttttttactcttttttaatatactttcagttgttatgggccgcggcttctcttcctggctctttggctgagtacctaatagtatcaggatgtaaaattcttcctctccccgggctcctctcttttacagccttttcttttccttcattttatgtgtttttcatgaagaaaatccctttcttacaactttgttgctgattttgacgtcttgtctaatctgttaagcttgttaggtaggattattctaggtagaccattgctgctatattttgtcagagtgtcagagtgttctgtgtcattttgtaggacggta

SEQ ID NO: 6002 - DNA, 294 bp, Manihot esculenta
  Intron number 4 from transcript cassava4.1_014704m (locus cassava4.1_014670m.g) derived from phytozome v7.0 (chr-ID scaffold03614; pos 3613174 to 3613467 reverse strand)
ttcactgaaggaagcggcaaaaatctttgttccaggtctgtttatggtttattcggttattctggtagtattgattctttgaaagtgaaaatcatatgtacagatcttcctatacacgcacgcacatacgcaagtatatttccactgttcctgctttttcctatgtttcaaattttatttggaaaaacaagtgtgaagtttctcttgattttctttatgctctctgtagttttcaattgttgttatgctacaatggtaggtggagcaactttatactctgctcgaacaataaaa

SEQ ID NO: 6003 - DNA, 5041 bp, Manihot esculenta
  Intron number 2 from transcript cassava4.1_001441m (locus cassava4.1_001441m.g) derived from phytozome v7.0 (chr-ID scaffold06916; pos 1040781 to 1045821)
tttcaagagtggaccgctattcatatcttcaaaaggttggcagtcattttaactatttattttttcttgtttaattaggaagttgtttggctcaagcacttttctctgaaattaataagttagaaagtcatatttggttcacttactaatttcttattaaccgataattgtgagatctggagagctatgggtgatggccatgtgtctgtattgaggttgtatgggatgattgagaggtagttggtttgtagattgatatctaggcttatgtttgcaagagataaagagttagaaagcaagaggaaaactcttcactaattgcactccaatggctaagttagttgtagttgagagagaaaagtgatacaagtaaatgctttgggaagaaggtagtaaatgagtggaaggaatgaatgtttaattatcttccctcttttcttataatcaaccttaaagcatgctcatgtattagaatggcacaatgacttgattggttggaccttgagtgttagacatcttagatatacttgttgcttcctttgagtaagggcacactatttgagcatcatgacttgggtttggacttgtggtgttaggacctcgagggtgggttgagaggcacatttattaagattaggtggctatttaagattctcatccttgcattatgaatgtcaaaataaggataggtagtgtttatgaaaattctactcaacgacctattctcatgactcggctagatgagtgatgtgacgcagttgccaacctctgacaaatttgagggtccaacctaatgtcctcttttcttgaacatgtttgagctgtctagtgtcttggatgagcccatggttttaaatcacatttgcattcgcgtttgctggtcatgttagcggataagggaaatagggctataatgagcataatgtgacgacaactgacatggtgttgcttattttatttattttttgataatatcgggagatataaataagattaagacacacaactgtacactaagtgtaatacatcaacaaagccaaaaaatgtatcaatttaaaacatcattatcattaattaatttatagttaaataattatgcagagaataaaaatttttgaagaggtgaattattagtaatggccgttaccggtaagatggttgtaacaaccattacacttgcaaattatggggtgcctgtaaataacagtgaaatgggtaattaactccccaaaatcccattgcataatgtaacagccattatttgattctatggacgagtcagagtcttcatccaactatgaaggatggttgagcactatattatggacagtgcattctcaaaccagattgttgggcttctttaggggtgtcctaatattgtagatagtcaattccatgctagtatagtattctttcaagtacacacctcaaaataagagggatcatttatgttgtcagtaactgtgtggtaaattacaataatactttcattaacataaatatattttaggagcaattacaaaaaactaccctatggtttaacacattttcaagtaggatcatgtgatttaatttgtaataaaaaggctcatgtggttttatgatgttagcaaagtggggcttttactctaacacccttgaatattgctagtaaatcataatctgctccttgatatttagtgaaacatacatattaatccatgtatttttaaatttagtccttaaagttttgtttaattaataaaataatttcttaatttaaactatatatttttagttaaaattaatttctatatttttacaaattggtccctaaaattacaattactagtgagttcttataattacaaattattttttatttattaaattttaagtcttatatatgaaaaaataataaaaaaaataaaaaatctgttatttccttttttccctaattaaggaaaaagaataaatcaaggaaaggaaataagttaggaaagaattctttgggcttgaatctgtatacatatcgtgctaagattcttgatttaatttttattttattattttattaccaaatataagataataaaatttaataaacatgggatattagttttaaaaaatataaatatttatatgtaagcaattataatatttggagatcaatctataaaaatataaagatgaattataactaaaaggaccattttttcagtaaaaccatactttataactaaatttagaaatatagggactaaatgatatgtttctctaaaaattatttttaattgattttgaaatgccacatcaacatttattaatagtgttagaagaaaatccctactttgctaacgtagtgaagcggtagtatcttttttgtcaaatattaaatcattagactctttttgaaataggcgtcaaatcacatggcagttcttttgtaatattccctttattttaggaaattatagtaaagttaaagtatcgtgaagttcatttttacgaaattattgtgaagttaatttagttaatctcccacttcctgaagttgacatagtggcctttcattagtaagtcattcacaaatcataattgatgaagttgagcgatcaaaggaaaagttcggtttccctttggctttgtacttccttgacaactatacttgatgacttcgtcttcttcctaggaaaatccatttgttgagcttacttcttgcaaaacattgaggtcattgcttttagttctgctcccttgattaagtttctcaacatctttcaagattactttggtttcttaagttcttaatgctctaaattggggattatttgtaaattatttgagtctcaactctcaaggctctttattagaaaaaaaaaagattttttgaaatgcgacgtatattttcaactaatgcaaatatgaatttatgtactagtttcttgactcttttagatgttatgagattattcatatgcaaaaaatgacgcataaaagtttgaaacgattattatgcttaattatgttgagcttgttaatgaatcttctagaaatttctcaattctatttgatggggtaatttacataggcggtgcacaaactttggtgtctgaaagattaagttacctaaacttcgtttcatcacttaatacttcttcaacttctattagtaatataaaatcccttttaacctatagtagcaagtttctaagttacatttgctgatatggtacctattaaattaaaaacgttaaatacttgaatgatttggcaattattaaaactattttattcaattaaaaaatatttttaattattttgtctctttctcgacttaactctttttccatcgacaaatctccccctcaatatccgcaaacaaccccacaaacccctcttccccaacctccctcctcccctctcgaatctctacgatcaataatgcccctcttcccaataatgccacattagtcaagggtgagttcgggcacatctgaatgaaagcaaggataccatttaaagtaaaggatgaaaaggaagggaactccccatcagaaaaagatattcagacaaattcaagcattggacaattttgggctactactttaagactttcatttgtcaatctcaaaggattgttcagcagaagatgcaatgctaggagaaatcggaaaggacttgtagggaaatggatagtagatttcttgttttttgtgtttagcctataatgtcacaatccctcaatgcatgtccagatgaatcttctccaagttcttgcgctttcccgtcacaagcaagcgctctctcaaggctgacgatgcaattcacagggctaagttccaacttaccatcatagactcacttgggaccaattgcttttgccatcaatcaacaaccaactgattataaaccttcatatttttgtaattagcatccactttgaactgcaatttttgtagttttcgccaattagttcctaaattaattacatcacccacctaaattagtctacctttcttaattcaagcttgccaaaatattccaaccattcaacaccggaaacactgagacatcgactaagatggagagggaaaaaagtcgagtcagagataaaatgatataactaaaaatatttttatttgattaaaataattttaattattgagaaatcaagtgttaaatattttttaatttgatggaagtcacatcagcgaaggtaacttgaaaacctgctattgtcggttagaaggggtttaatattgctcaaatagaaattgagggggttttaaaatgacaaaatgaagtttggataccttactgttataaatctcaaagttagtgtactgtttacacaagttacccctagttgatgttgggagactttaactaatgagattatggcaaaacaaatttcaatagctgttgcgcttggtacttgttaattttttaattagtggtgttgtttttggatggttgtgactagttttggagaaattatatgctgaatccgcttacatggaatgaaaaaccaatgagataagtctacacaatatgaattccccattttttttaaataattggatggttattattttttttggggcacaataacagatgacatgagattcctctttttcatatttgacagcttaagcaagatgagaaattagggggtttagacttttagtgtcaattagaaacaaggcaagagcgtgttttttctcggttacttgaggttcattaatgcatctattatatttttcttccttacccaagagttaaaaaagaaaaagtgcattcactatgtcaggattgatcttggaattgtatcttagcagttaccatacacaaccacccttcttccagtcattaatgtcatatttttttaggactacttactacttactatattaattatctattagactaagaggtcttctaacttctaagcaacaaattacttaaacattgaattatactgccaattagaacttatgaaatattatttttctactcaaataaattgatgttgaattgctgcaggattaggctggaaatc

SEQ ID NO: 6004 - DNA, 3179 bp, Manihot esculenta
  Intron number 5 from transcript cassava4.1_001307m (locus cassava4.1_001307m.g) derived from phytozome v7.0 (chr-ID scaffold02952; pos 65647 to 68825 reverse strand)
attgaaaagcgtgagacacgttggcgtgtgcagtggttagtaaattatattttattgcatgttttgattttgttatagtaaatggtagagtaaggaacaaggatacaccgcctcctcaaagttttaatttttaaatgatagtaagttgaatatgagtttattttgaataaattgctacttttagccccctcaaattcttaaaacaatttagaaggttgatttttttattggtctaactaaataaaattttaatgagttcaaatttaataaattagaattatatttttactgtttagtataattatattgaatatacactttggctctctaagtataaaatgctgtgttagtaaatacattgacctgctaagtgcaaattttgcattggtccccccaagtgtaaatgttgcgtccgtcaaagcaagcaactataatgtggaattagatcgaatgatgaggaggaaactgtattaatggattaggaaatgattcctgattcaatgccttacaaccaaggcgaaagccccaatattctgattacagagaaataaccagcgactccctaaccagtaataacaaacaggatgctgttcaaagcatacattcctgattctctattatcctatttatgcatatcccttctctctaaaaaccagctgacccattcccatgctgcatgctgagttaccttctttctgttatggcctttgagtcttctagaataagtcagagttgggccttgtggtcctgctgtgtgtctatcttcaaatatatttggcatcaagaatttaaatttttgctaatcatgaaagcaatactttgtagattgtttaacctgtggtttatcatttggcctctcactggggacaaaatataagaaaaaagttcaagatgttttagaagtttgaaagaaggtaattggtagaggagacaatcttgtttaaaagatatggctaacttcatgagatgctaaataatagactttccagtataaaatgattttattgatttctaacttgggtgactaagaggttggagatcatccagaagaggttcatttgtggattagatttagaggaataaatttatataccatttggggaaatgagaggggtcctttcgtagttgaaacttgaaagctgggttagggttggagaatcttgtacttttcaatgaagctctcctgaggaattggttgtagagttgcatggttgggagaaggaagttttttgctgtgttgtgaacttgtcacagggttaaatatgtagcagaaatcatgttttcttagtgttctagagatttctgttatggaggcatagtaggagtggagatagcactccctctttttctttctctcaaatatctatataatctgtcttgattgtaggctattgcaattgagcacctcaacataaaatgttatggttcacaccccttgattaatgatttcttttttcttttttaattcttttttgtgctttctccaaatttacaaattttccctttttcaattctatggtaaatttgctctgctaaaagacaatgttaaaatgctactttctttgttgcatttagtcttgactgattgtcattaaaaatttagtagtagttactgaagttggttgagagggtatgaaactatgaattatagtttttgccagttgaggcagcaacgattaaaattttttagttgacaaatttttgtgtgattccttgtctggaaaatattaacctcagaagaatcaaaagttggtgctctatatgatggtttctaataagttgctttctttgtactcacatatatatggattgtgttgatcttggtcttaaaaataatcaacaatattcagaaacaggcatgtattgtgattttgatgagatatctttatagtccagccgccagcagttatgtgccacaaagagggactttatgctccttttctgtgtaaaatagtttttattttgacatttgtaattcattaaaaattacttttctttttaatacaaaaagaccatgaaaatatctggaccaataaggattccaaattccatagctgtatgtgagaattacatgacaaaaggtaaattgtggtggttgttgatatccactgagaactagtagtattcagtggactggtggctatatccttaatagttctcttgcaactggattggtggctatgtgcttaatagttctcttgtacactctgtcttagaggtggatttttgttatatgcttactgatttttcttctgactaggaaaattttccacctatcatttgtcatatgtagggaatgtgaactgggcttaaaactaggagaggttgttgttgtgttggaaagcttagaaagtgttggataccattcctttggctatgttgtcttggggttatccttcaaatgtttggtgtagtactaattcgtaaatgtaggctcaatgttatgttttggttgcatatttagcagttacgaaattctaactaatagatctgtttgttatcaacatagcaactaggacaatcaactggaatcaaagctaatctttttgataatttgatgcaacaatttttgcttttaaaaaaaaaaaaactctaatattgatgatggtaagtcaatcttggatttgtcattggtcttggagtgaggattcagtaaaactgaattggatggaatatcagaacacagtagcataattaaagtttaaaaacaacaatgtaggtttgtgattcacgaggttgaataagtgatctgattaattgggaaaaaacttgcaaaaggcattgcatgactttatacaagggttggctagtttcattttcttttgttgttcattatttcaacattatatttaccgttcaaatttaattagtgctcttactcacctttccaagtgttgagaaaaggagtgaagctcataaaatcttcacttagttggatgatctgtttatgttttggtcaaatgctagtgggttaaatgtcctgcttggctttgctttgctctcgactttattattcatttttctcctaatagatggaagtggcacttggtggatgttagtttaaggaaaaaaaagttcagcgttgcttcctaatatgtataaatttgtaattttttttaaaaaaatactctatggagtgtttaattcaatttggttttgcttttgataggtactaccgt

SEQ ID NO: 6005 - DNA, 4826 bp, Manihot esculenta
  Intron number 5 from transcript cassava4.1_004614m (locus cassava4.1_004513m.g) derived from phytozome v7.0 (chr-ID scaffold01551; pos 3138952 to 3143777 reverse strand)
tatatactgcacttggaagtgaggtagcatctaataacttgtcattttctctatattttattattggaaagaattgtcttggatagtcaatcggggaaaattagtatataacttgaaaagaatgacctcatctgtattatattttcctgccagtggtgcctaacttggcattgttgatcaatatagaaggtttctaattaggaggatttagattttttggatactaattaggcttgattacaaagattttattcttattataaatattcctaatttagattgattatttgtgtataaatactcaaatcttgtaaagattaattcgattggaatagaataaaaaattatttccaaaattcttcatagtatcagagcctaagcttgatttagagttctaattcaattttgaatttccaaaaccctaagcaaccaaatttggtactctcatatctaggccttttttctttcatcaccgccactttgagaaggatcacggcctcctcgccggccatccgttcgtctctggtgcatcatctgctggtgcgtgaccctcatgcgccactcattgccgatgcgtgaccccattttcggcaaggatcttcacgtctgactgccaccgttgaccttgggtttctgtttccagccttctactactgttcctttccctattgggagttggttaggtatttatgtggtgtgggtgtgggcagcctccttttatcctcttttagggtatttttttggctttgttgctgcaaggattttttttattgaagttgggtgttgactgagtattcgatttagttggacaacctcttgtcattgttttgttcgctttattgctatcttctaacatgtcatctccatgaattattgattctggtgcaaatagacatatgacagcctcttctaaaagcttccttaattatcttccatgtctacaaaaggacatagtcagaatagccgatagttcttttgtttctgtctctaaaactgaatcgattgtttgtactttcaatattatgctatcctctgttcttcatgtttctcatttacctattaatcttttatctgtcagtacttttaccaaaactcttaactgtaaaattaatttttttcctgaccattatattattcaggaccttcaaactaggaagaggattggcaatgatagactgcacgatggcttatatatgttgaaagtgaatctaagattgaattcacctcggctctttttgaaagaaatcaggatgtcaactagtaaatcatactgtggcatcgactgctaggacaaccatctttctttattttagagaaactttatcctcatttattttccaaggcttagtatgattctttagtttgtgatacttgtgagtagctaagtgtacaacaacctcttatccctcaagtaacaataggagtacgattccttttgtgaccatccattttgatgtttggaaacctattcaaatggcctcactgtttgataatcgttggtttatttcttttattgattgctgcactcgcatgacttgggtttatttgataaaggcaaaaagtgatatatttttttgctttcaatcttttcacaatatggtttgtactcaatttgatactaaggtaaaagttctaagaactgataatggcacagagtacatgaatggacatttttttgcttatttggagtctaataggatagtatatcaaattagttgtccttgcactaatgctcaaaatggtgttgttgaagaaaaaatacacctgttggaagtagacgatctcttcttttcaccttttcaccatgaaccttccaaaaacctattgaggagatgcagtcttagccgcagcttgtctcattaatagaatgtctctcaaaactcatgtctttaaaggccttttagaagtgctataagagaaaatgcttatactattccaacaaatgtgtttggatacatgtgttttcttcatactaggacaggtgggaagctcaatccaaaggcttttaaatgtgtgtttgttgggtattctttcacacataagggttacaagtgttatcaccctttatctaatttatcagtatggatgttacgtttagagagactgaactttacttcagtactatctcatcaccttttcagagagagaacaataagaaagaagagatgattcttagttctataactctagagcattttactctagagaaaactactatacaggggagactattagtgatcaggaaaagataattggcatttggataaacaagattttaagagatactcaagaagagacacaatagaagcagaaaaagccatcgtgcagcctactcagtatcatgaatctttcttttctctatctggtgagttattcctaaaccttgagcccattaatgatttaaataaaccaattgctcaaagaaaaggagttaggtcttgcacaaagcattctatttctaactttttctcttggatcaattgaaaaattcaaggtcagactaattgccaagggatacacttaaaacctatggagtgtattacctggagacatttgcgaccttgcgctgcaaatcttgactgggacctacaacaatttgatgtgaaaaatgcattctttcatggagatatgaaggaggaagtgtatatggaaatttctcttggatttgctaatgaaaaaacacaagaaaagttttgcacgctaaagaagactttgtataggttgaagtagccactcagagtttggtttaattgattcagtggagttatgatttcctttggctatcaacagagcaatgttgatcatatcctatttatcaggcattacaatgataaaattacttttctcatagtctatgttgatgacatagtaatgacacgagatgacattaaagagatgactcagttgaaaaagcttttggttcaagagttcaaaattaaagaattaggaaacttcaatatttcttgagaattgaggttgtcggatcaaagaaaagaatttttatttctcagaaaaaatacattctaaattttttggaagaaattggtatgttagactgcaaaccagcagaaactccaattgagagcaatcacaaactacatgcaggaattggtgaatcagtggatattggtagatattagaggttggtaggcagactgacgtatcttttgcatactcgaccagacataacatatgcagtcagtcagtttatgcataatcctcgtgagtctcacatgcaagctgtttttcgcattttgagatgcttgaaatttgctcctagaaaaaatgttctattctttaaacacagccatctttacataaatgcattcaaaaatgcagattgggctagatcccttgatgataggagatcgactagtggttaccgcacacttgtgagagaaatcttgtcacttgaaaaaataaaaacaaaagtattgttactcaattaagtgttgagacggaatatagagcgatggtacgaggtgtttgtgaactcctatgattgcaaagattgttggaagaattgaaactattggagagggacaaactccctttgtactgtgataaaaaagctgccatcagtataattcacaatctgattcaacatgaccgaatgaagtatatagagattgatcaacactttgttaaagaaaagttaataaatattgttttgaaattagatcatgtgactttcgataaacaactagctgatgtgtttaccgaagggctcaacaacaaaacctatcacattttggtttgcaagttgcgcatgtgtgatgttaaatttggcccaggcctaactcaccccaaaagctagctcaagggggaggagtgcctatagcccataaggggcacattacccctttacacaaccgatgtgggattcaacacaccccctcacgaccaaaatttttactggtgcgtggcacatttatgaggcgcccaacatcggatggggaggctctgataccatgttaaatttgggccaggcctaactcaccccaaaagctagctcgagggggaggagtgcctatagcccatataaggggcacattacccctttccacaactgatgtgtgattcaacatgtgatatctatacaccaacttgaggggagcgttgactaacatggtaggtttctaattaggaggattcagatttttgggatcctatttaatttctgatttaggttgattctttgtatataaatactcaaatcttataaagatcaattcaattggaataaaataaaaaattcattccaaaatacttaggtattgaagatgcttacattccttttgatgcgtgatatgtgtatcttgaatgactggcccaagattccatgtttattttacatgaagtttcttggctccggctgacttatatggcatctaattttaaaagctttcacttcacaatccaattaaatacttacagtttaaaccttcaaagcagtttacacttaactgctgcacagtaggtaaatggttgatcttatagcttatgctctcagtttgcagtaaaacttgcatataccaggtgtttcacttgatacttcatatcatatatagctcaaagtgaaccaaggaaattttttttttttctgttttcctttgagacttgcatatctattaaaatatgattttctttctagaaacaaatgaactaggctaatgtataacttgtctaccttgatcaatgccactagttggcatggcattgctcaaatttcgttttcttaatatatctagacttttttcaaaaggtaatcacggtaatcaagtgggcttttgtaggtcacctttgtcgaagctctagatcagctt

SEQ ID NO: 6006 - DNA, 2769 bp, Manihot esculenta
  Intron number 4 from transcript cassava4.1_011602m (locus cassava4.1_011301m.g) derived from phytozome v7.0 (chr-ID scaffold08265; pos 2655131 to 2657899)
caactggagctccacctatttgggtgaaaggtagatgatttatctgacataagccatagttattaacagtttattgacataatctcgttgtctggtgtatttaatagattttacttaataattataagtttagaagggttttatgttataaatctatagagcaaagcgccaaaaaaattgttctaactacttaaatggttatgggttaaactcctcccttccctgctttgtcaaagaaacaggataggatgtcagaaaaggaatagtctttggctgctgcaatcgtgttctgtcaacatatcttgtaatgttatgttgttagttaattcataaatcaccttgccttttctcagcgtaatgcaatttgctccttctcctcattcttgtcggttattgagcttttcctccttgtcctggtagcttagctgataaagttctcttttttacgtggtatgagtgatttatttgtttgtttatttatatagaaaaattaaatctttaaaacaagttaaaaagaggaggaacaagatcttaagtgagagaaaggggaaataaggaaggatgagatgttaggtaatgagcaaaatctcattgtttaagaaatgatggcgcctgagatcttaaaatttgaggtgaataaatggcgcgtatctcttaattggcaattcttgatttcttggttaaaaggtcctatagttaactgttggtataaatatgttgcttcttgacttattgaccggatatgggcttgtgtgcctgatatggttcattaaatcccagctaaattggttcactgtgactgtcagggttgtgaatatattagtgtgcttactgttcccttcaaagatttgttccttcaccaccagttgcatgctctggtgaagcattttataggtttagatgggaactggtgaaggaacttgctatttagttggaagaacacacggttttcaatgctgtggcatgtgatttatatttccatgatcattattctgtacttccaaattttctattttggcttttggaattttgtttacggaggacatattgccaaaattttctcctcataaatgtagtggtgagaaaatttatcttaattggagttgtttgatatggaaaaagaaaatgaggagatttgcgtggatgagaaggatttaacgtcagattaaaaatagagaaaatttaaggactgacaaaagctatgtgcttcttggatcctaaatagtgaaacatcaaggtatcaactgagtgataaaccttttagctaaactgatcttagacttggaatgatgcattttgtatttggaggatcatttaaacagcattcttttctttaattttttctatgccctgccttctctctgcgtgcatggttaagattagagaccagcaacaggtgataaaaattttcttttgttttttttttttttttttacatttatgttgacaattctgacagttaaaaatgaaaatacgaacaagaaataaaacaaaatgtataccaattagctgcgaagaatggaacctgaatttttctggtattattataacatttgggctcctttgttttacaaaaaaatatttttagctttttctagcatttttggtactcacgaaaattagtcagcaaaaaatatattttcctgataaaaaaaaaattaagtcatttcaaaaaacatgtcggtctcttttaaaagaaaaagttattttctagcctttgaaaatcttatttgaacattcatatataaatttgttaatatattttattttttaaattaaaattaaccaatgaaaaatattttccactttaaatatatatatacatgtataatattttgttgattaatatattattaaaaaattatatattaattattatgtgagttgagatttttttttcattggatattataaaatgtgctacattgaattaatgaatattttatattggagtaggggcatttatatcatttttactatcattttccactaacatagttttatttttccggaagtttaatatatcaactaaaaatattaattcatactccttggaaattgaaatttcaggaaatatatttctcgagaattgaatttctcaggaaatagatcagtttgaaccaaacgaggccttaatgtttgtttgcatgaagatgtaatgtttctttatgacctggcacattggagtattctgtggaaatactgcaattctggtggatccctttgatacttttgtcaattgttaatgatttatcaatgagtagtaggtggaaaagtatgacatgtccctatgcctccatggcgtgcatgcgaggaaaaccttttagttcttggatttccaataaaatgaaacaaagtgaaaaataaaattaaaaaaggaaagaaggaaaactcaagctcatgttagcattgctaggaaaccttataattcttgaaatttccaacaaaatgaaacaaatggaaaataaattaaagaaagaaaagaaggaaaacacaagcataacttactgttttttggacttgcatcagattatgttcctgggttaatatctttttcatcagtgacaaagcaaattgaatagattatgcttctaacatttcattctgttgtcatacattgttaaaaatgtttctactggttcttattgcatgagtttcttggtgtgtttcattttcagtcatttagaataacatatgtattatgtataataattctctgatgttgccaatgcaggcaagatttttgagattggttcaactggaattagc

SEQ ID NO: 6007 - DNA, 632 bp, Manihot esculenta
  Intron number 2 from transcript cassava4.1_026117m (locus cassava4.1_026117m.g) derived from phytozome v7.0 (chr-ID scaffold06659; pos 114210 to 114841)
cccgccggtttgagtctggtgatttggcggtgagattctggcctctgtgcaagtgtctattactggcctatatatatgtatatgtatgtatgtattgcttggatgcttatgattttaattgcaagtgtctaggatggtttggtggttttctcatggttgattgcgtaattgttttgacttcggagtgtagagtgatttggtaaatggtcgcagcttatatagttattttgcttgtcgattggagtatatttgtgctgctgatttggaggtaaatgttgaggtggatattccgttaaaatgtttgatttgcttttctcaatagtggtgcttggtttatgtgtctgagatgggcggtaattttatatacttgtttgtaatttttttattaattttttttggatttacatttttcgtatgtgttttttcccccttttttgggccggggggagttgtttgaggtggtggcattgaagtgttctattgtttttatttcattcttttgtatttatgcttaaatcaaatggataagaaagagcaccttagattattgtttgatagagtctacccttgaagcaagctttagtagtttttattttattttttaattttaattaatttttaggttggctcaa

SEQ ID NO: 6008 - DNA, 1420 bp, Manihot esculenta
  Intron number 1 from transcript cassava4.1_015427m (locus cassava4.1_015377m.g) derived from phytozome v7.0 (chr-ID scaffold06697; pos 284554 to 285973 reverse strand)
gaagccgaagcagctaaggtctttatttttttttttaaagcttttaattcatcatctttgtatgaaaatatatgtttttgatatatgggtcgatctgggctttctttaaattaggtttttttgtttaggcggttgatgattagtggcttggtcgattactcgattcttgctctggatgtgtttccttttcttgattctttttaattcttttataattttgaaccgttattatatgagagagtttgaaagaattagtgagctggtcatatcttggatcataatttattgaaagaagcagggaatttagtggaagagtctaattgggctattgcagatgaagcttaagttcacattgttgtaaactgaaatcacgattactgcctttagcaagatcctatgatgtagagttgtgttgtagatttcctctggtttcttagtgaagttggtagttataatgctttaagtggtcactaagtaacgttttttgatcttggagcttatactgctgcaacagatttattttttactttccgtaatttatcagaacatttttaaggttgcggccttcaagattttgagttttgattctttcaaattcttcattatcttatggtgttctatcataacattttttaagttggggccatccagattttgagtttggtttctctcaaattcttcattatcttatggcgttttggttttctgcttgtagctttattgtggatatagttgccattaaactgtggaattatccttatgcactgcaatgaattctgtcaacatttgaagtaattggcaactgccttctaatccaaaagtcacttatctgttcaaaagctttgtgatttcttggagaaaatagaagtagcagctttgaagaaggggttatgagatttattcccaaataacttatgctttcttttgtttttgttcgcaacaattcggaaaagagaatttattatgaaatgtttctagtgtaatatggtagcatgttatttcattagtaaatttatttcaatataagttggctggatattgcaaagttgatatgtacctagtgcttattctttcttttgcttcttcagattttagctcgaatggaagcaactgaaacatgcattgacgctttgcagaaaaatatcaatatagctcgccttcatgctctatactcatttcatatcttaatctattacatgtgtatgtgtttcagttgaaatttacatcatttttattttctaaaatgacgtttcaatttaatttgtcctggaacaagtgtgacttgtacttcactgattagtattaatagctgggacatggatttggtagtcactggatttaatgtagcttagaccctgcttttctgatattttctgtcatggttgtgacactttttcatcatatcaggccaagcttgcag

SEQ ID NO: 6009 - DNA, 2789 bp, Manihot esculenta
  Intron number 2 from transcript cassava4.1_025501m (locus cassava4.1_025501m.g) derived from phytozome v7.0 (chr-ID scaffold02915; pos 80211 to 82999)
ggtcacaagaagcattggcttgcagggtcaatcaggtgagttatggatcctccacgttccccatttagatgtaaataggtattattttggtgttttaaatggaacttttacacttcatctgtctattcagatgccttctacctttcttcctttctcaaaatcaccaaggacttttgaaagtcaataatacgtgtcatttttttttcctcttgcaatcttatatccaggcaaaaaacgatatgcaatcttgcaaattactgaagtttgtcctaatctctgtgtgagcatatttatgatgtttcacctctgtttaatctttgatgacatattgttgtttaaacactgttatatgctgctacccacttacaaggattaaaatgtaaaaatttgattaaaatctcttttggttgtaccacttatttattcatttatttattttctcgtatcagtatctcactaaaatgtttggaatgcattagtagtataatatacgtaagttatctggagcctcactgtgaaaagaaaaagctaaatatgttacctataccaatgcttcctttgaaatgcaaactgtttatgatttggatatagtgattcaactgaagtgtatggatttgttcagctatataagaagcctaataattagaatgtgaactatgtagtaggggccatttcttccccatcccaatgtgtgttaaagggacatacaagttgcaattccatagttcaaagaatttggatactgattcaaggactaagcatataccaggcatataccagtagacagaaaaaataatggttatcagattgagcttttagttaattttttttgtgaatcagccattttttaacttttgctattttaaattgcagaaaaatgcttttctgttgctgaattcaatttgatatctgtccatcaatgttgatatgatgctaagaatttgtctatgattttacttggttttaattgacatcttacatttttttccccaaaaaaagaaaagtttaaccaagtgcaaacatatacatccaaagcatggataaggaaggaaaaatagtaaagcctagtcatctgttaagtagtaccatgaattaatcttacaagctatccctgtatgtcctttgctgaaaggattgtggagcttgtggctccttgtttagggtgatacttagatgtacatatcatataatgtgaggtagagtttgtggttcattttaatctatagcattgcaggcagtctgatgtagagaagaaattttggaattacaatgaattagttttcataaattgtgattcatcatgagcttttcgactttgaagttatattcaatggcctattcaggaaaaagtacaatggcatactgttaaaactttacttttaggattagaatttagaaatattaatggctatatgaattattttaacgattgcaatcattaaatatttatgttatagaaaattttaaaagcaaattttctctaatttttgcaagactagtaatttttctttttcaactgaattaagtctcgttcccaaaactagttaaggttagttgtaaattcatgatgacaaactttctattagtttctttttgctattttttttgataaaaaaattgatgcaatacttttgtcaaaatgagaaaaagaaaaaaaaaaggaaaaaaaatgttactgctaaagtgtttttcggattcatgttggaagaaggtggtgataaggaagactgtcttaagtgtatatgtttctatctatattacttggtatgaatgattcaaataaccagaattagattagtttttttttctttctctttctagcaagataaacactatggtctaacaagcgtagcttgtcatttcttgaagtagtttttggtgtttattcctttccttcttctttctataggatatttgagttattttctcagtgttggttgcatctgttagattcaaaaaaaccatattttatgtctaatgatttccttgctaaatgaattgatcccaaacttactttagcaggtcatcctgttcaagctaataacgcttctacagctaaagctgctaaaggtgatctgttttccaagagtattagaattcagccagctaatgaaggcatctcccatatattttaccagcatcacatgtctgctatgtgtgtgcatgcgactttgtgtgcatcactaggctaattttctaatttcactaatgttcaagatcaagttccttttatgataaataagtttgcaaaaccacttttggaatttggttttacagtattcatcaagtctatgttgaagccccagttgtggcaggaatgttggtgtggtagttgaattcagtaacgaacatggctagctattattcataacattggaaaaacaataaatcacatgcttttatttctagataatataaaagcagaagcttgtcatatagtatcctcttagcatttgtatgctaatttgtgttacagttatagtttctaaatttcatttttaccaagtctaagtcatgggcaactttgactatggcaactaagttttcattctcactggtaatatccatcgatggtttcttgcatgtaatcttggtcaatctccagcctcttttctggtccagccttctagaagtttgtctgtccttgcttataccaccagtacactgttctcgcttataccactagtacctcttatgaacaccactgttgcttttaaattttagtgcttgtttctgtgaaactactagtgttattttacaacttacaggtcaagaaattccagcagtta

SEQ ID NO: 6010 - DNA, 1125 bp, Manihot esculenta
  Intron number 4 from transcript cassava4.1_012774m (locus cassava4.1_012774m.g) derived from phytozome v7.0 (chr-ID scaffold07806; pos 31508 to 32632)
ggttacagatagcaattggggtgacatctgcactggtaagtcacttaaaatccttaaaatttgtcactgcacagaatagcttttttattttttttctttgaaatcatagttgttgactaaacctaatttcaataacaaaatcctatttacacagtgcctcttcctaaaattgactagttaaattgaaaaaattacagctccaaaaaaaatgaatattacatctaaaaagtttcaccaaagttcagaggatcagaattacatgtttttaagacacatttacatagagcatccataatgttgatattgatttttgtagcctgtgatcatgccttcttctccttctgtccaaaatatttactcctgcaatagttatggaggcagaattgctaaagtggaatatattctatggtaacacaattacatgatattttcagtagcctacccgttatattatcagtagaaagtccaataaaagtaggattttgctacctcattatgcagttcattaacagaccaaaaaagtaacaatatatagatatacacacacagcttgatggtcaaagcaattgtccataaatagctagtaagctgtagtgataaatagtgaacgagttgtagaacagcctccttaagctaaagtgtgatccaccaaatttccagatgcataaaatctcttcacttcacattgtgctaggaattggtagcgataagttttgcatgtcttgccattaactttcaaactttcaaaaagtttatctttatcagaaatttgggacaatgtattgtgcaaatctttggaacaagcagctgttcaagtgatatcattcttttgattgttattttataaaatgtttatcccatcactcacttcatcctcattaggctaattgtatatatattttggatctgcttatgagcccatctttttgtgcccttcacgcagcaatttgtttaacttttagagttattggttgtttcgtccgttgaatggttgaacaatataatgtacaaaagctagtttttagtgcagaatattttgcaggtgcacaccagttaagagcattctacttatgtctactttacattgcaggagtatttacttctctttagcaacccaccagcgta

SEQ ID NO: 6011 - DNA, 1588 bp, Manihot esculenta
  Intron number 2 from transcript cassava4.1_013021m (locus cassava4.1_013021m.g) derived from phytozome v7.0 (chr-ID scaffold06513; pos 28677 to 30264 reverse strand)
agatattggaattgggttcccactgaagaatccaggttggtttaaactaaattatgattcttgccgtttgtttttctggatgtgatatttccagcttaattagtaagttttttttttttactagttagtctgtattttgtgaagcaataaagtggctttgtttgtttgttattttgctttctatgaaatggttgtagttatcatgaacggggaagactgattcttttgtggactgaacagtatggtatgaattgaaatagttttatcattttaatgatgccagaagatgatcggatttgtttcatttttaaaggactcggtgccggggttgggaatttttttaaagaaagtctggattgagcattattgtagaatcttatgattctctattctattcttatgatttgattcaatttttcaccctagcggtttggatccatggattgaatcttaagtatacctgaatcttaaccgaatctcatgatttgaaactgaatcctgcgatttgatattaatatattgattcggccaattccttttctagagagtttgttagaccttatagcttcaaattttattattttacttcatttttactgtgaaaagtaaaatctttacttagccttttttttcactagccattatttttcctctcccaccttttttttttcattttttttcttgttttattaatttacttgtctgatgaaagtggtcaaattatggaattttatattaatatattctgacattttaatttaacttgctatcctttcttattctttaactttttttattaaatttatatgggagataatagtaggactgaggggagattggaaacgaaaaggtaagtaggatggattagttgttggatatggtgagaagtaatgggaagagtgcagatggtggctggttattgaggcattagatattgtccatcatatgcttccattatgagtagttcattatagcttatctgaattcacatttgtattggttgcacaaaccaataagggtacatgatagtggtcaacatagcactgataggggccaaaaaaaaaaaagcaaagaagaagaatgggttgggatgggggcataccttgctgctggaagcctagaacgtagcatctctcgagtctccctaacctcccctgtgaccctgtatctaatgttcgttctttctttttttcctttccttttccataagtttaaaatccaccatctaagaactattgcttcttctctgctgttgggtgggagagtattttatcaaataactatttctcattggaatttcaacattgtttgtggcccatgtacattctgttagaaatagctgcatataatttttcaaggattgctgcatcttttcaacaattatatccctgaaaagattaaaaattttgcttaatttgatcacttattggagcaattactgtatctgccttaatgcttcctatgctgagtaacttgaagacttcttttccctagttgtcgattctaacgttttatggcattttattcttttcacaaagagtaatgctcttaaggttttaacagtgaatattttgtgtttacagattcc

SEQ ID NO: 6012 - DNA, 1518 bp, Manihot esculenta
  Intron number 3 from transcript cassava4.1_000097m (locus cassava4.1_000097m.g) derived from phytozome v7.0 (chr-ID scaffold01551; pos 1354958 to 1356475)
gcttcaggaaaatctcacaggtctctgttctcttcctagatcttggtgaattgtcttgttgtgtaatgagctggtctttagtgcattgtattctagaaaatgtaagattatatatttacatgtgttactaagagctggtctttagtgcattgtattctagaaaatgtaagattatatatttatatgtgttactaagagctggtcttccaaagacttcactactaaaattagttaacagcagtatcaatgttactggctttaatataaaatcgataggtgagcccttctgaaaaaaagaaatgaagaatacgacaaaggaaaaaggggaatgaataaatgaaattttcctgtctactagtgttctgacttgacatttggtagatttggtagtatggaatcatatttcagagaagcttaggttgtcataattgataatgggctcaaacgtttgataatggtagtactgaatgtttgttcaggaaacaataagatatagattaagctaaccctggagctttagttttatgagatgaaccttttgcagtatcaaaccatgaaaaccttggttcaaaacaactgctcttgaattttttatctacaaaacacttaattgatgggttttaagatttccaacctgataatttcaaatgatgagttttccttgcataatagttataagataatatcaatcctgaacttcctatgtatattatcaatttaaggaccggattaactaaataatttcctgaacttaaagtttcacccctgtgataaaagaaaaccacaaaaaaattcatcattcttttataaaatcctggtattttaattgattggaaggagctattatcttgtaaagtttaaaaaaatgtctttgtaatagtagtggctggcattcagcagtagtgtaaaaaaccatgaaacttttatctatttacagattgtaacagcatatgcaggatttcaacagttttgcatactgatccatagatgctaatacaattttcctgaaatttcatatgttcttttctttttgttattgtgacatttatgcagaacatcacagttaaagaccttaaacaatgcatttgtgcagcatatacatatgggccatgtagcttcttcttgatcaagttatataaaattttcatgtgtgtgagtgcacttttgagttatccttcacatctcgctgctggttgagaccaacttaaatgaaatctttttctcttttaactaatttttggattagagttctgcaaatatattttattggttccttagtacacgttctttcaatagagaaatagatgtggatagttcaatagaatatcaccctctcattgtacatcatgaaaattataaaagctcttaatcttatttgctataatttgcaagaggtagtagagctatgctaagttttcactggttagctcttagtaagaaattgaactgttatttacatatatttttgcaattcatgggccattctctcaatgaacaaataaatctgtttaaacagat

SEQ ID NO: 6013 - DNA, 1058 bp, Manihot esculenta
  Intron number 2 from transcript cassava4.1_013130m (locus cassava4.1_013130m.g) derived from phytozome v7.0 (chr-ID scaffold03773; pos 144227 to 145284 reverse strand)
ctgtttccccagataaggtaagtgtggtgttggtcgaattgtttttattttattttatttttatgctgctagtgtagctgaagagtgctggatttgctcccgggttgtggttaattttatgaattattctgtgttttccttcttattgcttgttaatcattgggacttcgtgtcagcttgtttagcctgaattgttttcacgtgttcattcttgcttagtgaaggtttgcatggaattgtcttactaagcaatgtttgcccagttgttttacgtgtggtggtaaacatagtttcggttagcgttttgaatcatacctgtacttgttattcacctgaaactgaaagtgctttaggtttccttctttttcttgagttatttcctcaagctgtttttgttattcaatgacattcctgaagagttctggttatccacctcagtttagtagttttggttcaagatctcatgtgggcattattcttaattttttatatttcagtagtattttttcaacaaaaaattgagtacttgatgttttttctttttttttttagctgaagagtacttgatgctgtttaactgtatgaattttggttgtttattcctactatcatgtttcctcagcttcatgaataactaccagacagttcagtttgtaccaatttgtttcattctggctaattgtttctactgaaaatgaattttccctgtcttctgataaatttgtgtgtgatttactatttagcatttcttttcttcaagaactgtctgttagttgtgaaatttcatgttcatgttggtcacttttgaaggagttgtgtgcatgttggataatcatgagtatgaaagttttgattttatgtttctgtaagtgtgttataatgtttagtgggtgttgcatttaagtcattatttcagaacgagaatagtttttcatcgaaaatctgtcctcctgatttcaagtagttctgttattctaagtaaactgtataatgattctaagtactttgtttcatgattctttggcaggtgcaggcagtgctgttacttctaggtggat

SEQ ID NO: 6014 - DNA, 3554 bp, Manihot esculenta
  Intron number 2 from transcript cassava4.1_017161m (locus cassava4.1_017161m.g) derived from phytozome v7.0 (chr-ID scaffold07520; pos 1229254 to 1232807 reverse strand)
ccattattattgatccccctcctcttcaatcaacggtaagcattgtatttcagggcttttattaacttttagaaacatttgtttactttgtttcattagttttgagaaatacccattgccattaaccataacttgatttgatgttagtatttggttttgtttctgacttgctacttgctagtatttagaaaatttttgactcggccagtgggcatgctcaatatattaagacctgaagtctgcgatgtagtacatcttagtgatagtggtcttagtgctagtacatgttaaaatcgccaagcacaatgggagaagccttaacttgttatatatactgtgctgtttaacttgttttgtcactaatttacgttgtattttgaaggtgatttaatttttcagaatacttaacattgcagtatagacttgttaatacttgtagttgattctgtatctcattaatgactagcatacagttcattgtccttaaattcgggtcgtgtcttcactaatgtgtatgtgtgtgtgttcattgacctggaatgtgtaaagaagaactttcttcttgattattttacactttattgttctttctaagaaaagattgtttgaattcagtttctttttaatattgatcttttttacctgggttttgtatgtgcactatatatctattcaataagacagtattttttttggcttcttctattttgacttccaataattctccaaaagcctttgttttctcaaaaaagcttttcttagctgaaaagctgtctttgagtttttggttgtcaagcttctttgtagatccattcttatttctggtttaataaactcttttttttttctttccgatttgctattcttaccctttcagtcttcacaatagttggactctttattcattctctcgatcaaaatatatatgactccctattcctccctcaatccaatgcatacagcaaaacttggaattggtaatattactttttcttgtggatctatgaacccaaatgaagattttttttcctcaattccttaatttttccattcacctacttacgaacagcatatatagttaatctcctaggctgtaattgactagttcataatatcacttgtaaatttttgcaactatagcttgggcaaattgaatcttccttattgtctaaaagcagatctaatatacttttcccacacttggttggatttgattttttttatttttttcctgtcaaggtcttaaacgttattgtcgtctaaacttcctctgctttgctgctgctcttcaacaggaattgtgtctacccaacagttttaataacctccttggactgtttgattttggatatcattgttatccaaatcttacaaacagaattcaagtctttctgggtggaccaactaagttattacaagggtcaatgacctaaaaaaatcctaagcaatacccattttttcagttactgtaggggcctgagccttgagattttataattttaggaactaacttgtctatatctagttatgcttcaatttaatttaacttgacgctgtgttgggctgtattactttttatttgtttaaggaacaaaccatagacatttccactagtttgattgctattgtcgcttactgcttgggatgatggagtgtatttgtgtatgcattcgtgtagttcttcctgttattaaaataaataaaaccaagtggaacagtctggagttctcacagggtccaaaattctaaatcttctcaaggtcttcttgctgaaagaaaattattttcttccttgtaataaattttctgtcctttgtgtcctccacctgatctttaagcatgtaagcagtagatatctgtaacttgcatatgataaaactcattagaagccgtgaacctagcctaccatactggcttgataattctttttttcgggcatttcatatgccttatttgtaagtagggtaaattttgcagaacagagactctttggtctaagcttcccagggtgagtcccaatttccatatgttctgttaatacatttcagtgatgcattgatgcagctaccattagcattattccatgtcgttctggttttgctgaaatgcctggattaggacacaattctaacttgttgatgaccatttgaagtattaaggataagttactaccattctgaagtgctaaggagaagttatgttgttgcaccctgcaatgtacatcatataatcatttatttgaggccacatgttgttgaactttgtagctgttagccgtttgttacggagagtttcaggaaatgtgaataagtggatgattcttggtcttggacttggtgattcacacgtttagtgtaaatcattgccttaatcttgtctttcattggtctaacagtttagctttttcgctgtagcatttattgtccaaacttaaataaaggtatgaatttaaaccccaaacactcttttggtgtaaccacatcatatcacgaagtcttatttatctagtgcttcactagccttctgtagtccatctggttttgtgctctacattgcctacgaatctctgtctctctcttctttctttttacattttttttctaggttcattcaagacctactactagattatgagatatttgttcatttacttctttttttccatcacctcatgtaaacatgtaaccttaccaattgatgttacttggttaaactctcccctggtataataacctcatgattttatgtgatgcttggacgctattcctaacaaagatgaaatctgtttggttactgtagccaggcagtgcttggttttgctatggaactgggaatggaatgtaatttctcttaacatttaggacatcatagattttatttgctattatttctattttttgtatgctgtgtgctggagttttatcctgtatcaaccttttgctaatcctcctttcttaaagtgccaactagaatgtctgtctgttgatgacctttatttcaagtgcctcaacatatcggctcttgctagccatcagtatttcgtagccatctctgcttgggactgattattgacatttagtcacagtgcccgatagagttttgtgtgggcctcgtaattcaattggacagttatgcaaatcagctgcaataaccgaattggggcatttgattgtttttttctttattttttttattttttaccttttagttttgcaaagaactgtgactcgaagtcagaaacaatgcatgataactgattatcacagaatcaatgttgatgagatttcgtacttatagaatgaaatatgatactttggccttgaaatcaaactcatattcattccaattttcttaggatagatagcaaaaggcacgtttacttgttatttttgtataatgaacaagtgttttggctaatattgttgttgctgctgccgcagccgcatttttttacccaattaattgaagatagagagactaaatatgccttgaccctgtattttccttttctatactcagagtgctcgaggattaagcaagagtcttaagatagg

SEQ ID NO: 6015 - DNA, 1575 bp, Manihot esculenta
  Intron number 10 from transcript cassava4.1_000371m (locus cassava4.1_000371m.g) derived from phytozome v7.0 (chr-ID scaffold08265; pos 88402 to 89976 reverse strand)
actgtgggtttcagtatctcttggagtataactgggtaagttttttctttgattttatttatttccatgtacttgctcatgcataaactgtctgttatagataacagacttattgttgttccacttttgcatatcccatgaaaaacagaatttttgtgtaatttttgcatgttgataagaagcttgaagtcgagtcatttaattcaatctttcttctgcttaggagacctgattttaacatttccattttatctataaatgagggtaatgcaattaattaattcatatcttttagattattcgatgtagaaattatgaggttaagaagatgcatgcgggatatattatgttatgtgtattatattcttcttgctttgactttttgaacaattgacagatatttatttttcccccatagacgtgccttgtgcaaaaataaggagaatgtaaatcttcttagttgtgcagtgaatgggattgggggttcttggattttggttagtttggattcaattgggtggttgtgtcctgtagtggagtttcatgaagaatggcagcatagccattccagaggtgaagaaaaaaactgtggagaatgttcctaatgttttggtttcctgattacttcaggaagtgtgatagatgaatttttaatgtggtagacaatattgtctgtagtttaagagaggttttattgagaacttgttgtgttgagagaaaatgttgttagaggaaatgaactgtaaatagaagtatattttgttgccttcttttgtacagcactggtatgcaggaggttccccctttttggctcctgtgagtggtatttcatcttactgggagaaggcaagaaaatcttgtttttaagagtagaggtggacgatcttggtgaaagtattggatactgtcctgtgagacccattatatagtcgcagtcaaagtctattctagcgcattatcacaagttatagttcctccagtagggctggggcttttgcttttttatcccctgaatttgcaattgaaattgcatgtctacagtctacttcaaaatccaattttggagaatcgaggatgatgaggtacaaacttttcttggtatcgggcagaagtgggcaaaaagagagtaatatatagaagttcttctattgaaattcatcttccaacttctgaaggctttttccaagaaaccagaactataagttataacccttggtgtttgctcatgtgcttgagaataatgatttattatttcagtttttaagtgtgggctttttgtgcctgtttaatgggaaagactgtttttgtttacgtgaaattgttcatcatattgtttgttatacattcattggtggcccttccttgtattcctggcaattaagactgcatgtgcgtgcacttgcatgttggtggtggcataactcatgtttgttttacatggttctggctttaatgttctagaacaaacaccgtacacgagtagatattctctttgaatttagctgcttttctcctttgttttctaaatattcttcagcgtatttatgttccctcgtcattttaccaggctggttc

SEQ ID NO: 6016 - DNA, 1236 bp, Manihot esculenta
  Intron number 3 from transcript cassava4.1_028442m (locus cassava4.1_028442m.g) derived from phytozome v7.0 (chr-ID scaffold10156; pos 27704 to 28939)
aagttttggttccgctgctttggacgagagtgcaggtttcctgatcttctccttaatcaagtccaatgctttttgcatgaattgatcaattatttttcatctacatacctgttaaaagagtgttaatataaagactttctagtatttgaatatgttgtctctggaagcttgtacctaggaataatgcatgtaatctttcaaatgaaactctgtgcaaaatgtaactcttggacatgctagtgtttctcagttcactgtacttcttgttagtcagtagtggcatatgctcctttgacagatgatattccagagtagtagttgctggtccgacttgcccgcatggacatttccatattgatatacatgcaatcccactttttactcaccttatgcttgatttagacttaaaaacgggttcagtttctggagtttaattttgccttgaccatactgatgttcttttaccactcttctttcactacattcactagcatgagttctatttctgttgtagattgtgaagcttgttgactgacctagcacaataagcttcctttttggatccaagattattaagagcacaacctttgttatttaggagcatctactcttctcatttctcactcttttactacattctctagaatgtgttttgttttccattatagattttgaagcttttcaaccgagctagcacaataagattcaatggttgttatttttgtaacgtaataagcttccttttgggatccattgttgttaagagaacaatctttgtgattggtagcatggtttaatgaagtaaagcattcttaagtccattttattattcagttggataaataaagatatcttcaccatcaaagagtttctcaagtccctccccacttgatgcttcacttcctggacatcaatttaatgagattaaattaggattttctgttagtgggggcataagattcttggacatttatgtttccatactttaccattgatgcagttgtttctactattttttatattattgatgattctactttgtatttgagtagtttctggatgaaatatcctcatgcatcttcccttgttacttttcttctctgctatatgatctttgtttttatgtttttttgttgtgcttaatgacttccccatcctgaagcatggtattaaacaatctttttactctttgaatgtgaaggtcaggggccaacttggtgtatatcgtggaggtag

SEQ ID NO: 6017 - DNA, 1851 bp, Manihot esculenta
  Intron number 2 from transcript cassava4.1_006581m (locus cassava4.1_006581m.g) derived from phytozome v7.0 (chr-ID scaffold06793; pos 7795 to 9645)
agaatctggaaggtggttgactcttgtttactgtaaaattaaattctctcttggctgaacaacttcaggactttttcttatcaaaattgtatgccgatatggaagttccatctggtcttgactcttgagcatttgtctgggttagtggtatgagtgtgttgtttcattttaagctgatatagatttacaggtgttggggatggatggttatctttttattttagttgtaatatcttaggtgttaaataatattttcaatttaactatgttattgtaaaaaaataaaactgtaatagccttgctcattccctggctcgtctagcagtgcctgcaaatattgctttgtcagtttggatgggtgatgtttcaccatcctttattgctgtagccttacttgatgtgaggcagacttctcttgttcatcaattaatgatattattttacttctccaaaaaaaaaaaaataacgaaaagataaatgaaaaatttttgatgtataaaataattaacccacaatataagttctctctctttctttcaatcgcgctctcccccatccccctccagagtgccttttcttatccaattagcaaagcagtctagtatgattcatataatgtgctgtgatcaaactagagctattagtcccggtaatgcttgatagttgcagggaaagtattttttgccatttttattaataatgttggtcatttgatacgagtatttggtttgcatattaacctaatgtggctcaatttaagcattcagttctttgactagattaatctgaagcaaatgttgtggagatttgtgtcatcagaactgacaatcggtgatgttcaattaaaattttgttagggagttaagacagagagtcacttctgaagcttctagtttcaataattatgctgatcactgtgatgaaattattgcagtgtatatgttattgcgatgtgtcatggaaatgaaaagcaaatactattttgctaattacattagacgtatttcagaatgtaagcttggggtgatatccttgatgcacgattggtcatcaatgagtaaatgatgaaataacctacaaaatcagctttgcaaaactgatacctgaaagaaattaatatgtgttatatggtttactgccatttgggagaaattatgtgttcaggttcggtagctataatttcagtttggtgttcaaatttggatacctgaatctggaaactctttgctattgatttgaaatggaaaaactgaatttgggtgggttcaggtagtatgcaggtgttactaaatgggtttgggatgggtaaatgtagttaaaataaaatagtaaacgagtttgggatgggtttggatattccatttataaatggatttggttttaggtaccctcatcaatttggcaagtacccttcccgtttacatccctatccaaacaagttccaaatttcactatgactgcttgaactggccataaaacccatttatttatttgtttttgtatggaaattcaaccaaaatgttatcataatatgtctagaacacaagcttaaattatagagatatagcaagaaaaaactctgtatcagtctacactacttagatgatctgatctttagcttatttacattcttgaaaagtagatagaattaatactatctcttcaaatgcaattttttcctacttatataaggaaaagcttccgtttgtgggatgctcttatcataaagactcatgctatagatttcaattctttgaagtttgaactccagcagcaaaggtgttatttcttttttcatgtgcaagtaacatggcagctaataattgattttgtggtgttttgcagtacgtg

SEQ ID NO: 6018 - DNA, 1102 bp, Manihot esculenta
  Intron number 15 from transcript cassava4.1_009093m (locus cassava4.1_009093m.g) derived from phytozome v7.0 (chr-ID scaffold02264; pos 474266 to 475367 reverse strand)
cagttgccaacgcatccatacctattaagcggaaggtatcatcctattgagtacttccaaatatcattgattggcattatttatgtatgtgcttttggggttcatgctcaattaaatagtctcaatcccaaattagctgtctggacctagttttcttgcttttctgtttagggactttctgtgaccttctggtgaattatagtgcgacatgattttgtaccacttctgcccacatcatttttggtttgtgtcttctgttttttactcctaggtcctatcacttctacttggtttgccattcttattatatccgcatattccagtaaacaatgatattttaaaagcaaaaaaattcagcaagattgacagcctgaaatttagcatttttctagggaacttggtctgtccaaaggaccttggacattgggttaattgctaataaaaattatagagttctggtggcaaggcagggtttttttctcgctcaccctagataccattcctagcagagtggtggtttttgcttattgtctaggcctgctgggttgtttattcttctttcaccactttcatctcattgagctttggttcagtctttcctatgctgattgcacgtgtagtttcttcttttctaatgatttcattgattgaagaaggtgcttatgtaggtgaagttgctttttgcccccagctgggaagagggtagggtgagggtgggattttaaggatatggtacgttggggcttgctaatgaagagcttttctaatctcagttaatataataggtctacgcattccttgatggtggtaactttggcaaatccaaggaaaccatggtgttgtgcccttccagcttattctgttattgttcagcttggaaaatttgcacatctaaacttgcattatctaatttggttatctatgtttcaaggtgctgcaagcaagagtagttgctaaccttaaatagtttttgggcctcctttttcatttccaaaataaatttgttgtagtatatgatccttatcctttgcttcttatggtcttgagaaacctaaactgattagcactataatttcttggatactggatgacaggaaactaa

SEQ ID NO: 6019 - DNA, 4695 bp, Manihot esculenta
  Intron number 12 from transcript cassava4.1_000160m (locus cassava4.1_000160m.g) derived from phytozome v7.0 (chr-ID scaffold03060; pos 46398 to 51092 reverse strand)
tttcagacatagcaaggaaggcattcctttacagtgtatgttgttttcatattatactgatattcttatcccgtagggttcttcatacttgttatgttacatatatgtttttactggaattgtccaaatgctaagtgctgaaaccatgggtagttactcatttcactaaggggaaagaaggagagatcgagagagagaactttgtttgctgctcccaaaactacacatgtactgtcatagtatggtatcacctttttgtacttgccaaaatataactttgattgctaagaaaacaaaaaattcatatggcataatttttgaaacaacttcggtcaacctgagtctggtgtattgaaatcttctgtgcttttttcattttttttagaagcaagccaatgattgatttgtggttcaagttttgtgtaaactgtcgtaagtcctaacctgtgaactgacaagttaagagttatatatttttatatttctgtatctattagtttaaaccttttcctcacatcttgagacatggtaaagtgaagctagctgaatctgtacaactatccaacttgatgttgataagaacttaggttcgattgttgttctctcttttgaccctgtcgatcagttctgatttgcatatgtggcaactatggtgggtactttttaatttgagctcgagaatttgagtttgatgctgtaacaatgtaagttaaaagatccttcttggcttataaaaggcagatgactgaatttcgagcaaggattataggcagtagcagtgccacatggaaggaagtgaagtcaaatgacttcactgaacttttctttttcctatgtactatatattattaacactccgcaaatggttgtatttgaaattaatgtagacactggcggagccaggtgggggtgaagaggagccaggcccccctatgaaaatttcaattttttaggagtatttaggtagttttacataaaatagaaaaaattaccatgatatgtttaagaaatttattaattaattcttattcaaaattaattaaaatattttgactttaataaaattaaactctttagtccttttatgaaataaatctttagggacttttaatatttatactatttagttgcatattatactatttaatccttcccattctctattctattttaatccaaaaaaaattatttcttatcttcaagatttcaattccaagtcgtaatttttcttaaattattcactcattatacattatttttattattaagaaattattatttttttggtttataattttttttatcttacttagttgctaatttatttatgtgattgaaattatatttaagctgcctaaacttagagaaataaattttaaatttttagaaacaaaagtgtttatgagtaaggttagatgatttaatgggttgcatggactattaaaaattaccaaaatgaaatttaagtctagaaaatataagtttaataggtaataggtaagataatttaaaatttaaaaaattttgaatataaacaaatattatttttatgtctaataggttagactattcatttttaggaaaagtaaaattaaaatgttgtttttatgggtaatgagttagattttttaaatttacagaaaattaaatttttaatagtaaacagtatattagattattatggtatttcaacaatattatttttttatgggtttgcctgccacagccatagtggaaaaaactttttccttgttaaatattatcaaaagtcgactccataataaaatgagagatgagctacaaaatgattgattggtaacttgcattgaaagatatatttgtaaacattgataatgaagttattatgaatagatttcaatcaatgtaaaatggataaggatcattgtaatttaattatagtagtttacgaacttcctataaaaaattctattctgcatgtgtatttatatgtatgtgttttatttttttctatcacttatttgaactgggtctctctgagagttaactttctacatccgccactgaatgtagaggataaaaattttgaatgaagagcgtcttagaagctatgactaaaacatggccaagaagcctcaaaaacaaaaagtgaagtgggaaacaaacaaacaaacaaacaaatacatgtccaggaaatatgtctccaagtaaaagacccttttaagcagttgagaaacaaatcataagtcactaaagtcctggttaaaccaaatgaactatacctttaaactttttaaaatagacaattaaaccatttaaactcttaaaaataatccaaaacttaacactgtctccaattctaaattaataaccggatgttggagctcttataaaatagttcagtagtcatttaagcctccattgaacaaataaatttaattttaaaattttggtaattaaatttataaataaactatgttaattttattattactaaataaataacataattttataaaatctataagataaataatatactttgaagaaaaatttataaataaatagtttgacaccatgaactaaacttctagcatccccattagattagctttagtgggttaggattaggtttcatgcttttttcttcctcatgatttggggtttttatattcgtctatttaatttggggagtataacaagcatatcatagggtttaaaacctaacaatcattcatagcatttgggaaaacaattttggcaatacattaaacctgattgtagtgtgaacttgaactgccattgcattgtgaacgggagtgtcttactcttgctgcaaatctaatattatttacatggttccaaaatgtataaagtttcagtagaaactaaaaaatctcaattttcttgccagctccttttgcctcacgtcaactactctttcttttccggttggcttgtttgtctatgcttgtccaattttagtaaccttcatgaggttctacagctcaattctagaagttatacttcaattcatgagttatcctactgatcaatttaacacatgattatttgggagaactcttctaattggtgataacttgtcctgctatgtgaaattacttctagtgcatatatattgaatcattagttatgagcaggcctggcaatgagccagttttctgttggaattggtgattccaattgtggtccaatgaaacctgaattggatcaagagggcctgttcctcacagttcttatttgaggatggttctgatttgatccatgttgaggcaattcaactgtctaaatgatttttttccctctttgttaaagcaattggcaggccaaactgaactggtctgccagttctggtccagtctggttcagggttcaaaaggggcactgggatcagtctcccccccaaggccgttccagccaattacgagtccattaaccattgactggttccattcttaggtttgaccgggtcagttctggtccaagttgcatcatcgctaggcctagttatgagctgatgcagaaagctttcctccttataattttagaactggtgacaggttgatttactttccctgtttaataaaattggcatataaatctccaaaaagaaaatttcttccttaacttctattgatttcagcagatatctttgttttactggttgatgacttgttctccttgtgaaatcctatagatctgatcacagaggcaggttaaaacataaacagacctaattcttgacatgagtacagaatgatagaacgaacaatgcatataaggcgttacattggggtgtgaatggataaaaagttaaccaatatttatattttacatcaccatattttcccttagctttttggactgcttccagtttcaagttaacctacaaatataatttgatatagttgagttcagtttgagatgcagttttatttttaaagggatagttaacatcatgctttaaagaaagaaccattaataagttaaggctgatgatagcaacgatcgtacagtttagtagacatatgcatgcataatgctcttgtctctgttctttatatgagaaaccacaaatctcagcttcactttgaattctgtgaaatgatcaattaaataatactatgtctttaaacaacagattagctttacttatttatttatttttttttaagtcagtgatacaagtatggatagatgtgtttgattcagacagttgaattatcaagaatatcaatttacagtgtcattgatagattagtgatacaagtatggatagatgtgtttgattcagacagttgaattatcaagaatatcaatttacagtgtcattgatagattggatgcgcagaaatgttggaaccaagtaaatcaatcatagagtaagagaatacctaaatgagactgaatcgtgtaataaggtttatggttgtaatatatcacttgaataagctaatttcttgaattgaacactaaattataatagcttcacctgctggattatatgtaatttattttgagttaaacaaccaaacatttcttttttgcaattaaacttgaatcattgtgcttaattttataactttatgttatctatctgttttatttattgcatgaccaatatgcaccttttggaatctccctatttttgctgtaaaatgctgccctaaaatatgtttattttcacagcatttc

SEQ ID NO: 6020 - DNA, 1745 bp, Manihot esculenta
  Intron number 1 from transcript cassava4.1_021519m (locus cassava4.1_021519m.g) derived from phytozome v7.0 (chr-ID scaffold01551; pos 774795 to 776539 reverse strand)
accacgtccaccttcttcaatttcactgctttctggtattattttatctagcccatctttacatagctttatcaatattcctctgcaatgttttaagctactttggaattcagctgtcctccattagttacggatcatctgaatcgaactttggcatttcaaacttaaaagtttttaactactaaaataaaatatttgattagaaaaaaatgacttaagcaatttgcagtaatttaggcttctgggtttcaacaaccattcgagcatgatttaagatgcatgattattgcgctgactatgttttattccaaaagtaaagtcatggctaaggaattagcttcatttctaaggaaattttgatatttcttgggggaaaaagaaattatgaatcgattattaactggaacttttagcagtgactctgatctataagacctgttagtgaccagatcatttactgtgtatctcattactgttagtgaccagacctgggtgtcttaatgtgcttaatttcttattaaaattattgcgcttccaaattctttggcattgtacttgggactgcttctttgatgaatatgggtgtaattctcctaaacaaaagaaaagaaaaggagaaaaaagacgcagcttgtttacttgtagcaacaacacccatgatgatgttgttttgtgggcatctagtgtttgtgtgaccttgtaggaatgatgtttttttggagaacaaactaacgccaatgtgctcctttcagtgaactacgaaaaatttaacatgaaatttctacagactatattgtgttaggcactttattttttgtgagtgtgactttagacctcctataaaaaatttatgtctttcgcaagctgagtcctttaattcttgatgtgatacatatctgactactccagcattagtaacgttgaatgcaaaatgctgcatttgatcatttaaatgcatctgcagtttgtttctatgataatttagtcttgttttcaatttacagaataacagtcaacgccagttctcatatgtgtaatgcacgggtgatgacaaaaataataataataataataaataaatttcaatgcaggaagtgctaatctcacaggatttaaagttttcatgtgctaatttcacatgaacttaatgaaattgtatttcatgttgatggtcttcatcttatcttgttaactggatcatattttggcttgggccattctgcagtggaaaaaaatgaagttaaactgtatgtcataattctgcactccattaaaatcactgcacaaatgagcatcttcatgaagaaaagtgttaacacatagattataagtttatcagatgatcagtactccaccgttgctaaacttgttaccagttatatactattcttattcatgttttcatacctgatatctcatagaacacaggtttttcttgcagctaccattttcttgttaactgtagttagtattcttgagcatgacctaccaaatgctgaatcgtgtttcggttaggaccattgtgcataaaaaaaaaactgtatgtcataattctgtccttcattaaaatcactgcacaaaggagcatctttggcaaggaaagttctaactcaatcagtattgaactcattactagttacaccattcttattctagttttcatacctgtcataactcatagaacgtgaaggcctaaggtagatttttttttttaattttctctttgcagctaccttgtagcttca

SEQ ID NO: 6021 - DNA, 616 bp, Manihot esculenta
  Intron number 6 from transcript cassava4.1_005320m (locus cassava4.1_005320m.g) derived from phytozome v7.0 (chr-ID scaffold05280; pos 746796 to 747411 reverse strand)
gaagcggtaatatgtcttatcttcttgtaatttttatactgcattagcttagtttgtacttggaaagctacccatttgacagaagtacggagaagatgttgacagttatcatcctagaaattcatcttttcaactgctgtccagtcctaaaatattcttgtcccaaagtgaatcccaaatttccatatcaggatttagaaaatggaagtcagcaggattaagaattggtgtggaaatcttcgctagattcatgatattgatgattttgatgaatgaaggtgttacattatcctgcgcttttatgatcaacattattacaagtgtgcatgcttaaacttcataaaaaaccttgtccaattctgagcaattgacgaaccatcatgggatttggctaattaacaatccccaggaccatatttgattatctattatagtctgaggagtttatttcgtcttgtaaaatgtccattcattttagtagttgaacttttgcttccaatctctctctccctccatcaattgcctgtttctttggttttctctggcactctggatcacagttcaaactgatgcattcaatggttcaactgatgaacttcactgttttttcaggccg

SEQ ID NO: 6022 - DNA, 1284 bp, Manihot esculenta
  Intron number 9 from transcript cassava4.1_000859m (locus cassava4.1_000859m.g) derived from phytozome v7.0 (chr-ID scaffold10173; pos 656944 to 658227)
ggtacctgtggaaaaaagggttcgccaacatctgggtaagttatttaagctggttgtgcaatttttagtaccagttactcgcaagagagagaatctttaaatgctaccacattaaatatatctaattggagggtgctaaactatctacatgtgagagaaagtggactcttcttggacaaagccgtttgtgctgcttcctctacaacaaaaatgcaaacggttgttgttgtttttgtattaataatcacagagaaaaaaacaaatcccattatttcccaaacctgtaacacgtagagatgccaattcccatagcttcgctcaactttagtgcaaaagcaaataatacaaccatttcagcaacttctgtagaggaagcatttaacaaccagaattcccatttttccagagacctcatactgcaccctgcaggcccacaatgtcaagaagtcctcatctaatccttcaccaaaggaaattaaataattattccctgaattaatgttatataacacttttgcatgtaaagattctgttgcaattgttgcctcacaagattctttatatttctttctgtcgtgttagtagtagttataaatatccatatagacaacctaactacatttggattaaggttgagttgagttgagttttgtcctgttaggaattcaagttttggacaccgtatttagaaatagattagatgtcaattctatttatcatatgtcttgcagtttaaccttacaatttatggtgtgagatttgaactttatggagttagcaagttagttgctttgcagctctcgataaatttccccttttatcatcagagctgtcagttaatggatttgtaactgcagtgttttatctatatcactggcaaaggtcaatgcttggaaattgctatttgtagataaggtaatcaaagcagatatctttgaggaaaaggaaattaggatatgactatcattagattctctcctgaatttgggggtattcactttataaggccctctgggaatttttcctaagtagattagacattcagttccataagtaactggtgtacaacaagaaatgacttgtgcctagttgacaagggatactagctattcttcctacaagatgacctgaaagaatatcttgaggaatcaataaaaaaactataccatataattcctatgtctacattttgtttagaacttgaaattatgttataatgtatttatccgcatcacttttttattttcagtggcagcagtatccagccagatataattctagtgg

SEQ ID NO: 6023 - DNA, 1135 bp, Manihot esculenta
  Intron number 1 from transcript cassava4.1_028082m (locus cassava4.1_028082m.g) derived from phytozome v7.0 (chr-ID scaffold12793; pos 140048 to 141182)
ggcgccatctacagaaattcttacgcttttcatcagtaagtcttctaggtttctcgttttgattgtggttactgtttaagagacgtctgattttctttcaagaatttggttttgttctgcttaccttaaaatggtagaagtttaagagttttgagtctaaataaattattttgttgatttttcttattcatccttacttaaaaattatatagtgaagcacataaaataaatatgttttctttttgaactggaaaataaatatgttttctaaaaaataatgataattaaaatgtattttttaatttttaattgaaaataaaatcaacatattttttaatagataaaaaataaaaaattattttaattcataatttattataatgaataagcataataaatttattgcacatgggatttattatgattatttcttcatattcaatttcaaaaaaaaaaaaaaaaaaaactaccatattcaggcttagaatctgataagacagggattgaaattttttattctttctatttcaggttttaaaaatacctttagaggaggaataatccctttaattgtgcaaataaggtaatagatatattacaaattaactttctaattattcttttaatgaaaatgaaaattgaaatataatttttagagtagctagattttaaattttttaataagaaaaaagtccttaatttttttttattttatatgaaaatgaaatttattaaattagatttttttttatttcacatgttatgctaattcaaggaaattacataaatatatatgttattcactcctcggatgaaagatatattaaaggaaagctcaagattttcccttgaattccttttctaatcctaataagcctgttttaaaaaaatcttgtctcaattaatccatattaggtttttttttttaataaaaatatttttaaattatataaattaaatattaaatcataattaaaattaacagtatgattaattgacaaattttttaaatattaaataattttaatgtattgttcaaaagcaacggatcaatagattttctcataacttaacattgagaccaaatagaaaatctcttaatattatcatttggatatgcaggagttatattgag

SEQ ID NO: 6024 - DNA, 2075 bp, Manihot esculenta
  Intron number 1 from transcript cassava4.1_007895m (locus cassava4.1_007895m.g) derived from phytozome v7.0 (chr-ID scaffold04151; pos 381178 to 383252 reverse strand)
ggccttcttcttggtgatattgaggtttatttatttatttttttaaattcattttgagtcatcaactttaatctttgctcctattttaatgaatttggagatttcgttttataaattttttatttttgctatgtttttggataaattgttattgcaattggaagtaaagtggaaatcgtgctgtttttcccggcttatttggttgttagttcaaatgggtagggcaaaatttgattacctattttttccaattctgaagcttttttttagttctttattcatatgtgtgcctattcatatttatgctatgcttcttgtggaaatggaattgaaattgattcgattttagcttgctggtttagtaggtggttgaaatcctgaattctgataaacatttgaagcccatttttctactctagcttttggatttcgtatctcttctgtgttaccatttgattttgtggttttgatttggaatttcagttattttctgatttcattttagacttttattgaataggaattttgtgctatattacagcaattgataaatgtgtacgtcctacactccataaccatttgtttaaaatgggtcttacaaatactggttctgttctcttctattcagagtattatttgatttgactgacgacaatgttgctacgttcacattaagcattacacttacaattgttaattatggaattttttagtatttgttggggagcaatcttatttctttattggatattcttttgagaactttgctataatgcaattgaacttttccttttatgcatatggttttgtttatgaaatgattttttttccaaattgttattcagttgtgattttgatatagataacaggatcctgctatctcaaaaggctgtaaaactctagatttttttttgggcagatagaaaaggaaaatttctaggttaacctgtgtattgtttatttcttttcccttcttctcttttctctatgaatttttgtgaatgcctcaaatggctatgagttacttggctttgtactcattgcctggaaattgggacttaatatggagttctaaaacttagcaaaagtgattacatatgtaagacaagataaagatagctccaattctaaacagatggacagctataccatttttctgttcttctctatgatatgccttttcaattcaaggaagaagcgtgatgacttggcttacttttagtctatatttgttctttattttttttttttataaaaaaattaaacttcaattctatgaaattggttataactaaaattaaattccattagagtaggtggaacttcaaatgaattccacaatattaggacagtgacactgtttggtctaaaatctccgtgacttcagtctctctctcccttgcacacaaacaacttggattatatagaattcaattgaattttgcatttcaagttatatcatacataacacaaaatgaattctaactagaacccattctacatctctagttcatttcaaccaaacagtgttaccgttcatccgtatttttctttaggattagctatttactgagttatctgagctgttgaagtttgcagatccaattttgttttgggtagctgacatcttgtttttccaaagattgcgaaattccaatatgactgattgcgtattggttttgacttttgtcaaaagaaatgttcatactgtggcatcttttgtgtaaaaggagacgaggattacatactggatattatatttgtgttgagcagtttgctgcactacttatttcatctgaattctgtctcattaagctgcttggttctagaatttaagatttaggacgcgtgaaattttctaatgaacaatgcatctcctagtagatttagcaaaagaaaagaatgaaggtatgaaattgatgtaggttattgtatggcttacctgagtattttgcattttgggaattgtgtttgttccttggttcttgtatatgagatttcacttattggagtggagaattctacttccatatttgatggttcagtcttgtgttgaaaatatcagtactcaaaaa

SEQ ID NO: 6025 - DNA, 1483 bp, Manihot esculenta
  Intron number 6 from transcript cassava4.1_032857m (locus cassava4.1_032857m.g) derived from phytozome v7.0 (chr-ID scaffold05206; pos 125382 to 126864 reverse strand)
ccggcactccagctccttcccccgcattcgtccctgtaatttctctctcctattttttcctttgcttgtagattgaattggtttttcttatgctacattgaattgatttttcttataacctttttctttgatttgggtttggcaatttttggtagatcataatattaaaacaatcaagcccaacacaaagatctctatttggatctgtttatcaacatttttctaacttaccctgattctgtataatttgttcatgctttagtgattcaataattcatttcttgctcttctctgaagacaccatccacaataggatatcttgagattcattctgtatattctagcatcaagcaaaagaactagctttcaaacaattttattgtgttggaaatgataacctttaatttgaaccatgagatgaacttttttttttttatataattttgctttctgagaaggattatcttaagttccaactgagtgtctcttcctgtaaaaatcacaaatatgcaccggacatgaatatccagtctcattagttgaagcactttgctcctctgtaggcatcaatttgcttactgaatgttattatcggttgccgtcttgatccaaaaaactggcctcattatgttgcatatctttgttcacttatcactctgggcatgttatggatcaggaagttatctggttacgttaattgttgcacataagaaagtctagaagaatggttcttaagtaacagttacaatttttgcagatgcccctccccccttcttataaaagaaaccaagtcctagattatgagcttgttgaaattgaaattgggaacttttacttgcttattcacatcattaaggacaataggtacaattcgatgaatagtttctgtgaagcagcaagagcctgatgatgtagttttatgtgtactaatgaatacatagagttggagcttttgctgctgaataccatttcagcagctcaaaacctgaattttaattgtcgattttattgtttttctttagctggaagcattctacaattcgtaaacctttcatttagaacaattcattttacaagaaaaggattcaaatgaagttttataaaatcatatatgatttcaattccatctaaattattttttaagataagaagaattaaattctttcatttcaaagaagagaattgatggaaaaataaattaattgaattaaaattttacgaaattcttgattccaaaggggaaagtgatatatagttccagtcctgtctatttgaaaaagaaatcaactgtgtgtttgttgggattgcatggtgatagacttgaatgtttcgattaaaaaaaaagacttgaatgttgaattttaaagaattttgtcatttggtgttctaattcaccaatcagtctgacataatctgttgaagcccaatttggttatctccgctatcgtcattggtttaaataatcatcgtttctttcttgcag

SEQ ID NO: 6026 - DNA, 3470 bp, Manihot esculenta
  Intron number 3 from transcript cassava4.1_017458m (locus cassava4.1_017458m.g) derived from phytozome v7.0 (chr-ID scaffold03852; pos 94497 to 97966 reverse strand)
aagaactcaggaagtggtaacagtcttgaacttgaattatttcttaatgcagtaattaacaattgtgcatggtgttgttttctaattctaggggtttctttagtaaataggaacttctaaataaataagatcttcttagacgtctagttatggttctttttgtaaatttaagtagattagaagagtttggtgggtgcaaggaaagatgtggaagttctttccgagataggtgatgtcgagcacgggaatgaaagatttacctttttgaatgtttaattctagtttactaccatgaattaggccattttattttcatgcaaggctcatatgggaacttcaaaagagggtaaattattacttcagcttatctaaggacaaagctgttccgtataattaggtctatgttcgactcggtcaatgactcaatcctgtgagcctaaatctaaagcttattctgtcgaatagcaagtttgagttagccatcctcagtatggttctactcattttcagtattgcaagcacctctaattaaaataataataataaaagcacaaggcctattttgacctttaaaataggacaatggacatataagctctttaaaataggacaatagacattttttttaagatccagaaaatcctttcaactatggaaatagattaaataaaatatgtaaattttaaaaataaatcgaatataacattgaaggacacatgagtccttcaaattctaaaaaaaaaaattaaactcaaattttcaaatttttcaaatatattaaataaacttttatttttaattcattttatttttcatattttatcacattgctccatgactaatgttcatcaatgatatttatgagcttatattatctattcatctttcaacaagatgattttattagatcataattaaaataataatcgtgattacgaagaagacaataaatttttataaaagatttttaaactatttaataaaaacaatttatcaattggctatagaatacactaaatgatcatcataatgttacaaattgaatatataatatagcttaaaagaacctcttgcactagaacgctttcatgtatggctttggttggatttgaattgaaataaattataacctattttcttttctttttttttctttttctttttctttttttaatctattttaaaaagttgaaagattcatttatcccatttttaaatttgaagggcatatatgtcaacatatttcgtttattttaaatatttaaaagactcatttgactacttgaagggcttaattagactaaaaaaaaagttttaagagctcatatgaatattgactaatattttaagggtcaaaatacgcttttgccttagaaagaaaaggaagaagtgaaatgaatgtgatacaatgtaagagcaacatttggttatttgacatcaaacattcaccagcataaatacaagttggttgcacatatggcaatacaaaatctaggtttgataaatctgaaggtggtaaaagtatttgtttaaagaagaaagtaaaaagaccttgactgttatttctaggataaacaaaatttatatgttcagatttttggtcgtaagtttgcaattttatagagcttcttaattttagtaaaggtagcagcaagtctgtcgagcaggtcaaaattaaaacaaagaggtcactattaatatttttaccacttaaaataaacaaaggaaaacttagttacatgtttttcctcatgctataattgatttttctttaattgctgacaaaattttactttttccaaacttggttattttgactgattggatataattacaaccaagttaaaaaataaggaaaaatttgcaaaagttagaaggattggaaatactacaaaataaacccaaaaattactgattcttatgacgccttgatctgattttctattatggttaatgttttaatttatattaatgatgtaaataagtttaaaatttgtgatttttttcttttttctttttatttatttatatgtatgttacacatacttgtccaagtttagcaataattgataccaataataaatgttagtccatatataaaagcattagttatcactgaatattgaactaatatggatatttcaagtcattaacgctagattttttacattatttattatgttccatcctcttgcatttttttagtagtctcacgatttgcatgtgaaataaacttaactatctcatgattgcaaatatattatcctcgttttgtataaatgattttataagaaaaaaatttaaatgaattcttataaaattattcataattttatttctatacataaaaaattttaaattcttcaattttaaacaagaattttataaaaaaaattcaattgaattgaatttttacaaaattcttgattccaaatagaaggaatatgatgtgtagtacttgtggttcattttgtttgaccatataaacaactaaaagattctgcatctctaccataacttttcataattctatggagaaaatctttttctttcagtttccttttgcattattgtgctctttcattgaaagaagaaacatgatggaatgccgccctttactctttttctctctttttgattttgcttgccttggccgttggggactgagaattgcttctttctttgtactcaagtatccatgtgtgcttttgcttgacgtagttgcaagaaaggaattgatacaatgcattctttttttcaggaaaaataattaaaattttaggactatttaatataagagtcggatgcaacaagtaactaatggttgttactattaactgatagctgatggtaacttatttatgttatgtctttggttatacagtataataaataaaatgactaataaaatatatcaaataatttattttactatcaaaataagaatataattattaatttagtatatcatagcacattttattattgaaataaatatataaatattaattattatagcatatcatttatttagataataaatatgtaattacaatagataaataaaaatccaataatgcaaaaaaaataatcggcttatattatatataaagattgaaagaaggataaatgttttttttttttttttttaaatcttgaaatattagtagttgatcataagcaactttaattttccaactttttgaactgtagtagttcaatggacctatcagctgaataatggtggtctgatatttttactaaaacaagtattttggagcagttaggtgaaagctacttagctgcctctctctgacctctttcccaaacaaccacttggaaaaagaaaaggaaatacttttataaacaataatagcagatttcccgtcttctattattattattatttgtctaattcaatactccaatgagcaggacatcaggctgttcatttcaaattggaccaatcc

SEQ ID NO: 6027 - DNA, 658 bp, Manihot esculenta
  Intron number 1 from transcript cassava4.1_007758m (locus cassava4.1_007758m.g) derived from phytozome v7.0 (chr-ID scaffold10316; pos 79752 to 80409)
attcgctccttggtgtgagtattacctagatttgtataatctttcaatctctatcttctttagatataaagaatttccctttctagagcggttgttgtattcactgtacattatgtaatgtttcaggctgttatgatcctatgacatacagatttttttggaaccttgtgcatgttgatttaggtcatttcgctttaccggtttattcttcgctatgattcttgtattcgttttctctttttgtgtatttaatctatatttgatccttcagaatcagaggcacatatgttctgtttctcattgttaattagtgatttattgaaaattttaaatatttcatctataaaaatggctcactttcatttctgtatagttgttaaatatcgttctctggttctacaatttttttcgttggatctgatttgggtagttaacaaaatgttgaatgatgttgaaggaatgcttctgcccacttagtttagagccttgatgctcgtgggcctgatacttgatgtgcaaatggataaactaatgattcctattgttattgacgttattttctggttgcttgtctttttgttctctaacgctggacacatttcaatttgtattctaagaataccttgtttcagtgttaggtgtgctcagtccactggaa

SEQ ID NO: 6028 - DNA, 4404 bp, Manihot esculenta
  Intron number 3 from transcript cassava4.1_027080m (locus cassava4.1_027080m.g) derived from phytozome v7.0 (chr-ID scaffold10070; pos 9727 to 14130)
ggcagcataattgggaagggaggagctatcataaagtatgaacagtgctttaaaatttttttttttcttatgcttatagaatatccttaattgtcatggctaaaaattataggatgaaaatataattttattttatgcctttaggtttcttgtttcatatttcattccctttataataattgcaagtatgattaaggtgtgaacaagtgttgggttgttttattttatttttgttattcatatcctttatttgagagtgaaaacatgttcaattttgttcaaatttctctagtcagtagcttgtccagaatcctcctaatttcatgagaaactactgcaatactaatttgtgtttgaatttaactatagcattctatttagtgtttgaattttacttacaaaaacaaaagtttgtgcaaatattatttcaagtttgcatggctgtttcctagtaatgaggtatccagaaaacccttttcccagggcaatgcaggaaaccctggatgtacaacccattttcaagaacattactcaggtgaatctgtaatagtaacacctaaggccctctggttcgcaatgtaggcaacttgcaacaatgcctcttgcctgaacataaaatggaacaacattgttggcatatgaaacaccacatatgttggcaatgctgggcatctgggtttatgacaggatttttgacaagcggaatgtattgtggagatgcacagaatttgaactgatgcaatgtagtggtctatgggctgtttcttttgttaggaatgaaacttttacttaatccacttctcatgtcccaaagtaaaacttctcctagtatggttggtctgttctagtaggtcttgaatagacttgaaagaatttataatctaggtgaacaccagctcctttttttcatcttgaaaatgtaatattattttgtttactgaaggtattctttgctttctttttgaagtcagttgaatacattactcatgggttctagaaagtttggtatgcactaacatgaatttgtagttcacatttggattttaatactaggaaattcttgtacatgcatattttggagagaactaatcaaatttagtaagtattggggattaaatgatgggaattaggagtattgcttgtaattggagaaagaaatatcgctctaatagcgttcataattagttattaagactactagctataagttgagaccatagtatttctatgctagagtgatagtaagatatagatgaaggttaagtggtacaatgaaatgcatacaattataatgcgtgtataccagagctttcatatgtagagtggaacacttgtttgagttataaagagatggtaattagtgaacaacatctgggcaaggatgtttgtcgttttaacgatcgcaaaacaatggcaacactaaatttatgagagattaatcttggtgccttgtgaatgctaggtggttaccatgaagataatgagttgaacatgaatccaacaattgtttatgtggtagcttatatatagctttatttaagtgagaacttaatacatgtatgtctaagggactagataatatggacatgtcctttatgtttaaatgtgaaagcttacctcgctggaaatgcaagctaaataaattcaaatactattacaaaaaagaaaattttcccaagaaagttaactcttaaaataagatagcaaccaactcgagagcattagccggcggtaatatagtgtggtgatgtttgcttgagttttgaagtttaactaacaaaatttcttcaggcggagtgaattgcaacacctgtctgtgatagaaaacagaatttgtcgcgggctagaacgtttgaataagtaaaagaatcttcttgggggggggggaagaaaaatggaatgaagagtgatttcagaatcctctagaaactgtaaccagaatcttgtcttgacaagagagtaaaggatgagagaaagcttaccatcaccaaaatagagagggggaaaagagaggaattggcagcagctgaaagcaatctcctctagccaattccgaccagccttgtccaagaaactcatctcaaagctttacccattaccttgattaagttgttttttggctttcattctactgaaatgtgaagttgttcttgctttcatttcaccaagggtccttttttttttcaatataaatcaagtatactacccatctcatttttttttttggatttgaagttggtcttgctgatcattttacccagagagaaagttatacatacaatcttttgcttttgctttttcattcttttcctttatactgtaactgtgtaactagccctggatcatgcaccaaggcatttacccctccatcccatagccatgttgtgatctattctgtatatatttatttgtggatgtttgtctgccatctgccttattccttgctatttttttgaagtttgttcttttagcctatggtgttacatgattattattattatttttttctcattttcgtaaacaccatttcatggtgacatcatttagcaaagaagggtaacattataattattgccattctatttgtttgggtaaattacactgacggtatcagcttagtagtatgtaactataatgtagctacgctttgatttgtaatacaaaactccctgatctttaattcaagtaacacaatacctcctatcaccttctaaagccagttttcaggttgcttgatccttacatggcatttattacatatgtattttgacaaataaattaattaactagtatttttatgattaatttgttctccctctctctttttcccttctctctgtggcttacaatgtttccagccattcctattgccatcaactagaaaactaaaagacttgtgtgattgtggtggaggagaaaggctgattggcaacaaaacctttaatcaccatctgcatattgagatgtcttgttgaaaccctcacaaactacttctaatcaacttcatcttccattaaatttataaattatatatcctaattattgcaaatgctgctgtttaaagaatgtggatgatgaattcagagagctagacttgataatagtcttgactacttattcgatgctataattttggtagctgttttttattgtttgaaaccttgagttctctgtaagcttatctggaatgacttctatgtaagcttatctgaaatggtaggatttgtattggtagagacaatgtttcatgcctgtgaaactaaacattcattcccacttgaaggcagtaagatttaatttgttaggaattcacagcttcctgaatttcaacccattttcaccactcgttattcatcacttaaatccaaccttcacccggtggttgttgttcttcttcgtcattaaccaaagtcttatttgcaaatccttgaaatctccaccaccattttcatttttctcatgtcaactccagatcatgtgggcctccattgattatgaatcaagacccagccctaattgccaccctcctaaacttacctttttaataagaagcataaataggtagaagtgaaattgatagagcaccaaaaataaataataagccggaaagaaaggaagacccagctccaatggtgatgaattgatagacccagcccagaatgctattctcgaattaataagataagaagaaagatggaaatggaacaaaaagaaatatttatgggacatgacgatggcagacattggaaccaaatgctcttaggctttgatggtaacaatagtagggcttgttcattgccacttggtttcacgaattcaccgttgcaggggatggtccttgattgattggcagtgatgatggatgtaatgttgttgacaatagttgttgagtagtctccctttgttaccgaagatggagatttcgaatgaatttggtgcatgagaagatgagacatgagatggctgaaacacagtgggggagagagagggcgaacatgagagagaaattgattataaatcttattttaattaattaaactatttttgtggcaagtattaaattaagggtgaaaactgaaaaatataatttttttttaattagataagtgccaagtcagcataagcaacttggaaactagctctagaaggttatagatcaggggtactgtgctaaaagttaaaatttaagtatcttgatgttaccctaggttgatgtaccatcagtataatttacccaattatttttggtcaaattttcatttctggataatgtttattacagtatcagctacaagttagctggattatttgctttatgtggcagaggaagaaaaggaaatatgctaatttctggtttacttttctacaggtcatttatcgaggagtctcaagctggcattaaga

SEQ ID NO: 6029 - DNA, 4009 bp, Manihot esculenta
  Intron number 5 from transcript cassava4.1_005413m (locus cassava4.1_005413m.g) derived from phytozome v7.0 (chr-ID scaffold08122; pos 323794 to 327802)
ctaaggtaacgatatcataattggacatttcatgcatgtacttcttttaccttcttgtgtggcttgtttgttttttatggaattttgagcagggtattactgtatcagattttgtcctttcatttttttttttagaaaaaaaatgaatttgctgatacatactgttttcttgtttcttctaaattggtttgtttactttttacttatttgtaaatggattgttatatctcataagttcttgattgtgttcttgctgctgaagttctcctttgtaattaagttgttcatctagtaatggttcttttgtttttaatatcaattttatttatttattttttcaaaaaaaaaaaaaaagaagctgtatggcgctgcattacttctagcttttgtgtaatacacattcaagtgttgcttgatcatgagagtcccagctcttccggtgtttcttagaatatccggtttagattttttttattaaattatgttgagattatttctgtaaatagcctagatttgtactgataattagggatatgattgtgtgatatgattggaatatgattaggctataattagggaattaatttattttcttaggctataattagggaattaatttattttcttacctagtatgtattcttttaaatagtatatatacccaattagtttgaggggaataatcaagtattttctctcaaatcttctgctctctttttctttatgctctctttttcttattttcatcaaaggcttcatagtatcagagccaagaaacttggttcaccaccttgctttggtgactttctggaaatcagttagtctcaccacccaacccattctccacgccggcttctgatttgctttccggtgaagcaccgtctccagatccagccccatgagcctccacgcgccaccccaaacagcctatctccggccacgcgcagcccattccccatgccggctttcgatctgctttccggtgaagcaccgcctccaaatccggccccatgcgccaccccaagcagcctgtctttggccacacgctgacgcgtgcaccatcttccggtgaccgtttcatgccggtgattcttcctccagcatcgcccggtgccggcgacttcagcccagcaggtccggttgcctgttcagcccgccttcacacgccctccggccacgcgcagacgcgtgcaccatcttccgacgactgtttcatgtcggcgactcttcctccagcatcgcctggcaccggcgactctagcccagtaggtctgatcgcttgccctgcccgtctaacgtcggatcggatttactctttgcaggcgcaaatccttcttttttggcagattcagattcaatctccatggctcaatcaaatattgcctattctggtaattcttttacttatctaaccaagtctttacccattggttcatggatcctcgactatggtacttctaatcatatctctggtaatccctctcttttatctactcttgtttcaccttccacactatctaaagtcacattagctaatggttcacaaactcaagttaaagggatcggtaacgtatatctccttccttctatccccttgactaatgttttatttacccctgactgtccatacaacctaatctctgttagcaaattgactaaagatcttcactgtcagtcatctttactactgaatctgtggttgtgcaggactggagtattggaaagatgattggagcaggatatgagtcacaaggattgtactatttttccacttctaactctccaattgcttttgtgtcttccacctccgctgaactcatttagtcattggggatatccaagtctgaacaagttacaaaaactggttcctagcctctcttccttgccttctttagaatgtgagtcttgtcaactcgggaagcaaactcgagcttctttctccaagtgaatcaataatagggtcagttttatgtttgacattgttcattcagatatttggggtccaagttgggttagtacaactctgggatttcaatattttgttatctttattgatgactattctcgttgtacttggctttttctgatgaagaatcgttctgatttgctctctatttttcaaaagttttatatttgcttttacacagttaaggtgggacctgatggcaaaattgatcgccttaaagctcgcattgtagctaaaggttacacacagatttttgggcttgattacagtgatactttctcttccgtagtcaaaatagcttctgttcgcctccttcattggctgcaattaatcactagaccctatatcaactgaacattaaaaatgcctttcttaataatgcctttcttaatggagagcttgctgaagaagtttatatagagcaaccctccagggtttgttgctcagagggaggcaggcttagtatgtcgtcttcggtgctttttgtatgggctaaaacagtctctaagagcatggtttagacgatttagcactgtagttcaacagtttggaatgtctcaaagtaattctgatcattccgtattttttcgttataatggtgatagatgcatctacttggtggtctatgttgatgatattgtcatggaaatgatcatgatggaatcttttagtttaagcaacatttgttcagttatttccaaactaaagatctggggaaattgaaatatttcttaggaattgaagtggcatagtctaaaacaggtattgtaatttctcaacagaaatatgctttggatatattggaagaaaccggtatgttagaccgtagacatgtggacactcccatggatccaaatgttaagcttattcctgaaccgggggagccacttaaagatcctgctagatacagaagattagttagcaagctcaattatctcactatctcacgaccagatatttcctttgctgtaagtgtggttggtcaatttcttcaaactccatacagtagtcactgggatgcagttcgcattcttagatatatcaaaggagctgcaggacaaggtctactctatgaggacaagggtcactcacaaattgttagctattttgatgcagattgagcaggttcctcatcagatagacgatctacttcaggatattgtattatgattggagggaatctcaaatcctggaaaaagtaaaaaacagagtgtggttgcaagatcaagtgtagaagcagaatatcgagctatgactttagcaacatgcgaactcatctggttgaaacaattccttcaggaattgaaatgtagcgatgctggccaaatgaagttgatatgtgataatcaagctgcctccatattgcatcaaatccagtttttcatgagaggacgaaacatataaaggtggattgccattttattaggcaaaagattgagttcggatgcatttctactagctttgtcaactcaaatgatcagctagctgatgttttcacaaaatcacttcgaggaccaggaatcgagtatatttgtaacaagtttgagggggagggttgagattatttttgtaaatagcctagatttgtactgataatcagggatatgattgtgtgatatgattgggatatgattaggctataattagggaattaatttattttcttatctagtatgtattcttgtaagtagtatatataccccaattggcttgaggggaataataaagtattttctctcaaatcttctgctttctttttcttcttttcatcaaaggtttcaaattatataaatattgcatataggaattgtaggtcttcaaggtcatgatcttctaaatttgtgttttccatcctgggctattacatataaattagctatataaatatctgtgccttcaaataatttggcatcaaaattaattcatcttatttgcagaggtttctaaatggcccttctaaatgtagatacaagaacacaatgatgtagcctgcattttttaatttttgcatgcacaggtccttcaggaaaagggcattcatat

SEQ ID NO: 6030 - DNA, 4382 bp, Manihot esculenta
  Intron number 7 from transcript cassava4.1_014620m (locus cassava4.1_014620m.g) derived from phytozome v7.0 (chr-ID scaffold04526; pos 97195 to 101576 reverse strand)
ttttgattcctcgtactaaggtcaaattcttattgcatcctttttttcctcattaagtgcacctttcttttttggcctaaaaaaggggaaaataaacccaagaaacaagataaattggtaaataaacaacagagaaataagtgaataacaaaaacatcttgggttggcctaatttattggcttgctccttaataattttctagttcttgctaaagcattttggctgacatgtatttttaagacgcaacgtaattcctattatagtcgattattcattgtttatgtttacttactgactctaacatgtccatttttgcaattaaatattgtttcttgactgtatttattgacaaagaaccttaccagtgactattatggtttatatgcttaaaatttctaaagaactgaggttgacctggtcaacctggcggggtttactgcaggtggatcctcttattagaaaaaaaaaaaaaatatatatatatatataaagcatctgtctttgggattttgacctggattaatggatagaatttgaagctggttgatatatatatatatatttttcttcttgcaaaattactaaaatgaataaattttttaccataaaataagaactacccttcttaattgtttattaagttcaaaatatttttattgatcattagtaataaaaaatgtaatacacccaaattatttttattaagttaaaattatatttaaatataaaataattagtaataattgatcggtgacaattgcaaataaagatgaagatttcttcatttcgtcaacttgtaacttcacaaattaatgtttagttagcaaaagtttactgtgttatagaactataaaagaaaattctgtttgttttgctataaaattttaatatattaaagcttatttttcattgatttaaatacatttattgttatgaaaattatattcttactattttttactaaaaaatagaattataatgtatatttaatatttatttaaaagtatgtcagttaaacttctgttggattctggttcaatatggaactcttaggctgattggaaaatctcaggttatatttcagccatggatggcatttcagtctttctgtatcttgaggcaaaattatggaacatatattatcagtgatatgaaaatggttttgggcttcaagggtgctacaaacctgctatagctattgtttttgcatttttgatcactttatggacacataataggtgctgtaggcctggctgttgatatagccttgtatgggggaattcatggtggttggagaaacttttaaaccaaattgtacaaatttgtttttgtaaatttgaaagctgacttaaactattcaactcatgtatgctaactaaaccaacatattatagttttttggcataatgcataaaatcatctctgaacttttatggtttggtcaatccacatcctatactttttttttatcgcaccacacacaaacacaaccctaaatttatgtttttcataatattcaaaaattccttttaagggttttaactttacttttttccatattcacttagttcaacacatcaaaaaggaagaaagagaatatacaaatagagaaagagtgaaatattgaaatgcataaattatatgaaaaaatgtgttttgggtgttataaaaatataagttagggtgcgcaaggggatcaagaatcatgtggatgtgtgtgatggggtcagaagaagtattgaatgcgaagagacgaaaccaatatagttcaggtgcatatttttgcattaggccatggggtttgtagtcgtctaagatgattttgggttagaaaatgagttctctttgggattaaacgttatgctgcttgcaatatagcttttgtttgcctctaaaaagtaataggaaaaagtttgatatttattttgaatgattcgcactaagaacccttggattgttgcatggacacatgcatatttcttgtgcatgctatccaaatctcatgagctatcacacaattggaagtgttcttttagtttttttttcccccgttttgttctgtggactgtgcatatcatttcctcaatttgcttgctggctgctgcttgcctaggagtgtgcaattggttggttctgtttagaagttagaatcaaattgaaccaatcaaaccaaaattaactgagcctcttaaaatttaagactgaactgttcataacaaataaactgaccctaataaaataaaataaaagaaaatttggctcaattcagtggttcagttttgaaaaagagagaattgagttcatccaaatttagaatatattcaccatgatgaagataggtaaaagaaaattgtaaagaaaatcttgatagactgttcctcacccgttaacatgattataaggataaattttttttacaaaatggacaatagtactgcactcttaaactcaacttagcaacacagatattattctatacatgtagaaagcttaaaacataataacctcattgagttactgtagatatttgtccaatagagtttctccataagaaatgaggagatataattgtacttttgaagatctgagattgtggccctgagtatatgagcaggaaatgaacatctagagggaatcattatagataagcaagcataaaaaaagagcttaaatgaagggatggatatgaccagctatgggtttaaggtcaatttgagattctattggcagccagaaaggaagttgataattttgtaatgggcagggagtttggataagggctgcgttgtcagggatgacttgaggccatcgtgtgaccttagggtgttttcagacaaccacttatttgaggctatgactacttttatgtggatagtgttcttgtaaacaaagaggggtcaaagggccaattggggctttccatgcttggcactctaatggctaagtaaaggtggttaagaggtagtaaatgggagaatgagggagacagtaaataagacagattaatgcaggagttataagtctcagaatgttctatacttggtactctaagggttatatggtgctctccgcccaataggtgtgtgccatatgtcccgtccaggcaagcgtacaaattgaaggcatcattggattggtgcatggaatcagatgagatcaaatcaatcatttcttgggtagactactccctctattcttatttggaggtgtcaatagtcattgggagcttagggatccataccatgttattgtagctatattagtgccatgtctgttaagagtttattgagctccttgttatttaatatgcccttttggctataaatcccctataagattcttacataaggatcatgtggtgctcattaagaaagattaggtgacttggggtattaattagacttgatcctgatggtcatggttgtgaggaacatggcatgaacccttgagcccaattagtagtataagcagatctctatcatgtgggacctatatgacctctgctctatgaccaataggtcatggttgaggttggggatatgtggcataataagaagagaggtaggtttgttcttataagcaaatataggcgttggagctctcttgggttttgtgtggagaagggagaggggaaagaataaagaggatatatgccttgaggagaaatagagggcaacaaagaggtatcagtcttgacgggaaagggaaagaaatcatgagggaaaagagtctacaaagttgacagagaaatagagagggactggggcagtcggtagagggcaacggcgtctgcaaggagaaaggaaaagtataaactaaccctaaatctaaaacaaaacatggagttttgttaattttgttctggtgattttggtggttctaggaatctcaatcaaactgaaggagtccaaaatttagaaattggctcaaatgaaattctttaatataccaaaccaaatttccaaattagggtggctccaccctaatctgtattgtatgtttgcatgtgaacttcagttttattcttatctactaacttaatgagaagttttacatgatgttgttgtgttgaaaccttcttccaataacagaaaagatgataatgaaaggatgtgactgggtgttttctttctgtttacatttttcttccttgcttttgatggtgtatgctgaacatgaatgtctcttggtaagtgatagcaagtgttgcattcaagacccactttgcattaagtttctgcccttgccccctcacccctttttcttccttctgaacaggctgtgtactcatttcaaatttatatgtgcttactgcttagtcatccatcttgatggcttcaatctttgtttctttcagggctttgtttcagcagtgagtaat

SEQ ID NO: 6031 - DNA, 954 bp, Manihot esculenta
  Intron number 1 from transcript cassava4.1_013115m (locus cassava4.1_010509m.g) derived from phytozome v7.0 (chr-ID scaffold00131; pos 172007 to 172960 reverse strand)
tcttgctacaagggcaaatacgccggtaacctcttcttcttattctcctttctttggttttagcttgtttggcttgaatctggagtttttttaaggctattttcttgttagatcttatcttcggttactgttgttttgttcattgttctgacttgattagatctgagtttgttcttatttgattcttttcattttcagattatctgttagatctattgctgaattagagatgctgaacttgttttgattctttatatgatttccccgatcactgtgttttcgttggaatctgattcttcttcttaattatgatctacctatctgatttgcgttttcatttgtgtgacgagtgttatggcatgagtagatctgtttgttctctgcaaatttcttaatgagcttgttttttttttttttaattctagactatcaaatccttttttattatagttcactttacgaagaacagtagtttgtagaacgaaatggttgcagttctctgttttgatcgatcaactaactagtcttgtggtgtacaaacttctgatttacgcactcgtcttttgagtcatgaagtgtgttcagctaagctgaatcacttgggtcacctgaacaaaggaaactatgttattatcattcatgatgtaattatattttgttttctgtttctaaatcgcgatgatttggaatcgaatgaatgccaggtaccttgatcgaatgaaatcttgtgataaatgatgttaaacgttggacaagcgtaaatgttagtatgttattagtcgccgctgaatttggcgctttgattggtttcttgattttatgttgtgagtttgatcttcaaattgaatgaattttgctgggccttccagatcttgatgcttgtctaattggtttcaaattccttcctcatatatgcatctaaacgtctaataagatttttctctctcattgcag

SEQ ID NO: 6032 - DNA, 3505 bp, Manihot esculenta
  Intron number 3 from transcript cassava4.1_005511m (locus cassava4.1_005511m.g) derived from phytozome v7.0 (chr-ID scaffold09231; pos 77634 to 81138)
ctgcgcttagactggtactttattattactgttgttatatttacttttgttactacttttcgatgtctttttcccatgtacataaatgtccattatatcttcaatttcaaggctaaggttgtatgtttgttcgcaatgtcaatgggatgtggtgacagaagaaagaatgaaccaatcttataaattgagctcatttaccctgctacttttgtcttttgggcatgcttttatgtgattgctatcttatgaattccaatacacatgaaactcatgttaggtgagaaattggatatttagcatgtgatgtatatatcatatagtgagggcactgtagcataacatctaaataagaaaacatgaaaaaaattatgattgttggaatgtttctgcagctaagtgaaaaaaattatgataattacctttatgaaggataaagatgatttgcaactgccgtacgtgacagtttggatccactaacttaatgggtgctgattctttatttttaagaatattcccatggtagttgatacgtgatactatccgctcccatttgtctttttctttacctgctatgtatcctacaacagatatgtctttgcacccgtggtcagtctatactctatattagtcctagcatattcatgtgtccatatcatcgtcttaatatcttgagcactacaagtaaaaattcgatgaaatcatgttaatgattgatgaagttgtctagatgtgttagtattgattctctttggtttttggttgtttaaaaagtatgattagaaaacaatcttgtttatttttcttggttttctaatcacacaaaatatacatttcagtagtaaacttccatatttcaaattcgacaaaattcacattttgtttttgtagctattggtttcatgatcttggaaattgccaataattcttggacactaaatagttggggtcattacctggatcattacctccatccctttttccatttaaacccctcatggctgataataaaggcaatagaatttcaagtctaagaagtatgacactgcccatgaaattcttcaattcactactataaactatttaggtacctttttccagttttctattagttccagttcttttaattttttcaattacatacagaacctttcatattagtatcaaattgacaatagtagcaaacttgaaatggcatgtgctataagtaacatttcatagaaatctacataagcatatttaagcggagggaagagggaaagagactagagagagaagatactaggaaaaaattctggactttttttttctattttaagttttaaataattactatgctcaagtatgcatatgtgacaaattagtggtgcaagaagtaaggagggaaagggaggggcctaaaatgacatataaggacataatatttgttaagtttttgttataagaaaaaagaagggagggaagggatggaagagaaggaaaataacttaaagggctacatctttactcaacttttaccttctcttacataatacatagtgcatatttataatgaaaaattacaaaatatagatcgttaaatttaggaaaacgtatcccttaaattaaggagctactcaatctctaaattaaggagtaatattcttcttaatttaaggataatcttattaattctaacactcccccttgatgaaattcttattgaatccaaagacaaaaagtgatccaaaattcttctcgaagtactgcaacatgtacagaaactaagcaggtttaccaacattttcaagaggcagcaataaacttgtctaggctctcttctcattaccaaaagctggtgtgaaagaactgttcttagaattgaaaatttagtgagagaatgagagagtagggacttaaacctggaagaagaaaagtagctttagggactcgaacccatagctttgaaaaggaaaaaaggagtagggacttcagcccttggctttgatgaaggataagaaattaagaagaaagtggggctttaacccttggccctcaaatcatgaagaaggaaagaagaaatggcagatttttaagggagattaaggaaggagaactacctagaattttctgtaggctttgataccatattaagtatttattacaaaaaaaaaggaagggaaggaaaggaatggaatagaaggaaagtaactagaaggttttaccttctcttatataataaatagtgcatatttataacaaaaaattacaaaaatatagatccttaaatttaggaaggcacattccttaaattaaggagatatttaattcttcaattaagaagtaatcttcttaattacttcttaatgtgaggggaatctcatcaaatctaacagtatcaatagatttacaatttctaaatactgatctgtaatgggttccaaaatatttgtaggtattgaccaagaaaaataaaagaaaacccatctcatccttctagatcaaaacagaacttgagtataaaaaatagatttcttgattttcttttattaatattcgttcatgtttatttcttttgattgattttagtctttcagtaaacgccaagcaaggcttaatggtgaacagggatccttatagtcatcctaagtagtttgagattaaggcttagttttgttttaaataataactagtaattttttaagaaatatagttcataatattttgccttctcttgtgcttaaatttactatatcatatactaacatgaaaaggtttttaaacaaacatatgccatgttagcaatttgagaaatgtagcatatgcacttccaaaatttggctacacttaacaccaacatgaaagattgcatatatagttaacaaaagcaaaaagtggattggcttgattccattgcaatgaaggttttgattttttttaatcattaatcttagtatagtactatttattagacacaagtgagccaaattgcctagtacaaaagctttataagttagtaaggaaaggaatgaaaaagagaaggggagatacctaaatgacaaggagggatgtagtatcaatgcatttataagtcttgaatattcatgcagacttagtgtgtaacagagctaaatggtgacaaaggattagctattagtagtcacaactgaggagtaattggtatataactggaagacagagataaggtggaaactcgccaccaatatagtttaattgctttgtacatgtattttggtgtcaatcatgttttatgtcgtcgctaagataatagttttggcagcatattctgatgtttcacctctgttttttggtgaaagatgctcactttgggtctagaattgctagaagaacaaaattcctctttttgtgagatacttgggtatatgcatatgcatttattttaactatatgcttgatcgagtgtctacttcttgaataaattatgttacaattagctcgctgcgcatcttatggttcacttttatcatttttgcttgcagattggcat

SEQ ID NO: 6033 - DNA, 2803 bp, Manihot esculenta
  Intron number 5 from transcript cassava4.1_004117m (locus cassava4.1_004117m.g) derived from phytozome v7.0 (chr-ID scaffold06446; pos 278103 to 280905)
ggtgtattctctcagagatacaggtatgcaagtttttcaatctcttactttaatttggtggccttaatgatagaatgacgtgttaattattggactaaattgtaattttgtagaatgacgtgttaattccatgtaggatagtctatatgaaatatcaagccaatagaaggtagacatgtgtgtatatgttaactccaaaaaatatcaagtagttttttttttagaaaataaataaaagaacaataactcttaattgtctacatgtctaccttccaattggcttgacatcctatccaaagtatgcctaaatttgtgcagatttgtgaatttgaaactcaggggatggaagaatcttttgtttgaagcagttttatgcctaaatagaagttttctgcacacaaatatactgtttgtagaaatataatattttgtctttgtatttcataataaagattacaacctatttatatataaaagactgtatctaaacagaaaagaaaattaagtctataattatagaatccctaagattaagcaactaacccatctatcaatatttactttctatattaatatatttacttcctataatctataacactccccctaaagttggagcataaatgttaatcatgcccaacctattatatataatcaactcgtcccatacaacttagcagacactgaatttgtgaacccaacttcttctaataattgacgtacccacaaaacttcacaaacggtttttgtcatgacttgacattcaggttcagcactagaacgggatgccacattttctcagcttgataaaatgccttacacacatcataaatacgagaaatattctctttcccagaatatagaaattccaaatactcaattaattctttaacaaattcagaatgattaataaaactaatcaccttactgtgaatagaatttcaaatccgtgaacagtactcgtgactcgtgaacagtacccgatgaacagtactcgtgaacagtacccgatgaaaaatttcccgtgaacaatacctgatgataagtcttcaaatgttagcctttatgagtaatccaaataaacagagctgtaagtctccaaatgttaccctttatgtgtaacccaaatgaacagagccctaagtttccaaatgttaacccaaatgaacagagctctaggtctccaaatgttaccctttatgagtaacccaaatgaacgagtctaagtctccaaatgtaacccataaaatgttatacttttatgggtaatccaaatgaacagagggctaagtctccaaatgttacccttttatgggtaattcaaataaatagagccctaagtctctaaaagttgttttttataggtaaccaaaatgaatagtatcaaaaaaagtctccacccaacacccaaacgaatcgcaaatctgataagggagctgcaaggcgactttgacatcctctttgggtgaacggtgagagacaaatattatcctagatggataacacaaaagaacagaaaactcattagttagtcccttagttttgaaaagtacattaaaacatccctaatgtttgaaagagtctactaattagtctcttcataattttacttattaagtattgaaaaaaaattttaaataccatcgatatagagggactaattattagactttttataaaactgagtgatcaactaatgagtttttctaaatataggaattaaatagtaaaatacttaaaggataaaactaatggaataaatggttaatagattttttaaaatctcgggatgtttcaatatatttttcaaaatcgaagggccaattaatgagtttccctaatacagggactaaataataaatttctctaattgttatattctgtccttctttctatttattttatttgctgcatttttacgcctttaaaccaaatggcgaaataaaccatgacagtgttaaaacaaatatcaagccaactctgatacttgttgcctacaccaagatcacttacaacatgaaataaactattaaatgtgaaactacagcttcatttgatgtcccagctggtcttgctttgttcatcaattaaagctccgaccatatagtgttctaatgcatcttgtgctgtgtctttggatttatgataggatctacatgcaatcatttgaatcaaatcataggttgacattcccttaatgcaactattatttgaatccaacactatatattatgcaggaaaaaattactattgagtccctgtgttatgggaaaattcattagttggtactcagctttgaaaaatataataaaacgtctttgatgtttttaaaaatctactaattagccccttcattaattttagtcgttaagtgttttaccatttagtttctgtatttggaaaaattcattagttgattgatcagtttgcaaaaagtctactaagtactcactctgtatcgagagcgttttagatttttttttaatacttaacgactaaaattaacagagggactaattagtagattttttaaaatatcatgttttaatatattttgcaaacgtgagagaccaactagtgaatttccccacaatataggaactaaatagtaaatttccttatgatatatagtgtttcaatgcatcttgtgctgtctttggattttgtgataggatctgcatgcagtcatttgaatcgaatcatggtttacattctattaatgcaactgtattttgtatattattattttctgagtttcggatgtgtaggctcctgcggagagaagacaagtctttcgtcgtga

SEQ ID NO: 6034 - DNA, 1419 bp, Manihot esculenta
  Intron number 3 from transcript cassava4.1_008379m (locus cassava4.1_008379m.g) derived from phytozome v7.0 (chr-ID scaffold06705; pos 422640 to 424058)
gcatgtgagtttatcttggattcagaagaatttacttgtaatgtatatacagcatctaattgcacttgtatttttatgcatttcattgtaagttatcataacttaatagagtagtaagtaggttcggtttttcattaatttatttcttgtagtctgtccagttttttcctgtttatgcattgagattatgcattattcttgaaattttcgtttcttggctgatgttggcttgttggacactactatttcattttacgtgttcatatttaccttggatttaatggaactggtgcactgaatattcgtattttattctaaacaaattcacataacgataacattttattggttttcctatcaactgaaatatttacatttcccttctttttttcccccatttctcattatgcatataaggtatggcagctaacctaagagagatgagagaatgcagagattgaaagaatatggttacaaatgagcttattttaccactctattagggatataggaagtaggaactagataaaatatatgtcaaagccaaaaaaggtcaaagcacttgatgctgctctgggcctctgagtatgttctagtgaagatttgctggttttcttcttttcaaacaattcctttcttgaaataaaagcaggaccatgggttcctaagattttctcttatgcagctttgccatctattggtacatagcttgctggtataagttgtcatctttttgtgcataacatgcataaaaaggcttcaatggttatagaaatcaacaagatgtctgtgttcatttgctccttgagataacatcaggctgtgcacaaatttatgcttgtccaatgatactggctaattgtaattataacttgtgcataaacatgtgttggtgaaatagatgataggaaagatttttgaaactttgtggtgtagtggatgttttctcatgtaacgtttaactgaaaactctaaactgagcaggtgaactgtgtagtgtgacatgcgtagaaaaatatttctcgtagaattaaatatttgagttttagttcaatattaaattgaccttgaggaaaatttctgtttgccctctgttctatgattcatttttgaatatcaatagccttgtagtatcctgtttatctgattaacaagatgaatatttccagagaatggaaactgtaataaagaaaagtgaattcctctattgagtttgttgatgctcaacaagtatatttgtatgtgccaaaaatgcaattacagtctcctgttacagttacatgaacatgaagtacatcatttttctgttatataatgctctagaaatcaattgttacttcttgtcgttattatcagttgacaacattgattaatcacatgtcagggaacttttgcacacagaaaaaaggcagggcgaca

SEQ ID NO: 6035 - DNA, 2464 bp, Manihot esculenta
  Intron number 2 from transcript cassava4.1_001646m (locus cassava4.1_001638m.g) derived from phytozome v7.0 (chr-ID scaffold04182; pos 164889 to 167352 reverse strand)
aaaagaaagcgaagctcctatatttgcaggaggaggttggttatatctgcttgatattttttttatcagtgctcacatgataattttttccttgtttgtcttacccgttttctttttatggtaaaaagacaggttactatattgtgaaaaattgcttattcgttggaatctctctggcataactttattaagaacttctgctttaaatgataatttgctactttaaatttaatatcatccatgtgattgcttgatacatattataattctttcatgcaatgcacaataactaagtaaattatataatattacatgttcaaatccaaatattcaaggatttttaatattaagcaccaaattttgttaataaaattcttcaaatgtgtgcattcttagctggagtaggtctcatgattaaggaatgaaagtctaagcagttagagaacaggaagaataaatcacaaattataggattagcgaaggtctgattcagtcctagatgtcattgtccattgtcttttctagaggattttgatatgaaataataagcgctaaaaatacatgaaatcaaataattgtcataagctagcaaaagggttcactcagacatgaagtttttttttcttttcttttttttttttcttggtgattagctctgatactgggtttcgaactagagactccgtgtccagtaccaatgagttaaaacccattggtcatgtattttctgcagagggttcttttcaacatcagtagcatttagtatttttggtgggtgcatggggcttgacctgatagtcttggattcttcttctgattgtttcctctaatgataataataataatagcatttgtttttataaaaatactgtacattttcctgtttacacatagttctcatccttcaaatttgatccaagtttgtgtcattttgtgggtgtgaaagatttcacacattagcatatcagctttgatgttggatttcaagcatagtgtctcttcactttggtcatcgtgtagggtaacatttttttaaaggtcccaatcttcttttaggctttcaactttcatcttttctagtcttaaacttttccaattatatctgacctcaggattagtatccatgtctaagttcattgcctactgaattgagtggttggctagatatataattaatcatttgaaagttaattattgcttaatattgcagtgcgtgataacatcacgaccttaccaatatagctaccaggaggtgggcctaaggcatatataattgagagaagcatgcgtgtttgttgtttttcttcgatattttcatattcttttacttctcatacaaagatttccagtaaaaaatgggaacaaaattagacttggtaaattgtaggaagaactaatagcttattgccaataattctttttcttttaatgtttaatctcatctaatgaattttgaattattgaaattacactttgagatatttctgtagtagacgtgcacagtctgctggacaattttttcatggatcaggcaatttatgcttaattgtttgaaatttcattcctgaatatgcttaatcctatggtttaatttcttgaacacaactgctctagcacatacttgatcacatgcaaacatttcatttcttcaaatttcttgagtagttgggctgcatgctttgtctacactgtatctgctgcacttttgtagtattaatataattttcttttgatgataccatgaaagaaaaccaagaaaatgaatttaaatccttagatgctactctaacttgataatggaatttcgaagaatatcaaatttctttaggtttttgaaggttgcatagtgtcataaaaggctccatatactgcagtagaaaaggttccatgattcctgctagtaagtaggtacaatgatgaagttgtaaagatgataatttaagggaacaggagcaggacattgatatcccactttgtcatttgagattaactgaagctggacttgttcatgtgaattattatggagatatggggcgaggtccccccagcccttttccccatctctgtagaaagccatgctaatgagtaatgacatctctattaacagtacactccacttgctttcaaattccaaaaagttgctgtcctataataacaccattattgtagtgaaaagaacaggcaatttatctgaaatttgcccttaattattttatgttgattttcccaatggagagtagtgaagtttggtacttgcatagtagaattgctgtttcttccactcacttccatcaaaagatgtttatattttattcttccttatcattacaagagaccatcgccttaatattatattgaatgtctagaatttgtgcttttactgttgctgtagctttattctttttttgatgaaaagaaaaaggcatttttgatgactatgttgctgtattttttgttgaaaggt

SEQ ID NO: 6036 - DNA, 559 bp, Manihot esculenta
  Intron number 1 from transcript cassava4.1_012122m (locus cassava4.1_012122m.g) derived from phytozome v7.0 (chr-ID scaffold10780; pos 173801 to 174359)
ctgggtgcacgaattgccttggcgccctccaaaaggttagtttcgaggtatttcgtgcatttatgatgtcggtgttgcattcaacattgagaaaaggaattgcatttattagattggcgatgaatatcatgtctgaattaattctgattttatttagttaactactcatcatatataaccctatacttaaaccaagaaaaggctagctgggtttctgggaatatcagtcttgagctaactttagtggagactgaagagaaataattcaaaagatgaagtttattatcagagaataatgcgtgaaagtgaaagtccgcttgattggagttgtttttcttctgcagtgttttctgaagtgaaccaaaatcaccatttgcaaaatagaaactgacccctgcttatctctctcttcctgcctattcctttagcatatgatttacttctactttttacctttactcttttgttgcatacacaatatttccggggactacagtaccctcaatcttgtttcctaattgcagctaaaagccagcaataagaacaaaagagaggaaga

SEQ ID NO: 6037 - DNA, 1604 bp, Manihot esculenta
  Intron number 1 from transcript cassava4.1_006430m (locus cassava4.1_006402m.g) derived from phytozome v7.0 (chr-ID scaffold03000; pos 145967 to 147570 reverse strand)
ctaagcacagaaaggttctcttctaattctctttttgccgttatctgctatttttcttataaatttcgattctaccttgtgttcttttttttttttttggtgtttgcgttgttttgatttcgatttcaaattgatctataaaaagctcattttctgttttgttgctgagaaattcggggaaaatgattgaatagtacgttgatggatttgaattttttgccagatttgatctgtgtgttttggatggaaatctgcgatatcaatctgttttatattctaatctgatttaaattcccatttattttttttattttattattgaacattttctgaagatttggtttaaattttggatagatgatacaaatatgcccataatatgattaattcatacgtcaacaattatatgatctttccttgacaaatagtggttgtgtaatttgctgaaaaattgtaacttctaatctatgcatatgtcaagctaatattgcatatatataatttatcaacatttgttctaattctatggagaatggtgcgatcaagaaaattgcattttatgagcatctatttaaaaaaaatattttagcgtcataatctttaaaactaatgcggatatacagtcttagagatgcctacaggtatactactcatttcacttttcacatattaagtaatttaattttcagtgtggttgcttgtgatatgtttcttccactgaaaagtttgaattccaatggaatatctggtatatacaccccagtatttccctatcgtgtgtcatcttgcttaatgctgttatggcatctatactgttggttttttgggaggagaggagaataagagactgaattgcatagaattgacatattgattttattgacgtacctgttatttatacatatgacatgtaactaaaaaatcaaacaggatcataaaaaatctaaatttgaatttaaaatcttaacaaaataatttaaataacttgatcatttgatttagtctattctaacatatacgctgagcacaataaggtgttttccatctgtttgtgggcttaatatgatatttatatgtttgcttattaccagattatttatcatataataagtgaataagtgaaatagttgtacattgtcaagtcttgtatgtttacaatatgcatcagctgaaacactatgtcaatgagtggttttagaaatgagcattagttatcatatcagagagtcaagaacatattaactacagtggaactacaaagttctcaagaaattttactgcttctaattctgcatttatgttaatcttatggttcttttctttttctaacacatcaactttaccattcagtgactagattttaatttgagccaaaatgtagaactttttctcttctaaaagaaatgtagctattagtatttcttcttccatttgtggaatgcttggcgaccctcctctcgttgcctcttaggagacatcttgatattttttcaatcaataacaaggagaattctgatgagcatattatcttatgacttttggattcttatctttgttgtacatgtgcagatattggaaggtctccttaaattgcccgaaaatag

SEQ ID NO: 6038 - DNA, 2009 bp, Manihot esculenta
  Intron number 1 from transcript cassava4.1_020526m (locus cassava4.1_020526m.g) derived from phytozome v7.0 (chr-ID scaffold07571; pos 35660 to 37668 reverse strand)
gtacgctagggattccttggtcaaattaggtgcgcgctctctctgtttctctctgggtctctttggctctgtatttgtatgcgtgtttctttgtgcttccatatctaattatgctagtgatgaatatatgtggattttttctttacaaaagaaaagaatcaaaatcatgctttatggtttgaatttggttagtggtcttcttcacttttctcttttggtggaattctgtagaatgaatccaacttatgttgtggattaagtatgtttttgttccttttttattttttaatttttgggaaagaatctgatctagaggctctgagtcggagtgatatgaattaagagcaaaactgggtgcgaagatcggtaacatttttggaatctagctagaatcctttttgagctagaaataattgtgggtcacaggtcaaacacggcgctttaatgaattctgtcaaacgtatattggtcaaactgctgatcctaatttctactcgatttgttgataaacactgaaggtaaatttagtttccaaatagttttttagagaatgcttatgcttctaagttctaacaagtgttccaacatggtaacctaacaatatgggttgcaacaggcttttttagttacggggttggaatcttctacgtgctttacaggaattttgtttcccttggttgacaaaaataaatagtaatatactaaaaattatgtgaagtagggttttgttagataactaccagtgtaaatatactttacctcctgttgtttgtgctatgctctagtttgtagttcttttccctggtgtaataagagcagggactaccaaaacatctttttgattgtaatcctctttagtggtctcttagagatctagtgcaacataagtatcccgtaattgcccaaaccacttggaggacatatgtattgtagacttttgagtcaattaagtagaatgattgaataatgcacagtagttaaaaattaaaagaaaagagtaaaatagggagagcttgggtgcatattgcataataatagaaatcactacaatttagtaagtccaggtcaatgttgttgaataatgtagcctcctgttatgattcatagagtttgagacaccccttccgtcatcctcattgttgatcgtttgaatgtggtttggggcattgtgctaaactttctcattttgggatgatggatgctgctggggagtgcagatagacttgctcaagatgaactgtggaagcagctgtttatattgaggatgtggtttgctgcaccttcttctaatatcgttcctcttgattgacattattctcgaacttcagatgaaatgaattgagtttggttaacacactccccacctcccaaaaaaaagatataaagaaaaacaacaaagacctatctattttacctaaaagtaaaaagaatataacaaacaatcgtcttattgtttgaagatcatcttataaaacgcattttcgacttaaacctgaaatttgttatctcatataggacaaagattccacatctccaaaaaacaaaatgactcatagaatccattggtttaagattttcatccatgttccggtctcctgcatcttaaggagaaaaacttgcacctagtaacactggtcaacatcatcatttgctggccactaagtagtggacaggcattacttttagctgtttttagggggtacattactttgatgcatccagttatttcttaacaacttttttaaaagcagaagcacacacttgatagatagaattgaggtgttacttttaactgttttagggctacattcctttggtgcatatttaacttttctcaacaactgttttagttgttgatggacgcccatgatagggagattaattgtccttttcttctaagcttatgttgcatatttttatcggctccttaacctgcaattaaattcaaccacagatttacggtcattcaatagattaaaccacagcaatcagaggagtaagatacagag

SEQ ID NO: 6039 - DNA, 3302 bp, Manihot esculenta
  Intron number 7 from transcript cassava4.1_004470m (locus cassava4.1_004470m.g) derived from phytozome v7.0 (chr-ID scaffold11240; pos 14442 to 17743 reverse strand)
ttaaactaattttggaatatataaaagctttgcctgtaagttctgttgctttttggtatgaataacattcagttctgactccactatcaacttgtgtccattatataccagattgcacgttaaataggttaagaacatgtgtttctcttgtcaattgtcaccttctcataggaatagtgagattgtctaaaataaattaacataaactattcaagtgtttattataattttatagaaaaaattacagaagaagaataaatttaattgctaaagactttttcatatattcttttttttaaaaaaaaaaaggtatgttgtggtattacaaattttcagttaaggatctaaactgctattagtcaagtagccttttcagtgaatgtttgaagctttgatagcatgacactaggtaaataagtaaaaacactttttagttatcaaaataggtcccacataaaataaaactaaaaatagaataaaagaggaaggaatcggtgaactatctctggtaacatattttcttttcatctggcactagcaactttttggcgctccaagcatcaacctacaactatgagcaagaaatatatgagagaacaacgttggtcgataggaaatgagaggagaaagagagtttaactgaaccaatctttaggattcaccaacccatagcattccacctcttggatgagtttatgagcatcacagcttatgtagtggagtaaatttgagagtgatttgaatgggaccaacctttcttttattttttagtctttcccaaacaggagttatttcatacttaaatattattttaaattaaatgttaatatcttgtaatcaaaatttaatgagattaatagaaaaagttttacttttcatctcaaaatcaatgtaaggccctagcttgataaatgtgtgaaactataaggcacttttttgtaatttttaaaattttaattaaatatttaatacatggaaatgtctcatcatttttgtcacaaaattaacctcagatgcttacttgaaaaatgcataaaaccatagtgcacctttttgtatttaccctttattttaataataattctaatttatgtcaaaacttgactagcggttgtcgaaaccagtcaaaaataacatttctggttatcaacaatcttacaactgcagatagtggtgaaaggatcaaatctacagggaattgacacttacctatctttcttatcaagaccaagaagattaattgaaagcaaagaaactgaaagcaaataaaaatagactgcaagtaaagtaaaaagtgggggttttgagattgattcaattgatctaatactgaaagcaataaaagaaggcaaataattaaaataaagagattcaataatgagaaagacctagttgaagaattggatccacttcagttgttgggattgatcattgacactcagtttcccttaatagattcaatagattagttatggagatggaagacgcttctcaccaccatgtctctccttaatcataaaccaattagggaacgtcctctaattaattactaatcaacaagttgccaagaaacgtccttgggccttaggcatcaaaacaactgtcaattgcattaagaaatagagagatctaattctaactacccaaacgcatggtgatattgctagattatgcaacttccttagtttttgcaccaagtgttcttatgtctgaacaatccaagcaattacggactcaaaattattcaaaccaacaatatattaccttgcaatcaagaatcaagtggccacattgattataataacaaagcaataatggaatcaagcatgaaattgcataaatattgaataaccaaaaataacaatgtatgttcagatctcacaatccataaaacaactaaagtttcaaccaatcttcaactagaataaaaggtttcagccactcatggctgaaacaaagcaagaaaataaagaaaggaagaagaagagatggtgtcacttgtaatcccgtatgtgtgtccaagggagagtagaaaaagcatggggaggctccttatgtgtctttttatagttgaaagtgttgtcctaggtccttacttactgtccaagttgaattctttgctgtccaagttgaattctttgctgcccaagttgaattctttgctgtccaagttgaattctttgctgcccaagtgctgcccaagtgctgcccatgccgcccatatcttgcacattaatgaggtggagcctccttttaaattttgaattttgaatgtgcaagacttgaggtggcatgtgtgacttctttggcttctttgacaagctgaatttgaatttcaaatttgaatgtgcatcttctaaagatttggcttcttcaataaggaaaatgattcttgaagatcttgaatttcaaactgctctgcagattgcactttccttatttgtcactttccttatttagcactttccttaatgagctgaaccttaattttcaattttgaattctcttaaggatttgaaatttgaatttcaaattactttccttatttgactcttttcaagttgtttttggcatgcttactctcctttgctccattttaggcagttttagggcattttcaccaaattgtctctttacaccattttctgcaaaataagattaaaatcaaaaaattaggtagaaaaagtataaattaacatcaataatctcatgataaaatggtctaaattatgctctatcaaaactcttctataatatataatttagtaagttggtatataagagagaaggaagaggaaatagtaaaattgccgagaaattctattcttattataattctaaacaaaagccctttaagaaaagagatactaattaaaaaataggtcaaatacattatttaacccaacatctttacataaaaaatcaattaccatcctaaccttttttgtggttaaattttaacacttgaacttttgtaaattgtaactatttaacaaaattttataaaatataactatttattctttgcacttttataaaagtcaagaattaaaagttaacaatataaagatcgggttgccaactgacttttcaggtaaagtttaagggtcaaatatattctgcctaaaaaataatcattgttaatgttgaaaacatgaattttccatgcgaaagagttggtattgcaaaccctttatgttatactttgttcctctttcatatatgcagtatgcacattacttttaaaagaatgaaagtgattttttgcagactgggcaagaaacagattttgtcttagtctc

SEQ ID NO: 6040 - DNA, 4423 bp, Manihot esculenta
  Intron number 6 from transcript cassava4.1_002942m (locus cassava4.1_002529m.g) derived from phytozome v7.0 (chr-ID scaffold03773; pos 148223 to 152645 reverse strand)
gtagcaatctggctcgtttacgacaggtacctacttgatttctgattttttcatgtagttttgcttcttttttatttgtgctgacctaaatagttcaacaagttcatagtgaactcatgatattatttgacatcctatagctactgataattctgctgttagtatctgacacttttttttgtttttgcttaacttatttctgctcaatctgatactaacaatgaatatagacttcgcattatcttctatgagtttagtttgatttgtttaagaaatctccgagaattttatagatagcatgtatatctatatatttatactatgttaacagttaagttagaaaacaaacacatgatcaacataaaacttcaaggaaaatcatctataaactttgtaaattttggtatataattaaaatgcaactttggaataatttgaatcatatttactgtctagacaatacaaattattctttcattatctgcagccaaattgtcatgagtaatacaataaatctgacaggcttcctaaatccaaaaccattagaactgatcaacttcatggcaaactacaattctaaaacagcttcaattcaactatctgtatatcaaacaaacctcgtacctgaaaaccaattgaatatctttcaaaaaagcccagggaaccattaatagtattatgtatctgcatatgttcttggaattatatgaagtaaaaatagagatcatagaagacctttgcaattccaaatgtaaattgtcatagaaaaagcaaaagagaaccacaccttaggaacttttagctcaacattatggattgttcttgtgttaagaaacatgaaatttaaaatattctgcaactgattagcctcttatgggtaacatttgacactagaacaaagtcctgtcctcctgatgacaagatatgcatttgttttatttaatttattccggaatcttctcttcaataataattaagggtaatttattcagaactttttcacaccttaagccattttacacattatatattttaaatcaacttcagctcatcgtctggtgtaatcagatctcaggtgccaaggttatattgcatgaacctcgtctaggaacaagtgacaggattgttgttatatctgggacacctgatgaaacccaagctgctcaaagtctccttcaagcatttatcctcactggccaatgatgataaaaaaaaaatgcttggttatgattcattagtttcacaaaaaaagaaagaaaatttccattagcggtctgtttcggctggttttcttttgacaaaactgtgtacactaatcctgtcctagttagccctagttattcatttatgttgtcttagtgatggaacatctcttgtttctggtacttgatgcaacttctcataaccatttactgtgacctggccatggctctggcaactttccctggtttgacaaaagctgcaatgctaaagaacgtgcttctgttaatacttcataatctttctgcccatttcattgagaaaacattgaattcaaatagatttacagttttacatatgaaatgtacagtgaagcattgaccgtctcaaggacaaaatgaacaaataccataattcaacagaccgtcaataatatcaacacactactttgtttcatcaatagtgcaaatttcttcgagtctatacaaggtaatataatcagttgattcatgtaacaactacatttccaatttgtttcagctaagatacgactaccagaaagagtacagaaacagaagcgatggtaaaaaataaggaatgtacatttgtctaggtgtacataccgttcacaaggtattgagatggcatcttaagtggttgattatgataacacttaaaaggtttcacaagaaaaacaaagcacattgatggaacaaaattttaaagtttaattattttttatgtgcaaattgaaattagataacgatattcaaattcattgtcaagttcaattcaaagaatagaactaaataaatttaattatatgtagtcctaaatgttatattttttattatacttaagctcttgaattacaactatggttgcacaagttctgaaggtgcaagaatgcaagtgttcttcacatgaaaattaatggagattatagtaattaaccattctaaatcacgcaatgcaatcatacaacctcatggatgacagaatttgatctggtggaagtaaaacagcatcacttaaaattcttagaattctttaaaaataaagggaaaatttcttggaaccaaattccttactgttcctgattcaggctggacatgacttgagactgagatcttggaactttagcttcttgctgctcttagctcctaccagagctgcatattggttccacgttttaaattgcaagccaaactcctgcgactgtgagatggaaaacaaaaccctttgtcctatatgtgtaactgcttgacatgaagaaatcttctcaaaattggggattcaaaataggcaaacaaggcaagtcacctcacaagcgttctccaaacacatttgcctagctaacgtttcatttggtagtatcagagaagcaccgacacttagaattgttcagaatttccaagtacaacaaataaatagaatacaatcgagtctcttgatagtggtcaaacatttattatccagtggaacctcgacatatccaaagtgccagattagaagacagaaataaattggatagccatataatttgtctgcttcgagttaatcatcttttagtgttgacaaggcgtatagagcaatggagtaaagaagccgtttcaattctgtgtcaaatctttatccatctttgaagcaatctctattttgttaacgatggactagaaactatctatcaagtcacctgaatttcctggatacatcatatatgcttattacctacaattcttgatcaaacaattaaagttctgaaactacatgaggattttgagacccaaacgaatgaccaagcattattggtcagttgtcaaggaaaaagccttgagataactgtcttctacaatgtgaacattgcttttccaatgacttgtaatgaattgtagaaaggtcattttatggctaaactaacaaacatataaaatgggcaagaaattagtgacaccttggaaagctcagcaagtgaaataaatgtcaacccacattttaatagggaattctggaactcaatcatgaataaacaaggcacttttttcctaagaaacatcctgaaggtttgaattataaattatgaattctacataatctgtacatagtaattttcctcttcataaaagtacaaacaaatgtagcactggcaacgggagaaaggaccacagtcttcaaatggcttgtagatagcattattttcactgttacagcatgttctgtttgtcttgaaaatggatgtctagttttcaagagctttatccaaatttaacttcaaataattaaatatatttaacgataccttttataaaaatcatacttaaaacaggaaattattcagcatcaatttcaaattatacaagtataaagatatcgtgataaaaaaaattaattatatttgtagaattttattcaattcctaattctataatccaccaaaatttactgtgatttgggactcccaaaacttttttttatatggggatcataatgtcctttttagtgacaccttcctctcagaagcttctaatagctattccttaaatattgtgcaacttctgctttcattagattgaacctgtattattctcaccctttcttgttcctctctgtgctactattctaatgcatcagaaatttgtctggttgtcgaatgactgttaaacaagcatgacatgccactttattttctctttgatttgcattgtctggtcaaggtgcagcatgctcatgcaaattcttccaaggtcagttaatttttattggttacgatatgaagtgcaaacttaaaagatctcaaagttcttatatttaaaaccaactaaaattggggcaagacagcagggaaggatatcctaaataaggtgcgaaatcacaaactatgaattgttttctgatttttaaccacttcttaagggattatggtagaggatatatggaggatgattttagtagggagggtttatatggaggactgttatgggccttatttggctaaatatggcttagattatctggaaggatgactgagaagtgagaggaagagtggagcagatggcaaggaggcaatggatatttactagaaatgagtaggaggttccttctcttttcatgtgtgttgattggtggtaatgttgattctcttttttcttttgttgtgatgactgtgagctgtttctctctccctgagactaccttcctaacctgtttgtgccagcaaggaagg

SEQ ID NO: 6041 - DNA, 3418 bp, Manihot esculenta
  Intron number 10 from transcript cassava4.1_007498m (locus cassava4.1_006479m.g) derived from phytozome v7.0 (chr-ID scaffold02936; pos 127510 to 130927 reverse strand)
agccattgatcgcttttgtgagccccctgaggaaggtatgttgcattcatttgttaattttttttccttttaatgtttttgagttctttggttcctcttgacattactgtcacgttttaatttatcttggcatctattgatgctgattagtccacctcaagttttaaatctgattagtgatatgcaatatattgtggcaattaaagttttatcattgactgcattgtggggcactgttttattgttgttttgagaatattttccccttgtcatttatgtgatactttaggccttttttttaaagtcatccccacaaatattttttctggaatgtggctgtatgaattcaaattatagtggtttcagtcacttctatccttttaagaccttttggtagctatgttgctgagcagaatttatcagcatcatgaaagctttactctgacctatttttactattttgctgttttaaatactttagcttcatttatgttacatgaagcaagaaagataaaccatgatcagttgactataaggggtctttgtgttgtatctcagcactcctcgtgtaaatagctggaccttcttcaagacactagttatatagcagcatttatatctgaagggaaaaagtaaataatgaggattttctagtatttcccatcttttccacattcattgtggtaaagttaacattttcaattaccaactacatttcttctttccagtctccattatattatctttgttaagggaatttgatttagttttatcaatttttcatggaatctgaaaatggtgatgaaaaaagaagagggaagcagaagctttgagagaaaaatgcttgatgattcccttcaagtcaattggggtatatatactacttacaagaatacatactaggtaagaaaacaaattaattccctaattatagtctaatcatattccaatcatatcacataatcatatctctaattatgtacacaatcattacaaatttaggctatttacagaaagtatctcaacactttccctcaagctcgagcgtacatgtcatatgctccaagtttgttacaatatattcgatttgtgaaccccaaagagattttgtgaaaacattacctagttgatcatttgagatgacaaagctagtagaaatgtagctcgactcaatcttttgcctaataaaatggcaatcaacctctatatgcttcattctctcatgaaaattggatttgatgcaatatgaagggcagcttgattatcacatattagcttcatttggccaatatcgctatattttaattcctgaaggagtggcttcaaccaaatgagttcgcatgttgccaaagccatagctcgatacaccctgttttttacttttccaggatataagatttcctccaattataatacaatatcctgaagtagatcgtctataataatctacatcagaatagccaacaatttgtaagtgactcttgttctcgttgagtagaccttgtcctgaagctcgtttgatatatctaagaatgcgaatgactgcatcccagtgactactgtatgaggtatggggtttgaagaaattgactaaccacacttatagcaaaagaaatatctggtcttgtgatagtgagataattgagtttgccaactaatcttctgtatctagcagaatctttaagtggcgcccatttaacatttagatccatggaagtgtccacatgtctatagtctaacatgcctatttctttcaatatgtctaaaacatatttccatttagaaatcgcaatatctgttttagactgtgccacttgaatcctcaaaaaatacctcaggtttttagtttggaaatgaatgaacaaatattgcttaaactaagagattccatcatgatcgtttcctgtaatgacaatatcaacatagaccactaagtagatgcatctatcgccattatgatgaaaaaatacagaatgattaaaattacttcgagacattccaaactgttgaactacagtgctgaatcgtccaaactatgctcttggagactgttttagactatacaaggggcgtcgaagacgacatactaagcctgactttccctgagcaacaaaccctggaggttgctccatatagatttcttcgatgagctcaccatgtggaaaggcatttttaatgtctagttcataagtgattaattgcagccaatgagataaggagatgaacagaagctattttggctgctggagagaaagttatcactgtaatcaagcctaaaaatctatgtgtaacctttagttacaaggagagctttaaagcgatcaattttgccatcaagcttcaccttaactgtgtaaaccattgacaatcaacagtagacttgtcagttggcagcccaagacacataattattacttccttgcaacttcacattagcaattaaaaagaaaggtttaagggactcagaacctgtattgaaggtattttgcttctcagacatgttgagagagattttggagcaacaagtagggatctgaatttgccaaaaaaagagcatctgtgcctgtgaacaataaatccaaagctactgttcacaagggacgtgtgaggacaagttgtgcaggtgactggacctagtgggttggagttgtcggcgtcgggcaatgctggagaaagggtcaccggcatgaaaagattgccggagaacggttcatgcgccggtgcatagaccagagatagacagcttgagcggcacgtggagccaattctggtggcggcgcttcaacgggttgccgatcggaagccgatgagaatggtggggtaggtggtgagaccaattgattttcaaaaagtctccaaaaggaggtggcagatttgccactcacaactgaactaagttttttttggctctgataccaatgaaaatggtgatgaaaaaagaacagggaagcaaaagttttgagagaaaaatgcttgatgattcctctcaagtcgattggggtatatatattaattacaagaatatatattaggtagtctaattatatcccaatcatctccctaattatgtacacaatcactacaaatttaggctatttatagaaagtatcgcaacagaatcattgccataacagaaagtgttataatgagtgagttgactgctagtttattttcaacattctgtttatttttatttttttaataattcaatcccaaacatgttatgccaataagttggacaaaatcttaattataatttaaatggcttactgatgcatgcttgtttgtgggttggggacacacagctctctctctctctctttttgtgtgtgcttaatgactttataaggtttttgaaatatttagtcaacaactcttatattttattcatatacttctttggtgttcaacagggttg

SEQ ID NO: 6042 - DNA, 2406 bp, Manihot esculenta
  Intron number 5 from transcript cassava4.1_029667m (locus cassava4.1_029667m.g) derived from phytozome v7.0 (chr-ID scaffold05329; pos 246646 to 249051)
ttttggcaacaagtacctttacctcggaacttatagtacgacttctcttccaatttaatctattgctttcaattttttaacatttttaaaatttttatacttatataatatatagtttttaaactgagcttcgtgacataaaatcgaaccaattcgttactggaataaaaaatttagtaatattaattattgttaagcaaacatagccaggccaatctctgttttctaattttgttttgtttgcttttctcaattctcaagacataataatttggtatcctaaactggacaaacaaacaatcctccggttttgggttagaaatcaatgaaatttaatttattaaatggaaattaaattaaattaaatttttattgacattaatttaaatttcatcatgttttttattttatttaaattaaaagaaattttttataattattaacaagtaaaataaaaataacaaattaaatattaaggcaccaatgataaattgaaagtgaccgaaagggtaataggaagcttgattttgaggttatgtttgcaaaaaagtctgatttcttttgcataagggcattaggaaaagaagacgcagaacttttacactcactgactggatgccaaattcaaaagttgttagtgtcagtcaaccacctaacatggcagccccctttcttaatccctatttaaatataattatagtctgattaccaagctgtaattttgtattttataaaatttttatatatttttttaattcaatctctttaaaaacgaaaagttataataatctaattcaaaatttactatttagttttatataattaatgaaatttattaattgatgctttatttttaaaaatttattaaaatattttcaagtagtaattttttaataaaatataaatgtaataactgaaataattcaaaagcaataatctaaatgacaggtttttagaaaataattttgttaaatttcttttgcagataatttatgcattttaatattttattgtatataaatgtaaatatcctaattttcttttttagaaaaggagaaaaaaaaaaaaaaaaaaacaagaagcatggagtattgaaagtgtcggttatgtaataaatgagtaggttttggaaatttagagaaaagagaaaagacgagtgggcggaaatgagcacacctggaaatttgcatgaagcatggtgcctggaattgtgccaggtccatgagatgtacacaaagcaaaaactttctttttcgctcagatcccttgaattcatttggcttcacgttccctgtcatcactaataataattactatacaatgtgattctcaacatttgcttactggggactccccacgtgactcaccccttacaaagacaacaaaacctcacgttcttctcaacattaacaatgaaacacacttattgaaaaatcaaaaatcaaaaatcaaaattaaaaattaaattttctcaatatatttaatagttataattcttatatcataatggtagacgggttgggaccacaaattttctttctgggtgcatgattttgtgtttttagaattgataatgacatggcatggtagttaatagttatgaaactaaatatcttagtagttaagtattttttttttcttatgatatattaataatttaaaattaacaatatcttaatatatacatttttaaaattatataaaaaaaaaacaataaatacagaagctatatggaatgtgagagtcacattttgtgctcacatgcatacttacaacgtgtgtatcatgtacaacaacgttttacaatgtctctacgaaacgtttatatttatttttagtatattgactaaattgtttttaagatttacaacatttacaacatctacctctacaatatcataatatattgaaacactactacatatccaacgattgattattttctttgtattttcatggctcgttatttttctaatctcgttattttaatttaactaatttttttaggtagctaaatgttataaacgagaaaaatatgtttcttcaaaatattttttgctaaaacaaacgacactaattaagttttctttttctttattatctttttctctttaaagcatatacaattgtgctaagcaatgtaggctgcaaaagaagctatggaagaatatgcattggtgaagatattacattaaacctaggcagaatgtaattttgacagcatattctcaattcagtctgatatctattggcttgactaatcttatcaactaatttaattctctaagattgagcagaatatataggcaaatgagcttccattggatgctaaactttgatatatgttttatttatttatttattttatttgttggcaagacacacaagaggaagctgcagcagcct

SEQ ID NO: 6043 - DNA, 2566 bp, Manihot esculenta
  Intron number 1 from transcript cassava4.1_019926m (locus cassava4.1_019932m.g) derived from phytozome v7.0 (chr-ID scaffold08799; pos 617019 to 619584 reverse strand)
catcaattgttttccttcttttttcttctttcctggtaggtgatttcttctggcttttggttgatggatttattcgattaatgtcttgtatgcaatccttgtaggctattgaatatttttggagtttttattggtaggttcggctttgatgtttattgggttttgattaatcttttgatcttagcagtaatttttcagaatttcaggttttgcttggtttagggtttaattgagagcttaatgtttgggctttataagtttttctgtcaacgggatttcttatgattctcttaatgggattactattaaatcgtgattttgttcgtgggttattggatttgaatatgactgattataggacgtgtttgatatccaacatttcatttgaagttgctttgatattcttggggtttattaattgacagatgtttacttgatgaatgtttgattgtggtatttttgtgactatgagtttctaaggttatttgtgggagtttcattttgcttttttatcatttactaattgttttttagaattttagatgttggctggtgaatttcttgtcttttggtatggagggctctgcttaactgaaaattttgatttcaattctaaggaccacttctttttggtcagtaatcgtttacaggtccattctgttgtgacttttgaattctaatactagtatacatttcttggtttcgatcatgatggttcctttacagaagtgctatgaactttttgggaattattctaaacctttgttctggatcttgtggttacatagtaatttggaattttgtggttcataacaatttggaagcaacttttagtggtttccgttttatggtcatttgtgatttgtgaattggattctgcaaagtgaagattcaaaatagttacattatcacttgccattaagttttagggggaaggaaggccagtttgaaatttataatgtagtactagtaggtcattagtttgggattactgaaggcaatcagctatatcaaagtgataacactattttccaatgctttagatcaattggtctattgcagaaattctcaaaacgtaagaactattttctgtcagaagctatcttctttcttatttagctgacgaatcacattttcattctcattactgaatgcttagtgatttctgaaatcgttattaaaacttgggtgattgatgtaaatattgtaatgcatttttcttggagcatgctagagttgctgctaagggaagcaatagcaacaaaagcgttgctgttgatatgaataagtgctggcatgagaactgtaatgcgcttcagacagttcctggacttgaatcattgggctgctatgtttaatggtagaactaggtttatatatatacatgccaccaactacatatttaagaagaaatggaaatttttaagtacaccaaacatccttgtcttgtttgcagttgagaactaggagaaaaattgagccagtgcactttgtagttttcctagggcttcctcttgctacctttattttgcgatcatttggacattgtggattatcttcccaaacccatattgtgcatttttttaacctatattaacttattctattaaattttccacatgatgtttatttttttcatgcctacagtgtcggctaattcaaggattcattttagagatgtacttggggggaaatatgaagtttcttcatggaattgaaaaaataaaaatgcaaaacaacaaaaaacaactagttcttaatctcaaaaaattgcaaagatctaatgatatttttgttattaggctaaagtttagtttctgagagaattctttcgtctttctcattttggagaatgtggtcttctatcaatggcaatgaagtttcaaccgatagtaatatgaaatggttatatctgtgaattcatattttggagtgtaggcttatatgtaatgttttagtaaaagaacattataattagcatttactatcatcccctcccctcttggtaccgtgaaactggtggtctttctttggctgtacaaattatcttcgtaatttttgttacctcaacaaatcactatgatttttgctagagcagagcttatccatctaaataggtttattttctaccgtgtgaaaagttggttcaattcctgaagttttaatagaaccatacaattgttattgaaattgagaaaagcaaaaggcataatcaaatgcaaaaatagacatgtatatataaagaaaatcgtttttatactcattaggacatgaacagctgaaagatgtgcacatgaccgcaatgggattgcctaatgcgtaagatgttcatatttgattctagtctcaattgctggaatgtaacgctttttgctcaggtttttttctggagtcgtagctattgatgtttgatgaggaagctaatctttgcatctaatcgttgtccataatgtgcccacttttcttgatatggttctgttatggttggagattttacatatctatttgtgctgggcatgcaattgattcaattttctgacatgcagctttcaaaatttgccgagag

SEQ ID NO: 6044 - DNA, 2935 bp, Manihot esculenta
  Intron number 3 from transcript cassava4.1_007339m (locus cassava4.1_007339m.g) derived from phytozome v7.0 (chr-ID scaffold06512; pos 1019646 to 1022580 reverse strand)
tcatccactgtgacaactgaactcgttaaccacaggtagagttaccttgatactgacccagtagctcatggcggcaattgcctttacaaagtgaaacagttagagtgtgttaaaatgcttccccttacattgcttcaggggttcaaatgtcaatagcgaccttttcttttaaatttcctttgatttattgttattaacgaaatatctattctttaatgaagtttttaattaacctattagaccaactaaatttatttcaaggatcagacctagctaaattgtacctttcatttttttttttttgcttatgatataggaatttttttgttaaatttaaaatgttacattaaatggttttatgataattatcgtagcagtttttggtttaacatgcatctttagatgggtaaaaagaaattatatttaaatgattaaattgtgaaactctttctatgttcatgtctaaaattaattaatattgtcaatgaaatagttcttacgcaactaaaaaaggccaattggaatatcctataagaaaatagataatggagaattgaatttctggataaatatatatatatatattctatctcttctattttacacttggaaaataaaaactaaaaaactaagaaatttggaagaaaattggaaatagaaaatgttttccatgactaaacaagtacaaggtctaagagaacaaacttaagaggaaaaaaactagtatccataaaatgtgaaaaaatgtgttgctgcaatggatcacaccaaccaatacctgagaatgaatcagtgtgcgtcattgtgcatttgagcattacaggaggttgggaacccattaaccctggctgtttatctttcagaggatgctgacagccacttgaccctggcctttttacttgactttcataagttggctagtactaattgataggttcacatccatttcttaacatctggacatgatataggaatagtttgcataaatatccttggacgctttattcctataagagcttagtgctgatatttttttcatattgatgtgcttccaaatgtggggttgtgtggtgcttcaccctttttttgatgtttatccaaatattaataaacaaagttattgtagtttgtcacgtgaattcagtttgcataactgcaaaagctttacaaaactgcatttagcagactcttgccatctttttaacttgccttctgagttgttagatttttttcataggcataatggtgcaaattacttatttgaatcttaggtggatgaagcacagtgcaaattatgtttaaatttctatatgatcaagttgtaatcccgttttataatcttcacatagaatattatggtatgtttgcttattcttagcagtgatgtccatctgattattttccctcttctctttactggttttgaacttcatgatttatttggctacaacttttttctgcactataattgccgattatattactggctcagaggaatcgtaattgctagctacaacagaaagtgattgtccaagccctccaccctattggttgaagactatttattagtgattaattcaggaaagagaaatgagtaattaattatacagaaggaaaaaagaggtaattataattttgagttatatgtatgaataatactcatcaaccaataagatgaagaatgttagttactttctcaattgactatagcattcctctagtggttgaatacatccaattttattgttgggtaatttgcaaaatatgtagaaggattgtgatgttaacatagttgtgacaagctgaactattacttagcggatgaatttcactggaattaattataagcagcaaaaggtgtgaggtatatatgattcacatgcctatttgctaaagaaaaaaaaaatttacggtaatttacatttatattcaatatttgaaattttgaatgttaaaagctaaatcttttcagtttgtcacgatcataacaaatagaattaaattaaatctgaaaaagttaattataaattacaatataatttttaatgttttatattattaataaaatatgtaatcgtttaatttaaattttatatgaaattaagtatattttatatttactatatgcaatattaaatatattgaataaatatttattataaataaatttttattatataaaatatcacatataaataatatatctatatataaataatatatatgcataaatgttaaaatatttcaccgaatgtttatactcaatatcataaattataaattatgtgtatattttctatatttgacaaattttacttattattaataatattctaataaaatgaaatattatacgttttaaattatatagttttattttttttcatattttaagtttttattaatatctatgatattacatgaaagtgagaatagagagtgaatgatgagattaataaagaatgatattattataataagaatatgtatttaattaaggactattttattattcaaatagaactttagggattatattgtaatttactgttaatttgtataaattcaatttaattcttttagttataattatgtgaaattgaaaaggtttgattttactatccaatatttaaaatattaaatgcaaatgtgaattacaatggctcttaaaaaaatgtttgtgtattctgcactcttcaatttgaatgctgaagctgaactcttcacatactggtttgatgccatgctttttatgttcgtgtattctgaactcttcaatttgaatgctctttctttctcttttagtcggggaatggacatgtgatgtgtttttggagatggaggaaaacaatattataaatattcaagtgtgcaattatcattagatgtttttctcgcagatacggtgaacaagctgctgaggctactagtgagg

SEQ ID NO: 6045 - DNA, 1461 bp, Manihot esculenta
  Intron number 8 from transcript cassava4.1_005066m (locus cassava4.1_005066m.g) derived from phytozome v7.0 (chr-ID scaffold09835; pos 19104 to 20564)
ttgatttgcatacttttcgtgctgcttttcaagtatgctgtattgtcttacatcattctaattttttttgtatcggttttattgttgaattcttgaaaatgtgatttgagtaggtatttcttttgtttatccttgattttgtctttgcatctttttatatgtttgccattgagtcatggttttaaatcgcggtcgcaagtaacagaatcaggcctgtaatagctgtaatactacggtaatggtctgacgctatgcaaatttttcaaaaaaatttgcaaagttcataaataaaatgatattgattagatttaattcagaataatgtatacaaatgcataataaactgatatacataaaatatagattatttaatttaagttaaacatcatataatttaaaataagtaaaaccaacataatctttataaattgagtaaactaataggtcaaagtacaataaaactaaaaactaacactttaatccacaaaaaaattaaaaaaaggtaaaaaacaataactaaaaactaaaatagataaaatgtaattaacttttgagaagaaataagcttggaaatagagtagtttatgacggatttaagcttatatgagaaatatgcagggaagatcaaaatttgaaaaagaaagggaagatcagaatttgaaaaagaaagggaagagaaaatttaaaaaatatagccttcggtaatggccgtgaccaaataaaaatttaggaaacaaaatatgcttcgtctttaaagttacgttacgtgacggtcggtaatggctgtaacggccgttacgcctacaaatcagagggggtcgttgtataatgggataatgggtaacgacccccaaaacctgttatataacggccgttatgttatgtaacggccgttatttaaacccatgcattgagcatatatgtatagtttcattttgtgtattgttaaaaagatttcatagttttgatacttgccttcttgttttttgctgttttcatgcttatcacataatcaacttgcaaaattttctgcttgagctcattatataatgttattaaattacctgaaaaagagtagatcatctcaaatgatgatgaatgcttcatatttttagaagtttgtcgaatacatgtcttaatttttatatttttgtaaggccacattgctttcacataatttgttgaaatgaaaattgaagctctccaatcacacatgagcaagaccacctttcgttaaccaacaaaaacaaaaagacaagacattgtatccctaagttcagaggcaacaatttgagttgataaaattgaatatttttgtcaattagaaaaaccagattagtgcatcttagcagaattctggaatctctaagtttgttttcttttggtcatattcatctgcttagaataacttttgttttccttgaaggttctttgtaaatattatcctgaacttgtaaaaac

SEQ ID NO: 6046 - DNA, 1426 bp, Manihot esculenta
  Intron number 1 from transcript cassava4.1_015481m (locus cassava4.1_015481m.g) derived from phytozome v7.0 (chr-ID scaffold11882; pos 128963 to 130388)
ctcacacgcctaggaagcaattgctttcttttaaggtaccgactttggccctcgattgagcgatttctttctgcaagagtttgagtggaaattacaaggacccttttgttttaaggggtcaatatctgatctttttttattttcctgtgtgctgtgagcgaattattggatacccatatcctgaaatcgtgtgattatgttttattcatatttaggatatatttgtttgtttgattagcctgagaactgaacactgccaaattttatccctttagcattagttatttaagagtatttcctgtagcagattagttgcgataatgcggaattcttcaacattttcattagctttgccatataatatgcaattttgatgttcctgtgttccatgtctttgattaagacatgatgctcaaagctttaagccacactagcctcactcctctcctaaagctttgttcttctgattgcttacttttcttattggtttgttgttgggccactagacaggtttaaactttacaaagatttacttggttctaatggatgcaggcttagtagttgagtcattttatttggtttttattgtattcttatgtacctttgaagcaaattgtaactctggatgcagacatgcttcagaaaataagaattacatatatatgttttcttcttttcatattctttggttttcattattgttgtttatagcaatgattttgtcaaatcattgtctttaactatttaccagttcatgtaaatgaaatgcatttgcatgtgtccaattaatttatattttaaggtatttaattgtgttgaaacactagactcgcacacacactcatcaatcgcaatattagagaaacaaaaaagagaatagacacatgaaatttaacatgattcgactacaagatttatgtccgcaggcaaggtagagataaagttccattataatgaaaaagcgttatactctcggagctctcaaatcctaactccaatgtgttttccagaatctcacattaacttaggacaaggaaaaaacacaattatttatacgttatcttatttctccaattggagtcgcaatgcggactttttagattgtgtcacaatttgactcataagaaaatatatccataattcaagccacataattaacaaattgttttagttggtgaatatttcagtgaatttcttttgcttgatccttaacttggcgtgaacaaaggttttgagacaatgattttactgatatgcacaaatgttaattaggctgttgctttctaaagttcacatgaattgcaggatattatataaaattattcttttattatgttctgcgtcgtggtttataaaatttatattggttgatttccatgtgagctatagctaataatccttaaacttcaatactttatggaggtac

SEQ ID NO: 6047 - DNA, 956 bp, Manihot esculenta
  Intron number 2 from transcript cassava4.1_019010m (locus cassava4.1_019010m.g) derived from phytozome v7.0 (chr-ID scaffold06825; pos 248804 to 249759)
cagctgttctctggtttgcttcaagaaacacaaaggtcccatctttcaattttattttcatctttctgtttcatttatacttatcagtaaaacttggtagaaattgaaggtgatcaagagatttccaaaaaactggaaaagagtggggaaggagaaaagaaaaatatgaatttttaggtttctcaattcagaacttttgcctctttgctagttcgttagtgaatttgcatttgaatttttgagtttcttgattgtagttacacaacgagagagagactgtatgtgtgtgtgtcattgtgcttgagagagatgaatttccgtgcttgttttgctgcttgtactcttaatggattatgtgaaacataatttgaagtagggtattttgctattgccaagcttcatactggagttatatatttggacttgtaaatttcatactttactttcatagaaaaatgtatttattgcacaataaattgggggttcttgctcaagggctcaaattatgctatcttacggaatagagcaaagtgatgataatgaagttataatttctgtggctagatggtgattattgcttagtaatcatgatattctaaacataaaggatgatgatgagacaagaagaattaaacttgctgttttgataaattagaatccagacgtcgtggtgtgtgtgtgtgtgtgtgtgtgtgtgtgtgtgtgtgtgtgtgtctgtgttctttgagtgaaagttcaagtccagtctgttttctatgtaaagttctctagatttcgtggaatcaaagagtaagcataatagctaagttcagtatagaaatctaggattattttgtaatttgcactataaatacattatcatcaatgacagcaacttgttattagaaataaggactgattcagtgtaaatgaatcatgcagaaatcccttgtgctaagccagtgtctaaagaggaa

SEQ ID NO: 6048 - DNA, 3434 bp, Manihot esculenta
  Intron number 4 from transcript cassava4.1_008076m (locus cassava4.1_008076m.g) derived from phytozome v7.0 (chr-ID scaffold06814; pos 91925 to 95358)
gcccctttgaaggttagtttatttacatttatcaagaatcaaccatttatttgttctccatgtcaacaatttttggacttttcttctcagaattttgattgtcaacgtttggtattctacattcttgaatttcatatccttggttttggagacaatcttttgagtttattaataaaatgcacccattaatcaaattgcataatcaaagcatatgactgggttatagcatttaggaaggaagatgacgtgctagtaaatggaaggaaaaaaaaatataaaatgctcctcctactacttttcctcatcaagtattatatctccatttcttctctattcttcactccaaaagttcacttatcatttatttggactttttcctggtgatggtcatggtgaaggcctatgttacactgattgggtatgtcaaaaatgaatacatatctatgtgtttgacttgtcaactttttaaataaaaaaatgcgagcaaatagaataaaaatatataattatgtaataataattaggctaaatatatcatcaaatacaatcaaatacatcataaaatacgtcataaaaaatgcaatcaaataactattttctatctaggaagaaaactaatgctctgttatcctcttcatcttgagaaaaaacagtgctctattaactatgtttttacctttagagatctctataactcgattgtccgattgcattaatgtgtcaaacacatattcctgtcatgtcccatgctttgtcttgttgacagggggtactggtatgacatatggaaaaatgaagagtcaagcaggagaacctaactgggaggtaagagagagaacaacccaacattggaaactacaagagacttcaagcaagcaaaacctatctcccaaaactctaattctcatcaatggttctgacctgttatggcaggatccagtccctacttcccccaccgttgagcacattaatgccaccaaaactgctgctccataagcataaattcatctttcagacattaaataatgacagaaaacttaacccatttgccatatgcatcataagaataacaaaaacagctacactgtagttcagttctccactcacactcacatatccggaaacaaatagttttgagagatgagcatgcctgaatgcgccggaactacatgaactctagtcccaaatctttttgctatacctttgccctccactattggaggctaaatcaccacataggcagaagtgaactcccatttctcttctgatcagaccacaatctttagcagcagatagcttgcagctgcctgcatgacacattctccaaaatgggtgcctgccagctgctactgccactcttcatgaaattcaccatctctaaggccaacatagcaaaagcattcgtctttttttattttttatggccaaggtcaggaagagcagcaggggccttgggggcagtgggattggtgacttcaaaattgccatcaaggtgattgttgttgttcttgtttccattcccattggcattgccttggtcttcatcatgagggtcttcatgtaggttgtttttttccccccctagtgatttgctgctccctgccttctgcctcttgcatatgactttgccatttagcagagagaaaattgagaagttgagaattgaaaaaaatgaagagaaagggaaaggggaagaggggttttcggcttatgcaagaaccagagtacctgaaggaaatgaggagttcttatgatttgtgttgtttttcgggtgatgggagagaacggaggagattagttaaactattaaagtgttctgtaatttttcccttccatttcactgacatgccatgtcccttcccattgctgtgatctgaaccggtcctgtgcttttattgtgtattttcaattagttggtgcattttattggtaaattaaaagattgtgctagaattgtgagaaacattgaagttcgttcttttttgacattaggctgcttgaatttatgagtaggaagtgggagaaagaaaaatagaaggaagaagatcctataatgttctgtgcatggttgtgcttgtgctgtctggttttagtcactatgcctgttgtggtatttgcatcattgcatgatataagctgcacaaaatgtggatcagaggcagagacagaactccaaggacatcgtattgttgagaattcaaaattgcatgtcggtgattctaataacttttttcttggagttagctgtcttgaaaatcaagaggaggttcagttaaaagtccaattttaaattggatatcagtgtaaggattcctggaagttattatcttaacctgtccatcaattcataaacaaatcatgtctggaagactgaataagtgtcaaaagaagtagttttcctcgaataaaacttatcatttggattttcagatggatagttagcaacttttgaagtttttttttcttcctcaaattgtgtcaaatcctaccaaatggcacatcaaattataggcttccaatatttatcattgaattgttcagctttaatatcaattcataaacaaatcatgtctggaagactgaataagtgtcaaaagaagtagttttcctcgaataaaacttatcacttggattttcagatggatagttagcaacttttgaatttttttttcttcctcaaattacgtaaaatcctaccaaatggcacatcaaattataggcttccaatatttatcgttgaattgttcagctttaatatctatcaggatgcaggattttttgttgctactttatctttatatgcaatatgtgaaatttgttgtttacctaggattgtaataaagacttcctcagaggctggtatgtccttcatttagattcgacgataattttcttcatgacatcgtctccctatacactctttttccccctctttcacctcagaagttgagagggcaaaaaaatcaaagaggaaaaattgattttgtagttaagatgacatcagcgaagttgaagtggagcagcataagtaatatatctgcggagtttgagttgaaatgtgaactatagtgccttgtccgttagtctcgccaatgaaactgagtcttttaacaccaaaaagtagggcttgatgtgatattacttgttccttgagttatccgttgattgagtgcaaacatatgaattcactccatagtcatttcaacaatgaagttctgttttcttcaatctctctcggttttcatgctgtactttctgttattaccacttttcatctgttagtatagatgtttcttttagttctctaattatccatattgtatctctctttagccacatgctttatttttgttggcctcataagtataagcagttcttaccttcctgttaaatgtgcagagaaatttttggaggacttcataaaacaaaatttt

SEQ ID NO: 6049 - DNA, 2724 bp, Manihot esculenta
  Intron number 1 from transcript cassava4.1_001304m (locus cassava4.1_001304m.g) derived from phytozome v7.0 (chr-ID scaffold11110; pos 43289 to 46012)
tcccattgcattctcaaaacaatattctagaggtgcttcaaatttcaatgctatgtgagatatcaatttatggcttagctattgttggccctctctcttaacaacccatagcttagttcttgcaagatggattctccttcttctagatctgaagttcttaagaactaaaacaatgcataattcatgcctaagattcctcttgtattactgttactgccattgctatataccatacccatcaacttctaagaatatttatgcaacacaacccccattatcaatatcatactgaagaacatggaaacattgaaatctttctaatggatattcttcctcttaagatttgtgagcatgctgcaaaatacagtttcattgtttgtgttataggttataggaagtaaagaggttaatataggaagtaaatattgatagatgtattaattgtttaatcttagggattgcatgattatacgcttgatttcttttcctttctagatacggcttctaatctctattgtagtagataacaaatattaccttaccacatggtactagagcctctgtcatagagatttttttttttcctctcccatagagatttaattttttttttttttttgtagacttagaactcttgttcttttgggttaccatatagggtaacatttgtctcccgctgcccacctagacgccgaagcgtaggcaaagttgccctcaagagctgacaggtgttcggtcggtgagtgctcttcacgcgctgcgacaaggttttgacaccgtcccactcgctggcgcgtagaggcgcgttgcctgtccatcactgctccggtcacccttgtcgaagtcgcctcataaccccctcgtcagatctgtagttcatttgctgtttgactgttgggtggaggcgtttttgtccgggtactattcacgtcctgtttttttattcttagtttcttttgttgctattgctttgggttggttgttctcatagctgaaattaaaaacactgtagctgaggttaaaaacactgtagctgaggtgatttctatgatactaaaatcacggaatacaaattgaatggatttaattttctcgattggagtaagactatccgtatttatttacgaagtatcggaatgtataatcatcttaccaaggattctccaattgatgaaacttggaaagattgaatgagggatgatgttggattatttttgcaaatccgaaattctattcatagtgagataatcagtcttattaatcattgtgaatttattaaaaaattctattcatcgccagagtcctcttattccgaatgaaagtatctaaatgcttttgggcttatgctgtatccattgcttgtttgttgattaatcgcataccctcctccgtccttcatggcgatatcccttataatattttgtttcctaataaatctttattttctattaagccatgtatctttagttgtacttgttttgttcgtgatgttcgtccaaaaattactaaattggatcccaaatcactcaaatgtgtcgttttcagctattctggactttaaaaagggtatgatttttttttcctgatcttaatcagtaccttgtatttgctgatgtaacattctttgagtcaactccgttctttccgccatcttctgtttatgacacccagggggggaagatgacctcttgttatacacttgttcactctctgtctcctcagactcttcctgcacgttccgctcaagtgccaggttgcccttcccttttatatgtttattctaaacgcttagaggactctgacttcgctccgctactagcttattcattgacaaaccctgctcctactaatcattcaccgtctgagaatttgctcattactcttcgcaaaggtaaatgtacttgcaatcatcctatttcgtctttgtctcttatggttaattagcatcttcttctcgttgttttgccactgctttagattctatttcagttttcaatactgttattgagactttatcctatcctgattggcgtgctgcaatggaagaggaaatgatggccttagacactaatggtacttgggagttgatgtccttgctccaaggaaagcgggctattgggtgtaaatgagtgtttgcactaaaagcaaaccctgatggatgtgttgctcacctcaatgcccgtttagtgccaaaggttatgatcaaacttatggagttgactattctgatacattctctctaattgtcaagctctcaaatttatagagaggactaaacacattgagattgactgttattttgttcgtgagaaggtccaacaaaagataatctcaatagaacatattcgaattggagaacaattaggagatatcttcgctaaatctctaaatgggactcgaattgattatatgtaataagttgggcatgactaacactatgcttcaacttgagaggagttttataggttatagaaagtagatatgttaatataggaagtaaatattgataaatgtgttagtcccttaatcttaaggattgcatgatcattggtttgattttcttttctttctagatacggtctctcatatataaatatgttgtaatctctattgaaatagtaacaaatattaccttactacagtttgaaacttactgtcttgcctcattttacttgtgatttgtcatcaggtctctacggcattttctgaggggaaaatttctct

SEQ ID NO: 6050 - DNA, 712 bp, Manihot esculenta
  Intron number 5 from transcript cassava4.1_013401m (locus cassava4.1_013401m.g) derived from phytozome v7.0 (chr-ID scaffold07470; pos 137128 to 137839)
cacaggactttgatttgaggaagaagtttagggaggttagcatatttcatcttatgttggtgccatattttttactctttccccccaatttgcatcccttttcactggtttatgaattgtttttccattattgtattgaaagtgcttgctactatgaggttttcttttaaagtggatgcgaaatgtctatagatgtgttttgattttgttatttttggtagatggcagctatagcaaattacgttcaactagagaagtagttgcctaaaattcttccgtgtgttactgccatgccaaaatatagtttccttatcaggatttatttagatgatgttggatatgcagaacattatatgaaatcatgtattaacctatattctgggccttttggccttaatcatcttttaggagattgattaacaatgctgctctattaaatttgtgaatttatcaacacatttgtatcaaataatagcttgtgttactcattttgccatgatcctcaactgcattgcagtgggtccctgtgatatgcgcaatggattagaagaacttctgcatggaaaagtttaatggatgtagttttagtcgtattgaaattagaaaatagcctaatctgactacaaataacccttagaatgtgcacaataatgcctgaaaatttagctattctgcaggtaccaggtgtccctgtcatatttggtctaagaaa

SEQ ID NO: 6051 - DNA, 1034 bp, Manihot esculenta
  Intron number 14 from transcript cassava4.1_001343m (locus cassava4.1_001343m.g) derived from phytozome v7.0 (chr-ID scaffold03264; pos 306222 to 307255 reverse strand)
aactgattcagaccaaagtaagtgaggcgtcgagtggaaactagttctgcctgaactgatatgcaaggttgtcaaactcacttttttaacttataggtgaagggatataaactcaataaactcgtaagatcttacaatctacttaaatgccttccaaaaaatataatgatatatataaacagattagtaaacttacacagtcaagcatagaaaaacacaatttgtctctattttttgttacgttaaactgtttacctttaaaatatattaagttttaaataaatataaatattaaatataataggagctccttaactataataaattaatgactactggggccgtcaccatataatgacacgtgatcacatctagaaaccggataagtactacaaatactaaatttcaagtaaaagctataatttctttttctatgtcattatttaagaatatttaaatagaaattttaaatttttaaaattaattattttcaccatttcttcaagaccaaaaatcatggagaagcctagccctatatgaagatagtttgcatacttggaccaacatccagatttgtccctctctttttttaacttgttattaatctcttgtacaaaaacagcaccatttcaatgttgttatgggctggattttctttttggccttttaaaacccatcacttggccaagttgaggtttcaaatatgcttgaatacgaacctgttaaactaatttcctactgggattctgctgattttgatgtgttcaccagtgattttacaccaaatttatatgatgtgcttttattcacatgttgacttgtttatatgaatttaactcgtcaatttatatgatttgactcacagcttgacaaccgtgctgatacggctcctctatttttatttacactagtaatttagtttttaagattgtctgaatctttttggcattttatagttttagctaacagtaatatttaggagaaagtaatctgttaatgtccatgatgaacatgggcagcttttgaatcccaga

SEQ ID NO: 6052 - DNA, 1461 bp, Manihot esculenta
  Intron number 4 from transcript cassava4.1_006409m (locus cassava4.1_006409m.g) derived from phytozome v7.0 (chr-ID scaffold02975; pos 37759 to 39219)
acaacaaatacacaactgtccaatttacaggagaggtataaatttttatttagttagacctttcaatgtcaacaaactggaagctactgccaactgaaatgcattcaatcatacaaattgagatgttcttgaacaacttatacaacttatctgcagaaaattattagatattcccgatgtaccacttcatcatgtgagatagtataccaaaccaatagtattcaaacaagtaactaaaataatttaaatgttaataaatttaaattgaatttaacttccatgtaagtatgaatttttagtggtaatattggtttagtgggtagttttcaattctttttaattacctgttacgatgctattggcttggtgcaccacctgagcgtgatgaggtgctaagcatggagtacccaataatttctccttatctgcctgcttgcctacaaatactaaatgcaaaattaagtctgatgtctctagtgtcattctaaattgaattaagtcacttggtctttattcattaacaattagaaaatcctatggtaaatgggattcttgtgaattctaaatgaattataatattatacggaagaaacactgctgaagttatgttgccatatcaattaccctaaaatgacttgaaaatttggctaaagttggtaatgtttatttatatcagttggaacatatccatttcatgcgctggacgctaactgttattgaattgaatccagtagatataacttgacaatcatgcctttttttccaaaacaaaaagaaaaaaaatccttgcatattgaaataattttatgctgttggttgtaatttgtaacaccagaaatcaaacaaaattaattttctaatgtttagggtgcactggaaaaaaagacatgaatcataagaactttgagttctatgaggacttaatgtttgtacatttgtttttgtgacctacttgattaggagaaaacattgcaaaagaaaaagagtgaattctggctctaatagcaatgcagtagttatgtgcctgtatggtgttcgttttgcattattgttggctaatgagagagacatagagagagagagagagatttctggtgctgatggcaactgggtgtatttagcaaagtaacagttatgtgcctgtgtggtgtttcttttgcattatcattagcataaaaatgttttttgtttttttttaacaaattactgtgcctggaccactgaaaaatatgaaaattttgttttaaggatatgttttcatcaagatgaaaagctagatttcttatgacctaattaataaagataatttttggtagaagtattggcaaaatttgatatcagagtgaggtttgcctcatgtcaacttttggttcctttctcatttatattagatctgtccatttgaccctccttttcgcaccctttcttctttaggttctgaagactcctgtctcattggat

SEQ ID NO: 6053 - DNA, 995 bp, Manihot esculenta
  Intron number 5 from transcript cassava4.1_008374m (locus cassava4.1_008374m.g) derived from phytozome v7.0 (chr-ID scaffold10954; pos 282221 to 283215)
atacggtatacctttcttttttttcttgggtcttgctttatttttacagttttgcttcatctttctgtgcattgtttattggataatatttgacaatctcatcttgaagtttgcattacaactctttaattttaggttccttgctagtagttttgcatcttagtttcatctttgaataatggtatcctcttctatggttctctttgttatcatattttctctggaaattgttttaatgctaagatgttgctgatatgttggtcttgtacctttatgttttgggatgcgggactttgttttacttgtcctctggttcatgtttggcttggtcttttgggaatatgatttggtctttggcttaatggattcatagcattcaattggaaatgaagattaatatgtattcaattgaaaatgacattcagtgcgtctgcatataatcatttgtagctgcatccttgtgtttcatatcttggtgaaattgccttgttttctaatttatttttgagctgagaagttgactgttatcagcaaatcttactttccaaagttatgaatatacaaacaagtaacattgaatagcatatcaatgttttttatgttgtggcatttagattgtatttatggatttgtatgatttatggctttagtgaaaggtttttctttccaatgtttatgatgttaaacggtttattctgtggcattgtttcatgacatttttgtgatcgggaatgatttggagtccatgatgtttgtttaatattttcattgaatagagagcctaggacctattcagcacagtaccacttaatatgaataaattgggcctttttggtttctagttgcaatttgataatttgtaagaatgactactataactttgaacagttgctgctttatgtaatatgcttgtactccttagttttattgcagttagaaatatagatatatcttactctatgttttccacctctttaggtattactcccataata

SEQ ID NO: 6054 - DNA, 1636 bp, Manihot esculenta
  Intron number 4 from transcript cassava4.1_003088m (locus cassava4.1_003088m.g) derived from phytozome v7.0 (chr-ID scaffold05005; pos 242080 to 243715 reverse strand)
taaagccccgtcatccaaaagaaaagtattagagggtatttatttcaatatgctcaaatttaatggtattcaatctggtctttagtttcaattgataactttgagaggccaacttgtaaccaaaaaccttgaattagaaaactttaactaaaaaacgaagtatctgcttcacatgctatttttccaaatggagaatttaactacgacttcgaaaatgatgaaaaatttgtttcccattgttttattttataatagaagctttatttccatctgttttccaaatgggatgactttttatcaccaaatttatattatacgttatttcgtaattaaatttaaatgattattttggaaaattttagttaaaatgacaaaataatttattattataaaataaataagtaccactcattaaaattttcaaataaaatagtttttaaatgtactttagaattattttttttaattatgaataatatgattttttaaatttttttaaattagaaaaactgttttctattatttataggtgaacatgttttccatttttcataaaaaaagattattggagctctcttagaaaatggaaaacggaaagctgaaaattgtttttgacacttaaactccctttatatgtttgaggttctgatatattcaacaagctaataaatttaaaaaaaaaaaagaaaagcctctatatcgaatggttccttcagtcattgaagacgtcttttttttaccataaattgttaatatgtctatgcaccgaaatatttctgtccaaggtatctttagaaacagggaagcatttacattttgagtgccattgaagaaatataaactctgtgtacttaggctgtgagaatctctttcctccaaggactcacttgaggcaatttgagccattgcagttagcctaattgttgattagcaatatcaagggagttagccatttgccatcctaaaattttctgttgcaagtgattagtgtcatgcaataggtcaaagataatgtaatgtttgaataggcatccaccagaaaggcacactgcaagggagaattctttaatttaagatccaaaagtccacgtgatatcctttaattattgtcattaaaaagggtattgacttgtatttgacaattatccttcaaaatttttaggcatcatataatcaaggtcatagtatagcactcattgagtaattttatcccagatgctgatagaagtgcctacatttcccattacaactgaccctccctggtaccgctatgaagaaagccttgtacatgatgaggctcaaagtttcttactgcttgagttatttttatgatttgaatacagatctctttgtagcttgtgagcatatcattttacataagccttcttgactactttttatgactcatcttcattattcatgaggttagtgctaaatgaatatattattattattatctacgaggctaatgttattgatggataaattctgtctttttttttcttcgggttgtattagcagcttgtgattgtggactgatgccaattgacattatgatatgcattttgttttggttaaatgttgttatattgttgaaacagatatagagccattacaagctaatcctgatctggag

SEQ ID NO: 6055 - DNA, 2510 bp, Manihot esculenta
  Intron number 1 from transcript cassava4.1_010545m (locus cassava4.1_010545m.g) derived from phytozome v7.0 (chr-ID scaffold07351; pos 152504 to 155013 reverse strand)
ctgctccactactcgacgcggagagagaaagaaaggtaagctttttcatgtttttccgcggcaaaaaagataaagatacggtctcttttatccgttttacccgatatgtttttgaatggttttcctttctgacatgatttataattatcactggcaaaaaaaaaaactaattttcgaacttttcgttttttttctcaaataatttgttttgggtgatcgtgaggatgcttatttgatataatttttgtatacggtccaagttgatgatgattacttctgtttggtaatgatccatattttaaattttaaatttcaaattttaattttgctcatcatgttggtttttcagttatctaaacttggagaattttttgttcgtttaatgctcagttacgtttcatccttacttttagttcttaataataatattaaattttcttgtcgttttgagctctgtgttacctgaacttgtttgtgggaggttgtgtttgtctactcgatgctggttttggtttctggattttatttgaagatcccggtggttcttattatttgtttgttggatcgtttttatctccaaagttaactcatttttggatttttatttatccggaaatgacttcaaattgtatagttcgtttcagatagaatatattgagggccttattgcggaagatggtaataagaaatttttgtccttttcaaacaattgcgctttgtcttaacacgttttcattgctagtgatatatgcttcatgcttatgcagtacatataagagctgtattctacaaagctgattcactcgttgaattatatttacagctatctctgttctcaattctctattttctgtctctctcgaatcttcttctcttcaaatctgttgtggcaatttcttccagaaatggtgagctgccgctggagtcagggtcaatgagcccaggtcctgacaatataatgaaaaaaaaaatacttcatttatatttcctgctcttgcaatgaaagtgtacgggattctgttgtcaatttatcatgaaaatatcactccctagagtttgctaaactattttcttgcttgggcctttctggtgaaagtaccttatcggatttgtatgggaactcttgtttctattctatctctctctttttttttttaagtttaagtttggagttccaggtgtctacccaatttcggtaaattttttgatggtagagagagcacatagtagattggcagcctagtaaattatgaagtgcagagttgaggatgttgcttagcttgaagttcctttcactttctaatgacttttaggatgttttatgaagaaagatcgtagagcaacaaagacaggaagaaaatgagtggacgacagtgagcaatatccccatgttagttttgaagcttttgttgccattttcttcatctttaaccttcttgttggaacaacatcttcaagatctttccttcacactttcatgtgattgtgaaagatactctgttttgtatcattgttaatttctcacgtattatcactttttgaaatatttctgtaatattactccatcatctgcaatactatatttcacatgattctttctgagtcgtaaggtttatcctgactctataataaataagttcagggaagtaagagtcactgtttaattcagaatgcctgtgcatcaagccttaatagttagtatattatgaaatagttcagagtaatgtattctagctcgtctgcaagtgttttgctgattaccaaaacaacaaaagtgtgttccctctctatatttctgtagaaattccagcctctattgtaatctaagttctacgaagctgaagttgctacagattttgtatttagattgttggaattgcattaaattacatgatcatgtcttcattctactgttggatccattggcagacatgcaccaactggactattctgccaaataggagcaactatttgattggacttaagctctgcattttaaggtgatttccatcaaaatttttaattccctgtatttggcactcgatcatatgcatttactgaagtaatcccatgcttccaatattctggttgtagggattttgtaatggagtgattagattaatatttaattggcattttgaagttggtctgctttcttgcaacttatgctttttataaaactaggaactgcactttaaataagtgatacatagttcacttactcatcattgttccttcactttgttcttttgggcatccaggggttgtcgtggtgttcttttcttcagaaagtagcccatttttaagaagtcaaaaaccatataatttgctgcactttcaaaatatattattgaaatgacaacgatgatgatgatgattcttattattcttattcaattaccgatctaatattaatatttaccctgtatcgccttatccaaagttttcacattgcttgtatatgaaaatcttttcacttatttgttttgtatttggattttaggtgtccc

SEQ ID NO: 6056 - DNA, 2426 bp, Manihot esculenta
  Intron number 10 from transcript cassava4.1_003641m (locus cassava4.1_003641m.g) derived from phytozome v7.0 (chr-ID scaffold08847; pos 353360 to 355785)
gggcctgtcactgctgctcagctgcttcctggaaggttcattagattttgctttcttcttttttcgaaatcatacttcggcactaaactagctgttgcatgacttaaattctatgtgttggcatgcgtttaatgttggctgcatgataatttgcaatgatcaacacattcatttagtgggaaatgggggtataatcttctttgcaaaggtggaacaaatatagcaaaagctatggagtttttactaagaattattacattaatactattatatacttggtattatactattatgactatctggatattgtaaaatcttcaactctatccattaagttcttactccaccaaaattcatctatttttctctccatgtaattcacaattgcaagatcattcctaaaggctttatcttcatctttataatggctttattattctgtccttgaagaaaatcttcatggaagttggaagtaaacccagctgtggtccaggttgggcttggaattggtcaactgttcaagggcttgaaccaggacctcaggagtcgggctcaggcccccttctttaaccttgaataagatcagactcggctgttaagcattatgttgtgatctggtttgatcccccttcttttttaagaaaaataacttggtctaaaaatcacatcaaacctagaatgaatcaaaattgcaactgccagttctaaaccttcttggaactggatttatgtggtctagtttagggctggtccatggtgagactacttggaagaacttgtttgatccctacacacaaggaaacaaaagcccataatatgaagctgcttcataaaaatcagtcccatttgaatggagttgtatgcatatcttgaagcattgtctgctttggctattgaggtctcaagagtttgtccttgaaatgggccctcatgggaaggggtgttcttggccttataaggctcttgcttctttggcttctagtcaatgtgggattttgtatcatcatctatctgatgctctcagccagtcgagggagtttgaagggataggctggatatccagtttggtggaaatgtgaggttgtgcctcactttctctagctctaaatgatgacaaatcaatttaaattgaactgtcttattgagacctcttggtattgtctgctttggccattgaggctcactactttgttcttggaaagggcccttcagtggtagggaatatacttggccttgtgaggctctagtgcccttgactccaagtcgatatgggattttgtttcatctattgcttcacaatgattaaggaggtgataaatacaattcatccagtgtggtttattcattttcttggttcactgaccttgcatgttgtatcatgttttgtagttataccctgagctactggtactttataacaagtcactgcaggatgaaagaaatgattggggcagtttcccatagtttctagatatgttgtttactttgttttttatccccctctctcccctgtacaacaatcttagtgcttgctttatcttttctgcggtaatgagttccactaatgagctagatatgttgacggtgttctctgtgccttagtttatgatttctgctttatttttaccaacctatccattctagattgaggttgtcttgaaactacaaagtggactaggacctgattgattcatctaggattctaggttgtcgtgttctttatagcaaagcccgtgatgatagagaataaagcaagttatttatgaggcaaccatattctggctgtttgcttgtgtttctgtttaaatgaaaagaatattaagaatttaatattccactgctatgctatactgtttctaactatacgtgtatacctgaatccttatttaccttaaatttaagtattttaccgatacccacttacaaaagaagtacaaaaaggtgaaaatatttgttttagataatcatattttaggaaaaaaattttcacttggagataccatccctataacattatgacaagtatgtgatttaaattttaggccttggctttgaggtatcctattatacttatcagggcgggaaacattaagtgtttttactgcttagcttttttgttcttgcacatttttcatattctcatcttctttatcatcacgaaataagttgtcttctgaattagtctttcaaaagctaacagaaactgtaacattatgacaagtacatgttttaaattttaggtcttagctctgtaatattgtaaacgtatacagacttatgagagcatgaaatactgggggttttcactgctgaattttttttggctcttgcacattttcatagtattatcttctttatcatcactaaataagttgctttctgaattagtctttcaaaagctaatagatcctcctatttgtgcagga

SEQ ID NO: 6057 - DNA, 906 bp, Manihot esculenta
  Intron number 1 from transcript cassava4.1_012173m (locus cassava4.1_012173m.g) derived from phytozome v7.0 (chr-ID scaffold00339; pos 2277 to 3182)
ctgctccgtcttgttttctgaacgattttatcgaggtcagattaattcattttaccacctgaattgccagttgttttaaaatttgatttcttgtgtgattggacaaataaccttttttatgatagtttttattaggcagaatacaatatcttgcattcaattgcaattaataccttgatgttaattaccaaaaaatgaatttgatttgaatacatctccgaactccagagagcatgaacttgcttactaagttggaagtggtatttttttttattttttatttatgaggaatcgtgtatcaagactattatgttctgttttggtgttatgcacatctttgaaattgaaattgtgagagtaaatattgatttgaacaatgaaatggactgtaatgcttctctaagtagttatggtagtggacaagagtgaggaatttgggataattaaagacataagcttccaaaaattaatggggtttattcattttgaatctgcagtgacttaggatgccataagaaaatgagtgaattcatggaagaagtagttcataattagtgactatgaaagtttgtgtttagattgaaatttgaaatagcaacgatgtaaaaaatgatagcatgttacttgaattacaataaaaaagaagtgcttaagttgtaaatttttcttttatttcttctcattgtttccatcattcagtttggttttaaaaaatttcgtacattgatcatgttgtgtgcttctttccttccattttgatgtgatgttagcctacaaaggcagaaatcaattaggatatgatccaatgatgagattactttagagggcataaattttttgtggaaagttgaattctttgtaattatgagcaactggaatttattctattggttctatgggcaggtg

SEQ ID NO: 6058 - DNA, 1641 bp, Manihot esculenta
  Intron number 7 from transcript cassava4.1_032827m (locus cassava4.1_032827m.g) derived from phytozome v7.0 (chr-ID scaffold09151; pos 651425 to 653065 reverse strand)
tagctgatcctgggtctgattacctcctcaaacgggtgagaactacaatactgaaaactcgacttaggtgtaaatcacactagttcctaacataatcaacagacactacagaaaattcagtaccggacaaattcattagtgaagaatataatttcgttggtgattcgagttactaacggattaacaatagaatttatccatcctagaaaatctcaataattttattttcaagggcacgtcaagattgttaatgcatcatgacagtttctttagtaattaaaatcaatgacctattcattgttgaccgcaatcatttttcacaactgattttaaaatattattaactgaaattctattcgtacttgaccgcaatcattcttcgcaactgataataaattataattaactgaaattttgtccttattatattaaggatactaattgaataggcgttactattctgttatagatattaatgaaattttcatcattattctgttatagatacgaacaaaatttctttcactattctgttattatagagtacaacaactacttggataataacatatttttttctattattgatagcaacaaatgattcatttgtaaatataaaaattcagctataacaccatttatttttttactatatttttatttttcataacgctacacatgtatattaataatattcataatctcaacacaaacataattaattatattatataaaagcatctgccaatttaatcactaaaattataattaaaattaaaagtgttttaaaatatcaaacattgcattaataatatctaatttaagtataatatatactaattttcacaagttaaataaaaagtggtatcataatctgtgtatcttgatcgttgtcagcctagttaataattttgttattgtcacaaatagattatttttcgttaatgattttgtaatttcttatagtgaaattctatttttatatttttaaaacgaaatgtttaaaaccttatatttttagtgcatttaaaaattagtcctttcatccattagttactattatacgtgttcaaatctctttgttacccttttttaaatttaagattttaactagaattacaattcttattaatccctttaattttttaattatcattttataatacactgcttcagttcaaatgaagaaattcaacaaaagtattaaatactttaatttttaacttatcattacataatacactttaattcttgatgatatcagtattataatattgactacaatctagactaattatcaaattaactaattttaaacacttttgtgattccataatcattcataaatactttaattcttataacttagatcaatggaataaagagtattttgaaaagaaatttatcttttcagatatttgattattcattaattttttggttaatgtcttaacgctttaaatgaataggagaatatttttaaacgaactaaaatacaagagtttaagtgttgaattttaaaaatataaaatatctattaattaaatttagggattaaataataatttttttacttcaaaatcatatttgtccaattacatactattttctttttcttttgttttttttccaagtaaaggc

SEQ ID NO: 6059 - DNA, 1432 bp, Manihot esculenta
  Intron number 3 from transcript cassava4.1_015157m (locus cassava4.1_015157m.g) derived from phytozome v7.0 (chr-ID scaffold00318; pos 356130 to 357561 reverse strand)
caagttgaggtgtggtttcaaaaccgtagggccaggtactgtactatacatactctccttgtgtatatatgctattcaggtgatattaaattttgatggtggcctcgcaaaattgtttatggtggctaagaatttaggatagactttaaagttgacggaatttaagataatttgaatcagattctacccgtatacatcgtacctccataaagtagaaaacgatctttttggtagttattttcttaaagattccctttggtcatttttcaaatttcatagttaaaaaaagaatcaggcttggatgatatatccaaacaaatatttgcaggttttatggagttggctagctagttttttgggtcaatacttttcgaatttatatataaaaaattgtcatttatatataggcaaattattagatgtttctaataaatatatcgcttcatcatatttctgttttatgtcacttgggatttattggttaattatgaggaaatttgaccaggaattagaaaatctatactatttgataactaaattagattttaacatttcaaaggattatgggtttacgggcattaattccttggtcaaaaagggatgctaaaaatctttataatcaataaatataatataattagtatacatgcaagattgtgtagtaaaatttctccctaatttctgatcgctgccgagatatccaggcaatagcatgcacatcacattatcaaaataattaaggtttttccttctcctctcttgcaatagaaatagaataaggagtggataagtgaaagaaataaagaaaggatttccagttcctttctggacacgttcatggggagctcccctttgagaattatgttgtgtctaggtcatcaatttaataaactaattcgattaatcatgttggttttgagaaattgatgtgtttctttcttggcctcgtgtgctactcagatcgtaaccctaatatctttcttttactcattattaatttggattagctcatgcataataacatgctttgttattacgtgtaatttcatcgtataatattattttaaaaaataaatctatatgaaaaccctaataataaattaactcctagtattagaataaatctttatttatggattaagaaagttatatttctaaagaatatcttaatattattaaattaatgaatgataaagcaaagactttatttcatgcatttaattatagctaccacctaataggtctgtgtatgcttgcaatcatttgtacttggaaaaggagtgtcacaaaatcaatgattatttgaattattttacatataaaatctagctcttttcatataattaactaattagaaaatttcgagtttgtatgtttgaataataagtaaaaatgctgtgaaaaaaacaggagcaaactgaagcagacagag

SEQ ID NO: 6060 - DNA, 1202 bp, Manihot esculenta
  Intron number 1 from transcript cassava4.1_007034m (locus cassava4.1_007034m.g) derived from phytozome v7.0 (chr-ID scaffold03237; pos 302943 to 304144 reverse strand)
ctctacctcaccttagtataaaagatactccaatagttagtcctcttctttatctctttacaatgccgcaatttacaggtcatttcagttgaatacgatgctaaattactgtggtagttcaaatacacgtttattagctctactctttgctcaggtttctctcttcctgtgatttaatttaatttttaatcacttgctagattagaaagtttattacttctaaaagaaaagattatgaagttcagtaactcagtatggtgctgcaatgcttcatcaaagttgctctgttctggtgcatgtttattccttttaagatatgtgaaaaatatcaaactagcttactatcttatggttctgcaatgtttttctaatggggtaaacttttcttcttttaatcgaagacccatgccttaccctttccatttattgtatctattcagttgggactttttgtatctgacttcctatcaatacaagcaatatgtgtttggaaagcctgaagatgaagaattcaattctatctaatcaattctcttgtttgggaagtttaaaattgctagaattccattcttttagttgaaaaaaagtaattttggaagaaatgatgccatgacaaatgattttgcacaaatcaattcatttaatgaaattttctatgaaaaacaacttaatacaccctttgcaaagttatatttatttctttgtaaagaaggagaatacatgaataggtacgttcattccatttatggattgttccaagcttcgttgcttgcaactgtagatcaaaagaggttttttttttctctctttttttttgggggagagggtggggggagcttggggcagtgtgtttggattctatttacccagaaaattctagaaatgactaaatcatagaacataactggcactcaccagcctaaagtggaaaggggaaggaaaaatgattgatattatgatattgcatatacaacgttgaaggagcgagtttggttatggaaagtttttgaaatgctcttatttgcataattatctctttggaaatgttttttgcttaacaactaacaaatgaacatagggaatttgagcagtctcaaatggcagttttcttttttctaatcatgtgcgtccgcatcattaagttgattctctgggttgtgattgcaggaaacttcatctgctcaatatatattgcagcagta

SEQ ID NO: 6061 - DNA, 1298 bp, Manihot esculenta
  Intron number 3 from transcript cassava4.1_026379m (locus cassava4.1_026379m.g) derived from phytozome v7.0 (chr-ID scaffold08994; pos 108958 to 110255 reverse strand)
ttttgtcagtttctgttacagatttggtcgtaaaggtaagtggtctagtggagttattattttaaagaaattacttgtacttataaatcatttcatgtatgtaatcatccagtaaattgtacatatatactaattgatcttttgttattatattgctttgtttttcatgttattattcaactttttgcactgaaaatgggtagtatagatgttgatggtcattggctatggtcagttggattttgaagaataaaaaggatatgcaaatatagaattttctttggatataggggcatgttttacctaggttaagaggcagagagcaaggttagtttatcatattctgcatttccttgttggttgcacttgatgctgaataaatatgcagctcttcctttgttctccctaaattattaagtggaaataaagtaataacttttagctagctgcaatttcaagctgcagaattccacttatacatccagaatttggaaagtgaaatatatgtagggggatagctgtcgattaataagaggcctggctgtagaggctgaaccaggaaattcttttgaggggccaaggccaacattataataaattgattaaaaaatttgttagctacatttattgtctatgcattttgaggcttaatgttgtatattcaaaaaaataccatgatagatatagttaagctaaaaatatttttcaagggtgccaatgctataatttttttaatataatgaaaataaacatttctaatatttcaaattatctagataatgataaaaatataaatgattttcggagtagccagtaactaaaataaataatttttccctaggtgtatatatatatatatcctcgcaaggaaattggagggaggttgttgtggggcaaggccccctcagatccctctccttctgcccttgcttggctgaacctttatcacacaaaaatagtggtgtgctggtttgtttgaattaaatagagattgtgttgggcttacatacgtagccaataaaaacacggccttaatttgagccagctcattgagctaacctgcgtattttctaggctattgtaaatttgcatagacatcatgtgacaaatactctattgagaaggaaggtgctaatggttgttttgaaaatgattgtgatttcttagtagttacttttttcatgcattgattgtgtttttcttttctattttccttttcttcctactttgcacctcatattaaagattgctagtagttattataatcgtatttggaaacattgcagacacccaaggct

SEQ ID NO: 6062 - DNA, 2441 bp, Manihot esculenta
  Intron number 1 from transcript cassava4.1_012705m (locus cassava4.1_012705m.g) derived from phytozome v7.0 (chr-ID scaffold11998; pos 828749 to 831189 reverse strand)
tcaactgttctattcaatcactcgctccctagcaggtgtctctccttccttctctctatctatcaatcgttttatttgtataatttgctgatttctaactgtttgtgtcaccgttgtggagatctatacattgcttattttttaaaattatttatgcccatacgttttcttatagtctatatggtagttgttatcggtgaaattattgatgcgttgttgtttttggccgatttttagctgtggatttgaaatttgggatctagggtgtatctatttagctgcttgtgtttggtgtcttattctgaggtataggtcagtgtgttctggtttttagatttggtggcttgattaactggtcatgataggataataatgagaaaacagacgaaacctagattgttgctggaggagttatataagattttagaggaagaatgtatacattggcaagatagataagctgatttgttaatattctagggggttgaatatgtgcgggctaaatttttaatattgccattttagttattaggctgctaattctcatgcttggatagtacaggattgatctatttgctatgttgcccatgtcatattcttagctttgttccattcttatgcttgtctagttagctgctaatttgccatacaatttttttagtttattgctgacctgctattttagcgtgcatacacaaatgcatttatttgcatatattcaagacacacagtcaaactagatgccacacccatgcttgatatttcgttgataatctgtatcagaatgccataaatccaaaggtggtgctagtattctataaattttacctcgttctgtttaatccatggcaaaatagtccgtctctagtaattggatattttggagtaggtaaatatccttcagtatatttcactaatgggtagacatttttgaaacgagcaaaactcttgaaagcatccggttgtttcctaagaataatagacttttgaatggccagtaactactcttcatttacttgattttaaagtaaaattctaaaaaatttcaaatttaggaaaattcaaatttccaattttctctttctaattgtctcctatatctatttttccgggtgctatcagtaggataaaaaaaatcaaccttttttggcctcaaatatcagcattccactagggaaagctacctcctatactcaagccaatagtatttgaatggctgatgttatgatagtctagttccatgtttcagcataaactcataatttattccaaatcccataagttgatgacaaattaagtgaaagtcaacagttttcgacctcaaatatcattagcagcttgtgaaaatatatcgtaatgcactatatgacttttgaatagctgtactatattcgtacgtaggggtgaccccatgcccctccctgtgtcaggcaagcatttaattcccttcggcgcctgcgtggacagggctgcgaaatgactggacccgcagtcttttcttcttgtgaccgggtttgagggaaaaggaccagaacctaggaaagggctggctttaaggctgataaatgggctgggccggtctgagtgagtgacttaaataggagtccgatcaggaggatggacgggttgggcctggcttattcgggggcttaggagcctcctgattgtgggctactaccgtaggtccggcctcgtaaggggatggagaaatccagcggtcatcagctagtgaataacaaatttatgcgagtgtaaatgtacatagttgttctagaagtgaaaatcagacccctagaaaatgaaaaatggccttagagtgggagttgcttggaattttgttgtcatggccccataaactaagtttcacttttacttaacattcttcatcataagatagctttgtgactcaattttttattttcacatttacactctttagtccttaccatatccaaattgtattagcatttttttataatatacaaaaaaccttatcttgaattagaaagcaaatctctttcactagttctgtaacaatgtgtcagctgttttataggtcttcttttagcttcgaataaatctatgtatatccatggttgcaattatagggaattcacttgaggttgtgtttgttccatatcatgtcctggtgcatgtaggtcagtcattcaaaaccttaatatgcgtatctgttgggtttttcactagttgattgttgatattttgggtaaaaaaagttttgttttgttttgctttatcaccaattgatggtatttagaatatgcttcagaaatcaaggttttgttcatgatttgggaaatttggtagttgatatatctgataagaagagaatttaaagttttgagtcattttgttttgtttgttattcaggagaaaggaactattttaatataggagctattggaagcagtatagacgat

SEQ ID NO: 6063 - DNA, 2753 bp, Manihot esculenta
  Intron number 10 from transcript cassava4.1_000756m (locus cassava4.1_000756m.g) derived from phytozome v7.0 (chr-ID scaffold06948; pos 497311 to 500063 reverse strand)
aggagaactccccaagttttaagcttgcgcaggtacggactgcagcattattggtgtgaaatgccaccagattattgtttttgtagttagaaaaactcaatcaccctgtgaatatatatttcacataaaacttggaagcagtccctccatgataagtatccatcactgcataggatgcgaaattattgtaggcatgatgttagtaattcttaaaaggggatataatattggctcactcgcaacattattaggcagtctatgatttgataatatgaaaagcttcttttgtttgattggttattagaggcatttatttcccttttgagtcattatatcaccaaaattttgtcctcaagtgctagttccgtgtgagaagcatgagcaaatattttgtatctagatctgttcagctgttctacacatctacatggttattataaaggggcacctaaggtgcaagtcactagaggcactagcctgatcttcttaacctgctaaaggcaggcaatatgactcaaacatgcctcttaggtcctcaactattttcctttcatctgttttttcaatttttatttttaacatgtttttctgcttctttctatccttttccccttctagtccagcctcctgctcctctccttcctccttttcttcattctcaattgcctagtgtcagtccctttttctagacctccttatcattatgcttttccccctccttgtttttgtctttgttatttgatgctttggttgttgcttgatattgtaggtttgtattaattccttcattaatttgtttgtttgaaactatgaattaaattaggggggaaaaggttatttttaattatgcaattagggagaggaattcattttaattctggaattagaacaaaaacaaggaaaggaactaagtgacaagtatattatggatggttatacgaccacaattttttttggcgcctcacctccctcaagcacatgcctgcacctcaggcttaggaaccctggtaactccctcccaccacaagttttggaggctagagctttacttacctggataaagggccaatgctactgacccatttatgccataattctcctttcataactggtcatgcgtgcatcgagtcgagatgcttatgcatctcatcaacgaataagtaatagtgatgtagtcttatgtcaatcatgtagaaactagaatatgccaacaaagcttttgctttctgctcaagtccgaaatttcctagtgcaacttggggcaggaattataaatgacatagaagcctttgactttgaggttattttttgtagtagtacttatatcattgttaagtaagttactaggtattctaagacgataactggtgtgtgggggaagggctttgaagttaactttccttgcttgtttaacatagctgttggtatttgtacttgtcgtatctggttttattgtagtcttctctgttccctccttgaagtttacgctttataagagtatcccaaagcttcggaattgaagtgcagtattgtgcttttggtcaacgttaagcttgaccctgttttgggctgaaatgaacgggtcctttagtggggatggttggtaaggtcactcattctgaagagatctcaggaactgatctttttttgaaagatttcaggaattgaccttttttgaaaggtgaaactgtctattacatgctttttctcataggaaacctcagccaagttccatggtgtggacttcaagtaaaggactataagataagaagtttgtgaatagtaatggacgtctatctctgctgcattttctgttgcgtgagttgtcttttttttcatctttatttgaaaagtagagtgattacttatttggtgtaggccatcttgaatgatattcttttgggggatgggggtagttggtcagcttagttgttaattgggaatttgggatgcagtacctcatgtctaggagactaggattaccaatgggtctggcttatttggcatggtgctgcctgttcagcctgattggaatttaggatattcagccctagcatagcccaaatatcattatcactttttgggtcaagttggggccagtccacattttcctttgcttttgttcttcttcttcctcctccttcccttccttaacctcccccgctcttctttttaattagtttgtctttctcacggctattttcacgtccaaatatttttattaatcataatcctatactaaagaaatagcacagtgatgccgtttaaattattaggtaaaatctcttgaattgaacagatccttaatgtaaaatactcaaatttgaaagatgttactatatatattaaaatttacaaaatgattacaaatgtcggaagatatatagtgaagcagtaatatataataggaaaagtattaaaagagaacattgaatatatactgtatgctttgtttctacagaatgctttattcggttgtttatcttttacataagctgcttatggctggtttctttactcatccttgaaaaggtcaaataaatggtttgggactagcatttttgcatttatcttcctctcctctttttaaaaaattgttatatgatgaaaaaggtgaatcaaagtttatttatttatttatttttgtctattttttgctttccacatgaagatattctctctctgattcagagttgatgctttattaattatttgatttatttgttttccttcagaggaactttgttgaaagt

SEQ ID NO: 6064 - DNA, 2315 bp, Manihot esculenta
  Intron number 9 from transcript cassava4.1_007622m (locus cassava4.1_007622m.g) derived from phytozome v7.0 (chr-ID scaffold08494; pos 109958 to 112272)
gagtgacgaggtaagacaattaaatggcgtaatttttatttttcttcagccattattattatgtgaatatacagaataagcaataggagggaatgaggatgtactttcctttttgtatagtatgaatctcagtccaatatcatgtctgcattaaactcatatcatgctaggatgagctattactattattgatcaccttgacatatatgaagattatcatccctttgacatacatgaagtgtaaattcagcgcgaagtttgtcatttgttttatagtagtgatcatttctgatgatgatgatccttgtatagcttttttctttttcaaattttctttccttaaaatggaaccatgcagccactgggtctttggatgaatatgctgtccaataactgtgttagggtccttggaaatggatcgagttatggggctattgctgaaattttctgggggcaaaattttctttgtgacctatggttgcaattgaaaagcctccttagagagaacttgaaaatatcttgagttgaagtactcaaaaactttggaaagttttctcatgatttttttattaagttgttgcacctaaatactagtgggagatataaccatctcttaaaaacaaggaaccattaaacaatataaaggaccactctcctaggaaaaacaaaaactaacttgtactatttaaatcatggatcaactattaagaacatagtttaaccactagctacacgactcttaaaaatagaactactaacttgcaaaaaataactcgcactatctgctaacattactcctctcgttcactgtatgcttgtccttaaatgcaaacttaggaaatttttggaaactattcagccagtagctggtctattgcgacatctttcgggtcatcatttgctaaatccagccaaaataattccttgcaccaatgtccttgaacaaagggttcatcataattaaaacaaagttctttccatcatcgttcctccatcttatctctgttcaagtgttttaattattcgggtaccttgtgctttcgttatttattgagatgaaccaatttttcccctcatagagtcttgacatgctcatggcaatgactaggtctattggttgatgaagttccatctccacagcgatgtattcttgcaacccactaagataaaactgcattttttgatcctacaagaagctcaaattgggtttagtagtcagcaactgttccttttttctttaattttgctaactccccaaatttgttactatagatcagtagcctaaaagggagattgcattggtgcttgattacttcccaagtcaagttagaaaaatcttggattaattgcaagaactacaattgagttgtgcaacctttttttctgcaaaggtctattagtgtcgaaagaagtgttcacatttgcttagccatcctaatgaattttttttttaccattgaaatgagggaaatctaatttggtggaacaatcatatcattgcctgaattatctgaacccgttgatcctactactcccttgcctctggatgcgcaagagtggctacttccctctgtcacaagtgctgggctatagtttgtaatgtcacggataagagatttcaacttagcacttaattcttcttggcgagccttgttggcagcttgcttttccaagaataaagcaagaattctatcaagttgttggattgagtcacccataaccgctggctctgatactaaaatgttaggatccttggaaatggatctgaattatgggtttgttgttggaattttctggaggcgaaatttttttttttgcgacctatggtggcaatggaacagactccttagagagaacttgaaaatcttttgagttagaaatactaaaaaacttcggaaatttttctcataattcttttatggagttgttgcacttaaatactagtgggagatataaccatctcctaaaaacaggaaattgttaagcaacataaagaatcacgcttttaccaccaaggaaaagcaaaaactaacttgcactgtttacatcatgggttaactattaagaacaaggcttaaccactaactacacgactcttgaaaacagtactattaccttgccttttttttttttttccaatccttgacaaatgttcaacataatgtttatcattttgagcaaattaactccttgagtagtatatttttgttgatgacatcatgttctgtgtatgtcctacttctttttaaaagtgccttgagtggctttaaaattttccaggacttgttggaggctctgaaccaactggaagaagg

SEQ ID NO: 6065 - DNA, 4083 bp, Manihot esculenta
  Intron number 1 from transcript cassava4.1_014584m (locus cassava4.1_014584m.g) derived from phytozome v7.0 (chr-ID scaffold07604; pos 36297 to 40379 reverse strand)
accccaatatcattcgcctcttcgacgtgttccaggttggttttaaacttgaatcgctctagttggattgataagcttgcgtcttgaattttggtttttagatgatttttagcatacccttctcagtgacgttgttattttgtgcatttatacattcaaattattatactttgtgaggacatctccatttgatcaaattgcctaattgtgcatttttgttctgctgggacttgggaggtaggggaattctctttgtaaattatcgatggtagtaattttctgacatttcgttatttgctcttttctgaattttatttgttagacccttgatttatgaatttcgacaattttgggcttttctgcttcctatttgatttgatttggattggtcatgcagctagaccattgaatgatgggttgtcatgggaattatatcatttagttggttgcatgtgtttttattttcttttagttttggctgtatccttgtgatttagcttgaattacatatcgcaattgttgttctcaagagggtggctgaacttaagtgatgattcatgatgtcaattgcttggctattattttcatttctaatgttgaagtgtttttctggatgtctatgtaattgtggatggatatggtgaatttagggtaggtgagattacagagttgatattcttcagtttttgcttgttatgctatttcctttacatgtggtttatgcaattgctagttttctggacattgtgctcttgcttacaagtcaattttgttgcatcattcatttattgagaataaaagaacttccaatttataggaaacatcataaaagaattatattaaaggaaagatgtagccaaatacatattcttgagagtgtgaccaaataaaggcagactcttcaaatgagaccacaaccgcatgatatcatgagcaaaatcgatacagctcttcctttttgataggctagtacatgataaactataacaactataatttgatttgtctcaatatactgtccaaaaatattgtctgcaatctcagttgttttttcaaaaaatacggtctttttctcaatctctctcatagttaccagaaagtcatccagtaatatattgagggatataaaggcttgttgaagattgaataattatgctgaaggtctggttttagttatgggagttggaactcgggatttgtaggtctaggttagacgtttagccttgtaaaccctagggttcaaatcatgggttttggtgcttttggcaaatttgtgttaaggctccgggtgaggcgatgtgccactgccccgcctcggctggcccaggcgaggcaccttcactgaggtgcccgcttcagtgaagggaggcgccaggtgccaagcacttgagccgctgcctcttttatataattggtttttttctttcttttcttttttttttttttataattttaggtaattactttatgtatttatgttgttttattgcttataattgaatacttttaaaaaatatacgttactttcttatttgttttaaatgattgtcattctattgtttttaattttagaattttaaaaataataatttgttttttatttattttagatgggcttttatatgtatttttatatttgtattattaatttgttgttgattaaacagggaatacatgattgatttatttctcttatattgcagataatatgtttttctcctttgaatatgggtgttcatacatgtatttgtaaatatatatatgtatatttaaaaaatatatgtaaaaaaaattggttgcctcgtatcttgcctctcatctcttgccttatcgtctcagtgtcatctttcaccttagtaacattggtttaccgttgataccacttgatttcaaacaaaagtggagattttgaagaataagaagaaaaaaatggtagagataagagaagaggggaagattttggtgaataggaagcaaagttaatcaaggtgttttttttaattaaataaaaaaaagacaaactagaagaaaataaaaggaataggcaatacaatgatagaaaatcaattgactaaaataaggaaaaaaggggaagaaaactaatagggtgctaaagggacatttcgatcttcgaaccttgtgttccttgcttggtagagttctcatgggaagaggggaaggttttggtgaatagacaatttctttgtaaatctggtgttgaaactgtgaggcacctacccattttattttactaggagaaagggattgtgaaatttggccttttcaattgatggccttttggttcacagtcaattcatttaggataactattggcttggaggggcatatgttagtatggactagtaaaaaagaaaatttttctttcaaattacgtcctgtcacttagatagttagcaggtacataataggggagccttcaagggaaaaggaaaatcagtatttagccttactatttcttggcttgcaattgcaactcttcatcttttgtatgatgatggcatttggagaaaggtttaagtttatagaattatgagttccacagtttttaggtatatattcaatcagtggtggatccagaaaaacaaaacttttccggggttaacttatgaaaatattttcctaatatcaaaatttttaacaaaaagaaaaaaaaattttctggggttaactcatgaaaatatttttctgatatcaaaatttttaataaaagagggtcagttgactttccatttgcagaaatgcatctgttgccaaaatagggttcaataattagatttagaagggatcgatttagataaatgtactgtaatgaatcagggtcacagcgtagcagcagacgacaaaatagtcaacttcaactttattacagaaggtaaaacatatgggatgtgttacagtttcaggtctcagatcgctttacaggatgatagatggggaagaagctcattagatggatttcttaacacctcagacttattaatgagagagccttaaatctcaattgtgtttgtaatttttctgctcactttattgaacaaaaataaatctcttatatagtggaggttcatataatcatagtctttctaattaggatagaagtctaatgcaagcaattattagataactcctaagacaagataatatataataacaagtaaaataagataatataatagagataagaaactatagataaaaataatctatttattatggatttaatctatccattatccacaacatcactcttcttttagaaaaagagtttgtccttaaattcaaatgtagaatatgtaacctgagaataattgatagactcacatataacttcagatgtaggacagccttgccaactaattaatactttccaaactcaagttgtttggatccaacacaacaactctgtgccccttttcacatacaagcaaaagttgactttggcattttggggcatcatatgtatctctatcctctctttcgttgcttgaccaaaaaattttgttaaatagagtgtattattttccttcataaagaaaaggagacaaaaaagaaaagaggagagaccattcatttctttagtagttaatttaattcatgcaggacagtccatatcctaatagcatactaggaactaagagctttgttgtacaggcaaaagcaaactctgagctgtgacacaaatgtaagtgaaaaatcatttaagagttttattattgctgatttagatttctagttaatacaaaagtatcttctttaagaaagtgaattcataaatgctgaagcaatcccaatcaaatttccaaatgttggattgatctgttctatctttcctgcatcattaattcacacaattgaattgaaaacaccatcttctttgtcatttcagccattgtttcttagttatgcaaaaggaaaatcacttataatcacaaacttatttgtttccaactccaaatttgcgatttatctgttctttttttgccacgtgtgatttatataaaatagaagctaagtgctttactgctaggtggagagttgtatatttctggttttggagttctg

SEQ ID NO: 6066 - DNA, 964 bp, Manihot esculenta
  Intron number 7 from transcript cassava4.1_007019m (locus cassava4.1_007019m.g) derived from phytozome v7.0 (chr-ID scaffold07520; pos 366758 to 367721 reverse strand)
caactaacccacgtcaacaaatttctgatattcgggtaacatgtcttgctttcttaacttatgaaactttttggttaacgattatttttatgcttgtgcaatggtcagattggttggaagaaactaaaaccaaaaaccaaatattagattctagaactgaatcaaaccaaatttgagaaacaaattgtattaaaatggaccgtcaaaattaatttggttgacttcagatgttcattgttgccttattaaaaaaatgtaagtcgacggagaatttgtttttaaattgaagcaaataagcaaaatccttttttgattttggcttcagtatttcatgcttctatataatgcctttttgatcagtgacctaaatgatgaatactttcttcaaatcctttctttttgtgcatcttttgcttggattgggctataaaagtttgttgacagcaaattaaataaaatcaaagaggacaatccaaatgaagatgaagaccagggggtaagaatttagtgacagtcttcatctttatttttggcaatgggcccaaatggtagcggactgcttgaaaaatcaacccaggaagaaaggttgtgtaccaaaagaaaaaaaaaagagatggagaataggtttaatattctgtcgaatcaattaggaggctctgtaaagggaggagggagagatgggaaggaggtgtgtattgtttttgtctttaggattaaaatattgaaaatgtcactttttgccatgttacagtatttaatagtatatttttgtcttctctaatgttcccccctctattcatacttttatatatgtttttttttcaatagattttgtagaatgatgtgtatgtatgaacagtatcagtagttgatagctattttcctttttttgttgtttttattttactttattttttttaccagcttgctgatttttataaaaaattttcagaaaattgcaaag

SEQ ID NO: 6067 - DNA, 2591 bp, Manihot esculenta
  Intron number 5 from transcript cassava4.1_016195m (locus cassava4.1_016177m.g) derived from phytozome v7.0 (chr-ID scaffold00847; pos 2066998 to 2069588 reverse strand)
ctcatttctcttggtattaattttaactccatattgcatctgttctcataaactttttggttttttcatcacattattgtcattttaatgcttttaaaacatatatggaaaatgttcactttgtatttctgatagcaagactcttgattacataactcctgattttactgtgaacctatatttattagtttcgacaatgtgattaactctcttgtttttatgtgcaactcatgaacacattgctttgtggttttgtaaaagtgtctaaattaagcagttgctagttatgcatgtgatgttgtgaaagagaatgtggagcaaaagttgttgctttatgtggatgtcttgtatcaaattttaccactagttttagatctaaaagtgtttctatttttgttggcttattgatgcggtgcatttggattaatgaaacaacactgctttttgtttcagagaaaagaaagaaatgccgcgcaccgtttcattaagttttcatttggtagttgataggcgggaaagtttgtttttcttttgtcttctttcacgcatgtttctcatttactccagctgtatatataccactcaatgtgatcaatgaagccatcttgcttcctgcttattttctgttttgcataagctgtcatttgcacatgggatcaaatcaattaaattttcaatcaagctgagaggttgtccacagtgtgaatcaccctggtacctgaatgaaaacaataacgtgaaatgtccttgtttagaaatttggtataggtttctttttagattgcctagtctgattgaaataaattatccatattggaaatgtaatggaatgtagaaaaaatagtatatattgaattagaatagataaacacaacattttctactatagtaaaattaataaatagatccaatatgatcttttcaataagaaaatactatgttaactgcttcattatcataaaaaatattaaaaataccaaaatttatggcatagtaattgtaattacttaaaacattatttgatatttgtatgattgagatcgtttcgttctctacttatagaatgctaatttagatttgtttagttatagaaaacattttctattttcattttaattttcctttccataacctatttttccgattttctttttttttttttttttccaaatggaaaactaagaaaaatacatatttatgattagttgtcttcctttaagctatttaatattttattaagattttgtattaaatgagtactattaaatttaaaaattagctatttaaagttaaattttaaactcagagacgatcatgtccattataaaatttaatttgatagaatactcaaaattgaaacaaattatatattagtaagaatcattatgaagtgttaaatttgggtcagacctaactcaccccaaaaactagctcaagggggaggattatctatggctcatataaggggcacgttactctttccacaatcgatgtaggattcaacacaccccctcacgcccagaattttactgatgcgtaacatattcatgggaggcccaacatcagataagaggctctgatgccatgttaaatttgggttagacctaactcaccccaaaagctagctcaaaggggaggattacctatggctcatataaggggcacataacccttttccaaaatcgatgtgggattcatcatgaagaatacaaagactaagaaagtaagaatagcatttagagatgtgttgtctaagccttttatttgaacaaaaataattaatctaaattcaaaaacttatagtaacatatacagaataagaatgtatgctgtttttggaaccccagcagccattttttttaggaaatgaaaaaaaacatcccaagtttattgatacctaaactaaatgtgatcattgcagcatatacagaataagaatactttgtcaaaaaaaatgccttgaatgttgttgctgggatttgatcctattattatcattcggcaaaggcccaaaatagagcaaaagtagaaaactgttttccgttttgagaaatagaccatttttttagtggaaatcaatgtaaagtagtattctagagtttagttttaagttacataatttgtctaattcatttggagaatttctattactaaaccctaatttccattttctagtttcctggaaaataagccttgttttccacaactaaacaaggccttattattccaaatcactaactttctggcatatggaaattgcaatccagaatacaaattactaaggatgcaactttttttgaaaacattggtcaattcttttacctttgagaagctatactaggttgtactagttagacatctgaaagacccttaagtatgtttgtatttcagtctcctcatcaagttttgttgctgagaatatttagtttttgacattttcatgtgaacttgaacgtaactatcctgttgtaacatagctatggattttatatttgacgaattaaatggaatataacttcttttttgacatctttttcattttctgccacttttaaggactgcagatattgtatctgattgtgtctggcatc

SEQ ID NO: 6068 - DNA, 159 bp, Manihot esculenta
  Intron number 1 from transcript cassava4.1_001159m (locus cassava4.1_001159m.g) derived from phytozome v7.0 (chr-ID scaffold03404; pos 17802 to 17960)
gtgtgggatcagatcagttccagttcttttcagtgagattctaacgccaatcttttagcttttcatgttttgacatggattttccttctgctttgttccatttgattgatttctatatgatttttaagtttgtagaatgtgggtttgattgcagattga

SEQ ID NO: 6069 - DNA, 2198 bp, Manihot esculenta
  Intron number 1 from transcript cassava4.1_025964m (locus cassava4.1_025964m.g) derived from phytozome v7.0 (chr-ID scaffold04247; pos 8832 to 11029)
ttatcttatcttttcgattactgtttatattagaggtgtttgatgattggctgctgagagaatatgcaagaatttaaaacattaatagatcggacttcattttgccagactgcagaagaattataacagggaaggagcaagcatagctaatatcattcttgaactgtaaatctcaaaaatatataagcatgaattgaaaaattacaagttcaactcttgaaaagttttcatattcttataaaattaacatttattacatatactatgttattatgaattcaacaaatccatacatggtatgtgatcattgtatcacctatatcttaagttgcatcaataggatataaccctatgaggtgatgctgcagtttttttcatattagagacaaatacgagcttaactaagtttatagcacatcttctagataattttatcagttaatttagttagttatatctggatgtttgggtaaataaagtcaacttggggatatttcatcttcaaattatatgaagtatatactaaaattcaaaaattgaaaaatggtgagaatctttctgatgaatttgaacaaattgtgcaatcttagtttgagaatccatttgtttggctactatgagtgaagtgtagcccttttaccattttttcttgtgtctgtggtcatctggatattcctcattggtgtagttgaatgagttaagctttatgtttccaatcaataggtagaggaatgttaagatttgaacttgcaagtcgacacaatgaaggaattcaaaaaatttcaacttgagtactcaagcaggttagattatggtttagtttattgaggaaattataggtattttctattttttttgagattttcaattatatacctactttaaaatacgagagctttttcatttattcaagtcacaagggtatgaaaagatccagatttctataagaatctttattttaagaattttttttgtgattagttaaagttaatattcaccttttgaagcttaaatcctaattaaagcctggacttttctgccctccatcacaagtttttaatgaaagcaaacaagagggcttctctgttctcttgcaatatatgcaactttgatcaagggaatagttcagtaatggcatagaagagcttttcttaaatcattacacttagtcaaggacacatgtagttataagttcaagtcaacctacaaatgttatttgatgatttcttgcttggttagcaaaaagtaaacccatgtgatgatttaaataatacatatttcacctagtcagagctattgtcggtaggaaaccttctggaaaagtatttatatatctattggtaggtggactgatgattcttattgggtggtgggtgcaatatgccagctgccctgttaacaatctcaccatgaggtctattctttatatatatatattgtgatggcttttggacatggggtttgttgtctgataaatatgatatcttctcatggttggatcagcaagtctgaaacagacgtgtgggccaaggaaaaccactaccctacatttttaaatcctcaatttgaatcacgacaatattatgtagggtataagattttatttcataagcattgtcatgtcttttgttgttttatttcaatgtcattttcatttgctgaggttgtgaaggttaacaaagtccaacaaaatctcatctgttatatttacttggttattagcatggtttcgaccatatcctttaaatattctggtggatctgtcttactctaggaacgtcttttgtaataaaagaaatagctggatgagtcattctttctttaatttaccaaattacttttgcaggttgcattgacatatttggacttgttcttctggtatgtcactgttagtataaactataaagcaaatattgacagcaatcacaatttaatttacatatttacaagaattcaattcaaaccaattcttttctattaattttcttgtttggaatgtaagaattcatttcttttctaacttgcaaaatttaaccatgcatgattttgtaagaactcaattgaattcttttcttgcaaaatgaatcagctcaacagagggattttgtttagtcagcctatggaatttgatgatggtttatgggtattatccaattgatcttgacttgaactctgctttgttttcttgttattagaag

SEQ ID NO: 6070 - DNA, 2559 bp, Manihot esculenta
  Intron number 4 from transcript cassava4.1_018799m (locus cassava4.1_015942m.g) derived from phytozome v7.0 (chr-ID scaffold08265; pos 3400350 to 3402908)
tatatctgcttcaaattgccatccatttgattagggtaattcactttggctactaataaaagtaaccaataatataagggaaactcatattgctctatttggattttctttgtcattctacaatagcaaatttataactgactgatcaaagcactttgatttgctgtttcctatgtgagaatggtttaattctttagatagtttcaaagtttccatgtctttgcccttcaaatttatggctgtacgcattattcatcaagggggaatccttggtcatggatgacaaagtccttccaagctggccacaatatgtctatttctgttgtttactttcacctggaatgtgaaagaaacacagtcaagcactttgccttcgtcaaaatgctctctaccatactcctttcaggcatgttttttaggatgtggaatgatatatgcgagttgggcccagaactggcccagtcaaactctagatcaggattgatcaatggttcttgagcttgactcaaaccattactgctctggggtcattcctcccccttgaaccatgaaccaccagactggctcggcctcaccatttttggttctgacctgcctaatttatttaaaaataaataaatagataaagagaaacaccccaaagtcaacagtcacttgatcatttaaaagttcatcttatttgctacttttccatttagccatttttcttgcttttttttttttaaaaaaagaaatgtatatgaaatggaatggcaattttacctttgtaaaaccatgtataattagttttaggggaattttggaaagatgaaaaatttagaatttcttataaatatccacccaaaccatttttttttggaccaacattgtctaattctcctaatctctcaattttcatggtctcaattagtttctcttatcctttcaattattttcaactttcattttttttttgtcaaaatctataattttcctaattagttaccctgttcactcaatatttcatccgatttttactctatcatagtcaggcttctctatgtattttctttttcctaatccaagcatttatacaacattttaagtgaaggttcttcaaaacatccaaaaagtgacaagaataaggaaatcattgaggaaactcattttttctttaatctgaattttaatcaatagataccaacaaagtccatgacatgctgcaaaatcaatgaccattcgtccagcctagtcaatttcctacataggagagtcaatatgctgacttggatgaaaatgaaactccaacacaaatggagtgaggaaatgctaaaactcgacatattcaaagtgcatttcctaaatttcatttaggaaatgaaagtaaagtatagtatggtcgattatgcaaattcaaatgaagtggtgggtatggaacatttaaatgtacttgcaaaacaagaggagatgtatgcatctcaattattaaaaagattaagatcaagcctcattattttccctaaaattgtcttatatatatatatatattcatttccctttttttttatcataaccttaattcatcattttttttaaactattgtaacccaacacattttatttaagttaatgcacattctttttctatcaattatttttgtcaccctccattttgtttgtacattaaaaattttaatttgtccaaaaaaacaatgatttggttgattgacaattagaatcaaaagcgaactggccttaattcatgtccgcattggaatcaaacctgaacaatgaggaatgggtccctatggtcctgttcaggtccccccaccccgcatccccccccccccccaaaaaaaaaaaaaaacgactactggaagtggcttgtggctgaccctagtattctctatacttaagactgaggaactatcatttatattgctattgcatcactagatattagttagaaacttattaaatgactggtaggatgggtagctacttaaaatagttaataactgaaatatttactaaaattttgtattaaaatttagaaagagtcagatatttgtgttttaatttggaaaggaaagtttgggtcaatgatatttatgtttttgattccttctgttggaacttggaagggatgttccaaataaaaatttctcaaagtagatagatttatgccaaccttgtgctgttgagaagcgatcagtttatgatctatcttctgaaagctagttttaaggttatgcatcacttaactagctgcagaaagatattaagaatttttttaagataactgtgagaacaaatggatagaagttattcttatgtgtttggacaattgagatggtctctagacttgcatttgtacttgaatattgatcaaggacatgggcctctcactctctctcacacacaagtgtctggttttttgcttattatcttaggtagataagtttgtaaaattttccttggtgcatgaaacacccccaagaagatggttttcctttttctttttccccttttattagctttcacttgtggttattttatttcagagattttgatccttgg

SEQ ID NO: 6071 - DNA, 1506 bp, Manihot esculenta
  Intron number 1 from transcript cassava4.1_004397m (locus cassava4.1_004397m.g) derived from phytozome v7.0 (chr-ID scaffold08446; pos 546687 to 548192 reverse strand)
ataaggtattgatggagattggagaatcggttttgtgtttttttttttccctttctatttcctttatctgttttttagtggtctaatttccagtgtgtttgtttccttggaaaatgatttccttgaaaatgatttgtggaaatctttctggggaatggaatcttttttttgagccttagtcctcatcctgatatgtatatgtgtgtttgctttatgaaaaaaaattccgtctttttctttcctctccttgttttagcctttttttttagtgatcaaacttcactattcgttcttttttttttttctttttttgaaataatggttgttatctctttggatacaaagttgcctttttatcccacctttccttgcagttttctgttttctgtttgcttattttgatatttcagtttttttcgggcctagaatcagaacatgaatttgaattctttgtttttgacgatgtgacatggttgaactgggctataactttgaatctataacagtatggttacctcttctatgagtagttcaatttgatttttcttttggagtgaaaagcgttaaaatatattattattattgtttaccgttggtttttctggaaataaaaaacatttatgttgcatagaccttgtggaaatattggccttttgtagttataatatttattatttttgcttttgggagataatagttcatttgtacttattatgtgattatactcactatagcccacttatttaatgagctaaagcttgctaaaatggttattattaatgaccatgtcaaacttgtaaaatgacattaatttattattagggaatggtttaggtaatcgctgatgtttttattatatcttcagtatttggacaaatttcatgctggttttaataccttgtggcattagcgtttttggttttgcagagcttttgataggccttaatgttttaaatgtcaactgttgctatttaaccttatatgaaattgctgtttccagcaacaacattgattttatgtttgcacttctcaattagaaagcattatgggaattttgctatgcgcttttctttcattatttctttcttttttttttttttgcatttgtaattgatattttttctcgagaagaaaccttataattacttctttttggagtgaggtggacatgcctgtgtatgcaagagttctaccccctaaacgtaaatcaactgttctcctaacaactgctgtataatttatcaaaacaacattctttgtggtgcttacattatgtactttgattttctatgcatgttattcaagaaaaggaacttttcagaattccctcctcaaaagtatttgcaagaatttcctgttgaaagaaaatcacttatataatgaggaattattggaaagctttttaagagttcattacttgatgatacttgtactgaatacttattctgctatactgtttcttattttacagggtgaagtagagtgcatattctatttttggtaatt

SEQ ID NO: 6072 - DNA, 3267 bp, Manihot esculenta
  Intron number 3 from transcript cassava4.1_011608m (locus cassava4.1_011608m.g) derived from phytozome v7.0 (chr-ID scaffold08679; pos 489105 to 492371 reverse strand)
caagtgaaaggtgtgcaggtaacctttcaaatttgttatatgatttttgttgcaattttcacaaagtgcttcttatggtataatgctgtttgtttttctaaaaagttgcataggatttaaatgttgtgatcctgttctttatctgtttttattttgagccttaatttttaactccaggaggcaacttaatctttttggcatttattttaatttgacatggtatgaaatatttttgtttgtgtagatgcacatttcacggtatggcaacttccaaaaatggaatgcactcttgtaataaattcattctttaaaaaatagggtaatcaccattacattgttatcacatcacttcaactttagaacctaatctttgtcgccaccaccactgcccctaaagtgctcttattatctctgcttttcaaccatcagtccactaaatttcctgtatcatcactgctttgcagccatcaagaacaataacatcacagtcaacattttccttgttatcatccagtcaccaaatttgccttatacccttgggttccaccacccaaatcttgtggcatttgcatcccagattgagttttcagtggtgagttttcagttagtttggttttaaatcacaccggatagaattggcaaagttgaattatcaaaaagcatagtttgaggaaccaaactgaagtaaaaaacgagttcaaccaaattcaaccaaaatgaatcaatttggttcatttgttttgcaattatcaaacttccaaaatcatattttcaaatctcaaaagaaaaaaaaaaagaaaatccaactgcagattgctacaaatcttagttaacatggttcctaaaacaaaacccagatttcaagtagcaagaacaaatctttaatcaaaacagcaaattactacaaaatcccaaaaaaaaaaaaattacagcaaatccaacctcaggatacaacaaatcaaaacccaaccacataatacaactgcccatcaatacaaaatgcaagatcaatcatagcttacaacaaatcaaaatacaaatgcaataacaaaacccatgcgacaagagcattagagtttagagcgtagactcacaagagcacaaaccttgcgagctcttaatagtgatgataggagcgcactagtcttagcatgagcatactctctgatgcaatgcaggagtggacttgagtcttgacttcaaatgcagatcaatttggactctcgagggggatataaaggagccagaatttgtgaagtataatggaagaagaagaagagatggaagtagataaggagtaggaagaggagggaggagaacaagaagtaagcaagggtaggaaggccaaattggttgtcgtcacaagaggtaggaaaagaagaagaagaaagggagcagcaaaaggaatgaggaatgacttaggtttctttgcttatatgcaagcataagggatgctgtatgatatatgggagaaaacttgtccaattcagttaatctctcaaaataaagttacacatgatgttagttcttattaagaagaagaagaagaagaatgaaacaagtggagacttctctagatcaataggataaaaatggaccttgatttaatcatgctggttccacatgctttaagccttagattataagccttggttactcatggtactaagccctaaatttaaggccaagaggaggtctctttacatttgttggataattagactcccatttaatcttgtgctggtttcacattaagtcttaaattataatgccttggttacacatgccattgagccccaatttgtaaagccaggtggtggtctctctttgcattggtaggatacttggaccttgacgaaattggactttgatttaaactggctgattacacatgccataagctttatatcatggggccttaagtcttaagttataaggctttagctactcatttgttgagccctaaattaagaggaggtggggaggtcttttttttttcctatgtcgttaaaattttaaaacaacatttatagtatattcccaattggacaataaagtccaaaccgctgttgttaggatcttatgattctcgatttaaatcttacaattcaaactattttcaacaaatcaattcaaatcaatggggtgaatcttatatatagctgaatcttatgattcttggttcgaatcttacgattcttggttcgaatatacaaagtacatggattgtgactaaatcaaacaaattgatactgaataaggtgaatcattatgaatcgaccaaattttcacccgatgcaattaattatttataaagagtttgtttagctcttatattgtcaaaatttaagatcttattcattttcgctataaaaaagtgtatataaaatttaagatcttagttatttttcttccgctagctgttcttttccctcccccgcttctgtctttttctttttaattaatcaacttaatttttactatttaattatatgaccaaatttaaataagagtttcaatatatgtataatgaaaactattgtctacaatttcaaagttcataatttatagcaaaaaatatatgacatactacatattattctattatgaagaatatttataattagataaatgataattctatagttagcaaactatgttattataatatattttttacttgtttctagaacatatattattttttaattgatttttagaagtcttagcaaatcttatgattcaattcgattttgaattcataaaataaagattttgattcttgatttgaatctcgatttaacaactatggtcaaaacatttatgctttctcatgattatagccaaactatttaatatttgatgataacatttgatattgggtccgattagttatcatgtggggaggttatcatcttcttttctaatttgttgtaaaattgtaataatacgtatacgcattcttcatatgaatattagaagttatatttcatagcttgtgttttccagtgaatcagtgataaagattttactacactggaagtcttcatgtattttttgaattcatgaccgttagtgcggattgataaatttcttcagctgtagtccaatagtttgatgcttgtagattttgtcatgtgttcaataactgcatattagtgcataactagttgcttctcatctctctctttatctgtgtttatgtatgtaatattttgatgtgtctaagcaggtcgaggagctgtattctttggacctggattctct

SEQ ID NO: 6073 - DNA, 2598 bp, Manihot esculenta
  Intron number 7 from transcript cassava4.1_010769m (locus cassava4.1_010769m.g) derived from phytozome v7.0 (chr-ID scaffold09505; pos 122871 to 125468 reverse strand)
ggggtgtgtccttgccttttattttggttcaggtaaaattccaattttgctgcttgtattaaaggccatgaactgagtagtgataaaaatcttcagcttgcaacaaaatgattggtggttttagaaattacaactgagagtggctacttgtgtaaaactgcagaatcatagaagatagaactgtctcaaaatttccctcttaggaccctatttcagtggataacaagtaggcaagtgccatggacgttctaatacattacttccattcttggagataaaaggaaatgttagtcattataatactggagttgagtttgtcaatttgcaattgtttcttttgaaattgttagtgttatttggttgtactagttagcttgacctaatgattgctcttgcatggtaagatgttgaagcatttgagaataagataactaaataaatactcactttcattattttataaaaaaatggaatcattggacatatcacttaggaggcatgtgcttgtgtgcatcccactttatctaggagacttgaattttttctttccttgggtgctttaaaattctctaattagctttttcttctgcctagtgaatactgcactcgacattgatttataatcttcaattatatagacgagtttataatttcctaagctgttgagcatagttcttatattctaacagtccactgttatctgtgtgtgaacaatttacatttttttgcataatattcccaagctctcgtattgaacaatgcacctgaggtgtttatatgttaaatgaatttgacttacatttatgagttaatatgttggctgcaaatggttgaactgaagctttttaaaatatagctattcagtataattgtggcaaagctatctagatgaggcattttagatgcatgcattcattcccagaaagtagacacaggcaaacctactacaataatatgagaagtgtctggtacagtgaccaactagagagggatatagtaggatgaaaaaagtgaagagaggataaatttgaaatgttaaacagattagcataagaaatactgtgcaggacaccaaataggagatggagaggaaaactctaaattatgtttcgaaagttggtggataggtgagagagaagaatttatgtggctagctgattttaaatatttattgtttaattgagtcccaaagaaattataaaatgtttttttataattgatttttcccttcatggttgtattcttaatagtgtctctgcatttggttgctagggttgctgaattgtcatgaagaaaaccacaactcctacttgaaaagggctaaaccgcccatatatttttaactttccttgttatttaattggactggtgtttgtgttaactatttccaaccttttgcattggattgaggcataaaatgttcaatcctgtaacttgaactagtttattgatcagacctacttataataatgcatattataattcaaactaaataaacaattttattaccttgcatgggagaaccccctagaatttaattattactttttttataattaatttgattttattaagagtatgatattgataaaggtatagtacaactacctatatcttatgtacacctaatagcctattatattttattggagttatataaattatcaaatagtctaatgttgccctttatgatctagcgttattgtgtgtgcgcgcgcgcgcgggtacatgtgtgcgtgcgctcatgtgtgcatgtgtgtgagagagagtaggttaaaaaatgaaagctcttaatgcttgaagaaacaagatcataaaccaaataaaaagaattggaagaaagaaatgaatgtagatgtacaaatatgttgacatgtagacctaagttctgagtcttctgatgggtggggttgattttgaccattcagatctggaaaaggccagtgtttaattataaggatatagatgtacaaatatgttgacatatagacctaagttctgaatcttcttatgggtggggttgattttgacctgtcagatctggaaaaggccagtgtttaattataaggagtgcggatacaaattatagatgctactggaaagctgagtggatgcaatcaatcaaatagtttaagtattatggtgaagggaaaatccaaaaatatatttttctcctgtgctgaaaaaagaaaaatagatttgtgcaatttcatggtgtttgttaactttttcataaaatgtgctaatctttttggttctggaaattgtgaacaagatgtctggattcacagtaagacttgtattttatcaacatctcattttccttgcttgtacatccaccagtgcacgaatgctcctgaaatttgcatcttcatacaaatctgctttcttgtctaggctttcagctgttttaaccttatcataagattttgcagaaggattttctgttagtattatctttaaatgaaataatgaaaataagaccacagtattgtaaaattttcaccttccatgtcctaattatgccttgaatcttagatatgcttcttatgagtcacattttttcccttaccatttggaaactatagacacgccctc

SEQ ID NO: 6074 - DNA, 988 bp, Manihot esculenta
  Intron number 4 from transcript cassava4.1_022671m (locus cassava4.1_022671m.g) derived from phytozome v7.0 (chr-ID scaffold03079; pos 191798 to 192785)
aggtatactgaaataaacttgtcctttctctatcattcattgtcagttttatcataaaattacaaatccataaaattcaaattattttggtttagttgccttagagatgcccacattagaaagattaaagataagcaaacacacattccgaatttaagagcacagtggtaagaaaatatggtaaagaacaataatcatctcatctgtgatagcaaatgtatgaatcctctgaaagtgtgtgaagactaatgacacaaattggattcaataaatacagaaaagtcagaagattttgtgatattcagctgtttcccacgtcccacatctacgatgtatgaaaattcaaaattttatataataattagtacgaaactattaaataatttgggttaaccattttggacaagtgaaaaatgggtccaaaagttatttaagtcagtttgggccgaattgttttaattggggtattagagccatcccaagtcagaaaaattatgcgggtccggtggacctacgaggaaaaggttactcatgtgagacgagatagagccgctcgaggtactagcgaaccacaatacccgagggaggacgtcacagatttaataggggagaatgatattcagctaagtgggtctaaaagttatttgagtcagtttggcctggtctgttttaaatttggttactgatggttatagttgagttaaggtgcccatcatggtagttcataccctatttatggtcatgcttcccacataaataggctttgaagctgaaatcacttccacgaatactggcatgtgaaaatcacttgcttacaagattctgagcatagcagaatacaatataagtgccaaattgagcatacaggattgtaataatgttgatttatagaaagggtccatgttttctaactgtattttcctggtagatcatataaatctctgcctttataggtgagtggtctccttgaaaaggtggaagctacctt

SEQ ID NO: 6075 - DNA, 503 bp, Manihot esculenta
  Intron number 15 from transcript cassava4.1_000457m (locus cassava4.1_000457m.g) derived from phytozome v7.0 (chr-ID scaffold12004; pos 810555 to 811057 reverse strand)
gtgcactaccacttgacattgaatttgacttacaggtcagtcattcagactcctcggtacacatttttatttttcctaacaatggaaggtattgttgagcataagagccttggcttcaggatttggtggtaaattatttattccaagaaccttgctatgtagatttgcaaattttcctgttaggtatagggaggggagggtttaggaataagcaatttacatttattttctgggggtgctaatggggagcggagtattctgcaaaattctgcactttatcatgtgcggaaatgtcattagactaacttgtgggaaactgtagtcttgagatctacaaagagaattaacttccttattctgtttattttatagaattatttattttgtcctagtgatcttttcttgagagttggtcctgatagttttaattgcatgtttgttcatgtaaggtatgctaatatttaaggcatttgcaggacttatttgctgaattacgccctagc

SEQ ID NO: 6076 - DNA, 1927 bp, Manihot esculenta
  Intron number 7 from transcript cassava4.1_011171m (locus cassava4.1_011171m.g) derived from phytozome v7.0 (chr-ID scaffold09880; pos 33250 to 35176 reverse strand)
aagagtaagttttttccgctacttaaatagctatgcagacctatgtttaggtttgttgctgacttttacagaaaatatgtagactgtgatcttgctatagaattactcatgtttcttatttcagctgattcatctttatatatatatatatatatatgggagcatgtcatgactaaggagatatagagaaaaaatagcaaaataaattgtatcgttagaattaatgagatttcatgatacaattaaggggagaattatggaaagttattcctatttaatgtaggatttatatttccaaatagatagaataataaatgtctatatattcctaaatagagagattgggttattcatattatagttgaagaattcttaatttatggtaccatatcatatatgtcttggattttccatcgtaggtagggaagcatttgtattattagttatagaatccaattcaataaagatatagcccttgaaggttttgtatccatgaatgtaggttcttatagccaaaccatgcaagtgttcatgtgttattttcttctccctcttttattattctaactataatatggtataagagctttcaattttttagggcttgggtactgttcacgggcctaattcactaacagtgttcattgatactatttatgagactgttcacacctaagtttccgttttcgatgggtgtggtttgtgcaatccctaagttgttttgtattgatgtttccttagtgcaattctaaagaattgttttatattttggtactttgtgggagtgccttatgtccaagtatttttaatatgctcatgagttgttggttataagctgtagtgaggaaatttttggcttttaaatagaatctcattaagcaggagtgttagaattgataaagatttcatgctacaattaaagggagtattatgggaagttattcctatttaatgtagaatttatattcctaaatggatagaataataaatgcctatatattcttaaaattgtgagatttgatatatttctattatatttggagaatcctttaatttatgatgacatataatctttcattataatgagggaagcatttgtattattagttatagaatccaattcaataaagatgtagctctttcctttgtgtatgtggatataagttctcatagtcgaacctcataaatcttgttttgttattttcttctccctcttctattattctaactttaacatgtataaatagcatagcattgtattggacacatcatcaatccaataatataaaagatgtttctctgtaactctcttgcttctttccttttcttcccaatttcctttctcatctatttgctctccccactgctcccctttctttctttcttcttccttaattctggagtctgagaagaattgagaagcttgctaatgactaaatgttcaataggctacttgctttcttgtccaaggattttaggttgttcttaattaacacaagtcagtttaaattctacaataggcaaagaactagggatttcttaagtaattaacatgaagtgggcttagttcaaagccataatggttgtgttccacacatgcaatcacgcatgcatatcattctttttagtgtgtgtatgtacatgtgtgtgtgtgtatatatatatatatatatttatataattggtgatgcacacagaggtatttattagtaatgataatcagtttccaacttgtattgtttaattgctctgtatcatagtttatagattactagttgcatttcacttaaagttttgagttcgttcctaatctgatattgatagagaacattttctactcacccttctattgcttaaattgcttctcattaattgacttatctatggtgttctgatgattcagtcttcattggagcttggtgattat

SEQ ID NO: 6077 - DNA, 1755 bp, Manihot esculenta
  Intron number 38 from transcript cassava4.1_023461m (locus cassava4.1_023461m.g) derived from phytozome v7.0 (chr-ID scaffold05875; pos 655895 to 657649)
aagccagtgaaaacagcatctgtgatccatattgtgtaagattaattacttctaccatgttgattactacaatttcctttattttgtgaacttggtcttgggtgaaaaagcttacaaaagcgtactgtctttagtctcgatctctaggaattttgatagtgatattgttatcatcttgaaaaaattaaaatgctttgatattttgattgtcattaagtggtagagcttcactgtatatcatcatctccttccttgtctgggagataatttaagaagaaaatagaagttaattgcatgctaatatcttttcctcacaactgtgatctatattcttgcatagaactggaaggatagagagttaacttctgtggtaacctttctcatcatatgtatatgtatcatttgttgtacttaaatattttcttctgcttgctgcatataagaaaattgatcaactatataatgtcgttgtagtagtagttgtgcaagagaaaaactagggatttttttggcctatggaagtgtctatttcaaaagaagagtattttcttttcttttgtttattttattttattcttaactttcacaaagtctttaagaggtgaggaaatcagtaagtaatggctgatactcaatactaatgcattatcttgacaatcacttcagtggtgaccgccacagcttaccctttattttgtgtaaatttctttaacactgaactataaacaatatgcacaacttgtgggtgttgttgaaataatggttttaaataaaggttgtcatgttatgtaacagccgttatttataggtttttaactcctattacctttacacccttatttgaagggtgaaaaaattcgttccctaacagctgttattcattgttaattaacggtagcggtctgttacctaattttttttaaagctgtatggggtaacaactcatttagttttttctagattgggaaattttatgccgttattatctcacttttatcaaatttccatcaaaagttaactacttatctacaaatttctcacttctcttctcttaagttagatcatcaactatctttctaattcaacatgtttataccccaaaatatttgagttatttatccttttttttggttttcttttaacttattaatcaaagaaaataatgttggatgccaagtgctttttgtcaaattttaagtatgaagaattattctttactatttatattatctacattgttattttagctataaattaagtattcttaaatatgtctaacaatgatggacgtctttatttgattggttaatgcttattatttgattggttatttttgtaatacttatatctttaaatatctcttaatttcatgagttctgcaatatatattttttaaaatttgtgtagtaggcaacggtctttacaagcctgtttccattacttgtgaccgcgattgcgatttaaattcatggttgaaataaaactaaatattccagtgtgctccaagttttatctaataattgctaacaaaatgttggtgcaattttcattcttaaaaaatgtttgaagaaatgtggaaaatattcccaacttccatgaacaaaatattatggtgaaactaaccaatctttacctacacaattgtatggtttcagtcttgatggtatttgtgatggcaataagttatgatgtttttcgtttttcccattgcagttctgacttcacttttttatctttggagttcaggcaagattc

SEQ ID NO: 6078 - DNA, 779 bp, Manihot esculenta
  Intron number 18 from transcript cassava4.1_026802m (locus cassava4.1_026802m.g) derived from phytozome v7.0 (chr-ID scaffold07520; pos 2797963 to 2798741)
attcttaaacattttccagggtgttcactattaaggttgagtattgaattatttatttttttggtatctcttgttcttccgcaatttcattcttatgatttatacctttacccctaaaggtcatggaatggcctataagcaatcaaagaataactgctcatgcttttctggtccaatctaccaaggcttttgaagaaagctttttgggttgttagttggcaaggtgatgaataggtctaaaatagctatgctcatgagaaaatgctgtggtattctgactgttgtacttggattctttctgcaagaaaagtggtgcaacagcactttttggttcattttggaaggctacacaagaatagctgtattatcctcagatatctcctgatttgtctcgtcatttcatttactatttcctatgggtctggtctaaacatgcaattttcaagttcagaaaatatcacttccaacaaacatatttctttcctcatctatttaggataattatgggatgtatgttgtatgtggaacttttttttttgcacaaaaatgtatttttatagtgggttttctttggatacctatgtataatgcagttgtagtattttagtgagacactggaactgttggaacatctttattctcctttctatagttagttgtgcccttctaagtatcatcatccacggttgtcttattggtttcaactttgctatagctgaactgtctcatttgtgtttcctgggctttgttacaggcgtcatcctactccaaccaaggat

SEQ ID NO: 6079 - DNA, 3493 bp, Manihot esculenta
  Intron number 2 from transcript cassava4.1_019113m (locus cassava4.1_019113m.g) derived from phytozome v7.0 (chr-ID scaffold06916; pos 381417 to 384909)
gattgccgtgtaagttggagcttgcaaacccttttattctttttgctaactgttgaattcttcaaattctctttggaaatggtatttccagttaccgttcacagtatttccttcaacatcctcatttatttttttttctaaatatttttctcttccctaaacttattacttctggatttctctttgtagtatatgaatattgttttcctcgtcttttttttaaaaaaaagaaatagaccgtaggagcattgttggtgaaagatttgagataagtacaggggcctccaaatgtgtttttccatgcatcattgttttctgtgctttctaaaattttgtatggattgtaagactaaacttgttgaatatttgatgcttgctattgatattcttttgaagaaaattttgtatgcatcatcagatagcacaggctgttccattttttgtgacttttgaatcacaggtctaaataatggaaatagcctcctcgtggtaaaaggggaagatgcatatttatttttacacttataactgtgtgagatgtcattcattctgatggtagcaccaccctatttctagctataatgcaattatggtcttaggattcaatttgaagctttcgtgttaattttgttaatggagctagtggaataatctaaggagacaaacctctaggatgatgtgttcaatatgcaataagcttgaagaatttagttgatgttgccgaaaatgagctgaatatgatctgtcaatctgcaaaaagtaagagtgaggtgattgacgtttagagacagccactttgatgctcaaatcagtgagttttcaagaaagatgagtgtaaatagataacttgagcttagagatgagtgtatcagaatgtgtattttgaattctgtgtatattttgcttttatatcctaataagataaggttagttaatcactttgctgaaaatctgactagtaccgtttaatggataaaagattccgtgattgtaatgggaatctgttgtataacatcctttaacggtaactagatgttatcagacatgcagggcgagcttctactgatccgaacaccgatcatcctgtcgaccgggtctcctttctagtgggtgagacctgagtgaccaagagtcacagtttattaagattctaccacgtggtcccatcgcatgttgctaacgcataatacacttcaggcgattattgtgttatatcattagcttttttgggtctttattgttcacttataaagatcaataaatttgtgatatttaagcagcagcagtagtagacactttttctttgactctgaatccttagggctggacttctgccaaattaagcttagtttctgcatgtattagaaattcagaaagcacttaaacaatggccatggcatgtgactttacacgttgtgacttaataggggtcaagattctagttatttgagaaatagaggaataaaagcttcacatatgaatcctttgactagtattccattgtcctaaactttatttatgtacttaaacaggatgctttggtttttgattttcactcagaagatttccacttatttaatttctgatatatttgagatgaaaggagtaaatgaacatcaggaaagtagaattttccacaactctattatgattctttttatgattaatgcgttttttttaaaaaaaagtaaaaactcttttagccaaatggatgcttgcagttctttcattacaattcaatatctaatatctaatggatgattatctgtgacaaatagctagggcttgatggttgagcaacataaattactggtagaggactagggcattataaataaagttggttcatatgtttttggaaatttagttgagtggcttgcagggccttttctacacatatttgcttgcctttgggaattctcaaaagacatgactaatgagaatctccactttcatgatgtcaagggaaattaacctcttggaaattgagctacatgagaaataggtgggagatctacttgtcagtaggttcgttttccttctgcaacttactttctcaaccccttttcatgtagttcttcttgatgaggggaaaaagtttcagaaagaccctctactggcagattaaatgaagattttataattggattatggtgctttaagtgcagaaggtagtttagttggactcctcgtcaacacagattcacggcaatggactttgatctccaaattctttattctttgagtgcttgtgatgcttgaatcttcattggatcctcaaatatcttgcttaatttttgaatattccttgaggaaggaaagaattgatgaaagagagagaattaggggggcaagagaaggggagtggtgcagatttatcgagagggggaaatactagtttgccaaaggtagagaaatccatctttaaggagataaaagtgttgcagagggttcctgttgtgtgtatcagttttttgatagcagcataacaagggagcacatcgtccaaatcaaaatgattaagggacacatgctcaaatcaggttacatggtaatttagttaaaagttcactgctcaaatatgaatctgtagacagcccaataaaccatctcaaatttctagtaagaatataattggttcctagtatcctctctctttgatttactgcctttcctaattcctattgcagctgcattattgtaaattttcaagaacaattaaacttagaattttctttttctgagaaacagcctcccccccccccccccccctctcccctctctccagttggaaagttactatggagaatgtgtgtttctgtgctgtgcttgtatatagatagataggtaataggatcccatgattctttgttcccataacaaattgcatccttggtaacagttaggtggaccattgggaaaaatattattagacttcacccttataatggagcaagttcaaggtagatatcataggagagtccaacagggggtgttttccctacttggaggacaagtaagagaatgaaatggggtgatgtataatttcttgctttattgaaagatcttgctttctaaatctgaaaataagcgcagttgacaatgttcagagttatattgtcattgtcaatttgatgctaattttcatatttagagcagatgaattcgaattgttagatttgattggcttggttgatggctcaagcttggcttagagaaaagtttgacgttcaattattcatatgagctaaaatttcttgtctcctgtacaggaatatatcgaattgcttgtgtacaaaataaggacactgagattgcaccaaccaccaatacactcatttacatatgcaaaactttgtgtatggaaactttgtatgattgaatttctaaattttattatcttttattgcctctggtgaacccttgctaaaagttttttgctgctcattttgttgcagtttcctggttatatcctctgggattgtatacgttt

SEQ ID NO: 6080 - DNA, 1396 bp, Manihot esculenta
  Intron number 4 from transcript cassava4.1_000173m (locus cassava4.1_000173m.g) derived from phytozome v7.0 (chr-ID scaffold11998; pos 1054277 to 1055672 reverse strand)
ccaagaggtatggtcagttattgctggtgtattgccatctggaagtaaggatgttgagttggatctgcaatgaaagttttattattgcagtactaccagatgtagaccattttttaaaatgtggacatttattaatagaaaaaaaaacaaccatgcaagttttgttagtttttatattattaaagttttatgtaaaaatttattaaattaatgatttgtatcttaattatagttcttttaaagtagtaatctaattttgttctttatatatgatgcattgtatttgtaaatgctaaatgtcagcgtattttataggtccaagtggcgtagttttaaactttcagtagctgacgcatgtatgtgggtatgcttcagcagctgaaaattttttgtagctgcagcatatgcctgaatttgtgacagccatatggtcactgtttgatactatgcaaggttactttcaatagaataaaagttattggtactctcaaattcatatatttattcttgtttcatgtcaatgacaagatgccaaatgttgttactgtgagatatgaggtagatgagttctctcttatcatagaatgcactgaatcatgcgatctcatttcatttgcttcgcatgtggctgtatttatgtcccattgagtaatattatctttatgtcatatgtgggaataggttaggaattatggtcaaaatttatagaaagtcaactaggaggtagttttttttttttttgggggggggttgttaggatagttgttagttatagaagcagttgaatattccagctggaatatttgcataatctgatgtattaaagggctgataagagttcgctgtgatttattccaaatctaattaatagggatacctcaagtctgaaatcacgtgttgtgtgattgataatgactcttttctgttttttatctttctccaattctttctcttaattcttcctaattcctgctgtaacagaatagttagggttcctaccataacactttgctttggtcgcaaatttccatgatttatgttgatttgtaatgtactcttaaactgtttttgctgagtgggtgaatccattaagttatatagtgtagttacaaaagaaaagggaaagcaaatgtacctataaaaattctgataaaagaccctgggatacacatgtttaattattttcttagttatcattccatgtattactaaaacaaaatttattcatgtggttaatgaaataattttcagatatggttagcagtggcctatctaaatcatttcctttgagattggatacttttatttgattattattttttaatttacataggcacataggcatactttttaaatctacattttcttgttctctcagttatacaagagactgcag

SEQ ID NO: 6081 - DNA, 3021 bp, Manihot esculenta
  Intron number 3 from transcript cassava4.1_026177m (locus cassava4.1_026177m.g) derived from phytozome v7.0 (chr-ID scaffold07520; pos 2325306 to 2328326)
ctggactcatcatccaatcaagtatttacttttcctatttgaactttgaagcctattcttaatcaagtaatttttctgtggttatacttcagtttaaagccaatcagtttctgttttttgcgtatattttgttttcccgcaaaattgtaagaaaacccttggctgttataatgggttaagtttacaagcttattcatattcatacttggtcaaattgtttagacggagcttctttattgctttcatgtcctgcaagtaaatgtccatttttagctttgaattcaagctgaatctcatgtattgtttacttgttggcaagaattgttgctctcacatttgcaatggatttcttgtaatctcatgaaaaaaatattattgtaacagttgatttcagaacaataatttggtttttaagtatttcatggagtataggcagaacgttggaattcttagagccaatccaagtagtttacttgagtatttctgattgtattacaatcttctttgtgtagaataaaaatgtggttcagattacatacttggtagtttgttgactaagttctcccatcattttctatagataactggagaccagggaacttgaaattttatagctttctttaaggaaggactttaatgtttctttttgctttaagaatggaaatgttcccaatatgggcctaaatcagagaaatagttgctggaaaaattccaatcaaaattacggttttgactggaaaataaaatgaagtaaatgaagtccaggatgcaatgctctttaagcaaaagggttatgctgctgctatgagcagcagttgtgctgtgcatgggaaggttgttttgatgctatccatcttctatataacttccatcggcccagagagaaactgctttaaaactatcctattcctattatgagctaggtttctttggcagcttcaactccaaatttactgatctattatacttaattttggttctgattacagaacttgcttatccaaattgatatagatagacataggatgggaatgttcccacttttgggggctagaatagagaaatagttactggaaaatttttaatcaaaattaaggtttcaacaggcaaataaaacaaattaaatgaagaccaggatctaatgctcttgaagcagaagggttgccgctgcagtgaacagcagttctgctgtgtgcatggtaaggttgttttgaggcaattcatcttctttataacttccatagatccagagaaactgtttttaaaactaaatgatttaagttagtcagtcttctgggatcacctattacgggctaggtctctttgcaattttaataccaaaattactgatgtgtgaaacttaatttggtctgggtatagaagttgcttatccaagttgatatacttaggatgggcattcctatttttgggcctagaatcagaaaaagttgctggaagttttttaactaaaattaaggcctaaacaggcaaataaagtgaattaaatgaagaccaggatctaattctctttttgcagaaagcttatgacactgctgtgaacagcagttgttttgtagatgtttaagttgtttgagcctattcatcttctctataacttccctacttccagagaaattgctttgtgactaagattttaagttttctaagtctgatgggatcctattcctgttatgggctaggtttctatgcaacttcataccaaaaagtactaatgcttgaaacttaattttggttctggttataaaagttgtttatgccaattgatgtatacctatttagagctgaacttggacctatttcataggctagatcacaaagtgcctatttggcattgtagtttgagggccaaaacagattttcaagactactgcttcttttaatataatggtgaagtaacttgttagccgacctagcctccacaagatccaactacaagtgacaactgatgctgtcacgtgttgctgagatttcagtgttattgctaggtttctgttgtcattttcttaagttgttaattgttggcccattttcaaaagtcatattcttagttaaatcatgttcatagtgggtaatccataatgtggataatgcaagttagttttttgcttttctttagtggtaggaggatgatacacggtgttgcttgctggttccctgtatttaagggatggttatgtctcccacttgtatttgagtgcagcaatacaataaaagaattatgagaaagtttttcaaagttttttagtacttcaactcgagattttcatgttctctctagggagtctgttctattgcaaccataagttgcaaaaagaaaatttcatctccaagaaactccaatgatagacccataggatggatccatttctaaggatcctaacaataactattctctgccatcgatccagcaggaagtgagccagctagcctatgaactctgttttctcaactgcattctgtggcatggaagcaccatctcagatgcttttgaaaaaatagtttgaaaaaagttgtttcgttattttagcgtttatatgactgaaacttgtcaatcttaattttaaagcattttttaatatcctctcactaatatatttaaaaaagtgttttttttcaatagcaattcctacagcatccaaactttgacctgtcctacactaagaattcaagtacagcccatgtcaacttcagtgaaattctggatatgctttatccttgagcttggtttttcctggagctgcttatagcctatttattgtacttaaacaatgcacaatgaaactttgctcttaaatacttcggttcatcataatcatgtgcagaagctttaagggagatactaaggctgatatcattaccttggaaacttaagcaccttaatgatatccaattttttttctgcaaaaatgaatgataatctttaattgattaaaaaaattgatttatctgcttcacatttctgttgtgtgttaatgtatacacaggattttgaggtttgta

SEQ ID NO: 6082 - DNA, 1338 bp, Manihot esculenta
  Intron number 4 from transcript cassava4.1_000955m (locus cassava4.1_000955m.g) derived from phytozome v7.0 (chr-ID scaffold07859; pos 262675 to 264012 reverse strand)
acagaaccgttgaacaacaagtccttgaagtaagacttgagacttctctttttcctatgctttgctccattgtggtaccatcctcctctcattctagagggagatacagctttgtttcaatgccaatacccagttggaattactctacgtcagtgtaattttgtgcttaagacagttgtgcgcatagttgtcaaattgagattcgaatcaagatcttcatttcatgaatcgagaaccaagaattgaattgaattgtaagattcgctaggacttctaaaaatcagttaaaaataatatatgttctaaaaataagtaaaaagaatatcaaaatgacatattttgataaatatagaattatcatttatctaattagaaatattctttataatagaacaatatgtatgtattatgttatatagttttttgttataaattatgaactttggaattatagacgatagttatcattatacatatattgaaactctcatttaaatttgatcagataattacatagtaaaaatatagcatattagaatattataaatatgaatcataacttgacaactttaattagttaagtaaattaactaaaaaggaaaaagaaaaggatataagagggagataaaagaattgttggtggaagaaaaatagctaagaaaagattttatatacacttttttatagcaaaaaatgtgtaagatcttaaattttgaaaataggagctaacactctttataaataattaattggattgggtgaaaattcggtcgattcatattgattcaccttattcgctatcaatttttttctttttatttagttacaaatcgtgcaccctatagattttaatcgctagtatgttgaatcaaatcgagaaccgtaagattcgaatcaagaattgtaagatttagatacatttaaaattcaccctatagattcaaattgatttattggaaaatagattcaaatcgagaatcataagattctaacaatagtggttttgcatatatgcgtgtagttaggagccatattaattcaacttaaattatgtcttgtaaaaaaaaaaaaattcttttgttgcgagagaagcagattttacatttttacttaaaaatttgtttaaaggttatgggttgggtccataaggattgttgaagaatcaagataacttgattgtttgagtttccttttgtagcttcttatgaggaaaatggctaaattcatgttttatcagtacattcttgaaatatgttgtgtgtatgtctttctattgaagtgttgctgattcatagttttgcataattcagtcaaatccactgttggaggcatttggta

SEQ ID NO: 6083 - DNA, 1817 bp, Manihot esculenta
  Intron number 10 from transcript cassava4.1_002944m (locus cassava4.1_002944m.g) derived from phytozome v7.0 (chr-ID scaffold03651; pos 277677 to 279493 reverse strand)
caattcccagggtcacatccagtatctctaaacaggtcctatctgcagttccttttatgataatttgtacaccccttccctgtcttttctctctctagctgtctattaccttagcaaaaccatggctctttaatgttaatttttgtgtgtaattgacatgctttgttattatgtactagattgtggtttttggaatgcaatggcatcgcctttctgtctgtaacattgatttttgcatgcaggaatttataagaaaatataattcctttgtagtttgggatggcaaatagttatgttttgttgttaaatctatcaggtataagtttgtaactttgtttcttgtggtggttgcaaatgttgatgctgatggtggacataggagttaaaacactcgaggggaaaagttaccctgtcatgaacaacaaatgaatttgaagtgagggctaaattgaagcagaggacataaacgttgagctttcatctgaatgcatattgtgattttcactgtgtttggaatggttgtaaaatgggagaaagaaaatcaaggatgaaaagttttgtgaagatttcacaattctcttttctttaggggaggggaaaaggaggagagaacattctcccttggtttgggatggaaatggattgcaagtgggttcaattactcatttgtccataatacctacctgaaaaacagtataggatattgttgtaattttaccattatgggctttttgtatattccttctctgcaatttgaaacaagatgagtggcatgcaaaatcgttagttctttttgcctaattatcattgagaagcaccaagattattttttatcatcttttaaagtaaaaatagataaataatctataggaaatgggcagaaaactcaggtatttgctccatttatcaagtttcctcgagctcgatgagcctgagataacctatgatattcactttgagaagttgggagaaagaaggcgggtgaaggcacataaaaatgggaaaaatatgattagatatcgtgtccctagatataggttgctgtaggcaaaaatcatggcagtttcatctgttttgataaaccttttctttatgaaacgatgtgagacattgtttcagatttctctttaatttttcctgagataaggcacatgggaacaagtagtagaatggagatttgtggtaaaaccagaatggatgaatgaggatcaaccctggacagacatgtagcagcatggagtaaatattgccaaaatcatggttcttttcttgacctaattcaagcaatgttttaagtggcaatagggtgtgtgcatatgtattttcgcattccacggctaaaggatgggatcagtggattctttctctctctctttctctctctctctctctgtggtagtggtgggagcatggtgtggtgttggagagggatgccatattgactggagcaaggtgaaacagtccctccctccaaaaacctattctgcgttagttaatgaggaatagatatatcgtgactgcaaggaggattgtccttcagctgtggtgcattgcaagtttgaattaatagcagaactgatgcaaaaaagaaaagtgatgcatctagttccactttttgcacaactgaaaaagttatttgattttattaatcagagacatgctttttgcttattttaatttatgttagagcagtcatggaactctggccaatttttatttagtttttcttttggtctcgttttatggaagtttaatttttggaattgcccatttgtggtgcagggacaatcttcagctgttaaggcagcggtattatt

SEQ ID NO: 6084 - DNA, 1749 bp, Manihot esculenta
  Intron number 1 from transcript cassava4.1_013346m (locus cassava4.1_013346m.g) derived from phytozome v7.0 (chr-ID scaffold04213; pos 24931 to 26679 reverse strand)
agatcaaacgcaaagtagagtaaaatcttgggattcatgaatttctattcattcatttgaaatttgaaatataatgccattgatgctattgtatttgattttagtttcttgtacagctttttaatttgatctttgctgaatgattaggacttagaatgttgtaacccttaattccttaatgtcattttagttgatctggatggaaagagatccacttatacaaaattcaaatggagtgtatatagaatctttgcatacttaaaaatctaaaaacaaaaaaaaagcttttattttttggaaagtttaatctaaaatgggagggaatagtctgcaaaaggattagaggaagaccctgtacgcgcgtacaagtcacctctttagtggtttgctggacctatgtattcttcaataccagagaatatgggtttcctagttcaaatgatacttttacttctggttgattcttgctagttttttggttttgcatcaaattagtgttgtgtactcatgttcaaattctgggaattgccttcatcttgtgccaccactataattttcttctttaacaaatatatgtcttacatgtatgaacaaatagcaagagataaaacagttgttctctttctgctattcaacttgatttactttgaaccagaaccattgcttggtgttcaaaccttgtcagaacctgcagactgattttttcgatttttgtaaaactacaaaaattgcatttgtaaattaaggccaatatttattcttgatagtacagattaatcaaacatttaaaagttgatgtttgcctttaacatccaaactgtcatgtatgcttgttcctaattttcactcttggcctgttgtattcaccaaacattcttaaattgagaccaacacatattccttgagcatacatttaaattattgaccaagcatgtagaaattgatgattgggaaaataactctttagttgtgcctttatacaacctatcttatatgccattgcctgttcaaattttcaatataatgcttgaatgttcacattcctttgtgaaatatttggattttcaatcaaggaatttggtttcattcgatgtctgaatgatttaagtttcacaatcttgttttcattttattagagatcataatcttctgctattctgatcctaatcgtggctttgttgcatcataattgttcttgaccaatattttccaataaataattggtatatgcccaatcttaatatcttatacatacctgaatcggctcttacaaatgttatccttctaggcttagactagtttctttttctttttctttctttttttcaaagtttcaaacagattaattaagatttaagatatcatatcaaaagcacttttttctttccctaaaagagtaatatttgtattgataaccctctatccaaacgactcataacactagcaaatttattagtcagttactattatcgtttagatcgtcttgctatttggcttataattaggtagtcatttggagtatgaactaattttccttccttcaaaatccacatggaaattgaacaaatattggatctagcaagtttcttatttgaaagtgaaataatcctttttggaaaactaaggaacaatttgataacctgaattttaatacttttgagagtagtcacgatttttctatttatgacattttagttttttgatatgtttgtagggaggagacttgagatactgtcggaagtgttctcg

SEQ ID NO: 6085 - DNA, 649 bp, Manihot esculenta
  Intron number 2 from transcript cassava4.1_023967m (locus cassava4.1_023967m.g) derived from phytozome v7.0 (chr-ID scaffold00802; pos 58194 to 58842)
aggtaactcctttttgccctaaaaactgcttaacctgccatccttgtattagaattattttttagattgtttggatttactcgtaatgaagcctgtgcatttacctggctttaaggttgtgtttgagttatttatgtaataacttgtgatgcttgattgcttttctttatattcctccttttttattttttttttaataagttaatctactaatatccattcacgcagcatattctctgaaatgatattttaactattcactgtctacacaagttctgatatgtgtgttttaattttgaatgatgacgtagtcaaatcatatcaaaattaaatgattgtattgcaatactcaaccttttgagtcctgtcattcgtacaccaattttttatatgaggttaacatgcagcacaatgttgttggtgcatttatgcaatgtggctgttaccactcttctctgacaaattaatgggaaagggtgtggattcctgggtgatgcacaaatcactggcaccataccatgttatagctatgaaagattttgtgtatgagtttatattactattgtaggatctaggactataatattttctcccttttctttccatttcctttcatgtgttaataaggcattcatgtaggtcctatcag

SEQ ID NO: 6086 - DNA, 4335 bp, Manihot esculenta
  Intron number 7 from transcript cassava4.1_006875m (locus cassava4.1_006875m.g) derived from phytozome v7.0 (chr-ID scaffold06446; pos 189530 to 193864)
ttaacccgaaccgtggagatatcaagcttggtcaggtattcacttttttgctgcttcactttttctaaagcaggccacattctcttttggatcactaaaatctgtagcaagcattcttttttgtgtatatgctacacacgcatgcaggtttgtgccttttctcgttttacgtttttatggattaatttggggacaattttatgtaaaggaggctcttagtgacttaaatgatgctaaaatttctttcctatcaataataatgtttttaattgttgaccaacataaaaggttcctaattaggaggattgagatctttgggatcttaactaagtttgattgtagtgattttattcttatcgtaaatatttctaatttaggttgattgtgtgtataaatattgaaatagaataaaaaaatctttgtggtgtcagagcgatgttgagcccctcataaatatgtcacgctccagtatagttctgggcacgagggatgtgttggatcccacgtcggtttgagataagggtaatgaacctcttataagggtcttaggcactcattcccttgaattagcttttggggtgagttaagtctgactcaaatttaatatggtatcaaaatcttgccactttaattggtataggtttcaaatctaatataaaaagttaggattaattaataagtcaagtttctaggcgactatatgaagggagttgtttcacaccacctgtttcgaaggaaagcccatcacatttctagcggatccctggcaacgtgaccccgctccaagcatgcacgtgtcctcatgcgctgccacagcttttgtgtctccttccacgcgccagcgcgtgagccttcctccgacttccttttccatcagcgctcctttccggcatgtcacgactatgattggtcctgttccgtgaccgtattctcctttgggtttttcaaggtgttttaacagtaacttaatcgtttttgcctctgtgttgctagccctttttcctttaaaatgtaaggcactaacagaggtgatgtacgtgtttttgatactgcttcatggattattgattatgatacaaatagacacatgatgggttcctctaacaacttccttaattactttccatttctacaaaaggacatagtcagaatagccgatagctcttttattctcatctctggaaccagatcgattgtttgttcttccaatattaagctatcctctgttctccatgttcttcattttcctgttaatcttttatctgtcagtgtttttaccaaatcacttaactgtaaaattgagttttttttttctaatcattgtgttattctggacctttaaactaggaagaggattgaatatggtagactgtcgtttttgaaaccagatcgattatttgttcttccaatattaagctatcctctattctccatgttattcattttcctgttaatcttttatctgtcagtgttttttatcaaatcacttaactataaaattgagttttttttttttttaattattgtgttattcaggactttaaactaggaagaggattgaatatggtagattgcataatagcttatatatatcaggagagaatctgggtttgaattcacttcaggctctttttggaaaaaatcaggatgttaactaggaaatcatacagtggcatcgatggttaggacacccatccttctttgttttagagaaattttattttttaaggctcaatatggttctttagtttgtgatacttgtgagtatgataagcatacaagaatctcttctttctagtaacaataggagtacgatcccttttgtgattatctattttgacgtatccattctgacgtttggagacttactcaaatggtcttactatctggtaatcgttggtttgttacttttattgattgttgcactcgtacgacttgggtttatttgataaaagcaaagaatgatgtgttttcttgctttcaatcttttcacaaaatggtttgtacttaatttgagactaagataaaagttttaagaactgataatggcacaaagtacatggatggacgtttttttgcttatctgattacactagtgttcaaaatggtgttactaaagtaaaaaataggcacctgttagtagtagtttgatttctccttttttactgtggagctttcaaaaacctattaaaaaaatgcagttttagctgtagtttatctcattaatagaatgtctatcaaagctcttacctttaaaagccctttagaggtactataatggaaacatgcttatattgttccaccaaagatatttggatgcatgtgttttattcatactaggataggtggaaagctcgatccgagagctcttcaatgtgtgtttattgggtactttcctatacagaagggttacaagtgttaccgccttgcatctcgaaaataccttgtagtatggatgttatatttagagagactgaaccttatttcagtactactccacctctgggagaataatgagagagaagaggtaattctagaggagactactataaggggagactaatggtgatcaggaagagataataattgggcatttggataaaccatatttaaagagatactcaagaaaagacaatagaagcagaaacaaccattgtgcagtctactcagtgtcgtgaatcttcttcttttcatctggtgagtcatctctaaactttgagctcattgatgatttagaggttgataggccaaactagttgccaagggatacactcaaacctatggagtgaatgactaggagatatttgctcctgttgccaaaatgaactcaatcagagtattgctattttgcgctgccaatcttgactgggacctacaacaatttgatgcgaaaaatgcaatggagacttggaggaagaagtatatatgaaaactcctcatggatttgctgatgaaaaaatacaaagatgtgcaggttaaagcagactttgtatgagttgaagcagtcacccaaagcttggtttgatcaattcagcacgagttatgatttcctttagttattaatagagcaatactgaccatactttatttatcagatatcacaaaggtaaaatcactcttctcatagtttatgttgatgatgacatagtaatgataggggatgtcactgaagagatgacttggctgaagaagcttttgattcataagtttgaaattaatgatttaggaaaatttcaatatttcctgaaaatcgaggttgtcagatcaaagaagtgaatctttatttttcagagaaaatacattctgtatattttagaataaactggtatgttacctacaaaccaacagaaactcctattgagagcaatcacaaactacaagcagggattggtgaatcagtggatattggcagatattagaggttgataggtagattgatttatttttcgcatactcgaccagacatagcatatgcagtcagcttagtcagtcagtttatacatgatccccgtaaatctcatatgcaagctgttttttgcattttgcgttacttgaagtatgctccttaaaaaggtctcgtattctctaaacactgtcatctcctcatacacgcattcacaggtacacattgggctagatcccttgatgataggagatcgactagtgattgcacacttgtaggaggaaaacttgtcacttggagaagcaaaaatcaaagtgttgttgtttgatcaagtgctgaggtgaagtatagagcaatgacactacaaggtgtttgtgaactcctatggatgcagagattgttggaggaattgaaactgatggagagggacaaactcctcttgtactgtgacaacaaagctgctatcgctcacaatccagttcaacatgaccgaacaaagcgtatagagattgaccgacacttttattaaagagaaattaataaatagtgtcttgaaattagattatgcaacttccgatgaacagctagatgatgtgtttatcaaagggctcagcattaagatctatcataccttagtttgcaagttggacacgtgtgatatctatgcggggagtattatcaacataaaaagttcctaatcaggaggattgagatctttgggatcctaattaggcttgattataggtttttattcttattgtaaatatttctaatttaggttaattctttatatataaatactcaaattttgaaaatatcattttaattggaataaaatcaaaaaattttcccaaaaatcttcactaatatcaccaatgcattaatgttctaatgtaggttcggctatttcttgagagagcttacaagttatc

SEQ ID NO: 6087 - DNA, 996 bp, Manihot esculenta
  Intron number 1 from transcript cassava4.1_013122m (locus cassava4.1_013122m.g) derived from phytozome v7.0 (chr-ID scaffold10305; pos 365259 to 366254)
ctttatcgttggaatcgttgctctcagcatcactggtatgtccatgtgtttccgtgcattttactttccttagggttctcggaaacttatgattttcatgggtttccattgagtgtgagattgtgagaattgctgaaagtagccagtctttgtacatgaaatttttttgagttatttggtctattaattggatatcatatactgcaatatgagtacttcccatggttgatgactggaagaatcaattatcaactcaggatacttttgttagggaagagagagtaagagcgtgttggggaatgtaattagaactcagatttgtaggattttttcttctagttaggtatgcgtgttatgaagtagaataatttgggtagtgagaaaacaaaatccaaagaatgggcatcaaatatactgacttccatttttcaaaaataatgagacaatttatttgggtttttagtttccacttctgttgtcatgttgtctccgtttggcataatttattttgtaaaacaaaaatttcatgaaattcttgtaaaatcatatgcgatttcatttcctttgaaatgaaaattttataagttaaaatgaaaatgaaaccttccatttcagataaaaaatgtgaaagaactgaatcaacttcttgtaaatttttttattccaaataagaagaatattaacattcagtttgctaatacagaaactacgtgcttaattctgaaaattcggaaacaatatggttgacaccacctaacttggttgaattttggcgactgcttctaagacatcttcttttgtaatgcagtcctgattgtataatgcatatggaaattcattccactctcatgtaattattgctatctttgtaaccacagatcgagtggatttcttccattatctgttcaaaagctgagcctgaaaaggttgtgtcttgattttgttttgcataaatggttgctcatatgctcaagtattgccttttgtagctgataa

SEQ ID NO: 6088 - DNA, 1007 bp, Manihot esculenta
  Intron number 11 from transcript cassava4.1_002986m (locus cassava4.1_002986m.g) derived from phytozome v7.0 (chr-ID scaffold05214; pos 986906 to 987912)
tgccagtaagtattgtgtttgcaaaagcaaatcggatgggcgcccctttttcatttataaaaaaattttctatgttctatgctgtagccctagaagactgaagcatgcattcttggagttcctgttctgttatatctagtatttcttagaattatgatggtgaatgtgctaaactgtatataacaaaattgaatctagttaataaaccacaaatggccttgttgagaacttgtaaactagctatagaggtggcaatcatttcaagataggcaggtttaggtgccgtctcctttttaggaataggaatttatcgcaggtcttttttgtagttatctttttctatttgtttcaacttctgtattaattgatacaaaactgaatggaaaatttttgtacttggatactttccttgcactgctggcaaatttaatctttgttggatgaatcatgtggaatatgtgcatgtaattggaaacaagatggaaatttttggattttatttagctagtgtatatgttcagacgcaaagatggccggatattttcaatgtatcacttcccttcatgttctaagaagtgctaatcaccttgcccatgcattagctaaactgggtcttaaaagtttgggtggaggatggtcctagtgctttagtcagcctggttcaatctgatgtacaagatttgtctatttaataatactattctgatgttttacttcttaaaagaaaaggattgtgcatttgctgtcttagtctggtgttgtattcttaattcctatttcatgctttcagaaaactcttctccattctcctccctctgcatagcaccaagaaaacgagaaaaaaaaaacaaaacttctccaccttttgatataatggttaatcctgagattgattagcattgattacattatttttatggctcaaatactatacttcttaataactcttgttgagttgttattttctttgtgatcctgacaggttcgtaccttcagaggccacacaa

SEQ ID NO: 6089 - DNA, 1413 bp, Manihot esculenta
  Intron number 1 from transcript cassava4.1_013229m (locus cassava4.1_013229m.g) derived from phytozome v7.0 (chr-ID scaffold01551; pos 545548 to 546960)
ctgagctcattgcttctttgaagctcaaattgctggttagtctcgtagttttgtgttttagtttggttatttacttgtattcgactgcttttggctttcaatttgttttccccagttaatttcttcctttaatttatggttcagatgcttaatgtactatttgctctggttttaggggcaatttaacatcggagagtgtttggtagtatttttgttcatgtacttactcctctttgaagtgcttcccatgctgggtagtcatggtgtgtgtcatgctttgatttggtttgctgttgcttagttgctcggttcagtaggtagcatatcaatattgtcattgctttcgatcattgattatggctccctttcggaaaatgactcatatttagaaaagaaattgtttttcatgaaaaacataaaaaacttattttccatgatttaatttttatttaaaaaataaaatatattaacaaatttataagcaaagcacctaataaaattttcaaagtgcaaaacatgacttgattttttcttttgataggaaaatattttccattgattgagtgcctcaaacaccagaatttgtaaaatatattgtccagaaaatattttctcttaaacaaacggagtataaacctcgtgttttttgcgcataaagttgattagaatatgcaataagtggttcttaccgcataaataaaaggaacatttgatttgaataatatgctatgtcacatgatactatgatagagttggttaagcttataacgttcatattctttgtaattgaaaacttctgtattccattctttcaaggatgttggaaaaataaggcttcacttgcagactggaagattttatcgcatgtgtcttgaatgattatggtgctatctaactagagattctaaacaaagaaatcaatgctgctttgtgctatcattatgtgaaagacaaaagcaggcatccctagggaatgtccaaaccttcctaaattatttcatagtgtgccaattgaccaaaacctaaatctttatgatttcagaagatattttcaaaactttctttccatacaaaacaaacatggagattcgagaaaacaattgatttaaaatgattttggaattgttcatctggtttttcaaatcctgttgcatattttatttatttatgtattcagagttccatatatttttctatgctcttaagttttgactgaaatctttcagcctaaaaactatggacggtttcaaagctgatccataacaagcatgagaatgcctatgttgacatataaaactccccttctgttttatttgagtggttcttaattgttatggcacttggaccttccttgacatatatggatggtcaattgcagagtattgtttccggtctgaacaggggccttgctgc

SEQ ID NO: 6090 - DNA, 2342 bp, Manihot esculenta
  Intron number 3 from transcript cassava4.1_022337m (locus cassava4.1_022337m.g) derived from phytozome v7.0 (chr-ID scaffold03542; pos 468962 to 471303)
cgggagtctggcactttcagtggaaatcttggcgagtatgttttccaaatagtgaaagaattagaaatatgagatttaggagtcagactttctgttcaactttttgcaatttagcgtgggccaagagatatttatttgctgctattcctggtagtgggttgggttgatgcatgtgatagaaattgacatgctaacttgcatttcttgttgataattctttatgttgtatttatatgacttgattcaaccaaagctgaacgaaaatttgatactagttatacacacttgtatgtttatgttgtggcatggtggataaattttagggaaaaagataatttcttattttccattgttaggtaggattgttgtgcgttcagtctttgtttcaatggtaaaattagttcactttcacccaattgctagggtttaccctcttgtataaatagggttgctaggagacgaatcaatagttttcctgcattttgaattgaattttgttcgagagatttttttaaaccctaattatcttttattttgttccagtcacagtaaattctactctaaccctagttgttgagttccaattttacttaacatttccactatctgacatctcaagcttagatcttagattttgttttatttgtacttgattagcaagtaattggtataaattgacttttttaggaccagttatatttaacgttccttttttttttgatgcaagaacatatctattcttgatttattgaaggagaaattcagattgctacaagtgaaaattgatggtgattttttttcaaaagccttttgcgtcaactgtttaaccaaaatgcaactttttagcattgaataacaatcagcaaaaacataaaatagaattaataccaaaggcctttttatatcctttagtggctagttcacatatattggttgaattttagtgaattttgatggaattttataaataattgctttatttcatattatttaacataatagccatgggcctgtgaccattacaatctgctacaactgtgcttcttggacatgcaatcattgttttaagtaaaggacataacagccattatttataggttttcacctctctttaccttgatatctattatttaaaggcataaagaagttgttcttgtagcagtcgttactttggttatctaatggtaacgacaagtatttattgttaagtaacagaaatgaaatgttaccacattttttttggtcgtataatattcctgattattattttttttgtctttaactaatgataacaatatgtatttattgtatactattcgtcatgttttttgtttatagtgtttttagctgttgtctctgactttgtccctcaaatttccatctaaacttctgcaatttccacaaaattttcacttcttctctatggagctaagatcatatctacgatctttataattctacacatttttttcttgcagaacgtaagttatctattttgttgctaggttatttgttttcttatggtatttaagcattaatttgcccgttataggcttgttaaatctatgcagatcaactttaatttgattaattattaatattatgatgtctaagaatgatgggtttcatgtaagtatctgatgtatttatgcttactaattagttgtatatcttagtttacttgtatcttcaaatttcaaatatattaattgaaaaaaaaatttgcatagaaatgggtcattactgctgttataggcttgtttactgagaatgcaattgccttttcttttattgcagcattcaccctgttttaaagctctgcttagtttaactgtttataatgattttaagttttctttaggaagttgcgtcccagttatgatacagtttaatggctaaatgtgtttcctacagatctcaaattaattaaaaatttcaattatgataattaacattcatgtcttgaatgaagttggctttaactagttgaaaagtgtgtctgtagtagtattttgtttttagaggctgctcttcaagtttttcagtttttcagtggtaagttctctgaaggaagaatgacatgcatatgcatggttaaccaatgtttatggagcactaagttgattttatatcctgatttatgtagaatccgcactattttagagtatctggcattctttggatctggttgaagctgctaacttattgattttttgttgcatttctgaagccatgttgttatatatgtcttcttctgtccttttgttcagggttgatactttacttgctttttaattttcaatctaggttggagcgaaaaacagtgaagaggaaaagagttt

SEQ ID NO: 6091 - DNA, 2112 bp, Manihot esculenta
  Intron number 2 from transcript cassava4.1_017016m (locus cassava4.1_017016m.g) derived from phytozome v7.0 (chr-ID scaffold04209; pos 689340 to 691451 reverse strand)
gccaagtaaggaccattcaattaaaactaaaattaaaaagctaaaccaaaaaaggggacagagcagataagtttgatttgaaaaattctatttccctttaggacatcttcatctggtgttgttagctttggttgggttgtctgttttcttatttgcattattttgtggctcttttcattactatctacttgtttgctctgtttcttgttagtagcttggcttgttagtttctctcatttattgttttctcattttatatctacctttggtattatgaacttagaacaattgggatggtcagatgtttctgcttatgaatgactaattttgttaatattctaaatttttgtcacttctagtttcttatggtagcataactttattatgtgctctattgtcgagcatgtgaattctttatatattcattactagaaataattgtcttatatggaaataggatcaatactttgtttgttaatctagctgctcatgcttatttgctttccccaccccaaccagaagaccctcttcccccggacctacatatctggaaacatttataaatttattcttccatttctaattatacataaatataagtcttttcttgcttcagtttttgacaaggtaagcacaggtggtctgaagcctcttagatttctggaactcttaaattttatttacttggttattttagtttttttttgtaatgttacttggtctcgatgaactgaatgtctgacacttgagtagaatgcagggtagtcttttctttagattcttggatgttgttgctctaggatattgattgttactagtggccacgagaaatgcatattttaccctaatgacactcctaggacctgaactagaagtttccctatgagttgaaaatcagtatattcagttaggttggaagaaaggggtgagggaaaaaataaggctgaatggtgaattactatcctctccttttttagattcctttccttttctattttatagtaaaatcccttgccgacacacagaaatatataccccaacataagaaaattcattatataaaggataggaagcatgatttgccagtcagttgtggcggattccctcttgatgtcttgtgcaagtgggaactttatacgagcaactttatttggttcttgctttcctttatcctttagtatcttattcctagtggaaaaatctcgcgtgttttgcatggattaaatatgattactgacgcgttgtgagattttagaatgctactgctgggtgggtaggtttttatttggattaatctttccatttcactcctgtagttattgtgattttaaattttttgcactggtgcagaagtttcaaggtaagctaaatttagttcaaaaattacgaaagttaagaacatgagctgcttaatttttaagctaaaccaaggcatcaagaagtttactttttttaaaaaaattatttttagattaaattaaaatttcagagtcaatatgaaaaaagaagagttaaatgtaacatccttaataagtatagtttaaattgaatatttagccattccgctgtattaggaggcctatgctaaggcataaatgaagaggaaaaaatgggtatcgaaacttaagaaagcaaagctgatcagttatctacgaaatgaagaaaacatcagatgattaaacgaatgcctaaaacctccgtgtaccacaaaagagcccagaacaaatgcctccaaaagattttattttattttattttattttattattttttttttgtttccccttgctttaaaaatgtatttgaaagaatttttcagctttcatgtttctgttcgattagtaaaagattctgtcatgtcatatcaaagtaacacattcaacttttcatattgagctacatgtatatatatagttgagggttgagtaataatattgggaccaatattcagtaaattaaatttttgcatgcctgctgtgtcattgatcatgtatatatataaaagggaataaccaagctagggccgaaagggcggtttctttatgcttccaagaaagaagctgataaatgatgtgataattatttgtgttaaacagcaaaagagcaaagtgt

SEQ ID NO: 6092 - DNA, 2795 bp, Manihot esculenta
  Intron number 4 from transcript cassava4.1_005478m (locus cassava4.1_005478m.g) derived from phytozome v7.0 (chr-ID scaffold03850; pos 112221 to 115015 reverse strand)
caaaacggtatgtgcacattatgccctctgtatcactagtttattttggtttttcctggaagttgctgaaggtgttgaagtttctacgttgaatagttttgccatttacctttctgttgataattgtgcacggatcatttttacttttagttttagaaatatgtcatttggtagcataaccacacaaaggatggtctcagctatgcttgttaaacccatctttaggattttatccagtgacgggtgcataaatgacagttaaatatccaattagaatatgtaatttataacaataatatacatgaaataaataaaagttgaccattattcttcaaaaaaaaaagaccttgctaaaaattaaatgaaattactgttaattaaaaaaatataatgaatgtttaatactatgaatttctaaacttaaaatatatcaatggcctaaaatttaaaaatttgctcaatctatttttaatttatttatttttattcaaagcaatcataaagattaaattcaattaaattatagattaaataaaacaaataacatggttctaatttatcaaagatttcttttttttttttcaaatgagtaagatgaaattccaataatggtagtgagatcatgagaagaaagccactaaaatttcatattgatgaaaaaaaaaacgatgagagaattctgcatggcttccctttaattatttttcgaatagtttaaatttcaaagaatgaagttggtgtttgttagattgtttgaagagtaaaatggtaaactataattgatagagaagaagaggccaagaggcaaaaaatggtgtcttttttttttttttggcaaatgaagatttatattttgctattgatatcattctttcagtaggacaacaaagaatttggattttttaaaaatgtacaattactaatcatttactagcaacttctaaaatacaagtctagttcccccatcaaaatctggtaggcaacggtaaaagatatgacttttgaggaactatcactgcatccctcaaaaattttaaaatcctgatggagtcatctgcctcatcaaactctagttggcaatagtaaaaaatactgattttttgagaaactaccactacacctaaaaaatttcaaaatctcaggggtacattgcttccttgggctatgagttcctggctctatgatgaggatctacctttagaaattttaggactatatgttttatgaagaaatatgcaaaatagtattttattttatttagcaagtttgagttggtttaagattcttaattactgtttctttaatgtttttcttgttttgggattccaaatcctattaatagtaggaccgaaaattctgctataaatacctacgccctctaggtactttgatatacttttattattatcgattttggaattgattttaagcattaatacacaatttgagaattatttttctttcctttcaagtgttctaatgtgttttacatcagtctatgcattaccttgtagtatgcgagtgattgcttactcctagaccttagatggcattacctcgctgagctgttgaagttgaatcaaatgaacttggccctcatggacttgttccttttaaattaaattatgtgctgcaccataaaagatgtttggcattttttggaaattttgctgagagaggctactctacgtttttaaagacttcgtatatgctgtatcagtcattggtcaagtacttggtatggatcattcgcattgtcaattgtgagtaatctagttaatttgatagtgcctttagtagaatgtttcaggaaggcaacattttccactgttggtgacaggtatatacaagcccaatttgtaactgatgctcttttagggacttatattgatctattgcttcctggtatagaattcatagtgagccaggctcgagttaattgcagctttggcagtatgaattatgaagcagcatgtatcatctctcataattatgtggtgcttgaatttgaaagtatctaaaacatcagttggaattgaatgatatattattgtgaaagtttggaatcaatctaatcggagaagagcccagatgtctaaaattgctgctgcaagaaaaggaaacctgttgccatcacacatgtagctgactagctcatacattgtggaagagaaaataaaactctgcaggaaaatatatatgtatatatattttttaaatttctcaaaattatataggcataggaatgaaattcaacagcgggtgctaattgggaacctatagatgctgttgaagttcttagatgtcagttcctctgtccagttatgctatgaagaaattcataatgtgtatgacagtctatgtagtggtaggaggaaaagtgcagttcacattaggagatggcgttcactttaacttgattgcataattatgctgaagacacatgatgggcaagcttttatatattattactgtataatgtatggtatactttctaattgattataatatgagtgccattcaactttgtaaatgcaattcacttaagagatagccttgctagaactagattgcctacttgtggagtgtatgctgaagacgcgattgccaatttttttcccctaatgttgcctagaaactgagctaacatatttaggctttgcataatttttatttactgcaaatttgcatgccatttagttaaattttattcaatttctccacatgcactggattgactgttagtttacccctttgcaattgtactcaggttgcttgtcttctggagaatatca

SEQ ID NO: 6093 - DNA, 739 bp, Manihot esculenta
  Intron number 3 from transcript cassava4.1_016684m (locus cassava4.1_016684m.g) derived from phytozome v7.0 (chr-ID scaffold10963; pos 163290 to 164028)
aggtttgtctatgtatatttttgtatgtgacctgttatgaaaacaatatatatatatgaagtaaggagaaatctccttcggtaatgattatagcaactgtacgataatgataaatatgtaaaatagaagataatcgatattcataattttatataatgaatttaaattatgtataaaatagtgctgaaagtaaaatttgctgaagaagatatgttaccagtttgccacaaaccaatgcaagtagtagcgctcttcaaaggagagattggtagggacaattttagatagttttatcaatgccaagcttccgttagctacttggcactgatgttgaaaggagatcgagcatcaaggtggtaatattcgtatggtcttattctgaacgtgttatgctgctttgtaggtctaagcttgctaattacatgctcaaaattcttccgaaacgtttagtgtggaagttcacgggtgattatggattagatttggtactattgagcaaatcttggcctgtgcataaacgtgtggtgcacagagggtggacgggatagtggatacaatgtgcttcattttttatgtcttgatttaagtttatcttttaatcatgtatatgcatatgaatttcttgtgatgctgtactcctcaggcttgcctgttatttcgtgtttggctgggaacataacttgatgctgtataaatttttgcagatcaggacgagcacacaggtcaaggagtcctagga

SEQ ID NO: 6094 - DNA, 1892 bp, Manihot esculenta
  Intron number 1 from transcript cassava4.1_031692m (locus cassava4.1_031692m.g) derived from phytozome v7.0 (chr-ID scaffold05979; pos 330699 to 332590 reverse strand)
aggagaactatcaccttccaaccatctctatcaaggtccaaatcttttcctgtttctttatttgattcaatttttataatgtttctctcggtataattgacgtctgaaaagtcaggatatgcttgattcaattcaaattcctaaatttgtgtggaattcaatggaattatatgtttgtgggtttggtttgaataaaaattagaatttaattctaggaattcaattccttggaattagttataactaaaatcaattactatcaaatttgatgaaatttgaaatgaattctacaaaacttacacaacaatatcttttggactaaaatgctctctctaaatgattttctctcaataatttatcctatatactttattggtaatcaattttctatttatttactattattatatatagacaattacataatatattttctttatttttctaattttctaatatttatagttcattttctcttactaataagagtgtttattttattatgtaaacctccgtgtcatgaaaatttattaatatatttttaatggatttatatttttgttagttattataaatttattaaatataaaattttttgatagtagaattttttattttactcttaaagatagtttagaaaataaaaaaatgaattatgtggaatttaattgaattctgcattttaagttgtgacatactagcactcacaggtttaactcgggtgataagtgcatctgagtaaatctgagaggtcttagattctactctcacactccccaatttccagttcaaaaaaaaaaaaagttgtgacatactaaacaatgaaattcatttcaaatgaattatatttagaattcaattgaattccacatagttttataaggtagaattgaaccaaatattatgtcagataattgcatttttaatttatttgagttgagtttcttttacattgctagaaaaagaaacccttgttgagaatgattttgtgacattgaattggatggaaattgggtttttgagctgatttgtggtgtgatagggatctgcttgtttatgcattcactattgcctggttgtgcacttgtgctgtggaggaatagtattttagatgttaaaaagaaatgtagaattaatagtttatgacttgaagcgttggtcaatttggtattaggcaacctgtattatgttgatgctataggagtttgtgcactcattacttgtacttcttgaaatatgtgtgctcaattagcctctggaatgaagcaagtttctgttgaacctttagcattttttcatgttgcgaagacatagattgaggattgtgttagttcagaacactgcatgataactctgggatccgaaggttaatgagatggcaacacatggactggtttaaggatttggggcagtaaatgacttggcttagtaaatgagagtagtaaagaagttgggtgtgaagtttcggatggtttaggtttggagttgcaaagggagttaagaggttaaagaagacagaatgaaatccttttctggatgaaataaggggcatatatgctctacaaggtatgcctgaacatgtcccttctgaatggacaatcctacttgtgtcagggacttttcaggtggtttattaatggtggacaaataactcatttaataattagtcggctaaggttatactacctccaagtaaattctaaataatcaaaatgaataatgaagtgatcctccaaggtttttttttcttgctaattatttgtatcattaatttttttaggcaacagttcttccatttcaacttgtatggacaagtattaactagcacatctcatgttaatttgttttcttctctaggtgacatcaccatacgggaacaatcttcatcataa

SEQ ID NO: 6095 - DNA, 1104 bp, Manihot esculenta
  Intron number 4 from transcript cassava4.1_021311m (locus cassava4.1_021311m.g) derived from phytozome v7.0 (chr-ID scaffold12004; pos 79942 to 81045)
ggagtggtatttggcccccgagtacatcaacactggtaatctatctttctgctttctaccaaaattttttttatacaatccttatatatagaatatgctaaaattaatatgggatccaccataaataataattattattataacacaactgttatatatataatagttatattttaatagtgaataaaacgaggcaagccgaaatttaaaaagtttaattttaattcgttattttttttttaaattcgagtaaactctaactttactcattttgagtttgaaatgagtattaatacgtttaagtttagtttatttagcaaacgaatttggacgaatcggatttttatcgaatttagtattcaataatttacgaacagtttaatttatttatatgtatagtgaattttagtttaaattaactaatttttattaaataaatatacatacaaaaattttaaaaaatttaaatttaacttataaaaatatatgtagagtttaagtttatttcttttatcatattaatttcgacctatttaataagattattcacgaatttgttcatgaactcaaaactaaatcgagttcactagatttagcgaaacaaatactataaaactcaaacttgactcgtttactaaatgagtttagaagttaaactcgagttttgatcgtttagaaatcgagttgaaattgatcaagtttttatcgaggtgaattttaaatagttctgatttatttatattctttaattctcattcttaaaatatcctaaaaaaaattaaaatagtatagtgatatatgctttgaatgtcctattaaatggttgataaaggcagatgtgaaatcattctgttagccgaattcaattcctatcctccatttactgaccaaaataaaaaaatgccatcctctaagaacttcatttattttaatcttctaaaactaattaatttacttttttatgcattatatgggtaaattagacaaatgaagaaaaataaaaataaaaatatttttatataagaaaagagaaagaaactaatttatatatatatatttctgttgatctgagttgttctaaaggtcatttaaggaaaagtggag

SEQ ID NO: 6096 - DNA, 1589 bp, Manihot esculenta
  Intron number 1 from transcript cassava4.1_018040m (locus cassava4.1_018040m.g) derived from phytozome v7.0 (chr-ID scaffold04851; pos 314138 to 315726 reverse strand)
ttctttctcgggtgctttaaactctctttccctatcttctttttcttttctcactctctaatttttaccttttgtggtgactgtgattgggacgatcaaaattctgtttgatttatgatgatcttttatatataaatatataacttttttgtaataatttataatggactaaaaccttgatggaaggagttgaataagtgaattcatcgtttaattgaattgggttaggttttttctagggttttgctaaatactaaatgggtatttgtaatttggacgatttgtgggttcaagggtgaagtggaaatgtcacagagaaatcgatttagatattcagttttctaggtttgctgctagtgcttggggagttggattttctgggatgcatggattacattcttggcataacgtactatattttgttgagactttggtcgaatgtgattttcagagaaaaatggggtctcagtcagatttatactatattcataacgatggtatggttcggctgcttgtaatttcaatactgttgaaatttggaatataactgaatagtgatatgaaggccctaaaagacgctaaattagagcagcattgctttttgataagtcttgcagatcatgttctttaagatttttccagcttcagatgattgaggagagagaatgtgaaataatgtcctctagtatgacttctacatcttgtcagtgtactttaaagatattgtactgggtttcagtaggcaggaagtcttattttccttccacttttctcaatgaagaatgttttcagatttgagagcttaaatttttgtataatgcaaacaaattaggccccctagtgccagcgtattggcttgagttttctgttttgtataaacatattgataataggattgttttctaatatctcctcatggattttgctaattgctattgttggacaatcactacccaatgacttcttcttgccccaaactttgatatgattgtgagttgcacttgcattagtgtaatgagctattgaattcactttagtagggtccataagaactttctcgttgtactggatatgagttttgttactgaaaaaataattaaagtgtaaatagacatagatttttcttttgaggggttcatgactgagggaatatgtattatatgtttctgattttagtacattagagatgctatgtgcacattttttagtcataaatatggttatttcaaaaaagaaaatcaaaatccatcaccaaatgaaccttaagccaaaattcataatgcataatcaagatatcatccacgccattgaagcctttttggctcaaattgctactattatggattatttgcaaatttgattcaaatggttacatgtattggtatagagtgaggaaacaaaaaagctaaagttgatacttttttaatggactactataaatatatttgtttggattgatactgatatgtttcttctcatctctttcaacttaaatcaattacattcctattatttgtgctttacatggcaattctatggtttgtgatgaatcagacttttaattgtcgcaaagggagggcatatctgtt

SEQ ID NO: 6097 - DNA, 2082 bp, Manihot esculenta
  Intron number 3 from transcript cassava4.1_015149m (locus cassava4.1_013092m.g) derived from phytozome v7.0 (chr-ID scaffold02871; pos 456635 to 458716)
attctagttggtaagtcggacacctctttgaaatttgatgcaagttttgtttttctctattttaaaatttaaattcagttgtaatatcatatcgttcgtattgcgacgggaaacttatttggagtacgttccagcttcagatatgctattatatcattttcttattatgtgcgaagttgcttcctagattacccaggagaagcacaatttatttatttattagggtaacttggtaaatggcacagcgatgacataaataattaggttggttatgaagtgtattggttgtgtggatggcattaaattttttgattgaccttttttcagaacccaaggcttgtttatttgtgaaaaactgagttctgtaagaaaactgaaaaatagagttttgtgttaacatgtgtcagttttttaatgaataactaagaactaatttttaagttttcaaaaatttaactaagctttgaaaaacatttttaagttgtttcccattgttgtaaacaaaaatttatgttttctacttgttttccaatgggaaaacaatgatttttctattatttttcataattaaaattgaataattatttaagaaaatatatactttagaataataaaaaataatcatattattataaaataaatgaatagagcatgtaaaaaaatctttaaaattaaacattttttgttatatttatactgatttatccttttttttaaattcttatgatatattaatactttttttattattattttataaattaaaaactttttttctaatattaataagtgaacagattttttcattttttcccacatttctcctagaaaatgaagactggagtttcctcaataaattgaaaataataaactgttctctacaaataaacataccccaaagttttggtttttaacgtacaagagattgagattgaactgttcaagtgttaagaaacagagttttggtggaattttcacattttgaatatgtctgcattttatgtgaaagctgtatatcagatattatttttggttctatccctgtcatttaaaataaatgtttgggaaagctttgaagtttgaacttatgaggttcaagttaaatagttggaattcatttgcttgtttaatgtggaagtgtaatcttgatagttgatgctaaatcgattttgctagagctttatgaggccaatggattttactacaaatagcatttctctttttttgcaaaaggcagaggatgatgtatggagtaagaatcaaggttctaataggaaggtgcctagagcatagagtattctgaaagggagaaatttttggattttacatccattggcagatgaacattgaggcagttatttattcagggatatttttggatatttctttaaaaaaaataaagcaacttttgtttatccaggtttgtatgatgcctatgttctagcacttggaatgtttgattcacacattttaagactgcccgtcgtgcttttgtgataatgttacattctttaaaaatcaaatgtagtgggttatcttattttacttctggtggatggtactaagattcttgtacattgaagttgttatttggcaaacaccatggtgggtttcaaatatttcagttatcatctagagagatattatgtaagttgagattacagtcttatgtcacaagtaagaatgcagaagaaaatcattgctgagagagaaacttcattgttgatacactggctaaaaggatctttgttgtcttcttaggcgagattggcagattgctgatctcttgttttctctctattgattcctcttggatcttagttaaatttgaagtgcattttcatctaagaagttctttcctgaatatcaaaagaatatttggcataatgtagtggatttatccagttcttcttttgttgttaactgtgtggaaatttattggcttctggtagatttgaattattgccaggtctgtctttccttcctttctcaccttaatgatacttttgttccattttgcagaatatgtgattctcttgcctttcttttgcagcttttccatcaatccacaggcttcctcat

SEQ ID NO: 6098 - DNA, 4140 bp, Manihot esculenta
  Intron number 3 from transcript cassava4.1_015647m (locus cassava4.1_015647m.g) derived from phytozome v7.0 (chr-ID scaffold10780; pos 5476 to 9615)
gcgaggtatggctcatgttctccaattctctattgattattcaccttgttattgctttaataaatttggaattgatttgatggtattagaatttttttttcaaaacttacttttagtagtttaatttataggaaaccttaaagttttgcagctatttgcatgtcatggtttattatctttgtatccgcagcaggcttaggtatttccatagtgaaagttgaccattatttcgttttaaatgagtagctggatatctggaccaaacccataatatttctctacttttgttctttttccttccctagtaaaaaatctcctttatgggtttgatattttgataccttggaaaagtgcaactgaaaaaaagtcaaaataactgaagcttttatagaataaaatttaaaatgcatttctagagtgaaaaatacctttacatgagttgtattacatatgtaactgaacaaggaaaaagtttgacttgttgatgatatggcttatttgcatttgcctttaactaatcactatgctcatgcaagtatttatcatgagaagtttaggttacttttttaagatggatatatacatgtatttgaattactatgagcatgtttctgccttgctttgcttgatctatatttttggtttggttgtctttgtttttcttcccatattttcattttagacttgagaaatagggctatgtatggttcttagaggtcccgaagcgaactgaagaactgtaccataactgaaaaagaattgatgttatagaaagttagagaccgaaccataccgaatcaaacttgtttaattatttggttttgattctttgtcaagaaccatactagaaccatacaaatcaattttgtgtatgtgttttttttaataatagtgatattatgattccattttatagttttaataatatgttttatatctcatatggttccaatataatcttgtaaattatattaccaaaattctatgattctattaaagaattcaaatcttatttataaaatgtaaattatataaagtagaaaactataaataagggtataaacaaaataagttttttgtaaactatttgaaacttaacttgataaaagtttagttcattgcgtatttatataaatatatatattctctttaattatatttatatttaatattatctatgaacaatttaattatgactatctctcttaactattaaatagttattaataatattataaaataaccatatattctaattagttattaatgatttctaactatatgatttaaatattttaattagttagttattgttctattctacctaagtagattatatatataaaatatccttattaattgaaacaatagtaatggaatttatatatatatgtttgtgtgtatatttgttatttcaaacataaatatagtagttactttatagtttttaactatacgtttgaatcacatattagtaatataatatacttttatatattaattacacatgtatcttttaatcaaaattatataattaataattatatataaataatataatatttttactgaaaattgtatatatatatatatattaatattattattattatttaaatgttagttttattattttgttttgatgttagttatttactattttataataaacataagaatattgtaatttatgcgtgacaatcaagatttgaatgaaattaagactaaaattaaagttaaaaaaaaactaaaatgggaaccgaaaccgaaacagaaccatactgaaattgcttagaattgtatcgaaatatgggtccaagtatagttcttaaaaattaaagaactagaggtttagttctggttttggttcttagttagaaccgtaccaaaaccagaaccaaacagctctattgagcaatctgaaaaggtctaatgactaaaagggctaaaagccagcagtaacataaggaactgcacccatattgaggtttggttgagttggttagtttttagaaaattgcagcgagttcagttactcctaaattttagttcagttaacccaacaggacaaatgtaatccactggaccaagattgatgcctgagttttatattaagcaatatgtaatttagtactttcatgcatgtgtgatctgacttaattgaaggaacttgatgatgcttgcacggttaaaaaggggaaaactggtttgaaaacttagattgaagtcatttattgtataccaagaagaagatgttttgcaaaggaaaaagcatcctaagtggttagctattgtatccaactgctttttcaagagttctgcacctgagtttgtaatatcatgcattttcagtacgttcttatccagtatgcactatcccatttaaccatttagaagttatagactcctttcaaaagcttgtttgacctcagctttttagaagtaaggttgttcactatgctatctgatgaccaataaattctcagaattagattataataagtagaacactaaggcttctaattctaattatgtgcaacatttcaccactttagacttaattaaaaagaacacttatttaagacatgtctgtttgatatccttgatttaagaaatttatatgtagtaatcatagcttcagggagacttggggtccttggggaccattttaggtcaggatctcttttattcttattcaagaaatttggtcttaattagtatctaatcatactcctgtgacacaacttgctcctagttaaccatatgcaactttggatatcaattcctcatattatgaaaacacattgaattgatagctgcctgcaacaatttttggtttgtaaacattctatttgattcattatgagtatcttctttccctctgcctcagtccctctccttctttttggttagtttatgtcagatgtgtgttctaattttaaccttacttacaattcgtgcctctagtttctgtggtggtgtatctcctatatttatgctttctttgtatatttaaagctgcaagggaagggaaacaaagagaaataatattatggaaaagataagaaagagaagtgaatttaaattccctcatgttatttgaattcttacaaagagaacttccaacttaaattcactgttataaccttattaaatggctttactttttgttggtatacagaaattatatccgttattgaagtttcagtgttttacttgagttatgtccttccatttcccttgattttatcccaaaacaaaaagaaatttaaaaaatggagttgaaaggaaaatagggaatctaatttcccttcgcatttttctctcctctttttaatacccaaagaaaggacaaaaatgtttttcaattattttctttccaattccactcatttccctcagaacaaggtgttatgtttcaaccaaggtgcaaataacacgaggaagatattgaaacgatatattgggaaaagcttagaaatgtatcttctgttctagtgttttggtagttaatatatactgaaattgacagagtatgattcagtggtatgaggaatcatctgttattattctttacaattttgatttatacaattgaattgtgtttaatatatatatatatatatatatagattcttatggataaattattataagcaactttataatgatatttgtaattcattatagatattattttatgtttattttatttctttatctataatggaactttattcagaaaagaaaaaaaattctattaaaaaagaattgatttgatgccacatggtcttcgtgcaattaagtatatagatagtgcacaaatctaattgtcatgtataacatatgagcattgcagaagtatgattctaataccattagccaaagatagtgttaataatgaattaaaatgcaaagaatttactcggttaaagtgcatgataacaatgtacttttctaagcttttccttagaatgttaattgtgtaagaacgattttcttattttattcctgactgcacttttgagttgcctcaatttctgcgagttctaaacctacattttggtttcattctgcaacttacatgtagtgtttggtgacacaggcctaccgtgagtcaactggcacagtttcatctag

SEQ ID NO: 6099 - DNA, 1756 bp, Manihot esculenta
  Intron number 2 from transcript cassava4.1_010337m (locus cassava4.1_010337m.g) derived from phytozome v7.0 (chr-ID scaffold07520; pos 438555 to 440310)
ttagtgctgaacctgaaaggccttggaatttgacggtatggtgtggttttttatgtttatgataggtttattatcccatcattggatttttttttaaaaaaaaaataaagttgttattattactatcatcatatcatcgttattattatgttggagttgcagaatttaaatccttcaaacttagatgctagctcattaggttaaattgttaatatgtttgcaatgcttatacaggtgtctcaagataaatgacatttatcttaaatgcttgtaatggaaaatttttagttgccttataatcatttcaattttctgtgggatgaattcaagcctcccacacaaactatgggaatgatatagaattcagcattagaatttatcttttttacctagcctagggggcatcaatggagctagttaccctgccattgttcattgaggagggttttccttatcctgtgaataatgaaatctaggcaatcgcatattggtggtggtgttatgaattttcaaattttatttaatttttgaaagtttagattgctgccatatagctgtctatgattataagtatggtttattttttttcaatccacgtgtgcatcagggtcatattttgacatagggttgttcactattgagagcaaaccataagccaaatcaaatatgttagttactcattggggtttatattggctgtttgctaccacattttcattgaccaatcgcagttatgttagaggacgtgctttgttcacttcagtttcatccagttttttaggaagcaggaaggtgccaggtggtggttggttataactagagaactgggtcaaagggcaatagtgaatatacttcggaaacaatatacatgcacacaggacacacccactgacacacacagtaagcacactactttcagttagttcatgtggaagtaagtaatggatcaagcgtaaaaagtggaattggtagctaaggaatatgactacctcctaggaagcttttcagtttttacatttctgtcaatttactgggcacaccaaatgtgtacatgattgattttgggctgagaagctattgattgacagggttttgtcaagctggacagacttggtctgtttatttgcttcttgtccttcttcatttaggcactctcgattcttcacttccttaagctctttttctgaaggaatgcttttacttgttaaaatgcaaaatcattgcattcacagaatgttaatgacttcattctttaaattcaaaaaaatgctgttgtatgccaatgttgataggtcattataatctacatgtaaaagtagttctccttgaaataccttgaaaaaagagtgtatgatattgattttttagaattggagaagcctattcacttgttgaacccgatagtcttacttttattgataagtagctgtttcaaatacaacaaaaattgggatccagtgttggctgtttcttcatgtcctaatcagacgtgatagtaaaaagtttagtattggcctgtgaaccacttaatttaattaatgttatgggttatctctctatctctctctcactcattcttctagtcaatggccacagacagcttcttgaaatttgcaacactgcatatatttattggtgaaaatcgttggctatttgttttatgttgtaattgcaaagtaatctttttatttactggtttattttttgatttctattttcaggtacacttcaggggatatccaaataatttattgat

SEQ ID NO: 6100 - DNA, 1472 bp, Manihot esculenta
  Intron number 7 from transcript cassava4.1_001343m (locus cassava4.1_001343m.g) derived from phytozome v7.0 (chr-ID scaffold03264; pos 310675 to 312146 reverse strand)
ttccttcctggatttccaaggtttctgctcaacaagtaaggtcttcttatgttgggcttttgatctataagatggattcaattttgattattgatggtctagtcatgtcattgaaataaatagtgcaatgcagggatctgtggaggcctgtgtttcatgaagttgctttattctacaatagtaaggctactagagccaaaaaaaaaaaagtgatttgtacttcctcttgcatacacacttgtaatccaaaaaaaaaaaacaagttggtgggtggttgcagagatatagtcaaatttgtctaggaccttctttctacaggtcattttgattattaagatagaaatagaaacacaaggagattaaaaagtgggatatgaggattactgcaagtaactaagaaaacaatccaaatatatggacatgttcatattataattaggccaaaaaaaaaaactacgttgaaagccatatagaagtcatatagtcagatcaacatctaagtgtatttgtaacatttagctttgcttatttatattgtcttgttattaactgttctttgtagaatattcagtgtcttcatataattttttctggtcctaattaaaattttcatttctcccacagccccgccaaacaaacataagttatttacgatcacctgattgtaaactgtttttatggttgtgcaaacttttgcatattaaatcatgcagggatcaagactgtttaaatggtggtgctaactgtagactttacatgaactaagggttggaatgatgtgcttcgatcataatcaaaatttagcttctatcatcttgttgaaaactatttctgtggtcatgcagttttttgtgagttgcccacactactggctaaaatggttcaaggatttcatagttcaaagttcctccttagatcaactataaatgaggccctcaaaagattagattagagcaaaaatagttggtctactggccccttccttttcaactatatcatccaatttcacatttgaatcaatttggttgctctacccagatccgcgtacatccagtgccttcaggttctggtgttaatgtagcaagggctagtgctgttaagcactatttgctccgtctggccataattgaaacaagatgattgattgacagtgtaactgaaatgaaaaaagaggtcaaaattgaaaatccagctaaaagtttggattttcaggttagaaactcaagaaaaggaagtgaaagaagcttgagagaggaataacccctctctctctctctctctctttctctctctattggagatttgatgtgcttaatgagatcatttctggttcgtggtagaatttttattatgctttatatgtttgtatcattcttaaatggtaccatcaaggcacataaacttgactatatattgcttttactgcatatactgtagcgaagaggaagagccggccgcgttcaaccaggaga

SEQ ID NO: 6101 - DNA, 2518 bp, Manihot esculenta
  Intron number 1 from transcript cassava4.1_004407m (locus cassava4.1_004407m.g) derived from phytozome v7.0 (chr-ID scaffold09876; pos 707718 to 710235)
ctcgtggtttccacggtatcttttctcagatcgaggtagttacttgtttttgcgtgtttcgcttgcttttgtaattattttctgttatttcgttaataagcgtaggtgagggctgattttagtgtaactggattcagggatacttgtctctaaattctaataatgaggagctttttgaagtacattatgaagatgtaatgcgctgaatccagaatttagaggtctaggagcggcattctttatctttattttgcattttgtatttagcaatttgaattggctttagtttgtagcttttgatttttagcggcttatagctaattacaaagtcatgggatactacaggaagagtttttaactgaatagaaactgaagctacctatctggcttgggtattttttggtatgaccaggatgagtttggatgtgtaattattattattaatatttttttttgtgtcaggtacctgtgtatataaataattaattcaatataaaaagtgtagccttatgataattttataagggagatttacgattttgttttttacacagtcaactcctgtcattttgagaaactcactagaaagtcctttacttttgactctgtcacatatataatccttccattcaatttttattaattcttccattaaaaaattggtcaaaaaagagattttctaaaattcaaaatgaccctctctcctgccattatttctctctatgtgttctcctcgctccccactatgccttttgtactcaaagatcacaacaggtaatatgaaagacactcaaaatgtacctgatccaacatagagatcaaacaaagttgagcttagaagctcactcagtcttgaaagtgaaacaaacactaggattggataaaatcataaaaagctacaaaaaaaccctgaattggaaaacctgaatcagaagaagcaaaagatggcttgttgtggatgttgtttgctcttcttcttctttgccttgagttcttgttggaagacgagacccagagaatccaccaatggaggtggcaaatccttaagagattgttactgatggatttgtgggatttgattatagtgatgatgatcagaagtgattcctctaaattggctaaaaaacggttgcaatagtggaggaagtaacaatccatggatgccactcactccaccaccaccaccactaccaccactatcagttgtaccaccagcgaacatcatactccacaacacttatccttgcgaatgccaaatttttcaatacaccgaggagaataataggcttagtcagtttgaccctccctgagttgctaagctgcatttttggtgcgcataataagaggacttcagtagcatcattgagcactcgctcattagggagcgatgaggcaagctccaataagatgatgagtatacacactagaatttggttcttgagtttatggattatttagcttgaaagattggagattattaggtgaaaacttgaaataaatgaagggaagtgagctttagaatcggtagaaacgattttgtgcttgagaaagaaggtagagagaattaattgataaggtagtcttttcatggtcctctaacagaagaaacaaagaaaattggaaaggactatataattgatggaggtaaaagttagatgccttttaatgagtttttcaaaacatagggattaacttgtaataatggtgatacctagggacaaaattgtacatctgtctatttataaaatttttatatatgtaaatatatatattctatttaaaaaaataaatttaaatatttatagaagtattaaatttttaaaatataaattattagtgaaaaatatttttatatagagtaagagtactacttacaatgtataaaaattaaatggattcgagtattatttatgataataataatcaggtttaggatgaattaggtagtttaatgtgaaatttaactaggtttaggtattcaagatattaatagggttcacattcaagcagggtgatttttgcatatcttacagttgctacttaccatcaagtgctgcatagttaatgagttattattatgaaatagcatagttttgacataagtattaatttcataacttaatggagcaggagtcggactatatgacaattgattgattgttcagttttacccgaaacaaccttctgtttttcaaaaactattttgttagattctgaaaatgttattttaactttgagaatcattattgactttaagtaatggttatccttaaagtaaccaccataaattggactaggggactaatataatcagagagttgggccccgtaggtgattacttagataaaatattgctcttgataagattgtatgcagttggtaaattatttttctcatttcgccatatacatcaaattttcattcttagcttactcttttcttctttttttccccttgactcgtacgtgtaaaacaatgtgcagctatcattttctgctacaaatttgcgtgaccggga

SEQ ID NO: 6102 - DNA, 3169 bp, Manihot esculenta
  Intron number 1 from transcript cassava4.1_034013m (locus cassava4.1_034013m.g) derived from phytozome v7.0 (chr-ID scaffold02943; pos 51984 to 55152)
ttaatctttgtcaggtaaaagtgccaacctttaaaggaatcttatagatccttggctaaatttcagcctatttgataaattcttatatacctcattcactgaacaagctaaaacagactcaggcgtggaagtgaaatctaatttttatgctgattttagataatcgttgtttgttttgcttaattattttatcatttgagtttgaaaaatggttttcttcccctcttctcttggtgaccttgcttgcactttgcgcttaactgtaatggcgttacccaattgttatagttttgtcagtattaaatctgtccaatgaataacggtttgctcttcatttatctagaggaagcaactcgtacttgataagggaaaatgaattcttacgaatcgttttccatggcatttgaattcagaaactagttagaaatttcaagcttgtcatggaagttgcttagcataatgtaaagttcaatacaccctttttctaaatgctgtacaacacaagatgatttcttatggaggtttgtagcatctaagttcttctgctggcaaaaagtgcctttggttcagagacatttacgaaataaataaaattgatcgagttaagaaaattactgaattgaaggtgaatctctttgctttccgcgactgttctaatcatatgatactaatgttgttttttttatgcaaaataattatatataaatcaggtcaggctttcttttatttatttatttttttaatcctattttcttttgcttgtgcacttgaagttcagattctaatgaatttctaaaatttatatatactggcactttagtgtgaaactatattaaggtaatggaaaaagtagtttgatgttaatcacgttaattttcccggtaactttgaatcattaattatatgacagcaatagatggctcgcaatagtcactcttatcaaatccttttcacggatgcttcagtttttgtaatttgtggatgaaagtttatgaattgttatttcatatattcttgttaaatcttcataatttttcagtatctttagtttccttgggctctggaattatagtttaatttgttgagaagggtagggattggggcaggaaagcaacctatgtcacaggagaattactatgttttggtagaacatctaacaatgattaattcgggacccatttttatggggagatctgcttagtgtggccttattcttgaatgctactattgattaagatgtgctatttggttttgttgatggtgcttaacgcttgccctttaatctgagacttgaaacaatcagataaagaacttaagcttcgattttcatactggaaaatttttatcatttggttaacacaataaataagggaacaaaaaacaaggttcctgtttttggcttacttcagtatctggtagtctcagttgtttgtcatatgaaattctgttggcaactcaaattccatttccctttttcttatctactctattgacgctttagtaactttctgctcttattccttttgtcatggttccccgggcactcttcactagttgtctgatataaattcatgtattgttgatttatgagttctaatggtaggtgcttattcttgttgttgtttaccccatgttggtaacatactgttcacgagacagcagataaaacgtgtgtgcatgcatgcatttcattgcaaaaagtttgaacaacgagatgctgtcgtatttctttagttcttgtgccaaaagtgagattgtgtcactactaaagcggtgatattatcatgcaactaaactgttctttttagctagctgtcttccaaatttgtcttgttagttgttttggcaaggtgactaaatctgacaaacagctattatttaacaataaatggctaattataatatcatgatcagtttcagaaacccactggtgaggcatgcaaaagaattttgactaaatggaactgatgtccttgcttgacgggccatttgcacaatcacttacattcctagattgtggcactggcacatgatgcatctgcattcttaacctggttttaattgactgccctttagtacccagcattgggatagaggttctgggaggctgtataaataactttgattcaacttccttgtattgaatatttcctcattgttgacccatgatgaagtgttgtctactaaattaaagtccaaatccatctatgtttgagtgctctccttagggcttctgtgtgctgtctgttctaatgctgcctcctgtgcttctttgtttgcatatccccaaaaagatccatcagtgtttaggctgatctggagggtcttaagtgggaggaatagaattctgaacattttgttctgtgcttgattggagcaaaagattgaaggcatcttaagatttgatatcttcatagtccttccagaaagaagaaacttggcgtggaaatgtccaggagcattatttcctcttcatatctgattaggattcagtatatatctaattatgaacttatctggtgattaaacttaaattgtatactggaggtccacccatcagaagtgagaaatccagcaaatttatgagtattttattgtgttttgtgtctcttgctgctatgttataggctgcttattagaactgactcccatagaacccaaccatgatggcctttttctggtgattgagcgtactttggccctgctatttagctttgctggtgaccatcttgcatcgcaacttggaatacaccttgacatgacaatattaactttccaatagctagtatgtgggcaggacaggaagcaaatagataaattgtgtgagatcatgttgtcatgctgataatgtacttttagtatatccctcgatcgtttatatggacaatactctgttttgactgcatatttccatttcaccatcaggggatttcccttcatatataaagactacataaatgtggattggcgaaagatatttgatttctgtatgaagtcctatttacgctgtccgtgcataccagatttcttatcatttttttttatgttctttccattttaatgatcttgttctatttgtaatgatgaatatgaaagctcaataatagtcgcctgcatgcctctccctttaacaggtaaggctattcctatccgaggaatctccttcaca

SEQ ID NO: 6103 - DNA, 762 bp, Manihot esculenta
  Intron number 3 from transcript cassava4.1_015664m (locus cassava4.1_015664m.g) derived from phytozome v7.0 (chr-ID scaffold07318; pos 66915 to 67676 reverse strand)
agtcacagcttcagggtgtttctcttagaattcaggtatgttttgcttgatggtaccatcattattcttccctgttcaatctaaggcctgatgcctgcccttacaagattcatgagcttttaggttattttatgacttttgagattagaccagctgattacttagttgattaataactcagtttcttcttctagacccttatttggaagaacaattagtttttgccttgttttgtggtataaatctgctcaacaatacaaattgctttatttttgggatggctttgcacgcaatccgtgaagtcttataggtaggttgcaatttgcaaattcatcatttaaaagtaacttatgccgaagcgtcaaataagataaggatagatggtgtggatcacaagaaatcatctgtttcttgatattaatctgttgagaaacagacttgtgcagtctagcaactcaaattaagaaatcaaaagctccatctgcttgcagtatctgattgagaatacaagcgacattttaagtataattttgatgagctaatacctggaaagtctatagaaaaagaagtataaaatattgatctgatggaactgttcattccacctcttctctgtgtcttgagataagcagtgttgttaaatattcaaatttactaactttgcttttgtagaaatttaaagattcttttgtttatgtttcttaatgatttagtgaattgaattttcgaaataccttccagaccttgaaatcaacacaagca

SEQ ID NO: 6104 - DNA, 1154 bp, Manihot esculenta
  Intron number 2 from transcript cassava4.1_004511m (locus cassava4.1_004511m.g) derived from phytozome v7.0 (chr-ID scaffold02264; pos 263058 to 264211 reverse strand)
aacttcgaactgttgaggtttgtttctggattctttgatattattccagtcagctggtgacagaggaaaaagtggtgtttgccttatgcataatttttcaattgtgcagcagttgccctcatatttttaatgttgctttgttttatttagttttcttctgtttcattgtctttatagtttgatatttcttcatttttcattaaataattgaggtactcccgggaacagatccagtggagacggggtgatttagctacagccattctgtattttgtgatgatcttttttgcaaatttggattagggttcttgacatatatctgggttgattgaaacattagaatttgaggttaaatgtcagaaagctgggagagcttaaggtggaaaatatcactagtctggattttatatcatagggaagtgcagctaaatggaaagctttattagaaatatcttaatatgaaaaactgtgaactccagagagatctacatatttttctgagcgagttccaaatgcctggttaagtttgcaatatctgattaaattgtttcttttggtataaggttccaaatgcctggtacgatcttgcaatatctgattggattgtttcttttggtatgaggaaagacattgaggggcagagtgggttgtgagtagctcaactagtcattgaccttcactttggttaatttttgagagaagataattcgcacagtgcttcaaaaatttgtttattccctttttttgtcacatattcttggaaattctaaaagattttgtcttgttctctggcctaagtttgctaatatattttttgttgaatcttggtgaacatccaaagagccttgactttcaagatccttgggaaaacttctggaaaatttttggtagttcccaacatcataggagcatattggtgaaaattttgtcaaggcttgttggagtttgaaaactttgaatcactgctcttttgtgcttcaaaagctttagcttaccaatgcttagtttcttttgttagaatttctatccttgcaaaatactctagatttttcctcatttcaagttctcttgcttaaacatcctctttatgttcattcaaacatctttactaaagaaacggtcacctatgttttttttttctacttttgcaggag

SEQ ID NO: 6105 - DNA, 3009 bp, Manihot esculenta
  Intron number 6 from transcript cassava4.1_012343m (locus cassava4.1_012343m.g) derived from phytozome v7.0 (chr-ID scaffold07819; pos 108263 to 111271 reverse strand)
acaggtcatcactctatctctctcactaatacaatgttcatttttctatgctgctggtgaatttattgtctttattttgcactttgtgcaatactgatgaggaaagagcaaaaacactctaattagacataagtttaatttgacaattttctgttttctgatttaagcacactattaaattaaattattctgtaagatttgtctttttcttcaccttagcggtcatgaatgataattttgatggaggccatggtttctaaatataaccaagttgcgaaagggatattaagcaagtattttgagatttcaaaactgggtttctgtaggaaaatgaaagcctatgcacggttattattagttcatgattgaaaagatagcttcctgtggttctatttaatacaattggagcccattttaatcaaattatgttcgttatatgatatttaataggggtgatgatattatgagtttggatttatgcatttattggataattaatcctacttggtggcttgatgacgggtgtcgaatccgtcaatttaaaattcacttcctttttctaaattgataagaacttgtaggtagggtaagtgagtatctattctacaaagacgttaattctgtttaatttaaatgaccaatttgaaatagagaaatagtttaatacgaaaaagtgagaagagagagttttttttttatgaaagtggttgtgctttgggcaagccaattaaaataaacttaataggaaaaaaataataataaataatgcaattgaaattgagaaacaaataaatagttaaaactttcagctgaatgtaatcaaattgaggtattttgcagatgatcattgcttagaaaaataattcatgttattatctattgtttggttatagtggtcaaacacgcgaatcctaccaattcttctttatgaataaattaattcgcttcgcgctaaattaatttctaatcaactaagaacccctacacgcgtgtagatttaattagtcaactgcattaagagagaagaacccaaactttatcaataaaaacacgcgatttatttaaatcaaatctgccaatttcttaacataaactaatatgttaattgctacttgttactaacccaattaaacaattacggatttaattaaattaattagttgtaggttattttcctaagagattcaataggcctcttgaattctcaagaaaacaacaatggaggtgattttatcctttaattctcttcatctaattctcttcatctttttctattttttgtcaacaatggggagcagcaagagaggaaatgagagtgagaggtagaatatgattccctaggtttaatgcaaggagcttttatataggcaccaaaagataaaacttaatagtttaaaataaaatctactacttctatcttatctctatcgtaatcttatctctatcctaatctacaattgattttgattcaacttgaccccatttgaagctaatcttatccttgcttaggtggcaaaatctatcttatcttcctatcgccttgggctacaggtttagtcaaggttgtagccccagtataaaaaatcctttaattcagccttttttttcttcctattctcaacttctgctcacaaacctgtccaaaattaaattcaaattcaaattaaatatttatatcaaaattatagtaaaatcaatgaattaaatgagaaaaaattgtgagttttgcaactcatcacttgaaaccgttcctgccaatttggctcgagtcttgcatttataacttggaatcacttctttgtgtcatcttgtccacaaatttttgccaatgctctgttatgattttcaggttaatgatctttagattcctaagcatattcttagtagtttgccacttctagagataaaggctggattctttgaactgaagttctctcatcaacttcctgttaggcttcttttcaacagaaccttaagtgtcttaccttgttgagaactgctatgatttcattctgcagggcaaaaggatactgatatcagtgcataatgtatatccctgcagttctgcaccagtccttttaatatagatctgtctttctgtctctgttcatattgacatgcacacttaggttacctaaggtatctatttagtttctgcaggactatgcacttgatatgttacctgctgttccacatgcataacatccttctcatacctccagtctgttcttaacaaccatatctgttgaaaatttgaaatgcctttagttctgtaaactccagtttaataaatgttgtataaatatagagaaaaagggtcatattctacccgagaagtgttgaaatgccatgtagcatttctgcttggcttgcatgtgaatgaaatgacataaatggcttttctttatcctcaggaagcctctctttcttcttggtcagaataggttggaaccttgtgcgaattatgagatcagattaaggttgcctttgacatgaagctaagataaatagaattaagcttttgtgaaaaattttgaacaactagaccaaaattttctagtgctgcactttgcttttggaattttggagagttttgaagtcaattatcattaattttatctattcctcaagtaaaggaactagacatggttatcttggggtatagagttgtgaaagactagataaaacatttaattctaatcaggtactttaagagcagattatggtatctaaatcctctagttgtgatgcttgcttattttataaagcctgaatgtgtaagtcttagatatgtccaaagtttgaggcaatagtaaaattcagagcaaaacaaaaaaaaaaaaaatctataaatgcaagcatatgtttggcttactaatttgtggagagggtaaattaaatgaatatggtgttatgctatattttaaagttcaaacgaatgtattgttttacctgggattttgtaaaattgcagggcagaattgttgccttaacaactcacgggtggac

SEQ ID NO: 6106 - DNA, 1530 bp, Manihot esculenta
  Intron number 3 from transcript cassava4.1_033201m (locus cassava4.1_033201m.g) derived from phytozome v7.0 (chr-ID scaffold07035; pos 206485 to 208014)
cgagaggcaagtacattctgttgcgtttgttttagagtttcacattctgtttgtgattaagtagctgctagtttaagacctcttctatctacttttatgtgtcatttaagatttttacagtgattaaaagaaagcaattaaaatcacctaaaatgataagaaagtacttcttaatttgactaaattactctttattttaccaaataactttattctcagtaattctctctccattaatctactgctagaaaaatgggatagagagaaagagaaattataagatagattttaggaaattgtagaatagagattttaggaaattgtagaatagttattgtgttagtaaagataagggtaaaattaaaaaaaattaattaatatcatacaattttgtgcaaaacaaattctagaaagtgatagacataaatgaacagagggagtatgagattattggcatttggtttgagttggatgttggactcaaacatgctttggctaaataagttgtattgccaatatgtaatgtaagtaaatatatgcgattattggataaaatttaggaaaaaattactatttagtccctcagtagttagccccttgatttcgaaaaatataaatattcataagattttaaaaaatttactaattagtcaatgttggagaaaagactggaagactgattagtagatttttgaaaacctactgagctaccggttactaataagtatcctcgcaccacaagggttaaatagtaaataatttaacgaccaaatctaatggatggactaattaatatatattttttttaaatttgaagaacattttaatgtatttttcaaaattagatcaattaatgagtatttctatcatagagactaaataataattttttcaaataaaacttactggaaaggcttatctgagctgtgaacatcccagattatcctttatccaagaaataagctctatattttagaatgaggctgtcaggggatttgatataagaatagtaggtgcaggtaccctttatttatttttcttcttaattagataatgttttgattcaaaaggttttgttaaggagtattagaagctcaaaggtttagattttattattctgtatctgcactaattgaattatctaattgtaactttctctaggttgcgggatgagaatggtcacattattgagcacactgaggtggtatttttgacttctttgaatttcatttgagtccttgtttccatatatgtgtgtgtagtgttattacctgccacttttatggtagtttacatcactatcacctataattttacttaaataaaaaattttagtctatgtataaaattctatttaccgtagaaccctttttttaggaaatagagtttgcattaaactctatttaccatactgatgatagattatgcttcttgttctattgtgcatagttcttttattttatctcttctttgttcttgcatttttcttgcttagccgacctgttgtccttgtgggccccaacggcgagt

SEQ ID NO: 6107 - DNA, 1335 bp, Manihot esculenta
  Intron number 10 from transcript cassava4.1_003602m (locus cassava4.1_003602m.g) derived from phytozome v7.0 (chr-ID scaffold12758; pos 20308 to 21642 reverse strand)
tgtggcttgattctgttaccaatcgtcctttaaaggtaatgcgatattatcgaatgacattttatttggaatgcgtgcatttatctatatataatatgtatatataagtgcaaatggaggatatggggaagtatgaagaattactaaaagacttttagaaactcctatatgtataggtaactaatctatcctatgatgtatttattctattttagttactggtaattacaatatcataaatagaaataaattgagtaaaaggtattctactagttgttcaacacttgacgttcctattttatgtgaactattacttctatgaggaaaattttaaatttccccgttgaaaacaagcactaattctgaagagcacattttttttttaaattgttaagattattaaaaaagaataaaaggtggttatgaagaaatggaataggaagattagcttttcgtaagaagttaaatcaaaataaattttatgaaaattaaactaaataataactataaataattgaaagtaaaacaaagtataaagtttgagttcattatacataagattgattaagttcttaatttttttttataataatgtttgttggcccttttccatactcttaaaataaaaattttctggtgctattgttatgccaatattgatggagcaagaaattattaattgggaactaaataacattctcctcgttaggagaataacaatcatattggtagctaaaggaattgaatagctttttcaaattatggtttcatttttgtagaacttggctttattctttaagcaataaattgttcttatacattatacagaatacttaagcatgacttactttgaaactaaattacagtggcttatataaaataagactatgaacaaaataattctatagataatgattgagtttaaaaaaaacccataagattatggttttctcagagaactcaattttcctacataagtttcttgcttttgggatttttatattatttctattttgactttagggttctcaaaatattttggattagtttataatgagcctatgcatacttgttactaattctgtagggaaataagagaattctaattttaagcttacttccattttccctttttcctacgaattctttctaaaattttgtaataagggagtttttttagacacactatggattgtgctactatctaaattggaaatttagtttattcatgtcagtttattgttttagatttcaaattgacatagtaatgactagatttgtaaccaagttatttatgtagacggagcgatctttcatttgcgctgatacaggtgc

SEQ ID NO: 6108 - DNA, 4805 bp, Manihot esculenta
  Intron number 5 from transcript cassava4.1_008175m (locus cassava4.1_008175m.g) derived from phytozome v7.0 (chr-ID scaffold11170; pos 88775 to 93579 reverse strand)
ctgagtttattcttcttggagcaaacacagttcaggtaggcaaggataacatttgttctaattcttttgacactttcgttttgtttcttttccacaaataaaacaagggatagcaaaagtaagttcttcaaagtatgaatgatgataacgtataaaaaataggactctcgaggtcgtgacacgtgtacacatgaatcgaaagttttttcatctggtcggatcgggcagtaagaagcccgacttattgagtacaaagaattagaccaacaacactcctgactttaacaaaagttcggaacagacaaactgacttcctcaaagacaggagaggacggatagactgacctcctcaaaagcccgtattacaactagactttgaacgtcgacgtgaccgaccttagtaaccagaaggaactcatttctatgtaggtcgaatgagttcggcatgacctgatgaagccaggataaagataccgacctcctatgagttagtcacctccttggtacaacacaggcatcataagcgcgcatgtagagggtctgaatcggccagctccgtatttattatcttatagcccatcattaatgtactgcctcacatacctgtataaaagcatccctaccccatcagaagggggatacgacattagggacatcaactttattcaaaagtatttattcattgaactaacactaaaaagggatttatccttctctgaaaaggacctatctctctctctctctctctctctctccgtcacatagagggaacccgaaatcactattctcttctcttctctgttttatttctcttaactccactaagtttccagatctgacttgagtgtcggagggtctttatcaagaactcttccagtggaccctgatcgtcttcttcatcttacatgaccccttccttaaagccaagcataaagagatctaacggaccaatcacaaatcgatgatcaacccaacaaatcagacatctgcctaggtgtcctcatttggacgctccgctggacctcaacattatcaagttggcaccgtctatgagaacgaaggagactatcttgtcactggagtttccaaacaaaatccgttgagatccacatgacaaatcaagaaaagctaatagtcataacagcaaaaaaggaccaaaggaaagagagatggtgaaagacccaagaatcactaacgacatcaaaaaatcacacggtgaaagtcaaaaaaagactgacaccgatgtgaaaagggattgcgacataagggcaattcgcctggcgtgaaatagagatgacatgcgcgagttaatcaaattatacagttatctctttagtccaaagtatttttgtcattatgactagcttcaaacaatagtccttttgaatatatgcttgggcatgataatattttagaaacagtttaaaaagctttcatcggtgattaatattggtatgaattccttaaaaagggtattatttgcttaagcatgctgctatgagaattaaaagctgtataatgatttatgcatgagaaacattatttattagattctttgaaattatataagatgatatagttggacaaaattactattttgtattcagttgaattataaaactaaatatcttgtgttcaaattaacgagcattcttattacatatactctgtgcaaacttttattttgcagataaattttaaaagcaagaacaaagctaataaacctggaagtctcagcataaagccagaagacttcaatgaagtaggtgaccggtctcggaaataagaccgccgataccacaaaaccggttgagaagatgaatacctcaatgaagtaggtgactggtctcagaaataagactgccagcattgcaaaatcggttgagaagatgatctcaatgaggtaggtgaccaatataagactgctgacaccacaaaatcggttgaggagacgaagacctcaatgagtaagtgactggttcagacacaaaaccggttgaggaaatgaagatctcaataaggtagatgattggtctgaagaccttaatgaggtaggcgaccgattttgaaaataagaccgccgacaccacaaaaccatttgaggaaataaagatttcagtgaggtgggtgatcgatctcagaaatagaccgccggtactacaaaaccgactgaggaaatgaaaatctcaataaggtgggtgaccgatctcgaaaattgacttccggcatcaaaaagcccagttgaggaaaaagaaatccgaaagtagaccagcgagccaaagagctcgaatgacaaatagcaaaagcgctcggatgagattcggtggcaagtaccagaaaggttcctccagaaggatcacatattgacaacacaatgacaagagctgagcatgcccacaagaaatacaagaaaaagtccaaaattctcggattaaggttgggagcaaaaagcccggaatctccttaagagcaaatagcccggaatgaagaatcagggttttgagccacaaaatacttaagggcagatagcccagaggagtaaaaacgctcgaaagaagtttgagggcaaatagtccaaaaagcgaataaggacgaaaatagtttggaaagcgcttgagggcaaaaatgtctggaaattacgaagagccaaagagctcgaaagaaagaattagtgctaaaaagcccggagtatcatatagagagctaaaagagctcgagtgaaaaatcaaggctaaagagtttatttgctcttaaggagatgtggccgacctgcttaaaagctcgtattacaagaacgttttgaaggctgatgtggccgatctcagtaaccggaaggagtttatttctatgtaagttggatgagtccagtacggcttgatgaagcccgggtaaagatgccgacctcatagctggtcgcctctttggtacagcacagggattataagcgagcatgtagagagttcgaaccagccagctctgcatttattatcttatagcccattattaatgtgctgcctaatacatctgcacaaaagtatcactgccccatcataaggggacacagcaccaggggcatcaattttattcaaaggtatttatacatcgaactaatactaaaaaaaggaatctttgcttctctgaaaatagacctatctctctcttcatcacacagagggagtccgaagtcattattctcttcttttctctgtcttacttcccgtaactctattaagttcccaaatctgacttgagcattggaaggtctccactgggaactctcccagtggatcctgaccgtgtttttcatcttacaggaccctttctcaaagccaagcatgaaaatgaaaagacccaatggaccgatcatagatcgatgttcaatctagcgaattagagcctaggtgtcctcatttggacaccccgccggatctcagcattatcacaagtatacaagcatgaaatcagtcattcccattaatctaatttttaaaaaagatgtagcttaactatgttaatgagaaacgttgcaatcctaacataacgggagggagttgaggggtgggaaaggaaggacgagggaacgaacttaaccttaagagcttgtttagcaagaggtagtggaatgataaggtgtttctcccttgttccttcccaaagaggggaagattaaccttccctttgtttactttaaaaagttggtggagcatcttgtggcgctgagaagtggattgaagtagtcagggagagtaagggaagtaataagcctaaataaagtgcaagattgaatggtaaaaaatgttttaatatcatacatattgtacaaagtttggccctaccacagttcaaatggaagacaaggacctcattatttaataccaattaatgaaattgaatttttgataatagctatatctctccctctttttattctgttaatgaaactcctacaaagagttaaaattgcaatttgggctttaagcttgcccagtggaagatggtgcaaacatctctttaagaagtctcatgcaatgatttgaaattgctgtgaaaacactgctatctttttctaactttttcatgctcaatgtagaagcttgctatgatctaagatgtatattttagtattgtattttaatattttctaaacacctatgtgcaaaacgtgattgctacacattcataatcgttattttgtagtaatacaaagatgattagatgtagctgtcggtgcacaaatcaaggggaatttttagttctaatggtgcaacttgtgtctatgagagctctgatttagattagagatataattatttactgtggaaaggattcatttaattattaccatgatagttgcctgttattggtagaagattttacacgatatttgtggggcatgtatctgaatcaagcttttggttaattgacatctttgggatgtggtttgttggcttctggtagttaaatcctaaattcctgcactagttgattcatttaaggctgatagaattttctcttttcaacctttttcctgaatatgcagataaatattaagtttcaacaaaaaaagaagaagacaaatattaagttctgaaattactaaactgccacaagcatattgtgtactttttgaaatttgtacattaccatatctcagattctcaaaaatatgtaggagggcatgtttggtacaatgtaattgaatgtgatgactgaaatgaattttagttccttaattacatttcattttatcctacaatcatgaactaagatctttgatttattatttgaaggtctgcactggggtt

SEQ ID NO: 6109 - DNA, 3888 bp, Manihot esculenta
  Intron number 16 from transcript cassava4.1_000089m (locus cassava4.1_000089m.g) derived from phytozome v7.0 (chr-ID scaffold01237; pos 332357 to 336244)
gtcaatatcttaactaggtgtgcttcttaccaacattcaatagggctttttgcccatacactgtaaaaaaatatttctctcaccctgtttgcaaaaaaaactatattaatcactctgttaaatttaccgttagtcaaccattaattgtgaactgttaattgaagaagtcaacctaaattgaaaggattaatttgttgcaaatattgaaattataaaagataaattgttacaaaatattaagataaaggggctaaactgttataaaaagtgaatttgaataactaaattgttatagtctaataatgaattttaatgaaatacctattttgttaacaaaatataactttaggtattaaattgtttcacattttatagcagtattgcattaaattttgctatcatgtcaatataagtaatttaatcaagtgtttgtattttatttttattttatacatctacctattgtaatacatttaaaaatatatttatataattttataaagataatttgttaatttgtatcaaatttaattaccttaacaaagttgggaacatatttaatataatgttgcaataaaatatcttgatataaattggagatttggaaatttaaagattaagggttctgtgtttatacagtggagaaaatatttaatgcataactgccataaatatcttgaaataaattagaaattagagaatttgggattataatagagaaaatatttaataaatgattgctataaaatatattgagatatattagaagttaagaaaattggggttgaggattcaaagtttagcggacttcatcatgactaacaataaatttaacggaatgaataatttattgacaaaatgaaaatttaggaactaaattgtttactatttaaaaattagggattaaattgtaattttttaaaaatttaaggattataatgtaaattaacttttaatttatttaatatatatataaaaacttatcgcaactcattgttttatttatttatttatttatattttctgagtagagtgaccattatcgcatcttgtagatgcggtatagtcctaaacttccctgttttgggaatattttttttcccaaacccttatttggatataattcttttttttttgccttgagcctatacaatagctttttcaatagttttttttttttgcaagggccacattgtaattgatcttctataatgtaagtgaagtatgaaattctgtttggcataagttttgaactgtttggcaaccgtgtatcaattcttttgggtatttggttgttgtccaattttgaaaaattgtttttggaaaacaagatgaaaccaggagctgccagcgagtcaaatagcagaagcccggtgttggaatcctctccacacgccaccaccttgtttcagtcttcagtacacactggtgcatgaacccatttctggtggccgtttcacgttggtgacatcatcagcaacctcgcgaaagaaaggtgactccagctaggtggttcccatcacttgcccgcctctcctccacaaatccacggtgaacaatgctctgaatctgctgttcaagattcatatctcctaatccaatttccagcagcttcaaagctggtttttagtctccaaacactttcttttattttccccaactcgccgtcaacatggctaagaaatagggggccctcttgaatttatctattacattgattgaagcaaactacgtggactacatacaactccaaactactaagtagtagtcttcttcctctaatgttgttcactctagtaacttctatgcttgtttgactcagtcttcacctatgggtctatagattctagactttggcacttctaatcatatttttggtagtcacattcttttgtctattcttgtttcaccctctacactgtctcacgtcatattagctaatggttcacaaactttagtcaaaggagtaggaaaagtactacttctcctgtttctttccttgactacagttctgttcactcctaaatgtcccaacatcttaatctctattaacaaattaactaaaaaccttcattgttctgtgactttttatgctggttctgtcattgtacaagatctgattacgaggaagacaattggagcaggctatgagttgcaaatattataccacctcttcgcttctccagttgctcttatttctactactattgaacttattcacaatccaagtgttgtcaagttacaaaaattggttcctagtctttctgctatatcctatttggagtgcgagccatctcaatctgcgaagcaaactcatgtttctttttccaagcaagtcaatactagggctacttctatgtttgacattgtttatttaaatatttagggtataagttgtgtcagtgttattttgaaatttcagtattattgcgtttattttggcacttgggtttttcttatgaaaatcgttttgagttttgtgtttttcaaaaattttatgctgaagcacgtaatcagtttggtgtttgcatttagttgttatgaagttataatacaaaaagaatatatgtcttcttcctttactaatttcttatgccctatcccttaacaaaatgtagttgccaagcgaaaaaatggacatgtaattaaatgaactgcactttacacatacaccatgatgttggtaatgttaattgcttagctatagcctcgagtaattctcgaatctctttttgttcccaacattgttgctggtaatgttcttgagagagtttgatatgggattctagccgttgctatggattattttgatctctcatgatgctttgctatgataccaatttgctatgttcctagaaaaaggatcttgttataggtttgagaataggaaaatcctctcttgcggtggaagatttccctttgttatcattctttccctttcaagatgaacctatggtgatcaacaggatgaagagtcattcggagaatcttataatctcagagttctgatgtgtgagagaactctcaatttcaaggaatggaaaaattctgcttattttatttttgatcttccagcaacatatataaggaatcgtgtaactgtttaacaccaattctgctgaactaggagccctaaggaataagaaaacaaatagataaaggataaagcaatctaatcctaaaataaagaataaatcaatctaatcctaaaataaatctaattctagaaatcattcagtttgctcgactgcttcaaagtctgttcagctggctgagcttttctcttgtgtggtccccataagagagtccataacatactgctctagttgtgtagatttttttcaatcattatggctttagcctaatgggaaactggagtaatgattaaattgacattcagcaagatttagagggctttatttcatttgccttcatgtcttgtaattctcttagatttgtattatttttttttcttggggtgctttcttcattttgttatactgttgcaccttaataaattcttttttatagaacaatgaatgagggaccaccacctaatagcacaaatccaaaatgagaaaccattatgattcagttattcacagtcaagaaagaaaaatgattttgattcttacatctggagattaaaaagctatttgaaggatttaagtaagaacgatgataacatgagaggtattactcacaatgtttgatttgggtctaaataataccattttgtggcttttctaaaggaccttttgctttggggctgggaatggatttagtaagttcactaaagttattttatttctgttgaagttactccaatttggattatcatttatgcatgtggaagcttgttttatagggtgcaacaagaatcagttg

SEQ ID NO: 6110 - DNA, 649 bp, Manihot esculenta
  Intron number 1 from transcript cassava4.1_001718m (locus cassava4.1_001718m.g) derived from phytozome v7.0 (chr-ID scaffold03718; pos 186474 to 187122)
atcgatatttgcgattctgttaattcaaatatttggtaaagcttttttttactttttcttatcatttgcaaacctcttgctgttccttttggatttgactttttatgtttttgtgtttttatttataatttcattatttgctatattatcttatcatatggttacagataaaaataggcgagttgccatctgtgtgtttatgttgttcttcttgatatgtatgttcgcaaaattgcagggttgtagtgttgatttaatttattctgatgaattaaattcgaatttcatttttttttttaagtttcttctttatccagtctaagaaattaggaaacctagaagggagaagaaatctcttgcataagttttgaactttttcatggttaacaagtttccccaagctttattgtaaagactgcttatattgaagggagaggatcgattaaacctgtaatagagtttgcgtttatttgaggacagatcacttggtgaatagagccctagtctgctggtggtggtggtggtggatttcaattaaatttctcttattaattattttttgaaaagttgactgccttttaggaacataaaatgagttttgttttgctttgctgattagtagattttggatttcttaggcaagcaaaag

SEQ ID NO: 6111 - DNA, 3254 bp, Manihot esculenta
  Intron number 15 from transcript cassava4.1_000902m (locus cassava4.1_000902m.g) derived from phytozome v7.0 (chr-ID scaffold05875; pos 1701253 to 1704506)
gcttccgtgctgatcagaagctatatcatcttcaggtatagatcattttttctttctcctattgtttctttcttgattggatacttctttggatagaaccattctgtgtgcaaatgttttccattgattattgtaattatgttccctcatgtttgttcttatcaataactatacctccattgacgggcccattctcgtgttccatataaccatgcatcttcttaacccattgtgactttggtattgactttattctaatatgtgttagcagatagtgcaagttagttcttgcaagttagtagtcctattttcaagagtcatgtagttagtagttaagccatttcttagtggttaacccataatgtaaatagtgcaagttgtttttggcttttccttatgatccttcatgttgcttaatggttgcctatttttggagatggttatatctcccactagtatttaagtatagcaactcaataaaagaatcatgggaaaacctttcaaaagttttttagtacttcaacttaagagattttcaggttctctttgaggagtttgttccattgcaaccataagtcgcaaaaaaaaaaaatttatccccagaaaattccagcaacaaacccataacttgatccatttccaaggaccctaacaaaatgcgtgtattaaatatagttacttgaaaagggtatgacatttttggcctgtgacatctataagtattggatactcatacccacaatttcttatcaatcattttaaaaaattagatacacatacccgcgtccaattaacatactttaaccatacttttttcctccaagaaggaaattactttttttaaaatgattgataagaaattgtttatccctttgattaatgtgaactaagtagtgagataccagttaagaatggcattcttagtttttaaaatttataattttagtattataggtgaatccttgggactaaactgtaatttaccttctattgttatttcggagatgtaagagttgtgtttttatgacctgtgcacttaatgcaatgaaagaattacccgtttaagcaacctgtggatgccttccttgatgagtatggatgggtgttcatatgaagtgagggaacagctccaaactataaaaaagggacaaacctgaataatttgttgattgtagggcttagaactttaaaatatttagttaatttatatgttttgaattgtttgtgttatcaacttaatgaaatatattgttgatgaatgctaatgtacatttaactgatgaaaaaagtattatttgttgatttttttccatgaaatgaagaaaaggaggcaaaggaggcaaagatactttgaacttttaaagcatcattgcactatagtaacttgtttcagtttggaaaaaacaaagtgattacaaattgtgagggtggtaaaggagtacaagtatagattttatacgtaaatttttattatttgtgttttagaggattgttgagtaaaagtggagaaatcaattaaatggatgctggttaacagctattactcagtggggtcaatattttcacacaaccctcaaacacccccatagccgagaagcaaattagcagcatgactgattgtgcggttgtcgaagccggtcaaaaataacattttcagttatcaataattttacaactgcagatagtggtgaaaggatcgaatccacagggaattgatacttacctatctttcttatcaagaccaagaaaacaaactgaaagtaaaatcaaagtaaactgcaagtatgtaaaagggagggtttgagattgattcagttgaactaatgatgaaagcaataaagtaaagcgaataattaaagtaaaggaattcaaatatgagaaaagttctagttgaagaattggatccacttcagttgttgggattgataattgatacttaggttcctttgtttgattcaataaattagttatggagatggaatacgcttctcaccattatatctctccctaagcataaattaattagggaacgtcctctaaccaatcactaatcaacaagttgccaaggaacgtccttgggtcttaggcatctaacaactgtcaattgcattaagaaatagagagacctaattctagctacccaaacgcatagtgatatcgctagatcatgcaatttctttagtttttacaccaagagttacttgtgtttgaacaatccaagcaattatggacttaaaactattcaaactaacaaattattaccttgcaatcaagaatcaattggccatattgatcaaaataacaaagcaacaatggaattaagcatgagattgcatgaatattgaaaaataaaagttaaacaatgtgtgttcagatctcccaatccataaaacaactaaagtatcaaccaatcttcaactagaaataaaggtttcagccacttatgactgaaacaaaacaagaaaataaagaaaggaagaagggagaagtggccggatggccttggagaggtgtgcgcccaatgtgtggccgaatctgaattgagagagagatggtgccttcgctgaatggagaagagaggcatatatagggtgtgcggcacttgaagataggatggagtgttgccctaagtttctttgtgagatgaagcctttttttgaatttcaaattttgaatcttgattgcttgagaggcaaatgcattttcttgagatttggcttcctgaataggcagaactgaatgctgaggtgtcttcacattttaaataagggaaggaagatttgaaatttgaatttcaaattaatctgccgactgcgctttccttatttatcttcgctactgcactttccttatttactacgctttcttatttggcactttccttatttggcttcacttcagctgcaacttcacttaggcaaactacttgttctcttttatcctcttttaggcagttttaagagtattttctccaaattacctctttacaccattttctgcaaaataagatcaaaaccacaaaattaggcagaaaaagtgcaaattaacattaataacatcgtgataaaatggtctaaatttggactgatcaatgacgatcagaaatacatgccacatttgtttgtcccttttgccctttcctctgtgatatgcgtacttgtgattgttcttcattgttttttgctgttgtgataaaaaaaaaactcttggcattttcagacccctcagactcccattgtgcgcacaagttcata

SEQ ID NO: 6112 - DNA, 2323 bp, Manihot esculenta
  Intron number 20 from transcript cassava4.1_000555m (locus cassava4.1_000555m.g) derived from phytozome v7.0 (chr-ID scaffold06656; pos 785159 to 787481)
tccacggtggtgatatagtaagcctctaaaattttgttttcctttattttctttttcttttttccttactttaaacaattttgttgtagtggatcccttcatgttagtattctgctgttttatttaatttatttcattggtgcgccgccggtacccttatttctctgttctgtcatcgtaatagttcactgttgatagttacagctatggtactagaaacttgagccctatctggttgattatggataacaataattacagttggaaactggaactgcagcatccaaagtccagacttccaaatataaatgaaattctacaactcaaataataattcttttgaatctgttgatactttttgttccttatattgaaaaagaagactctcctagtttattacagtgaaaaatcattctaaattttaaacaatagtattttatgcaatagccaagcccaactactttggctcagttgtatctaacaaaaagtttagtttcaaagggcaatttaaataacaaacctaatagccactgacttgaaaattttgacatttatgatcctcataaacagaggcaataaactcaacagttggtttactatgcttatttttactatattttgtttaattaccataatattcgaccagaaaaataggtgtagggatgggggagggacctaataaggtcctctgcactctagatttttctcgttgaggttagaagtaatgtattctcgttttgatgttctactttggtgaaaggaaaaggaattccagttaagagcccaaaaaaaaattgttgccttagcttttgagaggaagaaatattttgggagagaccaataaaggagcctttccgttggatggaggcagcattttgtaatattagggtctccccttaacacgaaattactaccaaaaatatcattatatttgcttaaaggcatttgcaagtatttttctcatgtttatcatgtcttacagtggagagtgagctatggtgtttgatggatatggaaaccacaaaaaataacctattaaatatcaacaaatatgaattatatatagtgataatggatcgaatacacagggaattaacactaaaactttccaaacaatgactagaaaaaaaaaattgaaaatagaataagggtggactttgatgatggattaaaataaagattaaagcaatttgaagaaggcgataattaaaagaaaaataaatcaatgaaagcaagctctagttgaagtgtaggatccatttcagtttgggaattgattatcgatacaaaaatacttttattcgtttcaataaattagttatagtcatggaagactctccacataaccaatcactccttagattttagattaattaggaaacgatttgctaattaattcttagccaacaaattgaccaaagaatgtatttgagatcttaatttatcaactgctttaagttttagagagatctaattctaactgacccgccacgtggtgagtttgagttagtttatgcaacttcttagttgttacactaattgttacttgtgtttgaataacctaagtaattacggatttcaagtattcaaactaacaatatactactttgaaatcaagaacaatgggccctattgatccaatgacaaagtaataataatatgaagaacataatttgcataaatattgaagaataaaatatgaataattgagtttagatctcccaattcatatagaaattgaaatttctcctaatttcaactagaaataaaatatttagccactcatgccttacaaagaaaatacaaagcagaaaagaaagaaagaggcagattcggtattgtccagtatatgtgttatgcggctgtcctcaatgttctgtttatatgggcgttaaaccctagcaaaatctcttttggaatggtaattcttttttgatttgatttggaattccttcctttaatgtgtttcttcaagaatagaattccttgatttgaggaagacttattgccgcattgtttgaggagattccgtgtgggtcccgcggctatatattttatttatgtgcagtacaatggaagatttgtccaaatcgacagatcaagtcagcttttgcacttttaagccgtttttcatcaaatcttcttcgttttatgcttttctgcaaaacatgaccaaaattacaaaattagttagaaaaatacttgattaagtactaagaatagtataaaaaatgtatcgaaattatgtttgattagtgctcacgaactttttgtcttcattcatcaaggcttatccagcaagggtttccaataaccagccctt

SEQ ID NO: 6113 - DNA, 2161 bp, Manihot esculenta
  Intron number 1 from transcript cassava4.1_000490m (locus cassava4.1_000490m.g) derived from phytozome v7.0 (chr-ID scaffold05162; pos 728185 to 730345)
tgacaactgaatttctacttgaggtacattttctatctgtttattaatttgaaagattgcttatgaataatccagacttttaaaaataatttagtgttttgataagggacaaaaagagtaattacctaatattcaacaaataagatataggaacttctgcaaacacaactaggcatcacatctatggctgtgaagagctgaccctgcctgtttactgtttgtgagaatatcttccagagctcaattataaactgaacaagccaatatagagctctttaagctgaatccaagttaattttggttcagctggtcagcctgacccataactgagtgcttctgttagtcccaagtgcgatgatagcttgttaaagccaaagcaacatgacatccttttgtcgtaatggaaagcaagcaggggcttctacatcttcttctttggaaacaagtgtccatgtgtcaaatgaggccctatgagctgtgtaaatgtggccttatgaaagttttagctgccaataggtccacttgttaatgtgtgcattcacagtaatgttgctgttgctcttctttttttgttttaaattttctattttccaatatgatgctcaaagttaaaaaagaaaagagtagtttaggaatgaggcttgggtgactgacatggtcctaaattcttattccatttaaccatcatgaccttggttttctgcctagtggaataaccactgggtcaattttatgctaggtgcccataccttttctttatcttgagccaggttcaggctcattcatattcagctcgcttgtgactgatatcaactttctaaagaaagaaatatattcacaagataaaattcctttttttttcttggggtggggtagggatggatccatgcatgatctccctgatttttttttcaaaattagaggtgtttatgtaatttctcatttctcaaactcctacttaatttttggtataaattgctatcctttttttgagtatcggccaactaataatccaattccgtttcctattctttccaatattccaaaagtcaagtactttagtggttctcatattgtctctatttcaaattttctcttcctttgaacatattaataaaagtaagtcttttattctatcattattcttatacaccattctttattatttaagaggtgactgaatttttttgtttatctcactttgttgcaaatttatttaagggaattgatcgaaaatataggttatattacttaatttaagaaaaaaattttaatttttttaaaaatgagtttcatatgtaatgtttagattatctaacattaggaaaagtaagttttaattgcagatgaccatgagtttcatggataatgggtacactatttaaatttacgaaaaacaacttttaaatctagataaatatgactttaatgagcagtgggttaaactatttaaatttaggaaaaaaaataaaatttaaatatataaaactatggttttacaggtaatggattaaactatttaaatttagggaaaaaaattttagtgcttaaaagtttttctaaattattatgtttatgatttttattagtagttatatgaaatatttatcttaagtgatatttaactgtatttattgatttttttaaaagaaacttatagctatggaacagttctataaaagaacaattgcataataagtatcatcgatcaatcaacctgttcaatcaatattacccaagtaaacaaaattagctttttcagcaataaatatcattaaaagtccactctgtaatataatgaaatgataatttggtgacttacattgaaaaagatatacttgcaaatattgttaataaaattattatgaatagatttcaattaatgaaaaatagaaaaaactaatagtaatttaattgtaatatattattaactttttattagaaattagcttcttgatatatatttattcatgtcagcctcccagttaatttctgtgtgtccactgctggtgggtgggggaagggggcagctataatgtagggctgttccttggattgattgtttaattgctatgcattgataatttatgattctttgacattgaggtggtcaaagtttcattcaggatacagttactcagcaagctgaggaaatagagct

SEQ ID NO: 6114 - DNA, 2264 bp, Manihot esculenta
  Intron number 2 from transcript cassava4.1_008559m (locus cassava4.1_008559m.g) derived from phytozome v7.0 (chr-ID scaffold01805; pos 201787 to 204050 reverse strand)
agagggttattgaccaggtttgctcattcattacatttgccatttcttttaaaaaaatttttcttttactctttactctatagcatgcgtgcataccagttaatgatcctgccagggggctattcttggtaggcgaatgggacagcctagggctgctaaagcccgaagtgagcctaaaactcagaactttatcctcttagggtccttagagtgtgattgaaattctaaagttggtcgaagagagactcttttcttcattaagacttaaaaccctttgaaaagagcgtagctctactttgaagaagtggagttcaaataaatgaggaagtaagatatatgcaccacgcacatgtaggctggaagttggtagtcaccactatgagagattatgtagctgtgagtttgacatgaagatgcatggtgtccaatctcctatccagtgttggagtatatttaggacagaattatgtgtaggatattatattaagttggatagttttagtagatttacatcaaaatactaagccttatagtgaagtgaagaattccttctatgggaagggatgaggtggttattaaggtattggagataaaacaactgctagctccactgtccatcatcaaaagtacagggtaagactgactcttgcaatgtgagcgtctttggatagaaaatggtcccgaccgtgtagagttgacagtctaagagtgggattcattgacgttaggactcgggaggagttggaattatgagacttgatgtcagagcaatctaaagaatcttcaaccctactctgtaatctcatactctttcctcatagatttcttgaacttctccatcatcatagtatttgtgcatgtgcatttcagatcatccatgtagagacataagattaagaaaatttttggatcttgtaccttgatttagattgatggtttgttgggacttctggtgtagtctttgttgagcaaatacttgttgatcttatgattcccatttcatagaaagttggtccaagcttaatgctgtattgcactaatgcgaccaatggagcccatgaagggcctcttattccatacaagcaagggctaatagtaccttatgatctggatggatttgatgaatttcaaattatgggttagctagtgccaatcatctgagagcgactatgccatcaaaaagttggtagctctacctgtttggctgtaatagagtggatgctgccaccttcattggatgtaattgttggttggacatcagttgtgctggtgattgagttgccagattagcagcagtattgctgtcatccataattgctttgcaccgctatggtggtcaataaatcatctgttgctgctgatttacggtgctcaggctgcgtcatcatcaagcagcaccagattcttctccactgtttctacttgtgattccacatgagtgtgtatcattcaagtagcagtttggaccaaatcggtaaagtgaagaatctggatggtgagatttgagaagaaattgcaaaatacaaaaaaaaaaaaatttgacaaaatgagctatagagggcaatgtttattacttgataatagcttaggggcaggtcgagcttgaattagtcaactataataccttttgcagcaataattacaaggaataaatccctctctgacagactaattttcccttccaggctctaagctggaaggaatccagaagaaggataaaaaagtaccttccttatgtctataattgccctttaacttcacatcatcagagtgccgttcccttttttaacagaattccttaccagatccaattcagtcccttatttcttctagaataaaccatctgagtcttccatgtgggcttctgtactgggctgtgaatctgtgatccactattcatcaatctgatataaatatccatataatctgccatgtggcttttttttgcatgtaaatgaatgggacttgagattataaatcatggaccatgaaatataacttagatactccattttgtttttcctcctttatgaataatttctgctgtttactttaagtgaaagtgaagcataattttgcacgtacttaaatgcatgaactatgtttacatgctacagtcttgtgaacagctgcttgacatcctgttttcaaatgttaaaagatagcattttcaagctgtgcttgattttgctatacttatgtcgattgatcaaatatttattgcaacagaccatagatacaagcattaagctagcttttgcact

SEQ ID NO: 6115 - DNA, 3615 bp, Manihot esculenta; identical to SEQ ID NO: 5654
  Intron number 3 from transcript cassava4.1_014030m (locus cassava4.1_013984m.g) derived from phytozome v7.0 (chr-ID scaffold00524; pos 25929 to 29543)

SEQ ID NO: 6116 - DNA, 2310 bp, Manihot esculenta
  Intron number 1 from transcript cassava4.1_010621m (locus cassava4.1_010621m.g) derived from phytozome v7.0 (chr-ID scaffold04209; pos 727678 to 729987 reverse strand)
attgcttaatagcgtttactttgatcaacaccaaggtactccgtcatcttctctttttccattgtttttgctacttttgctgttaatgttactctcaattcttcatttgtgtttcccccccactcttaattaattggttgttcttcaagggaggtgtaaaaattgcgtagttgttgctttagagttgacagtataatttacttggttacgaaattttactgaattatttttttgtgctaattataagttttggttgatggggcttcctttcttttttttgtgttttcctttctgtagtagattattctcttatcaagtatctttcgcagcctgaatctttgtttttgaaagctttaagattacttaggaaactttgagagaggatttggcgtgtgatctaagctagagttatactcaacccggtgctctttttttggtgattaaagctattgattatggtgtatgctgcaactcctttcatctcttcatttggggtgatgtttctggatcatttatatgtgattattatatgcaaaactaaaatgttcttaatgattagcttaatttctcattgaaagttcaaatatcatgcctacgacacagtggggtaaaagttatgaccttgattttgcgtgtgcagttttctcatcaacaccttcagataggtcatattgtaatgtgtcaaagcttgcactgatctcactttttgtgccaggctgtcagcttttgttatattgatattaacataagttggacagtttgtagctcattttttatactttgattttgtatgctatcttgccataatgtaacatttctaactggtttctggaatgggtcctttcttatgggttctctcacaactttgcagctacacttttgtacacttggtgcttctgctctgcaataatagttgccttgcatatggaataaaagggaaaactactgtctgattagtatggaatggaaataattcaggctattctattttcctaccccagagagaatccaattattcactaaaatattgttggaaaaactgtgtcttccacttacaaaaatattgttggataactcttgtttctttcacttgtacaacatgtttaagaaatgggacttattattcagcctggcatattttcttttagaactcattcctaccatcccatcagctaccagtctctaatattatatgtaaaatttaatctgtgttacctcccaatacctgatgtgacacttttatggattacagtcaaaatttcactggagtgtgatctgcaaagccttattgttgccagcccctacttttatctcaagtttggatgattctgttacagatggtcattttgtttccattttataataatcctagttggttccagatgtgatattggtagataaggccacatccacatactgattagtcttttaaaatgtcaactgagttctagaatatgggagaaaagtgaaacattgggtgtcatgtcatattctttgttcgtaagaataactctagtaaaaatttttgctattttagttactttttttgttggacactctataggatttgttgtttggcgaatattctgttaccattccttgtttttttttgttttttttttactgaaggtatatggaaatgtcaccactgcaactggacctactgcatgggaagtccgttgagttatcatagtcagaatattaaagggcacttgcacatgctgatgaatgtcaaaacttttaatcaacagggactgagtttcataattgaaactaaaggtcagtagatacaaagatttgttggaggattgatagcaattacatttagtgaaaatgcagttggcagtgccctttaatggaaaacagttaactggtgttatttattggcttttgcagcaccctggtgtctcttatccgtgtaattagtgccttctgttggtggtgtaccatggcaattagttcttcaacatttgcattttctaggtgccaaaattttagatatttatttctgattaccttatatcaagttcaacatcactggagcaactagtgaatatcaaatctataaagtatgggataataattggtagttttacaaccattgcactcactacagtgaatttataactatggcacaatcctcttatattcttctattttgtttttatgcaattatagttgttccatgctttaagtattaaatttttagctactgcttggttgcaggtactgaacccactgatggagtttttaaaatgaagaatggtagtgttactagttctatttttgggatgaattccagagatacag

SEQ ID NO: 6117 - DNA, 2118 bp, Manihot esculenta
  Intron number 3 from transcript cassava4.1_031205m (locus cassava4.1_031205m.g) derived from phytozome v7.0 (chr-ID scaffold06853; pos 122785 to 124902)
tttggtggaggtgcccttttttctctcgttttctttttctttttcttttttaatagaataaccattttctatacctatagtatagtatgcttgcggcatttgatttatgcattgtcagtatgcagtattttatgaccatgtttgtgctgtttaagctctccatttgctcatgagctctgccaaaactaagtccttattggagatgtgataaacaaataattgttgggcaataccaattaacttgtacagatctttgttagatagtaaaatgctgttagcctactctataatggtcattctcatcttataatggctggtatatgactttccttttgtgccaattgagaactctttcatatagctgcagttcagctattgttttatgggttgaaatttcctcgaaaattgggttcaaatttgtcatacatataaaccagttactagatctggatgatggatgggataaggaagtacaatcgctaagcatactgatgcaaactgaataaaatatatataaggaagtacaatcgctaagcatactgatgcaaactgaataaaatatacttcaactatttgttgttggtttatttagaattcagaaaacaattcatattgtcattagttcgaatcatattctgactaattttttgtggtacgattccagcatagtatctggtataccatttaatattatatgaatttgttgttgctctcttttgcttatctatactactatggacttaattgcagtaacattatagaacttgatcctggagcatatttaaattttattttacttaggacattaaagcttttgagtgtggattcagaattatgatatggatctatattggtcttgaaagtgatagaacatttcttaaaacctgagattccaacttggaattttcaggtttggatcattgggtgaggagtcttaatgcttgttgctatacctttatacccaaatccactgttgttagaatcttgtgattctcgatttgtatcttatgattcgaatttatttttttcaacaaatcaattcgaatctatggagtgaatcttaaatgtatttgaatcttgctattttttatttgaattttacgattctcgattcgattttatatcctagcgattcaaagcgatagggtacatgaattgtgactaaataaaaaatagatagtgaatcaggtgaatggaccgaatttttgcccgattcaattaattatttataaagagtttgttagatcttatattttcaaattttaagatcttattggtttttgttataaaaaagtctacataaattttttcctttaagtatttttctttcaccaaccattgttttccctctccctctttttttttttttttttttaattttttttatagttaatttacttaactcattattagttgtcaagttacgacaaattgacaatttatattaataacaatctaatctgctagctttttttactatttaactatttgattaaatttaaatgagagtttcagtatatgtataatgataactattgtatacaattccaaaatttataatttataacataaaactacataatataataatacatacatattattctattatgaagaatatttctaattagataaatgataattctatatttatcaaaatatgtcatcatgatatttttttttttacttatttttagaacatatattattttaagtgatttttggaatttttaatgaatcttatgattcgattctcgattcatgaaataaagatttcgattttcgattcgaatctcaatttgataaccattcctaaattgtttaaagaagaacaagaagaataagagagagattgcatttaggaattatacgtgtgttaattttgcttgctacttgctgctgaggcttctgggatttgtaattctctggtctttttgtactgctactgtttccgtaactgataattgtggcatcattatgttggattttttaatgctttccaattctcaattgtagttgtacttgttggtgtccaaacgttcatctatttttgttacattcgcttgtttgatccacatatttgttcatcctaattgtagtgcttagaaggtgctgttg

SEQ ID NO: 6118 - DNA, 1465 bp, Manihot esculenta
  Intron number 1 from transcript cassava4.1_001612m (locus cassava4.1_001612m.g) derived from phytozome v7.0 (chr-ID scaffold02196; pos 293655 to 295119 reverse strand)
ctcttcctcttctcttggcctttgttggtttgaaggtacagaatggttcttcctttatctgcttctcttgtatacatagtcacactaggtctcggtatcgtgttctatatctttcgccataatttctagatctgtggtttttcttctgagatttagctttgtaatagagattctgtagttgtgatctttgattatatttctagattgattcagcttttcaggtgttgtgtcacttgttttttaaactctttagttttgggcaattcgttttttagattggatgatcgttttgagcttcttgtggatttgagtattttcggtttaaatttgttgatcggcttgttttcagtgctgtttttattgttgcctcagtcgttttattgggtaaaatcctttttcattttttgcacattaattaggttaagttttagattcacatttgcacgtgcattttaggtcttgtgttttccctactgtcttgggtgttcattgataattgatatacgcacattgctgtggtgatttatgcacattattggtagttttcatttttgtgctaacttctctgcatatacttcattgttctgaatgtgctattttttttcaggataattaggtatacttcttgctttaacaaaagccatcctaggtttaaacttaacgcatagatttaaacattgttttttttgttttttcacttgtttttattgcattcaaaataaggaaagctgctaaattatctcgatctacctttgttttgttggatgtccgtggggaattatatggagtaatgatttatttcagccacgcaactgaattatactttgggataatcacttttttttggtgcttcaattatcttggactgaagtcattttacagtcaatttacatgaatattgcatgtgatggtctctggatggttttattattggccctgaagcttaatgattatggtaactttgaaaaatattaatgaatcttgtctgcaaactattggatgtttttgaggttcatagtgatctaatatcatgatccatagggttgtgtgatttctcatgtgcatggataccatgcagtaaatgctaatttatggtgacttatgttttctcaagaaattatacagtactttcggattaccacaatggcatgaataatgcggtattccaaatcaattaaattaaaaaacataatttttattatttttaattattattagaatatgtaactttgaaggagtcaattgaagaagtataagaagaataactaccaacccacttacccttttttgttacatgtcctaattaaatggtgggaagtaccaactcatcatgccatgtagattccaagtgtattgtataatttttactgttttctcttattggtttatttaccatgcagtatatttaagttataaattgtttcatgcaggcataattttgtaacaactacatcaattttatctc

SEQ ID NO: 6119 - DNA, 1252 bp, Manihot esculenta
  Intron number 1 from transcript cassava4.1_017327m (locus cassava4.1_017327m.g) derived from phytozome v7.0 (chr-ID scaffold02801; pos 78 to 1329)
aggattgagttggttattgcatctcctttgctaaggtgctgaagcttgcatcccatgctcctatttaagctgacattcctgcttttatggtttgtttgtcctatgcctaacaataaattaaacattttttatattgaaaaacgaagtctataaatttttggagccgataggaagaagagtcctgtttgttttcagtgatgaaaatgttcatctaggaatttgtgcatatctgcatttgagaggctgatgtagtttgctggttaggaaattcaccttatgcttaatgaaaaatgtaacttgtttcggtcaacttgtcctcgcatttgctcctaaccttgttgacttctaatgtttaattagatttctggacatttttcatggttgtatccaactagaaagcagtggacatctctagtttattacttgtattctcctagtgaaacacatgacattgatgtgtgcacaaacagtattctcaaagaaacttatattctcttgaatttatttttatgtaaactttcagccagattgatgatagaatgaagtatcggtattcaccatcagagttatttgttttcaactttacctcaacttcttttgtgagtagagtagccctcatgagctactttactgctttttttttcttgcttgttttatttttgcttcagatagttttctcagtttacttacaactccaaagtacatatgccatttttgtatgttctttatgatcatgccaaacacccttctcacagattttcttggttagtggattttgagttctcctcttggggttgaaaattcattttattttatgtgaccaaaattcctggagtttaagtataggacttttgtttttcttattccacaaaaatgaagagttgattgctgagaatattaactcctggctgtggtttcaataacctccaaggactagtgacgagagctttttctttttagtagttccttttgtgtagtttattttacattttaaaatttcttacattcatagctggagttaaaattggtggtactgtttctagagttaagttattatcaggattgtgttccaaaaatcatatattggatataagtgtaggaatgtaggatttaatctttcttttagaaaatttggtttgttcatattcagtgccctgtaaaaacaaatgcttttgtcagatcttctctcgttaagcaattataactatggcttttaggacattgcaaacagctgttggagtttttggaggtg

SEQ ID NO: 6120 - DNA, 594 bp, Manihot esculenta
  Intron number 6 from transcript cassava4.1_001051m (locus cassava4.1_001051m.g) derived from phytozome v7.0 (chr-ID scaffold06916; pos 1514097 to 1514690 reverse strand)
cctgtaagggctagtagccttttgcagattcaagacatgttcatgatttagtgatgcttgcagtttgtttgttttagtgcattatgtaggttgttttaattgcagtgacattgtgttagtttggaacttttgctgatccttctattcacttttcttgcttttatattttcagacatggcagacattagcaaatttgttggaaatagctaaatctatacaatatagatagggtggagttgcagggtggtgtttcttttatgtagctctatcatgtggaattcagtccttctacatttttagaaaataattgtgaacttgtaagaaaatattggtcatgctgaatatgaatgaagcagaactggtcaagtaactttatgctattaattagaagttgtattagtttcaaattttaacctagttgatatctaaaaggtagattaatttaggttttacttgttcagaattttcattattttgttttgattctttcactgtttcacagtactttggaaggtaaattcttgttttgctgatttatttgcaatctaaacttcaataggggttgagcagctggagtttgcagttgctgagcca

SEQ ID NO: 6121 - DNA, 1770 bp, Manihot esculenta
  Intron number 3 from transcript cassava4.1_013516m (locus cassava4.1_013516m.g) derived from phytozome v7.0 (chr-ID scaffold06814; pos 221487 to 223256 reverse strand)
ttggacttattccagcctcctatataactgtcagggtacgtttctcatgattttatatttatcaaactgagtgttcgtttttatgattgctttagaaagttctcattccttctcatcaggatttttttagttatcctttctttgattgtttctctaaaataatgttgcaccttctctcatgtttttactgaattattatagtactcgacgttgatcgttcagacatatactaagttgagattataattaataattattactccttatgttggttagtttagcctatttcttggtgcatctcctattacttgtcttgggatgtttggatgaatagtgattagttagtagtagaaagaaagtgcttcctgcacaattcagcatgatagtacacaaatattctagaagtcatttaaatgtggtttctgtgaatgatagttgtaacagatcttgtacctgtttaggaaatagagaagaaagtagttgtccttcatgagtattggttgaccatgatttctgatgtaggaaaaatactgaagagatgggaaattggataggggagaagaaacagagatgaggaaaatgaagaaaaatagaagaggagaggaaaaaagatagaagagtggctgaattaatggtaggacatgtatagggaacaagctaactaaaatacaggcaaccaataaaaattaatcctaataataaaacctcccaaagaatgcctcttaactaatgctattatgaaatattcttatttatagtaagcatagtcaagaagataaaatcgtaattattaaaataaagtagataattaaattcaaatcttggattgatcttctaggctttttcatctaataggaaatttcatttatgtgatctgctaatacgtttcctcatttatttgaggtgaaaatttgttgtctgttttctagttgtcctattctataaacattgttttaattctttggatctcagacttcgtagttgtgtttcttctttctgtctttctagtataagcaaaaagggaaataaaatttgctatatgcaattatgaatatcatagttgaggaccatgttaactgagcagaataatgtaccagattttttttggctaacaaggggatttttgcttgatccatatattataccgacactcaagtaaattcttggaaacaactcagaaaatgataaatagtttgtgttaagtttctaatttataagtctatcttctttcataattgcattgaactgcgtctgcatgtattagtattcacatgatcggagcttctgctgcatcagctctatcaattacagcttaatattattgtgctgcctttattttttttatagtgttgtgcatgattccttgttatctgtcaagtgcggtttcttgtcttctgttgtctgcatgagaaatgatctgtatggtgtggttgatttctggacttttgaggtaaagcataatgagtttgactatagttgttccctacaagtgttgctaaatgctagagttcacaagcacttcagagggatttccataatcacaggagaggcatatatagctgctaggttcttggcatgtttgaaatttatttctcaatgaattgttgtgcgtgcgtgtgttttgtatctgtgtgcgtgtattgaaaggattggatggtttcttcagtttcctaattgattcctcagtacattttgtgtaatggtgctaataattgcgctgttattgtataatcaggcaggccttgctcttggggatctcaagtcagtcaa

SEQ ID NO: 6122 - DNA, 999 bp, Manihot esculenta
  Intron number 8 from transcript cassava4.1_031034m (locus cassava4.1_031034m.g) derived from phytozome v7.0 (chr-ID scaffold01127; pos 231150 to 232148)
ctacatttgctaggtcctcatcaggttcaactctctccttattcattgtacataactgtgttttgtttttaataaacttcattttgtttgaattagattttgtagatattgttttttttttatgtctattattactgcatttgctgtcttggtttttatttgtaattttgtttttatttttttgctatctgtttgaatttagtgcattgcattagtgttgcccataaagaagcaaggaaaattggcttttatggaatcatcccacaggaaagataggtggattttaggagcattgtcatcgtattataggttcattgattgtggttgcaagaaaaaactggatggtgctttgttatgtcctcttatccttgggtgggccttcccctcaaacaaggcaggattacaaaatttgtttcttttgctgaccctttgcactggctctggtgattaggtgttaatgagcccaaattctttcctgatttcctttagctttgataaaattttcagttttagcatttgcttctattctatgtcattaaacttgccattgatgctatcagcttacataactcttacttggattaggtttgtggtctaaatctcttttgatatcctttgcagtttgtaactttttattttagatacttgcttcttttctgtgtcagtatacttgatggctaaatttatctgcttatgtagtgtgcccgagtgtctttgcgtattaattcatggttctgactcaaattttccatattgttcccccttatagccagccaagttagtttgggattaaagcctatttgttatattatattgttttccccctaatttatttttgaaatgaatggcttcaaatttttgaaacattcagttacctacatttgcatgtaaaatcacaatttctttgttctctatatctctgcattagcatttagcacctaaacgtttgtctctctgttgacaggagaagatccacgcagaagcaggaagttggcaagc

SEQ ID NO: 6123 - DNA, 1005 bp, Manihot esculenta
  Intron number 4 from transcript cassava4.1_001809m (locus cassava4.1_001809m.g) derived from phytozome v7.0 (chr-ID scaffold03614; pos 3904410 to 3905414)
cccagagtaagtttttcaatttcaatgaactaatctgaattttcctccctagccacctctgttggatcttgtagattttttttttttaattgtatgtcatgtttaataggaaaatttttgtactttgtgaaattcattaatgttgcaattggatggaaggatttcaactaaaggtgtttatttgtgaataagttaatagaataaagcttaatatactctttggtttattgaattcatttaagtagatgagagcttagttgaggtggtgttcagtccacaaattaatgatcgtatcactgggtgatgaacagaaaaatctgcctctacaaacaaagctttccccttgttcacgttctttccacgtgaggaacctatgttgaccgcttaggaaactcgttaaaggaagctctagaccttagacttattagtgagaatcttaaacctcttacagctaaaaaattttgcttgtttgatttcattcccatggtccctttaaataggggttaaaattttctaaataggaaggtacaattagaattctaatcgcaataaaagtgcaagcaattatcttcctaactaggaatatcaaaagtagctaaattgttatctaatgaggaatcttcatcatcagttactacacggcttgggcctagccaacatttgcaattcgccccctataagccttcccaacaaacacatccataacaggtggattcgagattaaatcttcacatggatattttaaatccatccttaaacaagttatttagaaacattcatgatctaggatcaatatttgaatgtagtcaatcaaagaaaacctgcacattactaaatccaaattctgttaaattcatgcaaaaaggaccccaaaaaaatccacttcagatgtgtctatccaaattactaaaaaataagcatgctgcactgtattttgtcaagttaacattccttcttattggttctttctatggcaggtgcaacttcttaaactataggagaaat

SEQ ID NO: 6124 - DNA, 2818 bp, Manihot esculenta
  Intron number 6 from transcript cassava4.1_002890m (locus cassava4.1_002890m.g) derived from phytozome v7.0 (chr-ID scaffold12794; pos 1552589 to 1555406)
tagctgattttgctcagttttgggcaattgcaaaggtataccctcacttctctcttcttcaccacctctgcgagtaatgtgttgtcaatttcgagtttcttgggcatgtgtgaagggtctgtaggtcctcaatctcatacaggcttctcccatagtcagatgcaaatgatgtaatatagggtttcttttacttttttcttctttgggataggtggcttactattattcttctcttgtcaatgttcagccacttaattttctgttagcttttctttcttcaatgtattttttagaagcctttgtgctatttgacatttttgctttcgtagtttgtaaaaataaaattcagtgggtcttgtgaatgtttgtcttgaattgaaatatttgagttcagccttaacttttatttgatgtaaaatactacaagttatcatctgctgcatcttttccgatataattttattctatgttctggaggagttatgagtgtgagctttttatttttatttttcatatgagataccaaagtcgacaggccattgaaagaatgttgctgtgctaatgttattacctatttaccctgcaattcaatgtttattcttcacaggaattttaaaatctctccactgtttctatcaacatgtttagatgttcttttacctgttatcatgtctcaatatatattatagttttgaatttgaacctctcatgcatgtatgctagggtggacttggttcatcatgaacaatagaaaagccacatgtgaatccaactggtgctgttttatgacgtacagggttcacctaagaatttgacttaaaaaaagctttgacttctttatttttcacttttctattctgttagcttaaaacttatgagtatattgctgaatataaactttacatggatggtgttataagtctgccttcattctttttgtatgttgtatgtcctcaacatcattttcctaatggatcatgtgatggatgatgtttaatgagtgagaagtactcttgaagtcagaatggtggatgctctttttctgaattgggtttgtccaaattgatgctatttgggggtcttggcactaaatatttagaatttatcagcaaataattaggccaaatcttaaaaataaccgaacttttcgtgatttgtcagttttagccaatctttttttttgtcaatgttagtttaattttaaagtgttaattaattctagcctgtgtccaaaattgagattaatggatggtggtgtggcatcctgttcagcaaaaaaatggagattcttttaattgtaggtcccacttgttttaaccatggtcttaccatggtttgaaaaacagaaatgcctgcaatttggagaaggaaatgcagtcgttctatgcttcttaaacctgcaacataaatcgatggttcagtcctcaaactcagtcttcctatgctacttgttaaacatgtgagcagtgctgaaatgaggcaatcttttgatgtcctgtgatggtagtgtgcttctatgggtcttgccatttaccatgggggtaagcaaacttagcaaagggaaggatgagttggtgaagatggtgcggtctgggtttttggttctggctgggcagctttctactggagattgaaatgaagagatgggttgaatggggcatttgaaatgagtcaatgatgttcaggcagagattattttaggtcttggtaataatgagattgagaaaatgggtttcaaactaagaagacagaggtggacagggggaagggaaagagaatagcagtccttaagtgtgtaaatgaagatgatgctggttctgaaaatctaaaatggcaatagaggtgagagacatgtttcatggatggatgagagagcatagatcgactgtcagtagagtagataaggttcaaataaagctgtgatatgcctgagagtaccagctggagggattttgcgtggtgtggtaatgagtgtgaaggaatgagtttcacggatgagggggaagttgtcagttcgggtggtctatggtggtttaacaggtctcaggtgaggaaaaaaatattgatgctgtgcatctgggttttgtggaaggaatctaatggctgttgtatgaaggagatggctaatgcgttttatgatttagctatcttcaagtgggtatggcgtcttctggagttgatggccagtaatgtgcttgcttgcaggtcgctgctgagattgtggtttgaagtgctgggtctgttggtaaactggagaggagtggaggtgcagatcagtttgtggttcaaaccatggtgagaccatggttaaaacatgtgagacctacaattaaagaagtcttttttggctgatcaagatgccatgtcaccatcagttactctcaatttcaggcacgggctagtattagcattaacttttaaaattaggctaaaagtgagaggaaaaggattggctaaaattgacaaatgacaaaaaggtcaggctatattttgtggttaggccaaataattaaaatatcttgataatttcctgataaatcattgcgtctttgaatctgtgtttcacttgagattccacaactcacacacacatcaaaattctgaattcttgtgtcacaccacaggcttggaattttgtgaacagggggcaggttcctattttatctgcttcctggttagaatttttaatttaatatgcccttttaggactcactcccctttcttagttatctattgatttaaaattgtttatcttatttgtctattgcctcagtttttttttttaaattttctttttctatttttcagaggtctggct

SEQ ID NO: 6125 - DNA, 1245 bp, Manihot esculenta
  Intron number 18 from transcript cassava4.1_002186m (locus cassava4.1_002186m.g) derived from phytozome v7.0 (chr-ID scaffold08799; pos 95714 to 96958)
gctattacaactggctactaaggcatcgcagtgaggtgaataatgcattttttctctccttaggtcaaggaatcttaattgcatttctggtcttgtttattcttatcattgtttttcatctatatttatgttatgcatgcatgcaatttttgttgatgagtaaatcttgcatttgcatgatatttttaatggaacaaagttgaaatctgctcccaaatttgtggacattcaaataagcccaaaatgacctttttggcccaattagctctatacatttctgattaagctcaattaggcgcttctttttaccaaaaagttaaatattatccttttcctaacatttagtaaaaaagttcattttttcttactttaaatgttaaagataaaaaacgaatctaacatcatcaacccagatgaagaagactgatctaaaaattctcaatcaaagacaaaatcccagaaaaatcaagtaccaacattcatgccaactcagatgtctctgtcagtcgactgtgattgtcatgactctggaacatactggtcctcatcctcttcaatccagtacctttccagaatcttctcaaccttttcataaatttaccatactggagacattgggtgaagacaactctgttgccgaggaatctgatttaccagtggaagctggtttataatgatgccttccttagacaaagcaagacttctatagctttggcaaaccaatagaagagcttctagttttgttgttaagggaacctttgaggatttggttgattggaatagggattaacacttggattcaagttcgctgaataaaagattcctttgtttgagttcttatgctcaatgaagggagttgcagctaggtgaagggtttcgatttagagaggagacgcaaaaggaggaggaacagaagcatgggtttgttgattttagttgctctgtttgtaggttagagttatttagttttttttttttttttgttattttttattagtaggaataataattttagtatataaaaatataaagttaaacttttattattaaaaattacaaaatgtattatcttagatttttggacaaaagttggtcctgtttgaacatgaacagaaaagtgtgtgccaaaaggtcatataataattgagcatcccaaaaagttcagggatatattcacgctctgttcctttttccagttgtatgtatgcaagtggtttaatgtcttactgatcttgcagattcttg

SEQ ID NO: 6126 - DNA, 1191 bp, Manihot esculenta
  Intron number 3 from transcript cassava4.1_001838m (locus cassava4.1_001838m.g) derived from phytozome v7.0 (chr-ID scaffold01945; pos 616845 to 618035)
atacagagcttctatctgaggtacggctcttatggagtactttgtccaaggtgcaagtacacttatttttcttttcttttcttcttttttctttttgggctacggatatgagtatcaagggccctgtaataagggagggttatttacaggaaaaaaaatatgaaaaagttgcaggaagtttgcttatccataaagaatcatccactaaaatatgcaggataatttgacggttgttgcttctgtgaccttaaaatggtgctactgataaaagtagtttccagtcttttcctccatctgttttggcacttcttattatttgcctttcccatttctccttctcagttagtaaaagtgtgttaatagttactaactacaaaatgaaatccaggtgtttagaattaggagagagcatatcttgtttcaaatcgagaaactgaactgaccgatttcggttcagtggttcggttagtcggaacattcgattttattcaattagtatttttcatattattcggttttcggttcggttaggcttaaacgtgttaaataaccgactaactgatctaaccgattttactatatactattatactaatcctgaccaacctagccagcagcccaagtccaacctctttccctcctctcttactcaaccctgccagcagcccaagcccaacctcttctcccctcccttactcaacccagctagcagcccaagctcaaatgtgttaaatttgcaaacttcggttttgatataactgaactgaactgatttttatcggtttggttcggtttgcttaatcgattcagtttggtttgatttctaatatttttaaaattcagttttcggttttttcagttcggtttggaaccgaaccgaccaattgcacagacctatttagaatggatcccaatgagcttaaggagttctgttttggtgtttctttattgttcatgttgttacctcttttgctgcttaatggattgtatattgaagttcgtacagctataatggattcgccagtgatctctcttgaatgtttagtaataatcagttttataagaaacaagaaattgcagattttattattatttttttatatatcaaatttcctttctttttgaatattctaaggatttaattatttcttttccctgtgttagtgattgttgttttgatgtcttggcagc

SEQ ID NO: 6127 - DNA, 2184 bp, Manihot esculenta
  Intron number 2 from transcript cassava4.1_005671m (locus cassava4.1_005671m.g) derived from phytozome v7.0 (chr-ID scaffold03175; pos 312747 to 314930)
tgggagtaagtcaagtgggttcatttctacttcaggtatgagttcttcatcacccttttacagagaccaaacagttttactcaattttgcccagtgccagtggtgatctatagttttgcatttcggtgtcaactgtgtcacactggattggttcttctcttttatgttaaacgcgttttcctttttcttgacttatagaatttaaaagtattatctaccagttctgctacttcaatgattccttcgttagcatactaagttaggtgatgattttggtttggtctttatatggaagttcataaattctcatttttagcatgctggtcatagattgaaaggaatggcttatcgagcaatgacggtttcctgtcttgtaattattatcagaaatcacgattttccaatcattctctaaatttataatcttgtcagccggatcattaggttcgtgttattcttcaactcataacttccatttaacagacctcatccaatcaattatgaccaacaacatcttgttaaggtgcactggttgcctctagtttactttaactccatcatacatgtaacgttattgataagtcattgttcaagttgttactcctttcctgttgattggtagtgtctacaaacattctttatgattctaaatttacttgttattgatctactttcctgtgaattacctactttttcctaagctatgtttggatcaaatgaattttggaaaattttgtggtgaatttcacaattttcatatttggtttgaaaaataaatttagatttctattataggaacttgattctatgtaattggttataactaaaatcaaactctataaaaagaggtaaaatttcaaatgaattctacaaaattaaaacaataatatttcttgaactaaattgtccgtgtcttcctcttgtacactgttatggtccctagaataggatctgattacgggacaattgagtggaaaaaatagagttaatggatgagggtggaatcatgttttctttctttcaaccttcgatggaggttgtacaagctcttagattgtccgtgtcttcctcttgtacactgttatggtccctagaataggatctgattatgggacaattgagtggaaaaaatagagttaatggatgagggtgcaatcatgttttcttttttcgaccttcgatggaggttgtacaagctcttagagagaacttgaaaatctcttgagttttagtactcaacaacttttggcaattttaaacatgtttcctttattgatttgctgaacttaaatactaaaggaaagagataatctctttctacaaataagaaagctgaaaatcatgaaaatcatgggctcaacatggaggaacaccctcctcctacaattaaagaattaggaaagaccactacttaaatggagaatatggaaaaaacaactaattggagaacatggtagactcaatccacaactcaatcatgttggaaaaaaaaagaaaaagaaaaagaatttctcaactgtcatgtttagtggctttgacctggtcttgcatttcaatatttctctttccttatgtgtaaatttcttgtatagttagtaagggtctattaacatacacattcaccgtctctccctctttctctttccaaaacctcccttccctacccctctctctctctctcgcatacttttctctcattccctttctcttatacttctcttacaaacaaaacatttgaaattaatattttttgttttggaatttaaatattaaacatagtttgtacaaaattaaaataaactaaaaacccttatcatagataataagagtaagtcttattcaacataatgtttgacaatatatatatatattttttgtattgagattattttgggaaataaggataaatgaattccgatgatagaattatactgaacctgaattatatggaattttttatttgaattttgtattttaagtggtatcataacaaacccaagaaattatttcaagtgaaatctatatctctagttcaagtgaacaaaatgggatgttaattcagttgaagaatttgtaagcctatcctgaggcaaatagttaattctgcggtgacatcttgtctaggatttaactgttaatccttttttactatattcagctcaaaaatccagatcaataagagcc

SEQ ID NO: 6128 - DNA, 1160 bp, Manihot esculenta
  Intron number 6 from transcript cassava4.1_011813m (locus cassava4.1_011813m.g) derived from phytozome v7.0 (chr-ID scaffold08265; pos 270769 to 271928 reverse strand)
gggtttgcggggccaattaacccaggtttgtttgtaaaaatgctggcatgatcatgcacttctttttaccttgctgttaatttgtcttgctgaaattgcatgtctctcacttttggttggatatgtagaacaagctctagtaccaaatcgatgtttaacaaactataccaaatggatgtagaactagctctgatgccaaattgatatggaacaagttgtaatgtcaatttgatgtagaataagttccaataccaaattgatgtagaattagggaacaaagagtgagaaacaaattctctgagggtagagaaagtcattctcaaataaagaagagaaataaattcttgaatcttattattacagaggtatttattgaataatattaatcctcttactgctagagttaagaaaccttaaataagaagctataaatcaaaagctaattagaaatacaaatcaataaaactttcctaaataaaatatggtaaaattctacttcctaattcatagcaacatactaaataatataaacttcctaatttcactataaaaaaatgaacttaaaataattcaaaaaaatatcttcttatactgacagttggtttagtaattgacatctaggaactcaatgaactcattctgtggcatggaagaaatttaagcctttatcttagcaaacattgtacaattgggtggcactttatgcaataagcttttaagctcaagttgataaatcttttatgtgaatatattttatctgctgcacggatagctttgatgattctagattatgttcatattgactgttgctagagaacaaggaaactactacagaaaggaagtagctgatcaggaagacagctcaaacatgaagttgtttgttgctattttaaagtttaatgcttcgtagttataccaaattctgttttgaaattatgaaaacgagaatatatcacatattataggaagggaaagaaaagtaataagtagaagaggaaagaattggagggaaataattataactgttgtaacaggaaagaagagggaaacagaatgttctttgtttgtgttggtaaacttatctgtgctctattcttttatgtttttctattctatcataagcacacaatgagaattctgcaggtattgccaattttgag

SEQ ID NO: 6129 - DNA, 1405 bp, Manihot esculenta
  Intron number 20 from transcript cassava4.1_001325m (locus cassava4.1_001325m.g) derived from phytozome v7.0 (chr-ID scaffold02853; pos 611136 to 612540)
agaaagcataaaattttgcttgctctacaggtattgtatccttttaatccaaagttacaatctataactcatgccattttgctgctttgacttgtttttactttggcatttgtattgaaatgtagacataatctctgtaaaccaaattgtgcaaggcagacagtctatgaaatgataaataaacaggaagttaagatgctgaggctttgtttgttcctaaaaaactattttcctgaaaaaaaatattgtaggcacatgggaaagttgattaatggaaaatatttcctggtttatctttgcagtaaaacttgtggattttttttttgaggaaaacatttcttaagaaatgctgcaatattaaaatcatattaaaattattactgtgctttggattatattagaagttatgtgtttgtttatttaatctacttaagatatctgtactataaagatatctatatttttctattttatcgttgactatgagaaaaaagtggaaaaaatttataaattaagcttgttgcctggtgattggttagtcttaagttatgaccattgaccagtgatgatcagtagatgaactactaggcatattttgatgtcgttccttcacagcgtgcttgtgcttcccttttaatacttttttcaaaatttgggagtgcttttcctttttgagaatattaatgcagactcgttgtctaacatagctgaatggtgacaaaggatacatatggtgaacacaactagtttgggattaaggtttagtcgttgttgttgctgttattgttttccttttatgagatgtattttaactccattttcccttcaaccgaggaaaaaaaatttcattgattaattttagtaggcacacaattgctagaaaacaaggaaatgttttcaggaaaacatattacatcaattaattgtagccataaggaaatgactttctgttgttaagagtgtcggtttcataagttttacaaaatcataaaaaggaatagtcttttaagtgaacattaaaggcaaatgctcatatggtaatatcccattatcattctcgataggccattgttagttattggcaacagctacagcccaccattaatattttccaatgaactccaaatacctgaaaaataatggtcaaatgatcttaaatattgcaatcaaatgacagaattagtcatttccttggaagcatctttctcaaaaatgttttattctaagcaaatagagctttattctatggtacttttccctcatttgagatgacaggttctatttggtatcaatttaatgttctgaaatatgaatttaatgcacttacttgataccttcattgctaaatgtgatgttctgtttacttgtaggctgtgaagcaattgctaaggttggacgccgaaaa

SEQ ID NO: 6130 - DNA, 1152 bp, Manihot esculenta
  Intron number 2 from transcript cassava4.1_002922m (locus cassava4.1_002922m.g) derived from phytozome v7.0 (chr-ID scaffold05214; pos 775667 to 776818)
aaatttgtttttcctttaactagtctccaaattgggtgcgtatcttcctttccttttgctgtgtttctttgtttgaatttgaactctaggttgaattctcctatattctgtataatccttttttgaatgttattaaggataacctttctcttttttggaattttcattaactaattattgttttttggaatttataaacgtttttattattttttttataaaaatctgaatccagttcaaaaggacagttgaactaattttaggtgaatttagtaggtaggtaccggttttgatcatcattttattattactcaggactaatactttgcccatataaagatgaaaagtcatcattttctcatttacaactgttaatgatattgataaataacatcagaagagtgagcagccaaaaaaaaaattcttgtgatgtttttgaagtttttgagagagcgagctcggattattactacttattgtgctctagctttggctgaatgctatttgttttcagtttcccagttttaggaattttataatcattcatgaaaattatgatataatagtatttttttttggaaactaaaagttaaacttatgatggtggggatttagcttgtgttgatgggctgacccttaaggaaaggatgcaagcgaatgttgatgagattctagcatattgaaatcttttccgttctttgccttgtgaaaatgatttgtgttgcagaagaaatgatgaatacccattcaaactagattattcatctttattattctcttatattttctttgatttaagcgtaaattttacttttgcttaattatttaactattctccaaattttaatattactaccataaattgcaaacgtttagatgcatgtaaaatgccaatgtccaggaactttgaagcatggcacatctcaaatttgactaatttggaaggagtactcttttttttaataaaaaatgaaatcgaacatatagtttcatcactttgctgcatatatcatatggctgtgaatgttgtggtgttcaatgatggaggatgattatatgcttttgtccttttagtatgctgttctaatttatccgctcctgtgctgcatgattccagagacttgcagtcttatctttcagatcttagccttt

SEQ ID NO: 6131 - DNA, 1963 bp, Manihot esculenta
  Intron number 1 from transcript cassava4.1_003013m (locus cassava4.1_003013m.g) derived from phytozome v7.0 (chr-ID scaffold08597; pos 197895 to 199857 reverse strand)
tcacccaaatcttgttaagctgatcggctactgctgcgaagaagccgatagactgcttgttttagagtttgttcccaacaaatctttgaaatttcatctgagtggtgagtcctaagatacattttggattgttattatatgattgccatcttacaaataataaacgatatcatagatgaaaagaaaagatcaaagttgaagtggtcaataagaatggaaattgctttaggctctctgcgagaggtttagcatatctgcatgaacaatgtgagtaatcttatattaatcaaggcttactatgctctttttgcaattaagttttcatctattttcattttttaacttttcattaattaagatttatatttttctgtttttatttatttaggtaatcctaaaattatcatattaaatccgataatattcttctagatattgactttaaatccaaggtatgataattttttttttatttataaagaaaaataggataatttaatagtatcaaataaaacttttcatgcataggcattcatgcattctacatatgatgttgcatatcttccctgcattctttctcgatttttctttcattttttaaaattatttattttgaaacagccgtttattttcagcataaatttcaacaaatattagagtgaatgatttttttttataaaattttttgttgtttaagtgctaattaaatatagttaagatatcacttaataaaaaattaaacagcaaagtctcagaattaaatttattttaaatacatatatacgtaatgtgttatgattcacaataaatgaatcttatactaatttacttaatatggataaaaaattttttcttttcaggttgctgattttgggcttgctaaaatttttccagaaattaatatcagacacattcctgccgataaaaaagaggctaccatgtaagatttgatttatatatatatagtacttttgcttgtagattataattacatggttattattttttatctacttctacaaaatagattttttattaaaaaaagttaaaaagaaaaccaaggatcttgaattctcagccgagagattggagcacaaaatgggcggcgctgttttgggcttagactttatttatatatataaaaaaaatttcttaatgcaaaatttttaatacttcttaaacatgcagttatactgattcagaaaattccaatgaaaaatcggatgtttattcttttggaattatacttctagaactcatcagtggaagaaaaattcatgaaagtaatcttgatatcgtgaattgggtaagcagccagcaaaatctacaaattttcttttctgtcctttctcatcaacaaaatcaaaaaaataaataaaataaattatgaagttattattattatttatgttttatatttatctgtattacaaaaataataaaagataattattcaggcgaaacctctaatgataaaaggagattcaataaatgtgaattacaagagcttagttgattcaacattgaaagaagattacgatcaaatagaaatggaaagaataatttattgtgcagctgctagcctatacagtccatccccaaaacttcggccaacaatgggacaggtatacttaaatttatttgattatttaatcattcattttaaaattatttcaattcattttaaattttaaagaatatttaaaaagagagaattaatataaaaaattatttcaattaaattcttagattttatatagaaaataataaatgtattatgaaatgcagatagttagaactcttgaaggaaaaatgccacataaggaattatgggttgtggaaggtaacaaacactttcccacactttcaattaaagattgttgagttggtagtaacttacaatttggtagttattctctgtttacaggaacgcagtcagcttctaatgatgattataaagcat

SEQ ID NO: 6132 - DNA, 539 bp, Manihot esculenta
  Intron number 2 from transcript cassava4.1_028024m (locus cassava4.1_028024m.g) derived from phytozome v7.0 (chr-ID scaffold11581; pos 481042 to 481580 reverse strand)
atccagcttgttttgatctcttttgcagggtaagcaaacttcattaattatatgtaaagagggatccaataaatgtttttgggtagttcgaagccttgtgcttttgagaaaaatatatgctttcgattttccattttttgtaaaaaaagaattacgtgaattttcgtcatgagtttcaaattctgggaatagatataaacagaacatttgcttgctgaacttttcttcttttgttgttttttcctccctcttatttccatatataatttttttaatcacggtgaaagagaaccccatgagttcacctaatgatttccgtttgttatttgaatttgtaaataccaagttctatgcatccatatcccatccaggcaaaacaacttatctaaacagggacccacagtgaaaatgcacgggtttttacgcggatccatataaaaagtttctgttttcaaatagtataatttctcctgtctccaacttttctactatttatttaacagaactaacccatgaattttcatttgcagggtaacttt

SEQ ID NO: 6133 - DNA, 1204 bp, Manihot esculenta
  Intron number 3 from transcript cassava4.1_017312m (locus cassava4.1_017312m.g) derived from phytozome v7.0 (chr-ID scaffold07543; pos 146784 to 147987 reverse strand)
ggacttctgacactcccccaaaagaatcagttaaggtaaatgataaattgaaccaaatgatatggtcttagttggatcacttgtttttatacaaaagaaattgaggaatgaagaaatataagattgagtctttagttccatttttcgttgtctttctggcgttaaaataatggacttttagggagtagccatcatatgttataatatggattccttagtgtgccgccatgactgggatttttggagatttcttattccctttatgtgatgttcttccctctgaaatcccaagttgctgcatacaaatatgatgtagattatgaaggtgactctatggggaagttatattttaaaatagttgtcattttctgtcctcacaccattgtccttttattacaatgtagattcaaaagtctattatgtgaagacaaggtaaacgagagaagatacatctacttatcacatattagtatccaacataatgttctgtttaaattacttatgactatccttaatcaaacagtgcctgttgcacaaacaagcatttaatttgatcagaaatccaagatgattttggaaattaagtttaaagttcttatgtacgatattccaggaaaaaaaaacacttatatttgttgaagaatgttgttattttgagctagctattgctgtctacatttatatctaccattttttttctcttttgaatttgttaacctgttaagtttcaattacttttttgattagggagtgtgaagtgagaaatagtattctgaatgttcctggttcaatagtacagaatgctcatggctgctaagttgtaaactagaatggatgccaataataatacaatggtcttatttatgcatattgtcgttgtctgggcttgaggtgttttatgcctgtggtatggtttgtgtcttggtgcttggttttgaatcacttcctatattttgccaaagagcttttaaacattttaatttgaagttattttgccacaatatgcgtctaacacattattgactaccatgaatgcataccttgtcctatcatgttttttttttcatggggattattctggtttatgtggtttcattttatgttttgtgtgtagaatatccaggaaaacaacaggaacttaatttttaccattatttttgtctgttcaggatttagagaaagcatttgtgaagattcgtcccaa

SEQ ID NO: 6134 - DNA, 2566 bp, Manihot esculenta
  Intron number 5 from transcript cassava4.1_006418m (locus cassava4.1_006418m.g) derived from phytozome v7.0 (chr-ID scaffold03329; pos 167777 to 170342)
acaacaaatacacaactgtgcaatttacaggagaggtatggagttctatttttatatcatttaattaatttattttgacctttcgctgtcaagaaactgggagtaatttgtaagtccacaccagtgtttccattaccgaaacacctctaatcatatgaatggagatgtggaagttttctggaagcttctttcaacaacttgcataaaatatcttcatgcccacaaggttgtgctaaatgaaaattatgcataatgactctaatactacttttaaattgcactataactaaagtctttaacaagtaataaagtctcttgtaagtgagactcttgtgaaatactaaagcaatggattatttgctattatactgaataaacacctgtaatctgctgaagtttatatcgccaatagtcatagtaatagtaattactcaagatgcacctattccttaattttgtgatggctttggacctgtaaattccatctataaagttggaaatggatatttacctcagttggaaaatatcctgttcttgtggtggatgctaactgtttattgaattagtctcaataaatatagtttgaggatcaggcgctgttttgtttctcaaagattcttgcctgtggaaatactccttgctgtctggttgtaatttgtaatactaggaatcaaacaaaaataattttttaactttagagagaccagaaacccttttctttttaaagaaaataaagtagaagatcatgaatcctgagaactacgaggtctctatgtttctatatttatttatttttgttaggtacttgattggaagagaaaattgctctaaaagatgcagattctggcaccaatggcaattgggactcttagcaaggttattagcctaagtggtgttctttctacttatttactgtgctagtgagaaagagggtgtgtgtattgatggtggtggtggttgttctcaattcagtggcaaagactgtgataattaggactgaattggagaatggttgccagaaagacaatgatattagtggtggtggatttcagttgtttttgccatttgattagacagagaaagggaggctagattcatctaggttaagagtttttcttttttcccagtgtaaaaacttcaagtgctctttccacattttttgtccatatgaacatgccacatgccccttaattggcagatacaattggaacaaattccaaagaatatatagcaaattaataaatgttttgaattggataaaattggaattcacgaaaaggttaagatgaacaagatcattgggccttatatactttgtagaagtgtatgaattgacttcgttttgatagggacttgttatccttgatttgtttggaaccttggggaagatgggagtggaaaagagcaaggaaggtcactatagagctgaaaattttggcaaatcatgcctccttttgtaatgatttcctggttttaatagagtttccatgtgcttgtcattatgtggagtgttgccattgcacttgagcttgaagctgtggacagatgaaatccagaaatccaatacaccaattacatgaaataatttagtgtatggatagcatctttgtggtaaaggctatatatgtttttacttatttctttttattattttgggtgttcatcaggagacccatcaggccttgggccgcaaaatatgagccaatcctctctcctccctaattgccatccattccagtcttatttaatttcattgatatgtggtggatcttgaactggaggtttctctttccaaaaccttgaaggacattgagagattaatcatgtaatgcatgattgatgttgttgattaccattatgattttgttgtgttgctgacatgtattttaagtatcttagcgatttacatggaacaaaagaaaatgtctcttattaaggaataaaacaaaatgacattttgatttcaaaatgaagaaaatatatagattaaattaaagagataatgatttgatgataataaatatgattcaaccaaaatagtgatggtaagaagtgcaggacagattttcattctcccctgttccaggtaatattcactacccactgtttaagatcactgaatttcacatctatgaagagaaaatgctgccctccttttcctttccccacctagaaggtttgcaagccaaacaagttgtggaggggaatcccctccatttttgttcttttctcctaattcctctcttcaccatactttacaattagtaccctctttaacctaaaaatgtattttgaatgattttcccatgtgccataaccactgaacaatgtgaaacatttaaggaaatattgcagtagataaaagctatattcttgtgatctaataaataaatatatattttggtatataattcttggcaaaacattacttgatatgagttttagtttgcccatgcaatcttttgattctttaaatgaaatataattaccttatatctctacttatttgaccctcattgtaccctttccctatcctgttttgtaggttctgaaaactcctgtctca

SEQ ID NO: 6135 - DNA, 1161 bp, Manihot esculenta
  Intron number 9 from transcript cassava4.1_029148m (locus cassava4.1_029148m.g) derived from phytozome v7.0 (chr-ID scaffold07087; pos 341610 to 342770 reverse strand)
ttcaagcgtgcaacagtttgagtgttaaatatcaggtgaaatacttaatgcataaaagtactttggacatgttatattatttgcttgcaattgtccatgaattttcagttctggtgtttggaggaaatatgcagtgcaatggaatttccgcaaatccattttacataatccctgtattattatcgctttctacttcattctgcattgaccatctttgtgatgtatgaaaaatcttttacgaagtaagagcggttgaaccattacttatacaagatcaccttgaatttgccacagttgatatgaggcctctgttcggtttatttgaatcttcaatagaggttcttttgaaaaagaaaattataattcatcataactcagaaaattcttaggaatagcagagcttacgaaactccctttacatgtaatctattgcggaagtgtttcatggttaggtagtaatgacagtggagcaaactacgtaacgtaatattaaagaatttggcccaaaattcaaacaccagaaaagaacgaaaattaatgacctgaagtttaatctatgagggagatcagaagagattatgaatttttctttcaagtgcttcctctattccaccattttgcttttgaattcctgttcgtagaggccaaaatcaaaataaggtaccacaggagttccagccaagtaaaacctttaattattctaagaaatttttttatcttttagtaatgtttcggttctgttttctcaggaactgtatatttgtagtgttttatattgataattgaatgatgtggaattcaatatatgtaggctgaaagaaactcagattgatttattcgcctggatgttaaaatgcataactatcagtcagcaagtttgatttttatagtttgatctcattcgtataattttgccagaatgctacccttatttctagcatttaagtatatgttagaaatgtagcaagttcaacttggtgcatcatttgggctttaaaagaactccagatttatgtttgtgtttgacagtggcccttgccattgttacagctgattctgcaaaattataaactttgtgtgtatgcatagacagcttacaaagtgatgactcatccataattttattgcagctaccatacaaagacggcctctcgctcgcag

SEQ ID NO: 6136 - DNA, 508 bp, Manihot esculenta; identical to SEQ ID NO: 5851
  Intron number 9 from transcript cassava4.1_008366m (locus cassava4.1_008317m.g) derived from phytozome v7.0 (chr-ID scaffold05875; pos 1032111 to 1032618)

SEQ ID NO: 6137 - DNA, 1616 bp, Manihot esculenta
  Intron number 2 from transcript cassava4.1_016835m (locus cassava4.1_016835m.g) derived from phytozome v7.0 (chr-ID scaffold03081; pos 81949 to 83564)
ccatttattcgacgcctcccagaattcaaattctggtattgaatttttttctcttatatgtttttatttatcatcctgttgtcaacatttcattgcaagcatgtggtttctttttctgatttgaatcgttttatagatgatatcatgatatgtatctttttttttattttttcacaatcatgctctcttgataattagagtcttgaaatttgggtttctgcttgtctttttatcttctcattgttcagtggaaaagttcttccttagtgtggtttaactgtgggaaaaatgggaaattttgatggagagatcatctatatttggaaatcatattaatgacttgagagtttgatatatatggaatagtacctactacattatggtgataaattatgatagtgtatgctacatgtgaatgaatgggtttatagagttctttgatctatgttagaaaacttctgaacgtgatgagatattgttgattctttgtcattagagttcggagttcacatgacatgctttactgcatacatcactattattttaatgaaaaattgtttacttagctattcaatgaaacttgttgtccttcttttagttgccaatatttgatctaaaagtttggtttgcaattatcagtaattgtattattaaatcgcagaaaagaaatgatattgtttaaaaaattgtctctgcagttgagtttcagatgtaggagcattcctatagtggtttctgcttttaatttaaaggtgatggatatggacattctttgaagaggattgtttctctctcaaaggattttggaacctgaggtcaattcttttggtcctagtcataaggaaatttgctactttaatgcttgtgaacgatttcttgtccacaggtacatgcagaaatttctattttcacatctttgttgtcaaagcatatattgctggaattttgtgcatcagcagaatatgtttttcatgtttagttttgtcctcaagtggtcatgggtctgttttgaaatatgcttaggccttaggttgaatctacatagttcatagtttttatgggttgagcaactatgataaatgggatgaattcttgtaattttgcagtatgcttatcataaatagttatagtgaaggagaatagtccatgccactgttggagattgtttgccacaagtttacaaaatttgttaggttctttactgtggccattgttttttttataacattttctgatctctttcaatgtgaaaggtgactttaactgtttcaataacatctcagccacattgcataacttctttgatagctgaatacaattgtgcaggtgccaaactgatgtgatgatcattgtttgcttgcactaagatattttgttctgttctttgggatgtgttatgcttttcattctgcgtcacgcatacttttatttagctttcaagaattattgaagagaaatattagtagtttgcaaattaatttaactcaccccttcttcaaccacatgggcctatttccgcaaatccattcttggaatctatgcatgaaattgatcttctcatatccattgatttgtttgcaggtattccttcaccaaggcattctgcatagcatttg

SEQ ID NO: 6138 - DNA, 1338 bp, Manihot esculenta
  Intron number 4 from transcript cassava4.1_006340m (locus cassava4.1_006340m.g) derived from phytozome v7.0 (chr-ID scaffold04251; pos 61894 to 63231)
gtgctcctgaactctgtggttctttttcctctaaggtatgtatgtgcagattagttttctcacacgttcggtttcttgtctttattccagaaaaagggaactatattttgatttggtttatctataataaacatattaaaaattcagcttatgccctctggatatctttttcgggcgctagattgtttattatgtccttaatttttccctggttaattttgtgttaatgtatttaaattcacctgaatttggtgttttagtcttgccatacatgcattcgctttactgcattagtatgttggaaggaaaagtgaaacaataatactgcagggagtcaattttctgcatttgctcaaatatctgaaagagaatatgtgcaaatgtgtgcggtttcccattcctagacatgctgtgttgcgcttattcctgcagtaatgttggtagataattgcttttctggaaaggtggaaaaagagatctagtagaaactgaggttgaatctatgaatttttattttcttggactatcatattctagaagatacatttcgtaataattacaacctttgacttgtatgttatagacattacaaatgactgctgatttatgtacaacaaatgtctagtagagaggcactcatagcaaaggcaattcaaaaaatttgcttttatctagtatttgtttattagcagtttggattgtcaggattcattagtatagccttattattttgcctttttaggttcaactggatttgattggttatgataagaaacacacatgaaactatctaaacggaacagttatttggctgcattatttgaaagttatagattttatagcttagaaacagcaacgatttgattgattctgttattatgttgtaattgtaactcttggcttggggacaattcttttgtaaattcagaaattggattcttattatgttctaatttatgtgctttcgttagttgagaaaagtcacaagcaattaagacaaaatacatacgctgttatttttatttgtgaatttggctagaaagtcatgccgttactttttgtttttgtgcatctatagtttggagagcaggttgatcaactgtgctgatttgtatcttgctgtttaccattctttgactttgattatgttttcatgcaccatggagggttgtttttattattattattattatttttattttttctttgtgtacagttgtactaattgatttattttgcactgactagagcataattcatttgagattttctgatgatgcattttcttgaactttattttctgcagtacacccccgctattgatatctggagcatagg

SEQ ID NO: 6139 - DNA, 4310 bp, Manihot esculenta
  Intron number 3 from transcript cassava4.1_022450m (locus cassava4.1_022450m.g) derived from phytozome v7.0 (chr-ID scaffold04495; pos 69223 to 73532)
ttgtaattgggggtactctggaccgggttcagaaggttcatatttatgttgcatacatgaatagtcaatctttttttgggtatataaatagtctatcatggagaagctctggaacactgtttcctgttcaatttttagatagaaataattagtttattctaagtaccaaactgatacatacataatgttgtgttgacttatttgctgatttctaatgatataatttgatttgattattgattctaggaataaattaggatccttaattatttttgtagttatttgattatttgctttctttttagtcttaattctttgtgtataaatagtcatataatcacttgtaaaaattaagagtgaaaaacaaaaatactttaaaattctttaaaattcttcatggtattagagccttttccttattttagggtttaaatttaattttttctttttagaatttctaaactctagatctacctatttggtactgccttatctagggactttttttcatctcattgctgccaccagcagagtcatcggactgtcgctggccagctgcctaacttcgatgccgcaactccatgtgtgtgaggatcatgcgcctttccttccttgcgcatgagcttctgtcttacactactttcctgcccagtccactcgggctgccatttccgacctctttttggccatcccatgccgctacctggtctcttggtgatttggttaagactctcttatgtgtacgatcttgggtaccttttattctttcacagttcatttttatcatggcagaaggtaaaaaggtcttgattcctaactctgatagcccttccttgcaaattagtcctgcaaaacttgatggaaccaattatcttgcttggtcaaggtcttgtttgttgtttttcaaggctagaggattgcagagctatgtcactagtaataagaagcaaccggataagattgatccagattttcctcaatgggactcagataattgtcttgttatgacttgattacttaactctatgcaatctcatatctataagtcctattacttgatactgttgcaaagatatggaaggctttgttcttgacttattccaagattgagaatgatgactaaatttataatattcgaaatatgatcaatagtattaagcaaagaaaaatgactgtctcccaattttattctgagttatgtggttgatggcaggagcttgattactatctgcactttcaggcagagtgtactggagatgtagtgattttcgaaaaatgattaaaaaggagcgcgtctataattgttttgtaaagttgaataatgaatatgatccaattcgagtccaagtgttaggtaaaaaccctttttattcactagaagaggcccatgtctatcttcaacaagaggaaagtcaccggcatgctatgctttatactgtaccagttgaaatggctggtgttgaatcccacatcgattgtggaaaggggtaatgtgccccttatatgggctatacgcactcctccctcttgagctagcttttggggtgagttaggcctgacccaaatttaacatggtatcagagcctctccatccgatgttgggtgccccataaatgtgccacgcaccagtaaaaattctgggcgtgggggtgtgttgaatcccacatcgattgtggaaaggggtaatgtgccccttatatgggctataggcactcctccctcttgagctagcttttggggtgagttaggcctgacccaaacaccggcatgcgatgctttatactgtaccagttgaagtggctgggttggctacaagtttgagcacactgcagcctcctaattttgagaaagttcacttgcatcgtgactattatgggaaaccgaggcatgctaaggagacttgttgaaagttatatggtcatcctactaggggctatggggggaaacgaggtacctctagagttcacactaatttattagaaactgtggaggagccctttaaagagaacaacagctgaaatttacaatttcaagcgcctcctgtctcatattgacacctcttccgcttttggtgccacatataattttgtgaagttaggtaatgctttctctcttgatactggctcatggattattgattctggtgcgaatagacatatagcacagacggtaagggcgttcattgttttttatcttagaaaaactttatcctagtttgtttgctagaactcaatttggttctttattttatgatgcttgtgagtatgctaagcacaatagaacctcctatccgttgagtgataataaaagtcaaattctttttgtgactattcattctgatatttggaggcctactcaaactgtctccttatctggtaatcaatggtttgtcacttttattgattgttgcactcgaatgatttaggtgtatttgattaaagttaaaagtgttgttttttcttattttcaatcttttcacaagatgatttgtactcaatttgatactaaggtgaaaattttgagaactgacaatggaagagaatatatggatagtaggttttctgcttataaagagtcaatgggatagtacactagacaagttggtcttatactaatgcacaaaatgtggttgctgaaaggaaaaataagtatctattggaggtagctcgatctcttttgtttaccatgaacctacccaaagcatattgaggagatgcggcccttatagagatttagatgaaaaggtgttcatggagatccttcctggttttgctgatgagaagacacaaggaaagatgtgcaaattaaaaaaggctttatatgggctataaaaatctcccagagcttggtttgataggtttagtagagccatgatgtcctttggttaccaacagagcaatgttgatcatactctgtgtataagaccactcttcttatagtgtatgttgatgatatagtggtgacaggtgatgataaagaggaaatgactcaactaaaaaggttgttggctcaagaatttaaaataaaaaatatgggaaagtttcaatattttttaggtattgaggtgactagatcagaaaaagagatcttttatctccccaaaaagttcattctaaatcttttggaagaaattgttgtgttggggtgtaaacaaatagaatttctcattgaaagtaatcacaagatacaagtgagtctgtggatattggaagataccaaagattgacagggaggttgatttatctctcacacactcgaccgaatatagtctatgctgttagcttagtcagccagccaattcatgcttgaccctgagactcatatgcaggctgtctttcgcatcttgaagtatctaaagtctgcatcaggaaaatgacttctttacgccaaccatgatcatctctgagttgaaacttttacagatgtagattgtgtagatctctcaatgataggagatcaatctctgcatactgcacggttgtggaagggaattttgtcagctggagggccaaaaaataaagaagtgttgctcggtaaagtggtgaagcagaatgcatagtagtggctcaaggcgtgtgtaaacttttgttgttgcaaaagttattggaagagctgagattactcgagagagacaagataattttgtattgtgacaacaaagctgccataagtatagaacaaaatccagttcaatatcaccgaatgaagaacattgtgatcgatcaacacttcattgaagaaaaaataatagactgtgtcttgagcagtttgcggatgtatttactaaatggctcaataatagaacctattataatttgattctgttcaccaacttgaggaggagtgttgacttatttgctgatttctactgatataatttaatttgattattgattctaggcctaaattaagatccttaattatttttgtaattatttaattatttgctttttttttttagtcataattctttgtatgtaaatagtcatataaatcacttgtaaagattaagaggaaaatacaaaaatactctaaaattcttcatgttgcaaaatgtttagatgagggctgatagcgattgcaacttactgtgttcagtgttcttaatactttaaactttagaggatctgtgcttgcttgtgggatgaatcttgtcctggaaatagcatcaaggttttctttgtcactgtccccttacactggattaatgatttcagtgttggattgtgtgttaccactgttttgggtaattttctgtgttctgctctttttcagtctgttgaacttgatcaacttgctatttatctgga

SEQ ID NO: 6140 - DNA, 1196 bp, Manihot esculenta
  Intron number 1 from transcript cassava4.1_000258m (locus cassava4.1_000258m.g) derived from phytozome v7.0 (chr-ID scaffold11106; pos 354897 to 356092 reverse strand)
attctttgccctttagtttggagtttttttatcaggttcattgttcattgtgtattaaatatttccaaggagaattaattcaatttatctgttatagagcttgatatccctttatgttttactccaatttttggtatttgggtttttgcatgacaaagcttgctttctcaaattgcttactttcccttttgtgagtttttgaaatctgcttttcatttcaaatttatattcatgcacttttttatggttttcatgtccttgattttctcagttcaaatttgtatcttgatggtccctttgtcgttaaataaaatctggatgttgatgatttgaggtcagtgaagcttagtttctgggagatgtaaaatatggaatagaaaattgcaatgccaatttttttggaccgaacaaaaacatatggttttagcgcttcagttcaattttcactggacgctcagctgtaagctaaaagcttgagcttaagcttgcaaacgagcttaaatcaaaccaagcttgagctaggcttgttaactcgataaacaacaagtgataaacgagctcaatatgagctgaactcaaactcatttcaagctctgatgttagagctcaaattgagctcgagcttgaacctgaaaatatttctgcaaattgaccctgaattttcaaaagcctgtcttgggtcgattacacttctaatgttatcggattgtgaattgtttgtgaaatctgatgtatatgtttgcgttttatacatgtataagtacatttatatgtccacgatgtatctgttagcgtctgtttgtagtttgtaattttatttagggatttctttgaatgtttgttttttcacatgagcagagaaaattgtaggcttataatcttacttaattggctactgttcagttataatgtaagatgtcaattttattctctagaatgcaaaatttatgtgacgcatggttattgcctgtgggcttagtactttttttggtaacatagtggttaatttattaaagtccttcgagtctccaagtgcctttggcttcagagataaaacggttgggctgactcatgaagtttctcagctaaataataaaaagtcttgctaccatatttatgttttccatgaactttatatttatttcatttttgcatttactaatgctccttaaaatgttatggaaataggaagtgaa

SEQ ID NO: 6141 - DNA, 1590 bp, Manihot esculenta
  Intron number 4 from transcript cassava4.1_001044m (locus cassava4.1_001044m.g) derived from phytozome v7.0 (chr-ID scaffold06550; pos 72260 to 73849 reverse strand)
atactattttctcaccttgcctccagactctactggtaagattcatcaaatttaaagaaaagtttttaattgttttttttcaacaatattggcatataattatatacacaacatatgatcatgcttcctgcacagtaccacatctaagcaactgatgctgactagatttgcttgtgtgtctattttgatccacccagtaattgcttttatcaaatttgactttcacaagtggtaatgcatcaagtagggattagcataacggcatagcctcgtccagtctgtaaagaactagatccagagaatatagttttttctacttttgaggctgaaaacacactttaagcctctaattttcccatccagaactacttctgatctgtagtcttatgtggcatgagtgttgtacagtatgtgttactggggaatggtattgcatttatgggtgggaccttttgctttctatatctaaaatcctatatcagtgtaatttgactttatactaaaattatatccagcaggatggatgtatgtagccatttggaaatagcgatcttgttgatggttctgccatcatttctgatcctcttaattttcaggctgtaaatgttaaccccacctatcccagtttctcttcttctcaatcatgcaacagagtgctctctcttttaatgaacagccatttaggacaaaggagactagaaaattcttaccaggaggtaatggggtatactgtttatgtgaagtagttgcctgaattataaacttaattttacataattcatcatagtttttaactgatatttaaattgttattcattatgctagcttatttctccttttttttcttctgattttcaatttatcatttcatctgacttgcattgtatcaaatgcctttttttttcctgttttgtcttaagagatgggtggtcaaggtcttgggggatgtagatagatgatttgtgtaatgaagtatcaagaatgtagatcaccaacttgatacattttctcagcagagtagtcatgcttgatccaatgtttagagtcatttacaccaatatcaagcactcgcaattcaaatcgttcatctttgctccagtggcttcacacaattcaaataattcatcttcgcttcagtgatttgtttgattgaaatgagagttaattggttaactgtacccttctatatcccttgtttatgcagtgatgtccttgttgtctgaaattaaacgacatgagccccaattaactaatcaaatattcaagctgcttgggaatgatcacttggactcgctgtcatttacttgtacatttttctaatattttacagtgagcaaatatgttcgatatgcttgccattttgctgtatattccataaacccctccagttatatttatctttgtatgtatgctatattgaagtaaatataataacaatatggtgtagtttgtattaggcccctcgagtcattaaagtcatgaggttctctttaattcaactttgtagatttgtatatcttccaaaacatgtgggactgatcaaactttggcagatgatggcagattttgagagataatatattaacagag

SEQ ID NO: 6142 - DNA, 845 bp, Manihot esculenta
  Intron number 6 from transcript cassava4.1_000384m (locus cassava4.1_000384m.g) derived from phytozome v7.0 (chr-ID scaffold05213; pos 156623 to 157467 reverse strand)
tggtacgtggttttatttactataaaatttagcatcaccattgatgattagttaatcatgttgattaataagcatcttcatatatagtgtaaattttcaaactttttaacttaaagccaacttaataaaaagaaaatgacattttagttagtaaattggtgataactttagatttagacatttttaattccctaattcttttaaataattgaaatttaattaatcagaaagagatgagacaagaacaaatgtatctaacacagctttgtttattcggtatgattttgacaagccttttgactccacttagaatctcacacacacagaactgagtgggtccataattgaattgttgaaaactactttgtactttcacttcaaggattaactcctacattcttctctatcgtcatagattagacccagctagcttctatttttcatatttttgcagataggtatatagcacctaatttaatcatttgattaggaggttccttacctcacctgctggagcagtcatgacaattttctactatcaaattgcacattatattctattctgttcctttcaacaatttcttctattctctattattcattattggagattttgtcaataactattattttacttggctgttatgaccaacttctggatagttctatgtcattctattccttgactttctatatatatctattcatttatttatctcctgttgttaataaactacaaattttcttccaattattaaaccgtctttgcttctggaactttgtgggctgagtctatatctgtttttgtttcatgggcacaggtgagatctctagtgggtgacaga

SEQ ID NO: 6143 - DNA, 3733 bp, Manihot esculenta; identical to SEQ ID NO: 5575
  Intron number 1 from transcript cassava4.1_019928m (locus cassava4.1_019916m.g) derived from phytozome v7.0 (chr-ID scaffold10173; pos 350607 to 354339 reverse strand)

SEQ ID NO: 6144 - DNA, 672 bp, Manihot esculenta
  Intron number 7 from transcript cassava4.1_000062m (locus cassava4.1_000062m.g) derived from phytozome v7.0 (chr-ID scaffold04065; pos 354289 to 354960)
tgcaacttgaccaggtaagttcctattttttttttttttgctttcttcaattactgataatgtgttcataatggtgatagatattatatgtagcatatatgcacctaatgcattattaatttacttgtagcatcttaaagtttgattttattgtagcaggaggatgtgtagatatccaaatctgcagaatatcaatttattgcagaaacagaaatgtgttacaagtccagtttcttagattggaatagtgatccttaagtacctaatgtggtacatctacatgagaatttgatatggtgtttgtgtttattgtttctactcataacaccaacaccattgaatgacattataattagctaaaaaactagcccttatattgtgtccctgaaactctggaaatagctctccctttctctctccctctctccctctctcgctaagcttgtaaaacttttacaatgagaaaacttgaaaacgaataaatgaagccctataaaatgacagaaaaactgtatgacttgtattttgctgaagattatcctaagtttgctataagagccataaaatgcttaaatctcattgtcttttctattgcaatattgaacatattgaataaatgggtctctaagtaattatttgcataattgttaccaggatattttgtctagtagt

SEQ ID NO: 6145 - DNA, 4065 bp, Manihot esculenta
  Intron number 3 from transcript cassava4.1_015893m (locus cassava4.1_015893m.g) derived from phytozome v7.0 (chr-ID scaffold08265; pos 970950 to 975014 reverse strand)
aggaagtggattctcgttctgtatttgtgggcaatgtgagaaaatggaaaacctcttctccttttttctgccacctgttaactacctactgtgtctataaatgctagtttcctgtaagcttgtttttattcctagctgtgctcttagagttgcataatattgtgtattaaccaaaatttcttttctacatatctgagactgagttcttgttttaacctggtcagttaaggaaagtagtaggcctgtttttccattggtcttgctaaatttcttttgaagtaccatgcatgccattcactattttgcatttctttatgtagctacttcataaatttatgtatttcaaatttgcttcctatttcccacccttttctttacataaccttagaagttaatacattgtgcatgatttcatatttaatatccttctttcattctgtaaattaagcttcattattcgaatgtgcattgtatattggatatgcatgcttatggaactacaggtttctggttgtaaaatacagttttcgtcctggctagaaaatagtgatcacctttgggaatatttcttcatctgggttattgtaatagacttgttgactaacccccatgctgaaaatcattttacataatcttaattgatattctgttacctttctcttgtccattgaggtatttttattatataaaacatctccagaaaatgccctttcgttaaactaatctatttgggaaagagtagacaacttgtataattcttttataggaagtgttcaaacgccttatttgttgaagaacaggcatacctcctttctatatttatattaatcagcagtggtgggcaatctcatggaaaccagagattgccatggctccactatgttttcattgattgttttagtgtctagttattaataaaattttaacattttgtagttgacatttaagataatgttgtctggtaagttctttctgcctcttttatgaccaccacactaatattataaaaaaattggctggtctatccctttcaagtgtgaaatttctggactatagaaatttttattatgctttgcatttcaaaaaccttgtgaatgatagaaatgtaaaccatgaaagtcataaaaatgtgaaaaacctaattcgattttactttgagggtctgaaatttatctgttatagcaggttttgttaatgttttctttcgtttcacacgtttatctttaactgttttatcttgttatgcattgaaagacaaagtacatgcacatcaaatgcagtctgtaatttagtagtacataagtattccaaatctcaacagccctttctatccacccaaaacctcagagagaaaaagaaataataaaaagaaagaaagaaagaaactttcctcctggcagtggatttgttttactgttttgaattattatttactttaatttgcttgctttttctgttgatgtgccttcttaccattcgaaatcatggtttgactttacgtctcactatgatcgcaggattctccttattcttcaagttctctgtttgttagcgctggaatagttgtactgtcttttggggatgggccagtgtcaattttgtgttaaataagcttgtattatgagagattaaaaagtcctgcatgttaatagacaaaagaaatgaaaacaaagttgttgaagaaaatgagtagaagatatgataaatgttgcttgaaaaaaaaaaagagcggaaaaagaaaaaggaatgcagaacatttgaaagggccaaaaaaaaaaaagaagaaaagaaattcagaaaaaataatacaaaaggaagattttggaacagaaaaaaaggaaaaaaaagagatggaaagatgagagagagaggagtccaacttgaagaataatgcaaatctattccaagggaaattgtttgaaaaaagcaagctaaatgcctattggagttgctgaattgatgtagtttgtaattgagatgcttcaaccattatgttatgtgagaatggaagtcaatccgtttgaagagcagaggcaagtcagaatatgcaatctaagttgcagactgcagagcctcgtcactgctgttggtagttggtgcttccgaaatatgtggtcattaagcagaagtggtgaagggtgtaagattgttgcttctttcagtgtcttaatctcttgacttctagttacttttatccaaagtgttggaacttggaaatgtttgacaaatgtgtgttataatatttctagtgaacttacaagagttattaagattctaaatagcatattttgtcttggtcattttattatctactttaaacacttcttggacttgttatttctcatcagttgttcctaaaaggctgctcaaatccttgggagtttgctatatgaattatcgttttacttaatctcaagaagaaagcattttaaagcttgtaaatgatccaagctagacaaatttagacatgtgacatggcaatatattatctacttttccttcttacattaactttgagaacctgcatttttgaatgggataatatgtcttccccccgcccctttttatagaaaaagcattttcactgtataatttaattagcttattgctgaaaacactatatgtcctctcatcttaattttctggaaatgttttccatgataaaatccacttaaattgctgcggtattcatttgtcaaagtacctttagatgtcttagcttttcctcttttgatttatagacgaaatattctatacataaaaacctttattacttccatttaatttagaatttctaaacttcatctgttgtagtttttcttatatgtgtgtgtgtgtgtgtttgtgtgtgtgtgtacacacacacacttctgtgtttgcttctatttgaatgatttatatgtattttcatgaactagtgttctcaagtcctgtgttgatgatcatttgagcggtgtaggctgtaagcatttgggaactttgttttactagacgagagaataatgggttcatgtgagccagttttcagtgcttgaagttggagcggaaatggaggtgaaaaaagctacttgaaagaaaggacatatcacataagacaaggctaagacatatggactgtggcttacactgaattgttgagtattaaggttttgtttgagttgaggatgtagtcttcgccataaactgcagaatgctcagttgccagttcttttcccattatgcagatggagatgcacatcaaccgccacttaaagtgtctagtcagatgggagaaatgaaatactgcagtgcctttttttcttagaaagggtgaaagaaaagaggaggtagagaagggtgaactttgttactgtggagaggaaaaagctaaatttgagatgaccttgtggcaaaattctattctaggtctatatttgaaaaaggactggcagtgggataatttggtggtacacaagaatggttttgtgtctgctatttagaaaatgatagatatggttgaataatgaaagtatgcctgttttgatagaaaattttggcagattcatgtcgcttttatgcaccattgcttttggtgatttgaaattgaatcaggccagcgtgcgtttcgaaatttgaattgtgaactcaaaaacatcttgcacatgaaaataagtggtgcaaaaaagattaaacaagctggattagagactatacaatatccacaattttttaggagcagttggtggaaagaggaaaatgtagaacattattgcttgtgtcaaaactgaacaataaaactaggatttttttttcccaatccaatgcagccatttgatttcagctaaaacattattctttctttgaataatgttttcctttttgggtatatgatgtattatgcatgtggataagaaaccttgtccgaaaaattatagcagaaagaatcttggtaaaacatatttcaatgagctgtttgctaccataaatctgtttatctgatctagatcttataaatttatctttgatgccttgctgattgaaatttggcatgcaaacattatgatgaatttatcatgcaggttgatt

SEQ ID NO: 6146 - DNA, 2225 bp, Manihot esculenta
  Intron number 9 from transcript cassava4.1_006900m (locus cassava4.1_006900m.g) derived from phytozome v7.0 (chr-ID scaffold07520; pos 670749 to 672973 reverse strand)
acgataaaattttaaacttcaagcgcttcaaaaaggtaaattcatttttttcatctcaaccttctgcatttatttatttatttcacgtttttaatgacttttttgaatccatatctatgcatggggagaactacttgatgcagtggttaaagttcttggcttgcaagaacaagtttgtgggttcaatgtatggactgtttaatgaaaatgcagaaatatggaagggtaggacttatctagaatttcatgttctcctgatattagagctatatattctccctgcttgtagtagagctataactgtggcatggcttatttattagttgtgtcggagactcagaggtctacaatttgccaaaggaaaaattctgagggttaaaataaaaagaagatgagtagaataccttttttttttcaaaagaaatattatagaaatgtccagagtccaaattttcctagggatgttaatttataaggaaaggtcagttttcttcctaccattaggcctttgggaaacatgaaatcttataaaacagaatgtaagaagttggagaacatgaaatttgtaaaatcactgcttctagatagtagacattctatagttataaagattaacattgggataggaagtatctccttgttagatgtatctccacaaatgaatataataatcatttttagctttaaaatttaagaaaagcacaggaaaaaaaagaataagattagaaatgaacttccaaaggcctgtgactgaaattagctccccctgtggcattctgtccattttctcatatgagcaacaacggttacttgctctaatttggcaagttagcgcatgatgaccaacttgcaaccagatcgctagaaaccaatcccttttgagttttagctttggcaccttttttggagaaccaaatatgtgggtggaacttgaaccttttgatttcacaatcttgttcttctattcaaaattgaagccctcaaaacaaaatagtaagattccattaataatttgacattctagaattagagcatggggagcccacccttagagcagcaggaaataaacattgtaggactgattccatctgtacctaaattagctttggtcctgtgagtccatcagtcaagtcagaaatcttagttcaggaaaagctaaatctagggggaacaaaaattacttctcatggctccattatgttaccaagtcacttgggaaggggttaaatgaaatgaaagataaaaccattaaagaaactaaattttaaataaaatggaaatgtgatattagaatagcgtagaatggaatggaattgaattttggatttcatctgcccatatagggatcctatacgtttaccaatgtgcaggctgccagcttgagctgaattagctgctgagctatatagctagcaactatcttccccaactcaactaaaaaaaagtgcatctactataatcttaactgtctttatacttacgcaatgctctttgaaatcaatgttttgagaaccaattgaaatcccctggtaggtttcaacactattttgtaggatcaagtgtacatttctaagttgaaactttccattttcacagtgatgccattaaacatctgaagaattttggagaattttagagtattcttgtatttcactcttgatctttacaagtgatttatttggctatttatatacaaagaattacaagtaaacagaaagtaaataatcaaaaaataattatagagataattaaggatcctaatttatacttagaatctgtaatcaaatcaacttatatcactgtaatcagcaaataagtcaatatcttcagtttttgttatcaagctacaaacttcaaaaaccagttttgtctttatatttttgttagggttgcattaaatttgtataggtagataatggaatcttatgcgaattgaatggaatcaatgaaaaggcacaagaagatatatcttttttcagtttttagggattgattctgagaactttatatttaggctgtaaatttatccgtaaatttatactaattccccgtttcctggctaacaaaacacagctcaaagagtatcagcgtgaaattaagaatgttgtatttgttcatgatttatgttctaacgacttcctcttgcagttgttgtgccaagttcatgtcctaccttttttccttttacagaaaaacactcaatcagggaatagtttcaataacct

SEQ ID NO: 6147 - DNA, 3340 bp, Manihot esculenta
  Intron number 2 from transcript cassava4.1_008597m (locus cassava4.1_008607m.g) derived from phytozome v7.0 (chr-ID scaffold11821; pos 253524 to 256863 reverse strand)
gcaccgtaagatttttccccactttcatgcatttagtatttcctgcattcttttttctgttttatatgtgcactttttctctcttaaatgaagcatgctttatgaattatgagggaaaagtattcaaccatatgtggagattctaaaagcttcttatattatgtgctattgtcatcaatactcaagagggtcattttatttttctcaatgcctgctgatatactttatagaattgtttacctaactctcatttttatttgggttgtttgagttaaggttgtagaattattcggcataatgacctctaatttttaagtctagagtagatctgctgatattaatgcatgtgtgagacttgctctagctctttgttggcatagtgtatgaagataattcaacaaaaatttagaagaatcaattttttttgtttgccgctattgctagcacaaaacaattgttttttcaccaacgaactcttatctcttgcatttgtctaagatttaattgcttccgttcttcagtggattagccttagtgtatgtctactattcccagtccttctttagttcaaaatcttctatagttttgacatttgacatgattcctttaacatcatattgaattggtataaagcctattgaaattccttttatgatgccttctaaatttcattctctaaggtccttgttatggagcagagatctctctctgttagaaattttatgtgacttggcaagtacatgatcttaaatttttactcgagtatatgcagttccctaaatggcaaacagattatgctcaaacaaatgtttgcaagaaaataaaagttttataagcacgtgtgatttagggcctatttgttttactttcatgcttcattttttttggttaaaaaactgcttgtagttaatattttttgctcaaaaatatttttcctgcagtattttttatttgtgaaaggtacaattttatgccatgtttttataggcttttttctactttgtgaccttttttgtgtgacaaagaggtagcctgtacttgatgttcttagtgaaagtaggactcttgtgctgacatcattaacatatgctgacatgtaattttcaatatttaaaaatatatattgtgggacccactgaacttgaaaaattgaaaaaaaaaatataataataaaaaagggtcaagataaaaggcagtgtgtcaggggtgtaattttggtcaaaatagagggcagcaagccttggctttccttctttctcttggaattatttcatagaaatatagcactttgaagtccctgcttttcactttttgacggcacaaactcaaaggcaagttgcaaattgcaagggtaagaaactgaagcctgctattatcaggaaattctgttggattaactctaattggagctgcagatttatactcaggatgtagaacaacaattttccatttctgaggaggataaacatctgtttgattcataatctcatggcaatttaaacacttgcaattgaaaagctgattttgattgtcttggatccatgattcttgtcaaagttgtaccactcttgcagcactgtggtatccaatctttatctcttgattggcttcctcctataattcatgactttagagaaattcaattgctggtagggttgtcttactgttccataaatgcaatccagtaagacctagactctcatccacttccaagtcaagttccttggaacaagatgtcaaatgaagatttcagcttctgggtcaatgacaggaaggtggagttcaatgataagtgcaattggtgtgaagcttagggaggcgattttgggaagaggtttgggtgagaaaccttcaggagctggaggaagatggctcctaataaaaattagttaattaaagttttccctaaataatttttaaaaatgtttgttggacccacttgtataactaaatctttttcactgcattatttttattttttaaaattttttattaactggatctctctgatgaagtatgtttttaatattaattccatgttattgatttaatattaattccatgttattgacatgttagcataagttaatgatgtcggcctaaaaatcctacttttgcttacagagttaaccacaaggtatctctttgccacagaaagatacaagccaaagctgacaaagcatgtaaccgcatgctataaaatgcattttcccctccttaatttcaaacttttggtttttctcaaatgtgtgcttgtgtgtgtgtgtacatgtgtacaattttcttgagatattctttagacacactttttaacaacgaaagcggtggaggttgggatggcagtggcgatgacaatgacagaggtggggtgtggctcattaggtggtggtgatagtgatggcagtgacaggttaaatggtggtgatgatggtggagtgttgacatcagcaatggaggtggtggttgtggtagcggtggtggtagggtggtaccggcggtggttggtggctgcagtggtcagagagtactagcaacagtggtgatagtgacagtggtgatgttaaataccttcagaaaatgctgtgttttaattaggtgtagattctataatattccataaagataggcttatttctattttcatatggatcggaaagatgtacttgatataattaaagtaatacattttgtgtagtattttcctaaatcacccactcatatttttacgttaaaaataaaataaatagcgttactaacctattcttagaattaataaattttattttttaatatatattaaatagaggtatgttagaaaactaaaaaagtgccatctcaaaaaggaaaatagcctataatttggatgtatgagaaatgaaagtaggcatttcctcaaggaatgggaggagcagtacacacaagccctgtttcacaagttccttttcaagtttatgataatttttcttgactgtgcagggggatattttaataccttttttctatttctaattcactttagaaatgaaaaatgtgaatcataagtttctctgattaataatgattgtgttcctttccagtttgaattggtttgcaggaatataataggtaaacccaatgaacctctagaggatttctaactagaggtagtatatatagttaaatggccactggttatgtggaagtcggcattgatgtttataagtttcgatgaaattattcttttgctccccaaataaaccttcttgaatggctaatcagtcaataattgggttattcgatatctgcaatctaagcacttccgagacttgttgactagtttcttttctagctttgcagggag

SEQ ID NO: 6148 - DNA, 924 bp, Manihot esculenta
  Intron number 4 from transcript cassava4.1_000509m (locus cassava4.1_000509m.g) derived from phytozome v7.0 (chr-ID scaffold06871; pos 308022 to 308945)
atcagtatctttcatccactactgaggccgctgaggtattgagtgaaacatatgttggataatggaataagcaagttgctggttacatatccacaattgatttctcaaatgttatgtgtagaagcattcttttgtacttgatctgctgcacatttctgtcctttcaggttctcagcccttaacagaatacagatgtgattactcattataaatcaaactcaactgtttctgatcttcatcaatggaatacctatgtgtgtgtgtgtgtattctttttttttctttctttctttctttgtatgttactggtgttttggtaatcttagtgtcaaaaaaatgctgtgagctttgcctttttatatttagcagttgggcaacaccttatgatttatgttttcacatttctgttaagttgctataataattttctattgaaattttattttttgctcttccattttagaaatttaagtgcaagaaagtgatgtcaggtgtcatccataggctattaacctgtagtatgcagaattgtaaatcatgcaaaagcctttagagttggggattcaatccttaatcatcattattatccacatgttcttttggaaagtagttaagaaaagtgcttctaagttcattgctagatttttaattcaagttatttattactctgaagtttgagatccgtgggcatcttgatttatgcaattgtatctttgtgtttgttgctcatgtaacaacctagctgcctgtcaaattgttcttttttgttaatattggcacttgagtttctatgaagaatactgatttagattttggagaatcagtataggcaaaatttggatcaaacttttatgtggagaagaggtgtgctttgtgctgaaatgtgtatcaatgacaaattctaaattgcaggagaaaattgcc

SEQ ID NO: 6149 - DNA, 747 bp, Manihot esculenta
  Intron number 4 from transcript cassava4.1_001374m (locus cassava4.1_001374m.g) derived from phytozome v7.0 (chr-ID scaffold09876; pos 743290 to 744036 reverse strand)
gagagaaagattgaagctaggacacaaggtacttttatttagtgctagcttattttggattctaaaagaatgttttaggtccttgtgtttagggcttgtaccaatggttgtggtaagctattagtggatggtagttgaaggcctaagcaaccactagaaattgccactttttgcattctagttatgatttgaattgcttactctgaaaattctgttccaattgagatgttttacccaatacctcaagttagcagttgggagtccaaatgccaatcattggctctcaaacgttcttgcaaacaggaacttagtaaagaaaaattctgtcgatgtgaaaggtatagttaggattttattgcttattgctgtcacttgactggctgtatacgcctgaatccgacaaattattactttatttatttatcttgaatttttcatattactagttctgcattggcttccaatgtaattgcaattttcagaaaaaaaccagtagattagtgattcataatttcatattcagaaatatgtgtgtgtgtgtgtgtacatattttgtattcacttgaatgttactgaccttgttttggagaatgtttcggatgcagggcatgtgggttttctgtacttgtgctcatgcatgaatgcttaggttgcttgcaggcttgtatgagaaatgtgatatctgacatttgtaaaatgacaaatatcattgtgcaggtgtatcacttgcagagttagagatagaaa

SEQ ID NO: 6150 - DNA, 1353 bp, Manihot esculenta
  Intron number 1 from transcript cassava4.1_007683m (locus cassava4.1_007683m.g) derived from phytozome v7.0 (chr-ID scaffold00987; pos 50280 to 51632 reverse strand)
gtctcaaggtcctcttctgttcttcctcattattcttttttagtcttcaaagtttctatttcactactttggatttttttttattatctgcttattgactaaaaggtagacttgtttttcctggtatcgttatttttttgcttatattactgatgggtttgcttttgaatccaactgggcatctgtgatttctttgctatcttatggatccagatgttggattctgtatgtttaagttgtggatttgttttgctttgttgacttccttgcttggctgggagatctatgcattagttgtcatctttgatttgttccacttaaactggactaggaagttctctctgtgtcttggagttgaactgctgtagttctaatgttcttgcatgaacaaaagtataattcattattttccacgctttttagatttggatgtagttgaaaggttatgagaaaagtgtcagatgtgttatggtgggttgtttaatagcttgtggggttagtctctgtgcagccttctttagcagcttactggacctgcaaatggatctgttttttttctctttctgtaatgcaattcattgtgtattctctttatactaatcttaatatctgaacttgatcctctttatagttgaccaatattagtcatcgtccctacaattttccagggatttaccattttgcatgtcctatattagtttactaacattgtgtagtttttgaatgtgagatttatatgaataaacacctttgaaattggttgtcttgtgttctgaaatgatagggtggctttcatgaagattaaatagtaatgtactgtggagaggaatatgagcaagagattattgtgtttggtcctttgattgcaatcaaaagttggtgttttgcttacctttggattttacagcttttgcctcttgcaaagtactgtaattgattataatatttctggacagcctttggtactcagtttgttgcttatcaatgtttctgttagaattggatcccatgtctctattagccatttgctatattgggctgcatgcatgctggccatccattatatttctttttagtcgtaccaaattctgtcactgatctgaaatggacaagatgtgtaagatgctgttgtttttgacacatttgttcttccatgtattagaatataaaagctagtttttaagtaaaaatcttcaccttttcaattaataaaaaaattgttttatttgaatcattttggcttttctattctctttgaaactacacatgaaccttctaagctcatacaattgctgtttcctttagtaatacactaacatgatagcatgcttgattttgtgccaggttctgcac

SEQ ID NO: 6151 - DNA, 4273 bp, Manihot esculenta
  Intron number 4 from transcript cassava4.1_026203m (locus cassava4.1_026203m.g) derived from phytozome v7.0 (chr-ID scaffold04177; pos 316442 to 320714 reverse strand)
gactggtgtaagtagtttatttatttatttccttcttcttcttctgtgtaaatattgctgtttcggtggagatatattatctctgtgttgtatcttttcatttttttttttcatttttcatatttattatttttccctctatctttattttaaggtgcagagagttcataaaatgttattcacttttgcaatcactgtcctaggaatttgacttatgatgtgatgttactctgaatttatgttatattgtgtttttttaatgccgaaatattgatgaaaattaatgtggccatcttatttttggaagaaagaatatgtttaaataagattatcattataataattttgcttataatatttgttgtccattcgctgttattagatttacttttaattatattgaactcaacgactaattaaacctataatgtctaattggttagagacttcgggttggttatatggatctttgtcctctgctacacttgatttattgcaacatctttggaaatatctaagatttttaaaaactttttcattatttccccctattgatggtctagaattcacctgtctaaataaaacgagtcttcttctttcttgttttttttctttgttttatcttctccttttacatctctcccaatttcactttgagtttatttttatatcttttacaatataagttattagttatcagctataagttatatctaacagtttaaccaaaatatgctcttagtcatttcgtaaaaaattgaggttataagagttatccctcccttaacattgaagtatttttaagattgaatattctatcattaatgcttaaaattctttccgttgcataaaacctccaagcatgggcaactatttaaccttgcattcagttgtcgcctatctcattgatcaaacattatcttttctgaataattttttgagagaatttttaacttatatttctccctaattttacaggctaacatcccaatttatgcaagaggaataagcttaacttggaagatttatagaaaggcaacaaataaaaaatctctacaattaatccctacacaatcacagaaaatcaaatctgaatctgttaatataaagaatcaaatatgtctataactcttaaagttgatacatagatatcacaaatgcttaacttgcaaattaggtcgtggtaggttctgtcgttaagctctttaatgaacacatcagctggctgtttttctgaagttacataaactaatctttgccacctgttagtttttctttaagtaaagtgtttgtatgcttggttctgtcatgtactagattgtgagatatattgatggtggctttattgtcacggtacaagagtaatttatcgttttccaacaatttttgtaaccacaaaagcttacaaacgctagagacgtaactctatatttggcttttgcacttgatcgaatatttacactttgctgtttactactccatgtgacaagaataccacccacaaatgtacaatgactatacgttgacctcctaccatctagagatccagcttaatctgcatttgtaaaagcttctggttggaggtgactatgtttgcagagtatgagatcttttcctagaacagatttcaaatatcacaaaatgcaaaaaacaacctgcatgtgagactcatgaagatcattaatcaatatcatttcatttatgaactttacaaatttttttgaaaaatttgcgtagtgctaggccgttattgttacattacagccgttacaggtctgttttcattacttacggctgcgactgcaatttaaaaccatgatcctccctctgagcttgactctctttctccccatggctgttattagcatcctccctctgaagatcactcaagtagtatggaaccaagaatcacctcttccttttctcattctctccttgaagaggtgatggatttggaggaaaatatgatttatgttacttgaaagtgatattcatactgacaaaatacttttcagaaggagggtgacttgtatcccttttaagttggagaatatccaacaaacacacatttaagtgctataggtttcagttttccaacattctttgtatgaacaaagcaaacataatcaaaagcctttggaggaatagtgtagaaggttttaccttgtagaacttctaaaggactcttatagtcaagggcttttagaggcatccaattaatcaaataggtagctgaaagaacaacatttcccccgtatggttttggtagattcatgatgaacatgagagatctagcaacttttaataagtgtctatttttcctttccgcaaccccatcctgtgcattaatgtaaacacaactagtttgatctcaagtctagaaccctttctctattctcggaatctcaactttagcatcaaagtgtgtacaaatcattttgtcaaaaaacttaaagcaagaaaatacttcattttttattttcatcaaatagattcaagttaatttggtacaacggtctataaaggcaacaaactatctataaccagttaaagaagcatgttatgtgggaccccatacatcagagtgagtagtgtaaaaggaacaatgcttctattattacttaaaggataagagttccttgtgtgtttagcaaattcacaagcatcacgacatgagtagtcaaactcaatttgcttaaacaatttgggatataatctctaaaacaaaaaaggatggatgccctaacctcctgtaccacttgattgtttccttattgacatttttattcatacttagaaaagcttgatttgcaccaacacctggattatcagccaaaacatcttaagcaatcttgcagcctatcagtgccattcctcttcctaattagtagattctgaaagatacaatgagtgcgaaagaattaaactttataattgagagaaatagtgagagcactgagagataataaattaacaggaaagccaagcacatgaagaacaaaggagagagtgatattcggagtacaattaacagaacttatggcctatatgggagtataggagccatccgcaattcgaatatgatcttgtgttagacaaggagagtaggtaagaaaaattttgaaagagtctgccacatgtttatttgctctggagtctataatccactcataagtattatgattagcaagagaggcaatacctaatcttgactaggacaaaggattggaaagggcagttgtgggattgtcagaagcactaacattacctccaatagcaactttcttgccttcaaccatcttaaagcacgcaaaaaaaagttactgctgaaattaacccaagatatgaaaagtgaataaggtgatgggaataggctggtcggaggtgtgatgggaagacaaggctgccgaaaagggttgccgtcggaaaaggctgctgaaaagggttgccatcggaaaaggctaccgaaagaggttacatgctctagtgcgtggaaaaggcgctgaaacttgtgacgccacgtgtgacgccatgcatgtgactggatggaggtgcaacgccggggatgggctgaaaaaaacgcttgcttcctcctagagtgagtgatgacaaccaacttccttgctaatgtcgcccataagcctgacctagataaaccctaagtctctagtatgtgttttataaactataagccaattgatgatggtaaggctctgataccataaagaatcctgttagataatttgttacttatatttctaagtaattttatggagcaaacatccatatttatacaagaggaataagcccaactagaaagatttacaagaaaggcaatattttcctttcatttcaaatacctccaattttactttctatacctactaaacataaaattgtgggcaaacaaatcaggtagatacacacatgtaaaggcaagtgaaaagtgcaatgacaatgctggcgtgatacagcctttaagttttaacaatagggtggatagtattgtacttttggagcaagaagtatggtgcaaaatgagttaaaaaaataaattgaaaaagaaaaaaagtgatgtcatggcagtacttttattatgtcattttccaaatgttattatcaccttgtggcagctttgtcgtctgacttgagtgatgttttaagttagctcaaatattcactagttgttagcatgttcatggacattcagttatactagtttttgttcttggttctagggtgacagtatacttgcagattctggaacagaaca

SEQ ID NO: 6152 - DNA, 2070 bp, Manihot esculenta
  Intron number 1 from transcript cassava4.1_009328m (locus cassava4.1_009328m.g) derived from phytozome v7.0 (chr-ID scaffold07195; pos 12428 to 14497)
gttgttgctattgtattcactgtatatgtgagttctctctctctctctctctctctccctctctctccctctctctctctctcaagttctcagtaaatatatgtttcttttagatctttaatcacctgctgatttttcttatgcataaaatttgtagatttgaggaatttttgcctatctagtaatgattatcaggaataatgacacttagaagagtgtggcgtgtgattaattttaatcagatctgtgagcatgtaaaactctgaagaatccaggatctaaataaggcatgaagtagaatatttccttgaaatctttttatttttcctggaaagtttgcttcatggttgcattttcatgctatatgtgcagctagattgtatggctattgctagagaatgtaccatttttaaggagatagtacttaccttgattttttttttcattaagtgacaactgtcatgatctttcatgacactgggatgggatccttattatacccacaatgggcagttgttacattttattgtgcatcactgcagattgtagctaaagctcactgactgagcaccaaccacatcattggtcagtctgacacatcctgcccaagagagatgcaggaagaaaaagggttcttaaggtttgggtggagtactgtcagagatttaaacattttacttacagaaattagtgcataaaatttagatttattatagtcaatggtaagttaaatagctgggattgacaagaaatttccatgtctagttgtgttatttgaagctgaatagaaaagttgtgcaatcaattgttataatctgcagttggccttagatgataagtatcttttgcaggagttgccacaagtttggaagtgacttgctagaggatgagtgaaccttttaaggacagatagtcaattgcttacctaaaccttgccaacattcccttagatatcattagcatgaagcctaatttttctgtcaatcatagcaggccattccagttgttttcatagatagaggcacttcagaaggttgatatgaattctgagctgtaaatgttggtaatacattttgcaagtacttctttctctatgacactcatattatgagctaagcatctaatctcaccaaaaaggaaaagggggaggggctaattaaaaataattacttacgcgtaatgtattttcttttaaatagacatgcatatgtggtcatagaactatttatttttatatctaaaatatttgtactgctaaacaatttcaaaagagtcctttaggctttagtgtatttattttcttgtgtaggttaggctggtggtagttacacttaggataggttgttaaatgtttgtggtttttttccaaagtagcatgaggatgcagcacttgtttgagccctcttttgaggtaagcagtttctgcccctcccccctcctcttcctttctctgatttatccgactttcaaaccctgtcaaaccatgtatgctgcattcgatatgtttataggtgcctcattttcttacctagcatgatctactgtttccacactaaatccaaaatgcctggaatattcttttttttttttaaaaaaaaagataaaattgaaggtgtctgtaaaaggttaaaaaaaaagcacaacaaatctgaacaaactgaaaagcatttcgaagtggcccattagttaattcaaacttgctcagaacccaagcaacaaaaactgtcttgcaaaatgcagcacaacataaaacccatgcattatctgacttaaaatgcaacttctttgtgtgggtataccgtcttgtgtatattttagcaaaagtccctatgcgtcataatgtattcccaaaatgttttataccattgcttcaaggcagttgttggcttaattttttggacagtggtttcttttgagacagttatcttataagcaaaagaaagaaatatgtaatcaaacctctctgcagtatcttttataggcaagacattgttgagttccatagcattgaactccaacgtgtttgatgtctcaggatttagttcttctcctgctaacctctggaagaga

SEQ ID NO: 6153 - DNA, 1500 bp, Manihot esculenta
  Intron number 1 from transcript cassava4.1_020653m (locus cassava4.1_020653m.g) derived from phytozome v7.0 (chr-ID scaffold08473; pos 130916 to 132415 reverse strand)
cgtggccgttggaggtgctgttggtggcgctgtcggtatctctcttaaccctaaaccatctcaacaacttctccatttggactgtcgtttttcttttctctcctctttcattgaatcttcttgttctgattttgttccatattgcttttcttggttggggggttacatggccaatagtactcttgattaagtgaattggtttatggcataactagaaattcttcttgttattaaaaattattttcaggaatcaggattcccatttgtactgtgtcttgattttggaaggagtttagagaactacttattgagtgcgggcacatgatttaattccaggattccaactaccacaatgttttttggagttaggttttacaaaggaaaaaaaaaaaatcatattcggagccgtaaaggtaggagcgtattatctcattggaaaaaagaagtctattcttctgtggtatacttgattttggaagatgtgttgatcagcgttgttataagttggtattccatagttttttacttgcaaagtccttgcaattgctcttggaactatgagattgagaacagtggaaatattagagttgataaaattttcgagagtatgatacccccttcatattgcagagctggaacttaaactactagagtcttaatttatagtatgttaaatgatgttagtgtccatagtgattggatcatgccacaaggtaatggctagttggaaataatgggttgttattaaagttagtgattgaatctattatgtgttgtcatttggtcactgtgtggatatgaggcccttcttttgattgtaatgattataataagtaaaaatcttggattctaagtatttatatttgatttagatgagagtaaatataaaaattcactttgccaaagaaaagacaaaagaagttcatgatgtaaaatagattctgaagttttgcagcaaactcaagccagcctgtgatggattgattgatatttatttacctcttttttggatgtaaagcatgctcatgtttctcatggtttctgatacatgatgcattcctcatgttctgtcatgtgtctactttagtgaaactttttgacttgtcatgtgatactgatgagtgaaatatgctactcttttttgtttcttttttttttttttggagaagtagaaatatgctacttaatatactgctttgaggaacaaaggtgtttttgaaatagcaaaatgcatttcttaattctgattgtggagttcgcacattgatcgtgcaataaagccatatttaacatcctgttccatattgctaaaatatacgctcatgtatcttgcatgatggttaatggatcttgatcttgtttggtatttaacattttcacatcatataattgtaacttcaatggatatccatttatgacattgtaacacattattaagtgtagctatttgtgcttaatgattatatttctaatgttgtgttttctttctaggggctgtat

SEQ ID NO: 6154 - DNA, 730 bp, Manihot esculenta
  Intron number 1 from transcript cassava4.1_019445m (locus cassava4.1_019445m.g) derived from phytozome v7.0 (chr-ID scaffold06871; pos 256243 to 256972)
ccccccccccccccacctccactctctttctccaggtcaagggtgtcctcctctcccctaatatccttacgttttcattttgattatttcagttgaagtatagaggtctttctccaaaagtaacatggataattactccttagtttgtgttgattattctcagtttatcaacctctgttgtttagtatgatttttgttttaaagtgatgataacatatagcatataaaattttcaaagtttcattcagttacacctatagcatgtaacccatagcaacaaagtttgatcctatctagtgaaacattttgcaactcatgtaaggcctgccaattttcgaattgctgcatggcagaggctaaacctagatataccagtggtttctcttaaaggaagatgagttctctgttctgatggtctggatgctattaattgaattttaactttatccttgtgcacaaaaatctttagttaaggcaattgattaattaatttgaagaagcatttactcttctttcttctttggcattggctctgtttaagaaatttattgaagctactagtatcatttcaatagctaatgaagtcagttttgaataattttcttacgtttgtttacctgtctatctgattatcaaagttcaaacaaaattgtggtaaattttctgatgattttgattttttttttttattgcagacgttggttcggtaccagttacctgtggttgtgat

SEQ ID NO: 6155 - DNA, 1091 bp, Manihot esculenta
  Intron number 4 from transcript cassava4.1_015655m (locus cassava4.1_015655m.g) derived from phytozome v7.0 (chr-ID scaffold04233; pos 192380 to 193470)
ctcataataaggtaccctctctctccatgttggcatggtacaccgtgggagatgacattgaatatttgtatgattcatattcatgcagttagacactcgagttgtggagatctcaatgaatatcagtaaaaaaatcacttttttctctcaatagagatgatggttaacgaaatattgtttttccttagataaaaaatagttacttagttgtattttagatgatatatttagttgtatttaatcctctatttaggctacacttatcattacataatttttaattctattttattttatatagtatgacgtatctaagcacccgtgtcaaaatctagatccatatttctatattttctattctacaagttgataagtcaggcacaaggatatgtacccatttctaacacttttacctgaatttgagtaacatagttcttgggttgggagtgacacagagtttgttaggggaggggtgtttgtagtgacatcttctgttcagttgatgttctttttttttccacgtaatccagaacttgagttctgatgactattatgtctattaggaaatggtgcttgctgtctaatagttttaacaattcttcaaatgacaattgttatgtatctgttacccaagctgtgagctagcaaagtggaacttgaagttgctggttgttgtataatgatttagcctccgtttgtttcacataaaatatcttatatgtgaaatatatttttcaaggagaatgttttataagaaaataacttattttccgttatttatttgcaactttagaaaataaattgtgttaattaatttcatgtatagaacgtccaatggtgttaataatattctcaaagactgtaaaatgatatcgtcttttggaaagatgaggtaatttttcttaaagatatggcttaatttttcattttgatttggaaaacatttttgcattttaaaatttttagagtgaccttaatttcattctgtttcttttaatttcatacctttaaaatggctcaaggaaatacacttttgtgcacaaatggagccttaatgttgtttcctcttttattttccatttttcagttac

SEQ ID NO: 6156 - DNA, 1206 bp, Manihot esculenta
  Intron number 4 from transcript cassava4.1_019152m (locus cassava4.1_019152m.g) derived from phytozome v7.0 (chr-ID scaffold09120; pos 83487 to 84692 reverse strand)
tagtcagattatatctgcagaagcccgagaaagacgtcagttgaattttcattataaatttatatagacatgtactttatctttcagggattttttagtgtatgcattcttttaaggtgttactttatagtggctttcttgaaaagcattgtgttgctatataattgcattcttgagaatcacagcagctgcttggtttatacttcaatgcttggattttatagtagatgtaggttcgttatcatttgttatcacattctttgtttgtgaagcaagcaatatgtggcatcatggtagaaaatattatgtctttgctgaaatctatgtggtcaagaagattggcaatgttattgaattgctagaaggagaattttgatgtttatgagtgtgaataatgaaatgccctttatgaacttaactaggaagaaattcctgatactcttttattcctattcaaatttttgttatagaattctccatctgttagatttttggactgctcttatgaaaagttggataatgaaaaattaatttaaagggatacgtgtttttttatcttgggttactgtgtaggcttatacctgaagggagccttcatttttatgttttttaatcatttactctgcataaggttttgtagtgaactggtgatgaatctgggaaatatctccataacttcaagtgtgctccagggacttcttagaaatgaagtttcatgaatttcattagacaacaatgtgacatgtatgtgttgatatgctgattggatttgcatgaatcacttttgggagaatgattctaaattggtgcagagttaaaatctgatagtaatggttctgtaattggttcagagttaaaatcagatagtgcacttggtagatctaccagctgcatgtggacttctaagtgggtcttgattggtgaattcagaagaataatgcttggttttgtaaagtaatttggttgcaatggcaacgcatatgtagccattaaaaaaatctctgaattttgcagcagagattcattattttgttgagggcagaagaatattttgattttttcctgtaaatatttgaacctaagttgttaatattttttatttttgtctttccatatgtaatgtaattattggaaccaattatgtttatctgctatgacacaatctctgcagttgcgcgaattgctttagttaaacctgaaaaggca

SEQ ID NO: 6157 - DNA, 2436 bp, Manihot esculenta
  Intron number 8 from transcript cassava4.1_009198m (locus cassava4.1_009198m.g) derived from phytozome v7.0 (chr-ID scaffold03812; pos 106893 to 109328 reverse strand)
ttcaagcaatttttaggtgggttttccttgtttttagcatggtgacaaattaaatttctgcaacatcagtaaattatttttagtttcctttgtgttctcatggtaatgcagaattgcagaagaatctagatatgatagaaaccctgaatgacttcaacttagtattgaggctgagctaggtgtccttttagcatgttttaatgctttgattcttcttatttgaatgctcaggcacaaagaaagacaggcacatatttttgtgtcttagcactgagattcttaaaacatttgtcatgtcaaatactttctgaagcagttggccaaagtataatgcttgtcccaacttcttgatgatgttcatgtaggtatagtgcaagtggattccttaatattctaagttggcagtagaattaagtaattctttaggaaatagaaaattatgactcatatgggtggtcatcttactattataccttcttaaactaaggtaaatggaatgggtaattgggtacttggtagacagtacctatatgactttcaccaacccccagcccttcacaacatatttctccctttgaaatttccaaaattgatttctattgtgaacccaaggtttttcgaatgatgttataaattgtgcactatctttttgggttgacaagctattttggattggattggttagattttgcattattttccccccttccattttacttcaaaaatttgctggatttcttttttattgaacttgaacttgctattgaaataaaaactcattttcttgacaatattctaagaatatttcatttacaagcaagacatatcatttaaatattttatggtagccactcgggattaagttttagtgtatttaatgcattagttaaagcgagtaattagaagaaaaaagtcccttggcatcaaaaatcacattttaactaatagatgcttcacagatattttaaaagcgtcaaaaaacataagtgaaagtacaccaaaaataaatccaaacaatgttgttgaactatcagaaggctcattttaatttttgaagaatggaagtgcttcttgcttttagaggaaaagagaaaatagaagtgcgtatcaatgaggatatttttattagtcagtttatccattattatattttatctttcataagattttatacctgattagattttgactcgatatattcacatattactaagcatgtgagaaaagtgtgtgaagtacaatgtatatacacaacttacaagtgggctgagacacattaataaccccatataacaatccagcccattaccagaaattatcatcaacatagattaaaagcatcaagaatgccttctgctgactgtctaaagagacaatgatcattaggagattgagcaaagcccaattcctttaaagaactagtgaactgaacgttccattgcctagatgcctgtctgaaatcataaagacttcttaagtagacaaacttgaccagcagcagccttagcgtatagcatctgctgtggtgggagcatatacacatcttcatctagatagccacgaagatatgcattattaatatctaattgatagataggacgttgatgaacagttgtcacagcaacgaataacctcactatgactaataatcatccctggatgatctggtccctttaatgctagagtatttgccgctactgttccctctgttccttgcagtatcaaaggattaactacaacgttccgagctcacttcaccttcttctgcttcttgtggatttctttggtccaccagatcaagaacactggcgaaaaacatttccaactaccaaatcttgctgagaaacataactgcttcctagcaaatttcccactctgataccatgacaaaagcatgggaaggaaatgaaagttgtatcattatgaggaagtagagtttatatacaaataacatacaagtgggccaagacacgaatacaataataagcccttataaccatttagacttactatactctacagcatgcaccgacacattttattgtttataacaattagtcttaaactgaatatagtcatatgattcatgtatgaatgcaaggaaaaagtagttttcgccccagtttaagtgattttattattcttttaatcaataatactcagtttttaattcaattttgtaattgttttaatgtatgcttatggaaatatgctcagtagaaatgtaagttttaaatttgaaaattaatatagaatatgaattttaattattttttttgtgtgtgcgtgtgatctatgaactggttttattatcttttcacgttttttatattaataaaaactcttgctgctcgttaaagcgtattacttcatagcaaccatttgtggtacttttttgcaggcaagtggttataattttccattcgcaaatttctg

SEQ ID NO: 6158 - DNA, 3903 bp, Manihot esculenta
  Intron number 5 from transcript cassava4.1_013643m (locus cassava4.1_013643m.g) derived from phytozome v7.0 (chr-ID scaffold05875; pos 402173 to 406075 reverse strand)
cttttgccaccttatcctgttcaatatctcagtaggcaagaagtgtctttcattatcgtgtgcctgccaaccagtagccttttatctgaatacgtcattagttattccaaactgattttaggattatattgttgctttgctttaattggtcgacaccctgatttccattttacatccaacatattatcataatctggattctggaatgttgcagctctatatttgtatgcttgcctctttactactataatgtatgttgctcttttcagtcttgcttcaccgaggtattggactttctacttttttggaagctgaatgtttcttagatggtttcttcttctcttttcaatggtttaagtccacctttataatttagtggtggacatgtatggaaatataagctttctctctttactgtggaacaagttttgcctcttaccttcttcattgtgaggtggccttataatattcaaggcgagctgtgtaacaatgcatgtagccatgcagctgatgcaatctctaagttcaggccttcaggcaattcttttgttcagcaagatttcatgatgttggttatgggtgtcttaggttgtatttatacaaaattgaatttttatgaagttctataggcgagtgaatttggtgattgttgtacatgctgcaaggatatagttctgggagcttgttattaatgctgcttatttacgttccaggaggatatctgttgtattcttttgtcatgttattctgtatgagatgagtactagaatgagaaaattgcattctgtaggataatagcattcatttttggaacaacacgatcaaacaacttagtttatatggaatggaagttaccttaactggaaataccgtcactccgtcgctacttagtgacagatattataggatacatactctaatcatgtggcatgggagaaaactactggattgcgcatattaacataaatataagtgcttcagaatacatacttgtctaatgaagttggatattctaatcttaacgttccttcaggtgattacaaaggaagacgtgatgaagtcttcaggttattgttattgataggagttatcttgaaccgtcttttacgtgtttttatatgtcctttttgcttgagctgcacgtttctactgcctgaagtattctatgatggaaatgtatcaatgggccctgcaattcactatgaagtgcgtagctttagagatacctataaagtggtacattgaagagtggagttgaggattggggtgtgttttaggaattggagtgatgttagatactcctgttatggggtggtgttgttcaatgattgaacattgagaatttactgaagataattggttttgacttctatggcttgtgattggtgctattgtggatgaacggaacaaatgctaatctagttgaagctcgtgccattgccttcagggattagattttggagtttgtttctagtagttgctaacatgtgcaggtgggcatttgtttctgtgtataaactgttggattatgtggtttgagaactacttataccctatttgaccataattagactgtagttgattttagcttattattaagtggtacaaggctggatcatccctcccttagttctgaggcacattcataaaaaatttggttgttacctccagtgactgtttggttggattgattgacaggcagtgggcgggtaggtggttgaaatagaagtgttgctagcggaaatggtgtaaagatatatctgagctttgtttcaacacttcaaattgtatctggagatcacagtagctatctaacgcttgcatgttgtagtgaaataatagcctctcttttttttttctcgaccaaatcacttagttctcctgcccatctatactggtggtgatgcaatagccaaacaactgtaactcgaacgatgcttttaagtcttctcttgatttctcctgcaacatcattcagtagtcaaggtataaacaatgaccacctgcatgtatccctgctgctgctttcatgcatcaaaatgactgttaaattctgaaggacaatgggcatgctgtgacaagaggcggactgctaatacttcttaggcaagtattctgtctctgtaatatggtttcatggatctaaatggtcttttcctttaagctaaactaatgaacattctattatgtttatttcctgttctcatattgatgattaattactagactaggtccgtatatataataggtagtgcgctgtaggtgcataagttctctcatcagggaccagatattcccttgctttcatctttgcccagttaatcactagttttcctggctgctttgatagattataggtcattagttctgcagctgagcaagtacggaatatttatagttatctaccatcttttcaacactgtgcaagtggattatgtgcattactgcagaagaatcacataccagtctaaattatactcatgttattcccgactcttataaaccaacctaaattttttctctatgctaatatccatcaatgtactcgtcgagaataacataagatggcattggttaggatctacttttgtgtagttgggacaatttggaagtcgttatgattatcatcaaatccttattgacacatctacaagtctaggaaggacttatgaaatattagacatatttagtctttttcttgtagagaatatgcaaatggaatggtccatgaggcagacttgacaagggtctcgagctgtctaattggttcaattgatgtgttctgaactctgaagtacattttctctacagagccttgagatagttactagaaagtgggaaagcttctggttgaatgctgtatcatgtcctttctgaatgagatgagggttaagggaatgttgattctggaagtaatatggcataaggtgttgcaaaggacatgattaatatggactggacagtggattttttctctttatcaagatgcgcagtccaatcacattagcggattaggtagttgattttgaggaagatgctgagcattttgcgagttaatagctgattatccttctgtcatctgttttttaggcatttatcaatagaaggtcaacttgaaaagagctagactatcttgatgacttatgatctgtggacgcctgtggtgaagggctacaaatcaatagataaaagaatcccttgtgaatctacggtccagtcttattgtgaaggttggcatgcatttggttttgtgaactaaaggctgcattactgctgattaaccttcttttggaagtcgatggccaatttatctttttactatttttgtccatcagctttgaaagatattctcctcaaagtgtgaactagtctcagttgcaaaggtcagcttagtttttctccagcgaaaaaatggttccgttactttcagggtggtcattcctgctaagaaatgatagtgagatgctttgtcacacaagtccaaataaaagtcagattccttgctgcagaaattcaagttctttggttctccagagctggtacattttgcccatggaactacttatttattggatgatatgaggatgaaccaagacaaggctgtggttcggtttctaatttatgtgtcgatgcaatgtaacctttggatcatctgagatcatgtaggctcagttatatgagtatttgaccttgtacataaagaaagcctctatatgattatataagcagaagcaagctcatgatttctgaggcagactgtgttttatttatatctttttgggacttctgttagatagattatggatgatatgttatgcaatatgcttgtttctagcgtttttgtgttgtaaatggaacttgcaatttctggagtttttctaacttttctttaatgttctgcag

SEQ ID NO: 6159 - DNA, 1257 bp, Manihot esculenta
  Intron number 5 from transcript cassava4.1_013056m (locus cassava4.1_008665m.g) derived from phytozome v7.0 (chr-ID scaffold02421; pos 622203 to 623459)
aagctcaaagcacaagagctaaagtaagatatattagtttgcaattttagcttcattttcttacatttaattgtttattggtagctgatattgtcagtgcttttatttattattgttcttggtgctgcatgctgcttggccttgcatcagttagattttcaattgggttcagtatgggttctattctaacatgtttctttcttttttctttttgagctttgatttttattggatgagtgtagtgggattttgtatgacattgaccttctgaagtatatttttgagaaggtggcttattttttggtggaaagaaatctgaaaatcttaaaactatttttttttgaggacccgttttaagtttcctttggcatcgtaacgttgcttcttctgaaactattatggaatgctattatcggatcactaaaaaaactgctcactgattcttctatgcattcaggtccattgctgtttgcttatgtcttgtgtaattgcatgtctatatgataacatatattaatcatcttgcaaatgtcaaaaatttgtttttttgggtatactcggtgttttgaacataaaccagtgtggcttctacggtttatttgttttaaataacaaaaagaaaccctttaaacttcatgaagcttttatgtatcacaaattttacataaagtgctatttaactttgtaaaacaatcacttcacttgtagattaatggaaaaaacaataatatatactatgaaaatatacacaagtataatattttcttttgtaaattgatataataggacattatattaaattaataagaatgaaatgaattatttactttaaaaaaaatgtagtgtcattattattaatttaaaataataattatttataagaaatattatgtacttatattttttccagtgtaataattttttcattaatctaatatatttttatacagtaattatttatgagataaaattcataaattttataaggttttagttttttttttttcctccggcaaaacaaagtaggttttagagaagaaaccataaaactacctcaaaccacacacttgaccttgaaaggtacctttgaaggaaagaacatgtattggatattttgatttcttctctctgccctccctcacccttcttccactctccaccctccaaagttcttgtattaggattttatcttatgcttatcttttttgtaaatgatttgaagggaacgtgcccgcaagaagaaggaagaggaagaga

SEQ ID NO: 6160 - DNA, 2067 bp, Manihot esculenta
  Intron number 3 from transcript cassava4.1_033047m (locus cassava4.1_033047m.g) derived from phytozome v7.0 (chr-ID scaffold05363; pos 31795 to 33861 reverse strand)
gtgggaaccatttgcctacgtgctctgaagagcaggtatcaccttttctagtttatttttcagatgaaaattataaaattgatgaaataggaaataatgtgtgtcatttgagcatgttctagattatttttgcatttagacttggaagtaggatgtggttgagtccttttttgcttatatgttcctctatattaatatatagtttcacggaatcaatgaattggaagtgttgatgattttagaaatcatgcggctgacagatcgtgcactatggttaaatttgatagtaattttcattgttccaataattcaattgttttcacattcacagtttccatctcaaattctttggaaaattttaattattagcgaacaaatatagaagggtacccagtagatctgtgacttcttgttgcaagttattaaaaggtgcaacacattatagcataatgggatcttggaacctaggaactaagtgcaaggttgtgcttggtagaggtgaggaaaaagaacagcaggatctaaagaccatgcattcatgatatatgacaagtaatcccatttaagactatttctttatataaaaaaattttttaaaaaaaattaagttctgttagcgttggaaataggaacgaaatgtgatttttggaatataattcaatttttgttttgttacaaaaggaagtcaaatttttttataacattgttcgttgaataacttgaatatgttgaaataacttttatttttaagaacaattttgtgtgttccagtaaattttgtttgattatttctattggaatgtggcttatcctagatccaagcccatttttaagagatgttgattcacagtcctaggcctgtgaataaccacgttccaaaattccccccatgtggaattgggttcaagatcagtttcacaggcatagttgtcatgccattgcatggggccaactacttgggtctagctcctcttgactctgtgacgttatccttgggggttgttcggcttaggttatgaaaattggcttgtaagcactaaagcttaaaattttaagcaaaaatgtgtttggttaaaatgcttataaatgtcataaacaattgacatgtttagtaataaatagcttataagtatatttattattaaaattactaaatggatattaaataagaaatattgtgaaattttaaaattaaatgagggtgttatagtaacttatttagttaaaccaatttataagtttaatgcttataacttataagtaccaaaataaaaagcttgtcactccctacttactttttgtagcttataagctgaattataagctcacaaaatattataaacaaacaggtttataaactggtcaaaagttaacacaaacaccccttagggtctagctcttcttaattagctcatgggtccaataaaatgtagctcatcttggatcaaaaatggcagtttaattcattgtcacgtgttatatacatggttttgaataatggccatatctcagacattgcagtttaatttactgtcatgggtaatagaaacatggttttaaatcatgctattacataaagaccattgttaccattattcatgttatttaaaggaaaaaaaattatgcatatgtgaagaattttggagaattttagagtattcttgtatttcactcttgatctttacaattagtttacatgactatttatacattaagaattataactaaacaggaagcaaataatcaaataataactacagaaataattaaggatcctaatcaaatcaaatcatatcctcaaaatcagcaaataagtcaacaccctccttaaagttggtgcatagatgtcacacatgtctaataagtcaacactccccttaaagaagtaacctttttatgaccaacttagcatgcaccttaattttcttcaacaaaatgagcaatttgtcattctttttatttgagcctaaagtttttgttgctaagaagcataaatatcttaatttcgtcaggtagttttaatgacaccattgaattatgattatattccctttttctttggcagga

SEQ ID NO: 6161 - DNA, 3803 bp, Manihot esculenta
  Intron number 3 from transcript cassava4.1_001027m (locus cassava4.1_001027m.g) derived from phytozome v7.0 (chr-ID scaffold05335; pos 713253 to 717055)
acttcaggctccaattggacaaactcgagaaacaagtaatatttccttatgtttgaatattatactttaagttatatatcttattgttattatatgtgttcaatatgactataatcattaggcttttaaaaaaaaaatgtagtagtgcttaatattagtcttggtgtggcaattattgaatcctgaatatgaagcaaaacatgctatatgcccttcagttataaacatcaatatatggtggctataaggcaaggcagtcttgctttggaataagtggttttatgagattacaattagaagaataagaaggaaagatggaaataatacattgcttttgtgtaaccagattcttaatcataaaagaatagaaattaaagaggaaatagagaagaatgaaggaatagaagaagatagaaaggaagaattctgcatttgttattaatttctggaatgctccaattagtacttccctttatttatagtaataccaatctgtaacaagctagctaccctgttaacgtaaaaagtaccagcttatcccttctcatctcaatcagtttatatcccatctccttattcataacatttcccacctcttcaaataattcttgtctccaagaatggataaaagaaactagcgcttaaatgcttgtgtagtctatatccatctgcacagatctttgaataggaaaataggaaacagaggcattattttcattattcttgacatttccacaatattttcaatgcagaaatcctccattgacaaaataggaattttcttcttctacctccacagcatttcaaattccttctatttgagtattgtatgcctgcatgatttcagctcaattatgttattccaagactccagcatttttctacctctatctgcttgataaactttcttacattctcctgcaatattatttacatttccagaactgtcgatttgtcaagcagaccagacagtgccctcttcctatgtttttctcttcagatgtgttggttgtccaatatatctatcagatcaagctcacttccagctattgttgtaattagtataacatctgtttcttattcttgatcaaccaaggatgcttttctcgtaaaatttgcaagatcagggccatgctgaaccaggttgcttgaatttacatggccagcttctgaaattttttcaagttccaattctcgagatcttcaatttatgaaggaagctttgtaaacattagcattctcaaagcccggatgccgttcttgcatgtcttcagaattcttttcatttcttaaacccttgtggaatttgaaatttctgctcctcttgatttgactctttatctccaacagtatgaaaaattaccttgtcatcaagggagacagtctcctccttagcttagtgtcctatctgtggtctttcccatttcccaccattacttcaagaagcctcaattccattggttctgatttctgcatcttgattcagcttctccaatttcccctttacttatccccatttttccagaaactcttcttgtcttttaatggatctctccaacggttctagcattcccagaaggatattctgttgccaaggttgtatttccatagtctaattatggaagggcactatgggtcagggaagaagagctcaaaaggttaagggaagaatggaagaattcagaaaagtttaagaatttgaaaccttaatgttagggttttagaagccaaaaagagcaaccaaaggaaatttagaagagttggaagaaattagaagaagaaagattcagaaagaatgagaaagatcagtgtagagaatgggagaagaaaactatatttctttaaagagatctcaaatttcaagaaaaaaggaagaggaagaaccatagccttgatacggataagaaaagaaacaaaaggtaaagaaggaagagatctcaaggaggaagaaggcaacttagaggaataaagagaggaaacagaaaagaaacctgactttgaacatgcatgtgcctcagatgaaccactttgcagctcaagcctgctgggaagcattctctgaccacttgttatgtaaccagctcttcttaatcactgaaaagaacataaattggagaggaaagaaaggaagaattctggatgccccaattacaagtattcaaatccctctattaatattagggcaattttcacatatggtgcaccaacttaaggttgtaacagtaaagtatataaactttaaattataacacaaaacccccctttaatttaagtaacataaaaatccatctgacctactgtcgccggttctcaggtaaaatatgctgccttggcaattatcatattaaaaaactataccaaaaagttaaaaataatattagttaaaagtctctttctaccttcactctctctcctctgtcatttttctttccatcaacgattccctcatccacctccctccatctctggtcttatcttagttcccaactatacttcaaattctcacagcaatttcaaccatcaacagaagtgaatatccataaaatgaacataaacaaaaccagtgcacatttcagcaaaatatggataattttttttaataaaattagatctgtatccaaacccacatttacaatcaaagggaacagaagaataggaggttgaagatttgttacaaaagatacacaaaagatctacaaaacctgcatgtgcaatctaaatatatgaattgaagaagagagatgaagatctttaatgtgtgattgggactagttcgagcaaggatgagagaacaggggatactgctgaccaagagcaacaacttaacaacgaagtgggaagacaaggtggcgtcggaggcaggaaaaggggctgcaccaaagagaaaatagacagaggaagtgttgcagctgcgaggttgagtatgaagaactagctgctgcaatggcggctgcaaacccaagtgctggctgcagatcaacgaagtggtaaggccggaggagtacaggtgtagcagatccaccaaagacaagaccaagcgatgggtgaggaggctgctgctgaaaccaagtgctgggttgttgttgactgagtgaggagtgcagaagatcaacgaaactgagtgaggggaaggggaatggaatgcggcgcaaattcaaaatgggagagtagatgagaagctggtcagattaggggaaaattttacaaccctaagtctatttttgtgcaagagtgtgatgggtcttcaatggtgagagttgagaaagagcagagtctgttgtgttgaaggtagagggtgaagatggtggagaagaccatgtcgaaagaggggaaaggaaatattaaaatattttttaattaattaatttttcctgataaatattttattaggagaacataatttatgtttttaatttaataagtgccacgtcatcaaatataacctggaaacctactatagaaggtgacatggggttttatgttgcttaaatagaggttgagggggttttgtgttacaatttaaagtttgtctgttactgttatatgaccttaagtttgtgtaacatctttgagaattactcatttatattaataccaatctataataggataactaccctgttaacataataactgccagcttatcccatcttcttactaacatttacttgttcattcacaagaatttataatattctccttattccaacacaaatatgattcatattatatatttctaacaactctttgcaattttactgtctgcaggctacaggagtcaaaggtgaggtagtggctgagcc

SEQ ID NO: 6162 - DNA, 814 bp, Manihot esculenta
  Intron number 14 from transcript cassava4.1_003943m (locus cassava4.1_003943m.g) derived from phytozome v7.0 (chr-ID scaffold00560; pos 125498 to 126311)
aaaaataagcacaaagaaataggtttgttttctttttctttgatttgttggaacaaagtagacttccaaagttttacaaactactagcaataaatagataagtcatgcaatgaagatgtaggaaagagtgattgaacgtgaacattactaaggtattagagaaccactttagctttattcttggtatatatatataacagagtctgtctttctgttaaggagatcaatgaaaatttattgggagagggagaatgatctgtacatatattcattgaaaaaaaaaaaaaggtcgtatgatcaacagaagttctttggtaggtcctggtaaggatatgaatgacccgagctacaaagaactcaagttctgctcttaaaacattttaccgtgatccagcttgatctcagcttgcatttaccttgtctgtagggcttacatctcagcttgttttagcacatttatcatatttttcaactgaacatcaaactctctttctcggtttttattggaatacttttctagaaaaaaaatgccaagttttccccaagtaaactgtccctccttgtcagttgtcacaaaaattaccccacatcaagcatttatatttatacatattatgtattatttagtttaataatctttacaatattttcatctgttattgtcatgtttatattttccttttatgcttctcaaactctacctttcttttaactaatttccatcatagatacatataatacattaatgtacaaatctctgttttgtattaaacaatcaggtgctgagcttaagagagaagagttagagcagctt

SEQ ID NO: 6163 - DNA, 2668 bp, Manihot esculenta
  Intron number 1 from transcript cassava4.1_004382m (locus cassava4.1_004382m.g) derived from phytozome v7.0 (chr-ID scaffold09870; pos 256090 to 258757)
cagaggtatggttattgcttgctggacttaaagctcattgttgtctgcaaacttctttatattttctccgttgcaaccctcttcttttctgacctatcacagctgatgcgtagaattatgatttgtcattttataactttgtgttattttatggaaacccttaataattgtattacttcttttgacctgttcagttttggtattcttcgttgacttgaatagttcaattgatgaaggcagaagtttcttttgttacttaaaaggtagaatttaacaagtttttgaatgacaaaatccaatagaatgcacttcttgtgctatttcatgttacaagtgcaaataagtagtggcagcaacataaaagcaagccttaacattttcgttactccttctgacttgttcagttttggcgtttttctgttgacttaaattgttcaattgatggggtaattaactgaaggcagaagttgcttttttggcttaaacggaagaattggacaagtttatgaatgactactagaagacacaactccaatagaatgcacttcttgtgctattttcatggtacaagtgcaattaagtagtgtcagcaacatgaaaacaatgatgggcatttttatttatttatggttgatcaaaatgaactaatgaacttctagctagcctgtagacaggatgattaacatgaaagatggagtgctccttacaatagaaaggaaatggggaaaaagacttagacaattatatctttgagcaagtcaggtacgggtggtattgatcatattacatatttaagttgtgtcatagctcattgcagtgtttgtatattatattgcaaaatgcttttcaaatgaatacatattaagagagtttattagaattaagaatgcagtcagttaatgagcataacaataaaaactactaagccttaatcacaaactgtttggggtctgttatatggatcctttgctatcatcatttttattggacgtttggagtccaaattaatttttaagacctgtaatttataaattctttgatactacttccctaacgggcataattacattaaataaagtcattgaatccatgatttatatcccttataataaatcaacagaaccagttcaaaacagagtgggcaataatgatctagccttaaagagtgctaagaggatgtgagtctcttatctttgagttagagagttttttgcctctaaatatactcccttcgattgatttctgctttgcatgcaatttaagggaaataaaattgtacatgattggagtttttaaaggatatagattaaagaaagagtgagactggtgactgcaaattggtatggacctggtagaaaaagaatctgtccttttgtagtgttaacaacggttatgtcctgtattttacaggcaactgccattgctattacataagctgtttactgcagaaaattttgaccgttgcatcctagctaccttcagaatccatcacgtaggggctcttgtgtaaaattatggtctatgttgtttattctctaaacagccaactcgaggaaaatctaaagagtgattttacattgagtaattttgagattggaaggcagtgaaggcacacagatgaatacaataatgatattgcagatactgccatatataggggcggaggtgtcatattttgggattgatgctaacaatatgtagtgttatccatttctacttttatgtacatttgattgttacagtggtagagatttatatttctcctagcttctccaacctttgacaatttaagttatgtggatcttctggaaaaattagtttgaataatgttcttggagaagaaatgtggatgtgttatttattcttattttactaattaaggaatttagcagccagaatacactatgatagtaacttaggagattttttcttggtaggggttttgtcaatcaatgtgatcctagagttgaactaaaatcctgaagcgtgactagttatttgtataagagttgctaatattttgtcatgtgtttaatatcaatatactctaatgaaaatttcaacatgattatggaactgacgattgtatattatttattaactgtaattggtttggttgatgatacttatcattgacaagataaacactgtcttgctctgaaataaggatgtgggaaatatttctttttacactatttgatgatatggaatactgattttgaattttctcttattctgatgttttcaaggttttccactatggtttcttgatgaaaataacaatgggttcttgtgtgtagataaatgttgaaatagcacctcctacttcattatgtctagctttaggttggagtatgttcaaatcagagtgcattcaatgcgtaggtatttaagtatgttgagataatattaatacctagagctgtccatttctgtagatagaagtgagagcctgtgttatagttgaaatgctagaactgtccgtttgtgtgttcaatgcacatgaattttaaatcctgatagtagtagcacaaagagctgcccttttgtggaaatacaagtgatttcttatgtcatatggttgaaatgctttgtcgcttgtttattttggttaacacttctgttatcttatttaaatattattctcgccatcagaggagcctgtata

SEQ ID NO: 6164 - DNA, 834 bp, Manihot esculenta
  Intron number 2 from transcript cassava4.1_002972m (locus cassava4.1_002972m.g) derived from phytozome v7.0 (chr-ID scaffold07762; pos 101228 to 102061 reverse strand)
gattcagagacacatattgaatttcaagcaatcaggtaggcttggacttctattcgtttcttttaaaaaaattaaaaataaagaataaataataaattgaaaatgaatacaaagaataacgtaccaatagaatgtatagaagtaaattctcataagatgaagattatttgtgctaattgtttttcatcttcctctaatacattggttactaaaatatcatttggtaggtttcctaaaaaatcttgattgaatattgtattttctctttgcattagaggtagctagtatgagtttgatgcgtaatattattggtttatatagtttataactatggttcttaattttctagttttaattaaataataaatattgtcgtaaattttttatcataaattaatcatatgatttaatcattgtaatggataatgatggtggcttatcaatataaatattataaaaatgaggtgaaatttattgctagaatgtggggtttagaatgcaaataggtgaacttattttctccatattacataccatttggcaaaaagtcggataaacacttggcaagattttgttagcctatttcagaactccactttataatataaatacagatacacataaagatatattcatatacagatatatgttaattattttcattttataccattttatgccagtagctattttgtggctttagtttaagtatctcattatgaactggcaaattcttgcagacattatcttaaaaggatgggtgatgacttttgcttttaatgttttatgatatttgcaggtaaatttattgtttgctatatccctgcttgtaga

SEQ ID NO: 6165 - DNA, 2840 bp, Manihot esculenta
  Intron number 2 from transcript cassava4.1_014307m (locus cassava4.1_014307m.g) derived from phytozome v7.0 (chr-ID scaffold06446; pos 510233 to 513072 reverse strand)
cggcagtgtaaagttttagcatttttgttacttgtttatgcaccttctatgaaaattattgctggtagatttgaaatacatctctttaaatgctcagaatttcctcttccccaattattttcctctatatgtgtataatagatcaaaattgtagagatctgctctagagcatttactccctaattgtacagatagttgttaaaggctcacctcatgcacaagaagcccagtccttactgctgagtgcctcagtccttgtaaggcaggcgatgtttaagaggcatctgcctttttgtcaaggtccatgcctcaagcaaggtacaagatgtatgcctaggcatgcacctttgcaatattttacaaaaattttaatagaattctcttaattaacttttgaagaatgacttaaaacttatctacgtatacacaacacaaagaaagttacatatgttttagaaatgcatacaggattatagcttattaaaatgaaataggctgaaattatgcttctcaatttaatattgaaattcctttaattttggaatgagactgattaatatctaaagtcttgttcttatgggatgacattcctattttgggtttcctatgatctatttattatgagttgacatttgtaactgtaaatttcccatgttggagttttcctgagctgactctttggttacatattttttcacactcaattcaaatttatcacccttgtccatttttccccttggccaccttttcttccttcttagttctttttctgtaatcctttcatttgtcgaggtgcttttgcttctgttttttttttatgagattttttcattgctttttgctaatctatagagaagaaaatgctacttattaatctatcaagttttatcaaggcaaagggcgacactaaggcggtaggtatcctatgtccttaccaaataaatatcatacttctaactagtttatagtactgaattatttgcaccatatgtctatatgtaatataagagacaaaataaaataaaaaacatgttgcctgcatcaggtataggtgagaggagaagaagagaataagaggggagaaaataagggggaagagagaagataaggaggaggagacaaataacaaaaaaattttaaaaactgagaagcatggatctgctgtggtgcagctgggagaagggaagaaaagaagaagagagaggataggaaaaaagaagacacacctgttaggagagaaagagaggaagacgagagttctccattctccaactgcagctgcctttttcaaatggatggagaggctagggtgtgtcttctttttttccccctgttcaaatctaataaaacaaaagaaaaagaaaggaaattgcgttacccattacatcactgaggcgtcaccttttcgttctctctccttgcaccattcagggttggggtgctagcctcccggcatccttgcttcctcgcctctccttgctttgcccgttatgttgcctccctgtgcttttgacaatactagcatgaattaatcatattatttatttgactataagaaatgctcaattaagggaagaaaagaggttgcattgacagcatacaacatgtttctctttgtgtaatgaggaagttactcttgatgaggcttatttccgtatagttattttcgcaattattgctatttactaggattaaggagtatgatctaagagctttaacatcttttagttttattttattttttcactttgatttgtaaaaaattggtgatagaattctaaatgatttacgttgttgatatgtggtaagatttcggattatggatctagttatgggactaaatggtgtaataggggaatcaagggaagtgggtggagagacttttttcttttttcgacctatgtttgcaacagcacaagctcattaagagagaatttgagaaccccttgagttatgtactcaatgactggcaaaatctaatcatgtctcctttattaattgttgaacttaaatacaaagggaagagtttactcttcctataaacaaggaaaattattagcatgatttggagaatcaccctcctacaactagagaagtggaaagaagcaaggcagagacacaaagcactattaaacactaacaaataagagatcatggcagtagccactaacaaataggagatcatggcaataactgaatcctcagaataaagcagctagttatcaggacagcagctaggaattctcagccgtattcatgacttgtgtggcacacatacctttcttcctttcatgtgtgaaccttttataaatatgaagaggtctgctaacagtatgcattggcttaggctcctaatgtcattcaggcatgcacctgcaccatgtgcttaggctccaagaagtcaagagccctttgtgccataatacgtcttgcattgtttaataactatggttgtatagttttttgaaattataaatgcaaattcttcatgtatatgtggtgaaaattttttattgatttatgtttgttgaattagttcatgtttgcaagtcgagatgattggataagtaagattcagtaaattaaatatgaattttaataataaaccctgcagaattgagtcatttctgatattattaatttactaaatagaaccacaacatttcatgtgcatccaacattgtgacattgggaatttacttaactgaggcatgttgtaaagaaagcaaactctctttcctataaggacattgcccttttctgcggctgcattttcccttggctatatttctttagaattaccatgtgttcactacaaatttttcaaatgtggcagggtc

SEQ ID NO: 6166 - DNA, 3035 bp, Manihot esculenta
  Intron number 6 from transcript cassava4.1_005448m (locus cassava4.1_005449m.g) derived from phytozome v7.0 (chr-ID scaffold12865; pos 661807 to 664841)
aagaggtaatttcttctccaagaacttgtgacatgggatagatatttacatacatgttttcataacaattagaataaattatcaggttattaattaacttatgaacatctacgcactgctcatgaaatattcttctttgatgtaagagttaaacattcttcctttttcatgaagtccatcattagttgcatgtacttcctgattataaaaacaataaaaagttgtttttttcttacttgtgggataaccaataagctgctagcttgagcatcacttgtctttgtttagaaagttggttaacacattctaatttgcatttcctcatgttagtttcaggttcagtttggtatgtgatttgaccaattttaagtgaaaataggtagtttttcaaagatgcattatttgacaattctttctagtttattactattatgatgtatggtagagttgtccggcaaaaagggaaggaaaccgttgagaaaagaagagagttttgtggctgctgtggttctgtgaataatcacacagttcactgtggcaggtagccattgaaagtaagaaaagagagaaatagagcaagaagatgagattcatgcaaggcaatgtgacttctctcccaaaaaacttacaatagatccattagtcaaagcattaattaaaaaaaagaattaggtcgatggaagtttacagaagctatttttcctttacacatgaattacaacctctaaattgaaaatttccaataacaattaaaagggtgaattatattttagtacctaaattttagcgtaattaacagatcggtcctatttttaaaatcaaacacttaaattctagtatatttattccatccaacaaatcgtccttccatccatttttttagaaaacttgccgttatataaggtagaaaagtctttattacccctatttaaccttgagatgttaaagaaatatgaattacatcatatgatcaaattcaacaaattgtaaacaactttaatccttcaactatcatttcatagtacattccaatctctgaaaatttttttcctctcagcatcattaactatcgtgttgtgtcacctatatttgtctggaatttataccacaacctgaatctataagacagatagttgtgaaaggctcaaggtgcactaaggcgcaaaaggggtttggagcctaggcgtaagacgcaggcatgtgcctgagcaacgcaaggtgcccaaaaaaaaattcaaaaattcattaaaattcaagtaatataaagctacatgcaataaaatgaagtaccaaaaatcaaatctaaagctaaatataataatgtgaagtaccaaatattaaatactaatagttaaaaattaataaaaagttcataagttaaaaataaagccaagtttctccatcacacaataaaaccaactactcttcaatcttcacaattcacatttatcatttacagtcacaaattcataatcaaatactacattataatctttatttgctagctaaactagctatctatattcacaattcacatttataatcacatatttttataatgctagtgctactttcacaatcacaatttatggataattaacataaagtaaaaaaaaagaagaaacattaatggacagaagcagcaggttggtggcaaatgacggaactatggaagagcagccatcggcaaaatgaacataaaaaagggcagcagcattccagcagcatttcggcagtataacagccataggagagaaggagaaaaggagaaggagtaggaagaaaaagagaaaaaaaaagagggaaggagaatgataaactacaaaaagagaacaagaataatttagctggtatgttgagattcttaagaatagatcttgattcttgaaaattaattttttcttcctccttttttttttttttcttctttttctttctctcctatggctgatgcttgctgctgtgctgctgtgacgtcttaaagtttttaagtctaaggcaaatttagagatatttatatatatggcgccttgaagggcatgggtgagggcacctcaggcacgtcgcctgcctggcgccaccccaggcactagggctggcgcctgaggcgtcttgcgcctcaggcgcgcctttcacaatactgataagacatttgataataattagtaaacttaaaaaccagcatccatgcaaatcgattgggactcttcttttagttttgatagggtactgcatattggcaccacaactcaagagcacattgatgactccagcatttatcgcgtagaatgacatggtggagaagagttcttccaaagtgagtagtgattggggaaacgcatagtttcaaagtcttccactgcacaattggaaattgcatagggctcagctagtccttcatccacttgaaactcttcttcagtagtagcattccatgaccatgctcctagtgtcgactccctttgacatctgtcctaacagcatctttttttattattttgattgcaatcagaataactaatagtaaaggattggagaattttatttttcaaggaaaatctatcaaaataaaggaaagaaacccatttagaatggaaaggaaagggtatttttgagaaaaaaaaatgcattctctcctttgatattgaactaacagattaatggacggagggaatgattattaaatatagggatttaagtgttcgattttaaaaatagaacgaccgatctgttagttatgtcaaaactcagaactagataatttactctaattaaaaaggaagcaagcaactttctatgtgaaaactccttgtgattttgtctttagaaaaaataaaaatttaaactaatactaaaacccacattttccgaagaggaactcacataatactcaattaaaaaccttgccagaaaattttagattttcatgaacaagagttaaatgaaaaatcactgcttttctttgtctgcatcatgttattcctaactattggtgtttaggtaggttcagattcagtccagggagctggtgcacc

SEQ ID NO: 6167 - DNA, 2383 bp, Manihot esculenta
  Intron number 1 from transcript cassava4.1_023882m (locus cassava4.1_023882m.g) derived from phytozome v7.0 (chr-ID scaffold05180; pos 92721 to 95103 reverse strand)
tcttcttcctctcccgctgcttcttatttaaacaagtcacttctcgaccacggtagtaccacaactcgcgcaaatcggttgcagcataaccaggtgcggaatccttaattttacctctacctgtttattcgatgaatcgaaattgtttggcttattattgaaaaattaacatattctgaagagcaatttcttcttggacttcaaattttttttttttttttttttataatttctcttaaatatttttcatcaaattctgcaaaagtggttggtagtccacttctttcataggattggtgggaatgcgttgaatgatgtgttcattattggggacccaattttaaccataatggtgaaatatagcattcaagattgtacaacaacctcaaaattcaaaaatggctatgaaatgcttggataattgaagcttggaagttcttttcctatttattcaatctgtgaattcctttcgactttctttgaagaaaacggcaaggtatatatgcttatattttataattgaaatgctttataataaaataatactaaaataatgataataatttgaaataactatattttatatatatatttttttttgaaataggggttggaaagtcgaatcttaaatctttcaagactacaggatgcactctccaccagtctaagccttgaagtgcaactatattttatattagcttacataaattttaaatttttttatagatttataattatataatgtcgtgaaaaagtagtgtaaacagagtctccatctgtttccgttgtaaattttataaccaaactcatgagttatgacaataaaatagcatgatgtgccattgcccatttctctgtccttgtgagcgctaaaaaataatgcggcatttcttctgaaacatttctccataattttcatccatttttttatttaattttttaaaattattatttatttttacattttaaaatatagtaatatataaattaattattataaatatatttaattttattatatttttaagaaattttttaaacattttttaagtatttaatatatttaaaatgaatataataaaaaattatattttattaaaaataaataaacaattatgagcggaagtttctaagtcgtaaacaatctacaagtactttctaatttgtaaaaccgaccttatagattatatatatttttataaaaaagtataattattttttatattataaattaaaattaatatattttattaataatagctaaaagtgcatgcactctgggtgaaatttattattattatttttttaatcttctaagcttaaatctaaatttaatcttcgttgtgtataagcaagctagctaaccaatactaatacttgtttctttaaatttggctaattaatatatttttctccgtcttacagttcatagttgccaaattttctaatgcacattaaattaactgggtgtaaactttttatatattagaagtttttttttttttgttttaaagaaaaaagagtgaaattatggtgtttggttatgattgaagaaggaaagaaaatgatgtctccacccatttgcataattctgtgataatgataatcagatgccaacccatgcttgcatttgtaatttgttgttatcccaccgcctccaatttaattatttcttcattagcagcagagttggggaattattattactattattttaattaaatatgctgctgggtctgcgtctgcgtcatcgtcatctctgaatttaaatatttcaccattaatttttattttatcacatctaagtttcttaaaataaattaaagtatcataattttaattactaatatccaatgttgtgaatgaggtatatcatattgctataagacatttttttaataatagtaattttttattattttatcataatatttctttaagtggaggatatgggccatcaaaataaacattttttaaaagggaattgcacatagatttcttcataaaaacaaacaaagtgaagactcgatttctctcccttttgctccttgtaatgtaaaaagtcttgtctttttttttttttttgttataatgtatttcgtgaaatttaatagtatttactaatttaataaaaagcaatttaatttttaaaattttattctattaataaaataattattatattaaaattcagattataacaatttaattttttaaattttactttttataacaaattaattttttaattttaataatttataatatttaatctttataattttatatttataataatttattccttttaaattgagttgtattattcaattaataatttttaatagtaaatttaataaaaataattattttgtcactataa

SEQ ID NO: 6168 - DNA, 1387 bp, Manihot esculenta
  Intron number 1 from transcript cassava4.1_028827m (locus cassava4.1_028827m.g) derived from phytozome v7.0 (chr-ID scaffold10540; pos 5108 to 6494)
gaaggtatgcaattctttcactacaattgttcagaatcgcctttttcatagacttctcttttctgaagatacctgtttgttgtgtgttttagaaaaccagaatgttcttctagccattgaatttgtcaaacacaaaatggttgtaaagacataattttagtttctgcatttgagaatttattgtcttttacctttcaagtactatgattgccattttgattggtgccctatttccaattgctcctatagtttgtttatgaacaagatgttcctaattggctttacacttgcagtgtcattttgttggcatgctgagtttgcttatgctgtagcttcatcacatcattttttaatattaccttagaactgttcttttaagaaactttagtagagaattattcagttctagaaaattagtttggtatgcatacttctcctaacttcaatgtagtgtctgttttatatgcttgactaactctcttattcttctgatattgaaaaagtgatttttttttaactttcaaaattattcctatgaaatttgaaatcgatgcatgattgctgttttgggtatttagttaagattttgcatatcttagcctaattattgtctagatgtttatatcaaacaaccagatgtaaaccagagttaggggcctggcctccctaatttatattatttttaaaaaataaataaatagtaattgccttgactttgtaataatgataataataaaaatataaaggttacatattattatgctaagaaattctagaagtgaacaaaataaaaataataatattaattaaatattacaaagtgtgaaaatctatttaaaatactctataaataaaaaaaatattaaaatataaagatataaagagaaaataaaaaatggagaatgggaaatgacaggggaaaaaaaagcctccgaactttctatgtcttattttgtatctctcatatcttcatatcaggatttttcacttgacacttcaggtgctaggttgggggtatggggtggatttgttgtcctgcatatagtttgaaccttctttgttaagttattgctgattattaaaaactaatcaaatgtatgatttattaaaaatacaaatgaatgttgattattatttgataaaggagcaattataaatttttattatgatcttttaaattttgatcctcccctcatctaatcctgcatccacctgcaaaaactgttgttctgcctatgaacatctatatcaaatggtatcttcaacaagcaaaatgcaaagtgggttttatgtgcattatccctatgactgccccctcactgaatagattgtaaagataaagattttgatgaagtgtctctgcatgtagctttgcagctagtggaaa

SEQ ID NO: 6169 - DNA, 1473 bp, Manihot esculenta
  Intron number 2 from transcript cassava4.1_004916m (locus cassava4.1_004916m.g) derived from phytozome v7.0 (chr-ID scaffold06688; pos 438399 to 439871 reverse strand)
agaaacgcccggtttatcatattcgtttcttggaggtactgcctctctatttggcctctcttatttttaagctaccttataccttaatgctgttgggctctcttatgtagaacatgcttttctaccgaattaatttagtaccagtaggataatggagagggccagaaacaaattctcaaaggttagaaacacattttcatttgcaggagaaactcattcttaatgaacagattctcaataatataagctcaaagcaaccccgaatctaacacaaaatttctaaataataaattactaaacctaatagaactctacatatattcataagtaatagtagaattcctaaaccatataaatctaaacttcctaaccctgtaatgaatataattgccaagttgatcttcttgcaaatactgcaccattctctgttggtgagagaaaattcattctcaagtcttttattgcggaagaatgaagaactgaatttggagaataagaaactgtatcttcttggatagtaggaatgagttagaaaaaaacttcatcttcttctgtttttgttttgttttgtttttcttttagcatccatgagaacatccgaacagataaaatcgatcaaaacaacaaatgaaaggttctttgattcaataggaagggagtttgaaaaattttcaatttcccttgtcacttgcttagtttaatcttcagttgtcaattgtcatgatgaagtctctactctaaaatacctaaaagacataggtatttatggtatattaactagtcctaccaatattggtatatggaatccttaaacaataaaaccctaatcaaatattaattaggaatctcaaatcaacacaagattcctaaacaacagaagcactaaacctaatatacttctaaaaataattctaataaataaaaacctaaaacttccaaattttataaggatcataattgtaatgttgaattttcttccaatactgcgtctggctccctttttgccaaagaccatttcttacatgcttttcaagctcttaatacccatttccctacttttgtctattcaaaatttatattttaattggttgacaaactaaacttgttatcaataagcttctttaaagtttttcaatattgtttatctatttctttctttccctttttctcccatttgaatggatggcttaacattgtgatttcattttgctttagtagaatcttatcaggattgttgaaattgtgatttcagtttgctttaatagaatgttttcaggattgttaaatgattatggatcaggttaaaatatccttcttgcatatgtagatttgaagaatcctataacttaaactagaacatattgcttatgttctcaacctaactatctgtataagctatgtagtttacctccatatttttccttcttacttcccccctctttgatgttcggcagaatctttgcaccataacag

SEQ ID NO: 6170 - DNA, 1644 bp, Manihot esculenta
  Intron number 6 from transcript cassava4.1_014460m (locus cassava4.1_014460m.g) derived from phytozome v7.0 (chr-ID scaffold04796; pos 401551 to 403194)
tgttgccaatcttttgtcaacagaacctgcagatagtaagtggcttaggattttgagccgcttttcctagacctacttaacaattttatttacatagataaagtagtttcacaatattgaaggtactctatcttaatcctgcatggtgtgtcaataaaagggtttttcatataggataaatggcaaggtttagtcttggcccatctttttaccctgaaaggcaaatgctcatgagttgaacccgagtatttcttgtatcaagttgagttaaaatactcttgtttgagtgtgaagagtaaaacttgatcgaattttagcccagtttcaagccttgagatttctaatcaaatcaagttcaactagatattgactcgactcgactggattataccctcagtaaatagtgttaattatgtgcaatcttttcaatttccactcttcactttgtatctctatttgttgaaacataagtagagtgtgccctttttcccttccatttctcaattctcagtttcattgcacaacatcaataaagttatttacgtcgatagacgcttcaggtttgcaactctaattagcctagactcctaacttttgatactacgactcttcattgtgtcaagtcgtacctgtgtcaacacgacatggcatgggacacaatatggaatgtgtttaacacatattcatgcagtcgggcactcgagttacagagatctctagagatgaatattataattaatagatcacatttttttctctcaagggggagagtatggacaacaaaaaattatcttttttatcttagataaaaatagttatttggtcgtatttgatctatttaggctacaattattattacataattttgtgtttgttattcttttttattttatataacataatgtatccaagtacacggttcatacacgtttcaaaattagatccatatccctgtattttctattcagaaatttgataactcagacacaaggatatgtacccattttctgacacttgtacctagattcgagtaatacagctcctaacttgtggggatacttctatgtgttgccatttcttttgcacaagttatctagtatcttatgcttcctacttaaatcaaataggcataatcaatttcctttgaaaaagtgttgcatgaggttgcttaaataaatgtttttgctttttatgcccttatatcatatatgactgttgacatcttcatccgacagcattctcatgactgaataatttatgacaaaaaaaaaaaatctgagtgtttccttaatgactatggcattgtttgtggaattttgtatgaactagaaaaagctatatgatgctatagccactttcaatgaattgcttgatacttttaacaatcttattctgaagatctcaaaatttgctagtttcacagggatatgagaaattgcatatgccatgcctgtgaagagtgtgctctttaatggcttagatatgttggtgtctgattagtgactttcttttcaacatgtattttatacccaggtctttgtgtcaatagtggtttttattatcatgttgatgctcagtaaactcattcgttctatattaacacatcgcaattttgcagtcaaactcggtgttggtggcttcagc

SEQ ID NO: 6171 - DNA, 871 bp, Manihot esculenta
  Intron number 3 from transcript cassava4.1_009458m (locus cassava4.1_009458m.g) derived from phytozome v7.0 (chr-ID scaffold09570; pos 170400 to 171270 reverse strand)
ggtctgaaataaggtaaaattctgatccatagtttactaatttaagtgctcttatgaagcctttgtctttgataaaaaaaaaaaattcaagcagttttggtagtgaaggcaatcaaggactctgatacaactgaaataatcaggttgtaaagctgctggagtgtgggaaatttttgtttaaattaaatttatattaattcataataaaaaataatattatattcatataaaatttcacatatttatattataaattctttaaaatttaatcaaaataatttttttcataaaacaaatagccaaattgtaacgcgttacctttattttattggattgatgaatacaaatcattatcatgcatattggaattcctaatcattatctccttagataaaatacaatgaagtctctctcgcgtagccggccagaacggtgaatttgtctggtggtctcagttaaaaatcggttactatttaaaacaattatggttaggagtagttccaattcgactttgcttcccattcaattttggttagaaattttttagaactaaacaatcttattattcaagatattgggatacataaattaataagatttaaatttataatatatattttatttagtttcttttataaaaaatggtgaaattaaatcaattaatataaatttattatttttttaaaaagctaattctgattcttaactttcgatttgaatatgtccggcttgattttaatcccaattcaaagaggattaaacagtttagtccagttcatggactagaaccggttttaatcctgaatttgactggttcgatttttaccacattatcagttgaattaattatatggcttgattaggtttgcag

SEQ ID NO: 6172 - DNA, 2742 bp, Manihot esculenta
  Intron number 2 from transcript cassava4.1_014935m (locus cassava4.1_014935m.g) derived from phytozome v7.0 (chr-ID scaffold03668; pos 358258 to 360999 reverse strand)
gaaacttgtacaaacggaggtatgttttgcttaattggacttaattttaagtagtagatgttgaattttcctatccgaggcatacttattgaagcaagaatttttgtggcgtttgtttattgacttgtacttcagctgtttgaagttagttttctctccttgtccttttctttggtttagattcagcttttcttttcagcaatacacatgtatttatttgagttagtatatattacctgcttttttgtcctttaatagattatgaggaatactattactgtggttgattgggtaatgctgaatgattgtaattacacaggacaatttgttagttgtcaaaatagtggaactccattatgctaacagtgccaacacttgggaatttaagtggaattttttttttatattattgatctcttagaggcacaaattttgtcaatttatatgcatggttaaagtataacaccattaattaactttaaagtgttaaagtgctaaagtgcagatccttagaatataagagattagaggtctttttttatgtgaaactttgtagagattatgtatacctgtcacttttggaaccctacaagtttcagatcaataaattggaagaataaagataacaataagtaagaataaaaagcaataaaaaacagagacaaggtgtttcaaagagaactcagggatagagaaataagatattattgagcaaccttgcagatacttctaaaggattgcaattgaaagttgattttcctccaaaactgtaactacctactaacaacctttctacagtcaaactagtcaatcctcaagtcttaatttcctgtccttcatcattcgtcttagatattggagctgaagcagaatctttttgaataaatgattgctgataggtgtgccaatcctcctttatttccgcaacagtcatatccttcagagacccgaatattcccttgtccttcttttgctctttaggccttctagaataaaccttaaaaggccttccagattttccaacttcattttgggcctccctacacatttgttctctctgagactgctgcactttgacattagaactgaaatataacaggacattgagttctgtataagctcctttgaatctacaaaataataaatgagtcctatcctgcttctcagctttgctaaaaggccttatgcacatcatgtatgttagagagattgtcctttctggaacacggaaatttcaaaaatttcaaagttcatcaattctttatgaattcataacaattaattaaactaattacctcactatttatagagttcttgagttgtaggaacacgtgagcatcttcctgtggccaatcttgctttgtatcatcactagggagattgcaattaagatggccatccttactgatgttatgtagataaatttgcattgtcttaatccactccagatagtttgaggcatagagtttgagcttgtgttttgtgatttcagttatcacaggaataatatctggaagaataaactttgcttcacccttgctcagtcatgatgtatcacaacaaaaactcaaaattaaaaaatagtccccaagtaagagaaacaaatctgaattagattgaatcaagagatttgaaatacctcaggatctaaatatgagaaaacaaccaagaaagagatggataaacccaaaatagaccaaagggctgaaataacgccaccaaagctttgctggaaaaggaagaacaggcgctagaagatgctggataactgcacacatgctggagcttggtgttggaggggaaacagtacggcagtgcatgtggctcacatatgcatcgtctggttgctgaattttgacaggtagccaatcttccgctgggttttccaatgatgagactgtaataaaataaactcactgtagatcggtgatagtgaaatggcagccaaggaagagaataaaaccaaaaagaaaaaaaaaattctagatctggtattcagcttttaccatgtgaggagaatatattttttcatatattttagagagtaaaatacaagtatattatatacaattgttcctatttatttaggagtataatcctatgatcatgcaactaacaagaagtataatgaacctatatttacagatttgacttttccttaataataagcatcttagggagggcattgccaataagatagaaggtttgggacaacaatttaacattgttgagagaatgattgatgttgaaagggatgaagcacttgaacaggatgtggagaattcagaatcacctggtcatttttaattatccttgaagctacatgttcaaaatctctctttttattttacaaggtcccacaaagatgggcttactggtattttcacttggtttaagaaaatgtagataatatagtcaaaacaataaattttgcttacttgttttctaatatattctcctctcctgttgttccattaaactttaaataattcaagtgactaaactatttcttgagactcacaaattttgttttttcaatgcatattaaataggtgcatattagtaaactactaataaactgctatctcaaagaagaaagtgatctataatttaggacagattaaaaaggaaagtaagcttatctttgtgggatggagtgagtattaaatttagttttatttttgtgattgagtaatatattcaagtttctttgtttgacatgttcaaatttgcatttcagct

SEQ ID NO: 6173 - DNA, 1981 bp, Manihot esculenta
  Intron number 6 from transcript cassava4.1_002021m (locus cassava4.1_002021m.g) derived from phytozome v7.0 (chr-ID scaffold00752; pos 93672 to 95652 reverse strand)
ttaaggtaaagtaatcctttcttacataaggaaattcttacttattagatgattttgtacatgtaatgaatattattgtcgctttaggaatattttttttggaaagaaacaactagaaaaagatgattccatggttgttaatgatgtaaatgcaagcaaggtttttaatatcgattttgatgtgtatatgaaacacccaaaatcgtggatatacctgcaaaaattgatatacttgcaatcaagattttgacattgatgttgctattgcaatgaacaacaatcacatgttgatttttattgagctcatcaaataaacctcatagccaaatagctcctttatagcttcaactactgccatatacttggtatattaaatactcaaaattaatgcaaaatatcagtgagaagaaatacatagttattgaaggcatgcctcaagcttaatgcttactaggcgctgcttacaagttacaacagaaaggtaggttatattcaccaggctcttgccttatgttcctaggcatgcgccttgttccgggcacaaggctttaggaaaacatgtcttcctcatttcctactccagcgagtattttgattggcaaaaacacaaccgctctagccgaaatttgtcttactagtcttgtagcacctcaagaagttttcaaaattaatatcattggttataacttataactagtagctaaaatctcatctaaccactatacccacgtcacaaacctcccatattttccatttaaaactcatggttattttaatcccttgtctcgtatattgctttcaataatttttgaattcttctatttctaggttatttaaaattgcttcttttgaggtttcctaacaataattgcactatttggatttgtttatgaatatagtaaaatctaaggtgtgtttgaatatctaaaatttgtgtcttttattttctaacacattataatccacaatctgaaattatgaattggaatatttttaactctggatgaactaagttccatttatggaattatgaaattggtgataatggatagtggccttttttttcgatcagtatataatgatttgaaatttgaaattatacttgtttgtctgaagtttcttggattatacatgccttattttctattaattttggtttggatctgaaagcgccccttcctttattacattggtgtgagccaaaagagcttggaagttggcggaatgcgagaccttatttatttattttataaaaatgaagcaaagtttatctttgtcttgaagttgtaccatgccatttagttttagttatatattatttgttcaaatgatgtattgatggttctaatttcttgtcatttttaacttaatatgttgaggtgatgctgtataatctactttttctactttcagctttatatgttattgatgttgttaataatttgtttaagagaaaattattatttagtccctatggtataaaaaaattgattagttggtctcttggttttgaaaaatagattaaaacattcttggggtttgaaaattctactaattagtcccttgtttttagctgttaagtatcagagaaaaatctaaaatgccctcgatacggagggagtaactagtgggctttttaaaaaccttagggatgtgttaatgtatttctaaaagttgaaggaccaactactaatgagtttgccaatactatagggactaatagtaaacgcttgaatgttaacattaacaaagggactaattagtattctttccttaaaaattcaaggatgtcttaacgtatttttcaaaattgatggaccaactaatgagtttctctctagcacagggattaagtagtaattttcccgttgtttaatggcagtgaaacagtggtttaactttgttgatgtttctataactgatgctgtctttgtgctgccttccaggttcatcagcaaattcttcagcagctggttgactt

SEQ ID NO: 6174 - DNA, 2308 bp, Manihot esculenta
  Intron number 4 from transcript cassava4.1_026880m (locus cassava4.1_026880m.g) derived from phytozome v7.0 (chr-ID scaffold04065; pos 217662 to 219969)
gttgaagtgtggtgcttgtgttcattgcagtcgtatgcattgttgcttcattgttttgtccagttgtgtatatttttcttggtggtacactacactggcttgcaatttgctgataataaatgcaaaatgaattcatttacgttatctggtgttatgtggttcaattgttgttttgttccctaaatccactttattctcatcaagcataaactgaaggatgatatcaatgttctctttggtatcagaatatatatcaaagaatgaaattggttaaacctgattttaggtagtaaagggagatcattcatttttaattttgtgcttcctggtcttggctgttgaatgtgcagttagttgcttaaggggatgaatagaagtaattgtagtctttactgggtacaatccactgtttgataattccaaattttattgcaatttgaaatttaattgtaataatctggataaccaaatgtttgtctatttggaggcatgtaaaaaccattgtacagcgcttttactctataacacttcggactatatttgatctgatacccatttcttgtgcaagcacaaggtgagacatcaatctcgttattcttttgttttggtcttagctgttgcttttgtaacttccctgtaactacaagtgtgcaatatcgctttgtgatgctgtttctttttataaaaaatcattttttatgtttttatccttctatgtttacgaatggagggaattgttttgctgtaaaccgctctttgtttattcatgctaactttttatgacacttgtgattgtttgtcttctcagttgttggtgtctgctgatgtaccaagtgcatgcattgttgacttcatacattttttttaaaaacatctttaatattttaataattaaagtattctatgggggtgattctcgagggttgacggtatagggagctggggtttgaaatagttcaaagaacagacaggctgtttaatttctcctttaacttatatggtgatagtttatgtaaatttggaatagataccaatttatggactacaaatttcatttgtcaacactcgacattgtcttcttggtagatcactttggatacttattattctttcaaatatgtgataatttgggaaatttacatgtcgatttatactcagttgcttgtgaagcattgttgtaatgggtcgcggtagaatactttagtcattgtccatgtgtttagagaccaatttatgaatgttaataagaagagatgagtttaatgcatgtcataaatgaccccttgctgaacatccaaaggattttaaactgtgtgaattctaaacattttagctagaataaaaaaagacttctaaagtatgaatccaaatgaatactttagtcattctgaagtctaaacatccaaaagatcatttgctgcaatcgttagcaaagtaaatggtgattgagttgagtgagaggtttctttatattagttgttccttctgtttcaagtattagttataattggcttagtttgtttactccctgacatgctgccatgggacggatgttcattagcatctcttataagcctctgatcatttttctacgtatattgtgaaaccatgatttgttaaggcttcatggtattttgattatgcaaaagctctgataggtgtagctacgattttccacttaggaaatatgctaaattgttctctggttgtacctttaatggcactgctcaatacattttgggattgagattttgttttgtactctattgtaatatattcccaactcatcttgctgccatatttttgtttgccttttgtaattcatgttcttgctatccttttcctgcataaatgttgcgctcttatatctagacccttttaattgccagtgccccttaataagttccatttccctgctttctctcctccttttccctctctatgtgttcaaattgatgggtcaatcaggttgtcttgggtcattttgctatcccagctgaggatgttgtggttttggctgctggtgtagttgcatttacattaatctaaattccctgatgatatgaactcttcaatgagatttggcaaagaaaattgaagtaaatttatgaataagagtgaatattcttgagcaggccctgcatttaattttcactatcttccaagccactctttgtaatggggatttaacaaatttctccctttggtaattgctactttcctgttgttgccattttggattatgcatgtggatattgctttgctggttggtttattcaggtacttgtagaactgcatttcatcctat

SEQ ID NO: 6175 - DNA, 1137 bp, Manihot esculenta
  Intron number 7 from transcript cassava4.1_001378m (locus cassava4.1_001378m.g) derived from phytozome v7.0 (chr-ID scaffold03581; pos 1428639 to 1429775 reverse strand)
atagcgagcaaggacctgcagaatatcaacaggaggtataattctatcaacgttataagttctctttaagtttgctcatcccttattctttatatttatacagtagaatgttgcggcatgggttctctatcatcagttggaaatctaaattactaagaatgttgtaactacaaatttaattagtcttcatatatttggtaataacttgttccacttagccatgtaataatattattgcatatagctgataaaaaaaatggtacatttataagttgcttacgtctcccttttatttaatatatattaatcaaagtcagtcatagatatattatattggattttagagagaatgattttatatagacaattttacataaaatattaggtagtattatatttaatattatataatttctctttaatttttggacattgatgttctagtgtttagtaattactaacaatcaagagtagaaaaaagaaaaaaaaacaatcaagagcaaaatcatattaatgcaattgttacgtctttttaaaatttaatttgacttcatctatctcacaaaattcagatgataattatttatttattcattttatagtatatatatatatacattaaaaaataaaatttattaatttcaaaaataatttaattagaaaataatatgagcggagttatatcagtatattaggtaaaatttattaatttcaaaaataatttaattaggaagtaatatgagtggagttatatcagtaaaggtaatatagtactttaactataacaactattttttaaattcatatataacataattataggtttatctatgtggggtggaggaattattgtataattaagttgtgttgaatttggtttggtttgcaactaaaatttcaatattactccagtaatatatagtgctacccggttgtaattgataggttttggatgacaggctaaaaaagactgaacattaattaagaaattatgtgttcttctataatggccttttcaccaaagaagggaagcacctacaccatgcagtttagaagactgatttgaatttaatattaactgttgcactgcatgatttctatttatcggttgtatatcaggttgacgttttgagcaag

SEQ ID NO: 6176 - DNA, 1994 bp, Manihot esculenta
  Intron number 8 from transcript cassava4.1_003505m (locus cassava4.1_003505m.g) derived from phytozome v7.0 (chr-ID scaffold05129; pos 94099 to 96092)
ctagtgatgtaagctctctaataacactaacagcaattccttttaacatgttttcctctctacaccttattctgctcttagctatgttgagcaaaatctaagttcagaattcctgattggttatgcagagaagaattaactagttaatttactgtatggtcaattgcctctagcagtaatgcattttaacatggttttttcttctcttaactttgtacttccacgagtagctgatcttgtcattggtgctttagtgttcggcgaaaatgagttattcagctaatgctgtgttcttttgtttgtcacactagtttgtttcagctttatatttgttaactaggaaacagtgcttatttcagtgttatcaaggcgaaaggcgacactaagacgataaggtcttctttcgccttaggcgagaggcgagtcggcgtctttttgaaaaaggcgacaaaagataaaatttttacatatttagaataatataaacaacaaatatataatgaagcattattaataaaatataaaataagacaattgaatagaactactagcttagtctattactcaatacttatcaagatttcaaatataaaataaaatattaatcaataacacccatggcccattctaatttataaataaataaacaataatttacttttaatttctcacaaataaatgagctacaaatctcaaataaaaaacacccattttaatttcttaataaataaacaaaaattctcacaaataaatgaagtaatgaacaacaaatcataaatcaacaacaccgtttctaattaatttctaaataaacattaagattcatgcttcatcacaagattcacaacacccattctgtttagatcggctggagagtggagtgtgaagacaatgatgtggagactggagaggagaataatgagagggaaggaagggaggagaagaagaaggagaatgtcggtcaggtatggatagtgtagaggaagggaggagaaggaagaagaacaaagaggagtacagaggagaggagacatacctgttctctagtgcttttgtcggaattgggagtcggtcggctagctactgctgtttggagaaggatcgggactcaggctgtaagggttttaattttaaaaccctttaaaattaaaacaaaaatgtgcctcacctcgcctggctcctcatggcacctttaacaacactggcttatttatacacaaacacgcacatctgtagtttgggttattctgtatttcatcatactttggttacaaccgatattaaggatttgacctacttagttaatgtcttcagcataattgatttctgtccagcttgtagattgtttgaggaaagagttaagaactgccagagaatccagtccaaacttctgatgctctaagcatttgtctcttacctattttgttgatccccctgcctcactttaaattttctaattggatttcaactagagctgtggagattgggttatgtttgggtgtttaggattcttataagagtcgagtattgtacatgaaaacccacataaaattgatcgaattctgaactacccagtgatgtattacttcctatttgtcttcctaaaataagtagtcctaaaatctttagaagatcctgcatcatccagctatgttaaaccatttgaaatttctgtctgttaagtaaagttttgattagagagacagttaattggcagaaaagagaggctgtttgtaaaacaaattgcaaaggagggagaattttggggaaaggaagtttcacatcaagttccatctttgttttcactgttatcatgcataaccatgccaaggcttttttctccttttggtgtaaattatgtgattcacacgcatatatgatttctctaactctgtatttatagacatttatctgctcgtatttttttttgacaatgacttgctatgaacttgtaatcaggtaaactttagctcaggacgttattttactggcaa

SEQ ID NO: 6177 - DNA, 1515 bp, Manihot esculenta
  Intron number 5 from transcript cassava4.1_026998m (locus cassava4.1_026998m.g) derived from phytozome v7.0 (chr-ID scaffold02421; pos 374163 to 375677)
gtattcttctggtttatttttgtttttacaggataactgcattactctctaaattttgttctaaagctgctattctgcctttcaggtgaaccagaccctgacctgaaaatctcttgcagacagatatcaccattcataccacataattatagagacagcagtcttcctactgctgtttttgtatatacggtatgttcattcaacttttgctgtcatattttcttaaatgacatggataattctcagtaacccaatgaatttgtgatacaaatttctatgatactaattactccctccatctcttgaagattggatcacttttcttttcttcatctatttcaaattataggccactttctcttttgtaatggtaattcatttattgctttactaatacacgcctatttaatatgcattgaaaaaataaaatcgattatttctgagaaaaatttagtaacttgagttatttattatttttctaatggagcaatatgaggaattaggaaaaaaaactaataaaaatttattactttaactatattaactatagtttcttaaactatgttaaaataaaaatatagttaatataaaaataagcctttatttatgggattgatggagtaattgttattgtagcttaaatgcggcaccaagaagaatcagtttactacttgtatcatgagtgattatttgagcttttcagttgttacttgtctaagataagaaggtttcagtttgattacccattcagtttaaaacttgctatgactgaagctcagggttttaaacaacagaattggattaaattgttctgaagcaaactaaattcgttgcttattcggagaactttcttaaacttctagtatactgggttttaaataacagaattggaaatgattacaaaattggtcggtctgaaacagctgatatttgaaaggtgtaattacatcaaaagcaatgccttcgcgtgaatttgcaatctaatccaactctcttaatttgggcagttgaggcccaatttctgaagttgataggcctatccaattcactaattcttcaaaattgaaattgaaatgctttatttgtcaaaaataaaaaatcaattttaatgaataaagaaaacagagcattaagtgaaaaagagagtgcagggagagcaaggaaaataaaaaaatagaaaaaaaataatgtagaatatgttgtttttagtttcaattttgatcaatttggtaacattgcagccaatttggtccacctgacctaaattttcaaaattaaaagtttggattaaatcacaagctcatataactaattaggcctatttaaaaccatgccaaagctccacagtagtatgacaaatttaattggtagatggtataatgttatcttataattaagataaagtaattggacaacttgttgcatttttcgagtcatttaatttagtattctcaaaagactgttttcccccttgctacagttggtaaacactgggaaggaaagagcaaaagttag

SEQ ID NO: 6178 - DNA, 4320 bp, Manihot esculenta
  Intron number 1 from transcript cassava4.1_013631m (locus cassava4.1_013647m.g) derived from phytozome v7.0 (chr-ID scaffold07478; pos 30480 to 34799 reverse strand)
tagagcttcctgctcctcctggctggaaaaagaaggtctgtcgctctctccttctctctcttgttttggagatacaatttgcttcctttttctttttctcccattaaatttgtggttcttggacttaatttcgctaaatttacttgaattgctagtgggttttttgaatttttttgctttggctcctagggctttttgggtttgctccataagctggaattaggttgtattttttaagtcaattgttttgacttctctataaatttctggtttcagtcatttctatcagctagggttttattgaagaggctgtgtgggttcttcctcgtccttgagtttagttggagatagcctggtaggacgatataaagggctgttagtagtttgtttaaactttacttgtcggtttgtggctttctttaagatcttcagtatctccaatttattctgtttttttcaaggtgaatatttttttgagctgtttttatattctctgtgggaacgcaaattgtgagtggaaagttgttacagttggagttactttaaaggtgagagtgagaaccttttgcagttggcacaagaaattctgctgattatgatccttttcattatgagtgttacaatttctctttatttgcaatcaaccaatgcggcaactataactatttttgggctttcatctgtcaatatgggaaaattatcaatgtatctactccctgatttatgtaactattttgggtagctgcaatgtactcccagaatttatcaaatgctattgacttctcctcctcctcgtccttcttccccttttttttcttcagttctttgtttatactatataaccattttgttggataggctcttcactttcctcttttctatgttccatgacaagactatctctacttttgctttctaccagcctccagacatttttctcatattacttcatagaagctgttatggcaaaaatctgttgaggttgggcttcctttatggatttagtttttatgtagactcttattcgagttgtttcaagagacattggggtagtttaataaaataaagctgtagtagtttgcttacagtctctctaatatcaagagggggacagtaccagccaggaaatttaactcgtccaaattaagctactgaaatttcctgtggattgtgaatgtagaaaccaaattaagcaattatctccaagatcccacttaagttcggaagttagctgtcttgagtgctgtaaatcttatccacttaaatagttgttctgcagttctgtgagtgacagttctaagaaaatgaagaaatccacttcctaggtagaagatgctagggagaacagaattgggaaacggttcatactgaaatttgagattgatcgtgttaagagcacagtaaaatcaaagaaagaggttgacaaggctattttggacaagaattttttattgggaagcctctctcacatccaaagggggaatgaaaaccaaaagtagaataaattgaggaagaagaaagatgatatggtgaattcatgtgattgcgaaaaggctgatgaatgcacaactacaacaactaagtcttaatcccagaagggtaatgaaatgcaattaacacttaatggagtgtggcaacttccactatctcgttaggatggtcttatcatatgatgtattttgttgctagttttcttattgggtctatatttgcatttctggtctggcacctaaggctctcatcatgttagaaatgtgtttagtgagaaagcaatgaaccttttcttatggctcatcatgtgattttttgacgttagctaagttaaagtctatgcaaaagacttgtcatgttctgcttggttaatttcattatcatgtttaaagttttttcaagagggttttattctaagtaagtttggtggaagttaaatatgtgccaacatattaacatatttctcagtttgatcttatgtgggaaactaatttgattataagtagcattaatttagttttgaccttgtaaagtagctatttgggcggcatgacttgatttctctcactatcttacttgaatgcaaactttgcataggctcgtgttggattttttttagagaataaaggattttctagtaagctatttctaagtcattccttcgctgctgttgaggtgcttggactcttaaataatatgcactcttgtgctaggtagtgagttgacactttttgttggtcgaaagtgagttgacacttgacccaatgtgtttgggtcaaagtattttatgagttgtgttctttatcatgaacttcaaagacaagctaaaatgtagtacagactatatttcattatgtagttggttttctaaagtttcttacacttagtcaaactgttttctgcctagtttttttttacaattgatagtggttcattttcaaatagcatagaatgtatatctgctgtttaattattttagtgaaaacaaatgaatcattttgggttcatgaaattagagtacttatctgtgttagaaaggttcttacttatgttttgcgttatgatttaataatgaaaccgtcttattcttcaaattcatggttttttcttatttgttaacaatgtgcaatgaattttcatatgtttgcagtgtttcaaatggtttgcattaattatttgtctcttgagtaaagcaaacttgttcgttgtgttgtcagtctgtcattctgaaggtttgaattaatatgatttatttactgccattgtttgttggatatggctgtttgttttgtggctaggaaaaggcatttgtgttaaaatatgatcatctctgggctgagatagtagaagggtgaaaacaaaatgcaagggagaatttttgtacggattgaatgtgcaaagcattactcatcttgccagaatataaggtgctaaaaggttagggattcatatcaatgggattcatataatttctaaaggttaaacaaagggatgcaaaatagaagaatgagttttctttctctgtttctgacggaaatgtttgcaggaagaagaaaaaagcatggagattataaacattggatccatccaaataaactaaatttcttatgtcaaataccaaaaggtgcacagaagtgaggaaagaatagttgactctgatggatttttcatgtgccaaatttagccttgtgcctacacttaggttaggttttcattcttcctggtaaactaataaatggagaagttgcttgttgttcctccttttgtttctcctctcagacaaaaaatgtgtcgcaaggttgtgtccgttcgtgaatgtcttggggtgaagacgtgggcagattatggtagctgtcttcatctggatggtttactcatattcttttggttagccgcaacagagagaaactgggaatgcattaggtcgtgcagcgagcaacttaaatataatattccatttttgaattctctagtgatacaatgaacaatgtctcctgttttttgttttcctttctgataaaattgtctcttagggggagttggaagcacattgacttataacatatgtggaataaaaaataatttttcccccagcattagattgcggttcagagctctttcctaataacatgttggaattgtgtcattgcccaagcaactgcagcaacccatctctcccttgcatttagtgaacttagttatccaacataccatttttcaagttatgtaggctgtatccattatttggaattcttgactacggaggaaatttctgaaaccattttaaaggatttccattatttagaagtgcttattttgtacctggtagttcttttaattcaaacttttattctagtcttgtaattatcttctaatgatgtgcatgcttctgacttcttacacactgatttacccttttcccatatgtagtgaattctgcaaaattgattgctaccccgtggcacaattttggatgtgctggatgatgtatattgaagatcatggaggctgtcgcttctgttcttgaatcctataagactaaacaagttattttagttataggatttgatcccaccatttttggttatatgatattacagttatggaatggaatttcttgtttgttgatattttttgtgaaggttctttatagttggctgtaattggccatttcaagttttcattgcctgtagtctttgatcgaaaatttccagattcagataaccttgatattgtatatttcctgtccttttttggcctagtacacacattgatgatttatgttcatgtacagtttgtgcccaagaagagtgggacccctaagaaaaa

SEQ ID NO: 6179 - DNA, 784 bp, Manihot esculenta
  Intron number 2 from transcript cassava4.1_005153m (locus cassava4.1_005153m.g) derived from phytozome v7.0 (chr-ID scaffold02943; pos 72155 to 72938 reverse strand)
ttattgcgagacttcaaagttcagtttcttcagaggtatatgagttcaataaacccactgatatttgtgatttgatgttaggtgaatctagctaaagacacttttatttttctaaataaaaattccaatctataatgtttttgtgcaattattcttatttcttgcaattttggaaagtttgtgctcatgcttggttaaaaatttctgaaggcaatgtacttcagattattggatagatggatggtttagattgcatttttggtcatcttatgaggataatgttcttttcattaatttcataatttcatgctcttaacagcctgcattcttgtcatggattacataatggtcattccatcctgacatcgtcatctatataattaattgaatgtcctgtcattaaggttttaatgtatagttcctgtacatttacacactacttggaacgcatgcagttctgcttcttagtgggagttgccttttcaattttgtctttgagaatattcttttaatctaatgatctagaattttaatacctcattgttaaactgattgtccatgctacatttgtagatttatttccgtggatatatatgcccataatcttcttttcctatatgatgatatgtgaaaaatagatgtctaaacaattttaactgattaaagctttttccggtcatgccgcttgcttaaatcgttatatctagtgtattattccatatgtcatatggctttttacttgattctagcaggataactcagaaccttcatcttcattattaga

SEQ ID NO: 6180 - DNA, 2546 bp, Manihot esculenta
  Intron number 3 from transcript cassava4.1_018859m (locus cassava4.1_018859m.g) derived from phytozome v7.0 (chr-ID scaffold06916; pos 1656540 to 1659085)
ttcgaggtttcaagagataaacgaggcttaccgtcagcttcattctccatttgcttcggaattatttttctttgctcaatttagtgtttgatgtcgagtgaatgaaagtttgtgttgccttcaagatttcattaatttgtttctgacttaattttggccttcaaatttatgttttgtgtacacacacgtgtggttaggtgttatagtaaaggtgtattttgctgcatccttcatcatgtagcattggaaattccatgtttgcattatggtacgagcggccttcaagatgacttgttcctctttaggagatagattatgaagcgtaaatgcttatttagtgctaaaaggtggaatgagagtgtcctttgacacaaattttaagagcagaatggtttatatttcgattgcttgtgccggttgtacttataaactgagaccacgcatatacatacttataacatgttgaaagtgagaggagcgatgagttgcaaaagaaggcattagaatgatggagccaaatacacagtgagaagtgtgtggtctatgggcattgtggattattgaataatgtaggcgatacaagtgtttggagaaaaaaacaatgggaaatggaaacattttgagagccgaaatacatgtttctagctcctacttttggtactttttgtgtaattggttttgttggattttgagggagaaaaaacaagaaatttgagagaaaatactacagaaactttgtttgtttctagctttttctctcatacatgcttatagcagaacaaccatatttgtagagcaaaaagtcaaaagttttctgcctaattaactaagagagaagtggggcaccttactttgaagattactctgacaatcatctatacttttgttacctagatttcaggattatatccaaatgaaatacataaactaaaatcttagaaattgtagaaaatttagggtttgaagcaaaagtatcacatgcttcaacagatttacccgaaacttcagaatttcatgcttcaagatgtatttgggtgatattcatttgttgttcgcatcttcccttgtttactagattttaattgttctcatattgtttaccattatttatcttgcctgatgtatattccaattataatatttgttggtatcacaccaattttttatgatcatcaaatgtagcgttcagtgtaccgttaaatctttctttctttatcctcttatgtatcttaacttatgggagggttgtactcctttttttaattttcattttatgttttcttagttttcttcttctttcttgtacacaggacagacttgtcctaactaaataggtaaaactgttgtctattgactcccattcaatcaatcttttagaaagatttcaaattgtaattttggcccaaccataagtggtaaaaaagtgtggctactcaacccattgatcagcattcctatggatgtgccatgacattgtatcttgcaatttgatatctctattaattctcttgagttatttcttactcgacttctgaatccccctccaaccaacacctccccccccctccccgctcctcgaatgcactgcccagaaaaaaaaaaactaattttgggagttaagcagaaggactactgcttcattcctaaagtatacctttgagaatttactggtttgtacagcaaacttaaatcctacattgtttccttgtattttctgcggctgttgcataattggatttgtgtaggtggtaggttttttattttattctggctaaggttattttgataggattctgggatatgaaagaatgtagtcattttcaatagacatatatttgcatttgtccatttttaaggtctcattttgcgattttggtgacaattcactgaaatggggcaagagtgttggggaaaatgagtaggcgtttatctgatgaagttttagcccagcttaggaccaagtttcttgccttcacaaagattggaaattttcctgttttgctaggtatttatgaatttttaataggcagaccaaaagggctaaacagaaaaggaaggaagccaggatttctttttatgttctctctctctctctctctctctctatatatatatatatatatatattattcctttattattgcaattgttaaacttgatgcgtatcaaaggcttttgtagtggcaaagggaaatgccatatatttcaagagttgagatatgattacttgtcaactaatatcagcgatttgaaccttaatccttatcccttttgtcctttttccgctgattcaaatatctaattgaccacataattccttataacggttgcatatgcattatgatgtcagatggcttggctggattgataatactgaattagcggttgatacattgatcctacactgctaaagaacaaaatattgaagaagagaggcagagaatatcaaaattacgtgtagatgttaccttgcataccaagctaacaattgaatcttgcttctctgaacagttttgagtgatcctgtcaggaggagagagtacgac

SEQ ID NO: 6181 - DNA, 684 bp, Manihot esculenta
  Intron number 3 from transcript cassava4.1_006095m (locus cassava4.1_006095m.g) derived from phytozome v7.0 (chr-ID scaffold06335; pos 25861 to 26544 reverse strand)
gaagtactgaagctcctgggacctatttgtataaggtattgtgggttccatgaaaagttgatactaagcaaatttgcttcttattttttcaaagtgtctttattgaagtttgcaatttttgttaatggttttgattttttttttgtggaattacatactgccattttttcttactcattgattttactgatattctgatgttcatcatttcaatttgtttaatttagtaaattactaattctgttgcattgaaagtgtaattaagtatccagatatatgttggaaaaatctaactacaaagcacaattttagttttttttcccccttcactatataaatatataatctgtgaggcttttatttacctaatcttgggcagcattggccaaggcaaatcttttattacatgtccactagtggaaatttatgtctttgaatgttcttgagctttagttgggtttcagagttagatgagactactcttatcatattgaacacaaggcagtctaataacagagggaaattttatttgtatccaaatggataaatgtactgaaatatgtttctgtatgttttctatggttttccagcagtcacatgccaccttgtgcctaatcatttcacttaagttaatatgagaactggcctttttgggtggatacctgatttggcattgattgcagg

SEQ ID NO: 6182 - DNA, 1241 bp, Manihot esculenta
  Intron number 1 from transcript cassava4.1_013680m (locus cassava4.1_013680m.g) derived from phytozome v7.0 (chr-ID scaffold00224; pos 449901 to 451141)
cctcagatcaagaatccctaaataatgtaagctaatgcgtgcattcatattttagatttgattataatgatgtttcgttttatttatgagtatttctatgtggtttatgggaaactttggaagaatatgtgctgaaatgttaattctctttctttctgcccttttggaggcttgggattggcttttacttaatttaagtgtcaattgattcatcatgaattatctaattacatggtcctattgaagagtattttcctagaaaatatttagggagactattaaagtgttctggatggattatatgtttctgcagtaacaaaaactaggaaagattctgacatctgtttatttcttttctactgttctaaaatagattttaggtctatatttgatgttctgatttttgtaatagatgtgatatttgtttggaattcaagtataatgtaactcatccttgttgaaacagatgcatgaagcttgcctgtagtggtggtagattcttatggcttaagccctgaaatatgggctaataacatgaatcaatgcatcaagatgaagtgtcactgtttacattatcaatttgtaaaggggacaagaacgggaaattaatataaatgcatatattttaactgtttcaatccatagaattcaattattggctgttgcaagtgtcttttgggcaatgagccgtctggatggttgaatatggagtatcttgaattatctgcttgtagacaattaagacagcctaaacaaggatatctatttgatgattcagaattctgccttgaatcgctaaatttacaaacgaatcttggcaataatggcctttcattgagttcaatcatataaaatcaaagtatggtcctcatctatatctacagctagtacataccaatggtttgtgtcatattgattatctaggttaaaaattcttactgtaacagccatcaatggtcatatgctatgcattaactaataaggttgaaatcttagtacccaaatttctaataattttaatgcggcaccagtattctatatagcagaagaagaaaatgttgtgaatgctggtacttgtaagagaaatctttacattgtaacatgactttagacctaataaataaatagttttaagtagagttcacaactgattgctgttattttaagtgaaacctttactctgtagcgtgacttccaaccttataaatacttggtttttgatagagttcacagctgaggca

SEQ ID NO: 6183 - DNA, 3026 bp, Manihot esculenta
  Intron number 3 from transcript cassava4.1_022234m (locus cassava4.1_022234m.g) derived from phytozome v7.0 (chr-ID scaffold07519; pos 131089 to 134114 reverse strand)
acttttgttcaatatacagctgtgagtatttggtgttgctattgtgagagaagctgcccttaggcctagactgtagcattcattgtagtttcttgtataattggggaagtagttaacaatgtgcttttgtctttatgctgaggaaggcagaaatgattttgatgaaccatacctgtactaattttagttattttggccttgagtttttccattgtgaactgtagccagaggtcatgggtttgtgcctcagaatcagtaaaaatgcatgactgtttctagaaccttggtgcaagaagtgtcaggcactagggcactctttactctctttcccccttttcttttgtgtgatgtaatttgattatattctatattcactgggggcaaggagagtgcaatctatacacacttgtggtgcatatcctctcacacacctccatcaaaaaatttcttgtattttggagttggggaatgatgcttaattgtttgatttgattttgtgcccttagtgatgaatgatgaggatgtcaacatcatttgcattattctttgatttaactataatttaggcttgagattgcaaagaatattgctagtttgtcagtgtccaaaatgctcgtggaaactaaaatgttgttgataaatataggtttaaaatttcttggccactcttaccaagtgacaaccattggtaggatgcaaatatgtttgagtttacaaatgaatcaagtaaaatatgattaatgtgtactcatggtcctcctttatttcaagtgaaacgtgattgaacaactttctactgaccatccttcaattgaatactggcctctagggtctctgctgtttgtgcacctatgctttgttcagttcatgcagcctctttgatgtgttgccagctttacttgctgtatgaggtgaattgtgtgtatatttgtttagctttgttcaaaaggcatctgattttcttttggacagcacatctttttgctaccataatgtggtttgaaactttgaattcatggtcccaactcccatccttacagtaggacaggttagcctacacctcactgccattggtaacatggatatgatacaactttttgaaaagctttataacaagtcttagtcagaagctacaaatttggctagttgaaatctttattattttcagtaagtaagtttgtagaaacagtgtagaatctagaattatatgtttcctatttagctagcataactataggacataaatttaagtttcctatttaattagacaattatatgtatgtatatatatatgtatatatatatataaattgtatctgaatgattctttgatatattgaaaattagtattcctatttagttggcatgattataggatcaagtgtatataaaattataaatatttatttaatgccttgtgaatatgtgaagttctagattatttgctcaaattaaaatgaagtgtcaagtcacattgacctaacatttacaacagcaaaactagttagttaggattagctacatagattcccttttgatattcatctctgtttgagactaattttgcattaatttcagaaattgtaaatctcttgatctaatgtttacagtggagaaaaatccttcttccccgaaagctctaatcagtcctgttatttccctccataaaatgcaagaaatagttgctgggactaatagcatagttgtttgcatttatatacacagttacacattgctccacgcccgagatcatttccagttggcttttaattcatttgcaccttctgtttatacacctttacaatcagcttccaagtggaaatgaattgttgcaggttgagggctgatgatggggttaagaaaaagcatgtaaatgagatgtatggaaggcatgcttgttgcttatggcttttttttggctattattaagggttgagaaacatttgtaaatgatatttttgaaaggtgttggaatatggcctgtggtaacaagtcccacactgctagtgtacaagaaatttgaagggtgtatagtggttgatgaaaccaaataaaaaggcctaggccattttggtgagggagaacccacattcaagcttagttgagcatggagacctacatgtttactgatccatgctccttggcctcattttggatatggttttagagcaaaaaggcctaatgactataaatataggaccgaaagcatggtaggttaagccgtagtgactagacacatgaattgaactaatcaaggccatctggcaaagccaacaggaaatacacccaggttagtggagtcacccgtacatgtctagtgacaaattagcttgtgaagtcaaagctgaacccagtttcacataaggggggtgttggaacatggcttatgggaacaagtcccacatcggcagtgcataataaatacaattaaaagacaggtaaatgttggcaaagccaaatagaaaaagcttaggccaatttggtgttggagagcccagtttacttgcctattttttaatccacacctcagcccttaatttcaaaaaaatgtgtgcttaagacttatttttgtcaattcaaaagttgaaggttttgaacgacatgaacataactggtaggactggatggatcattttttagtggtcaaaactgtaatatagaatttgtctttcactttttccccgtatgtttaaatgtgtgcttcttacttttggtcctaaacattgtgggtggtggattatagaaatattcgtatgtagtgagttttgatcacgaaaatggtgcaataattaatgtactatgaaatgactactaaaacctattatgtttttgtaagcatgaagcattctgggtattttagcaattcaattgcatctattgcaggattcacagcagagtaattcttataaaattatattatacaaatcctgatgatatttcatgataaaaagatccaattttccgtaatgtttctcaataatgacaatatttttcccatatcattttcttgttgtaggaattatatc

SEQ ID NO: 6184 - DNA, 1631 bp, Manihot esculenta
  Intron number 1 from transcript cassava4.1_008131m (locus cassava4.1_008104m.g) derived from phytozome v7.0 (chr-ID scaffold11297; pos 827751 to 829381 reverse strand)
ttcaggtgggtatcttttcttttctcttatttgttttgtgcatatatgtttatacgtatttgtatttatgatttctatgtgttattatcttgaccagttcttttttctgttaatgattctgtgcgtctgaatttgactttggtttggatgtttgatgttttcttgtggtgttgttggtgagaaatttgagagtcccagttgggaaatatgttggtgagccatccacaatttcctctgatttgtttcgaagacccagaattgtttagattacaaatttcaattgcttttttcacttctctttcattacccaaaataggatctttcctgatgtgcaacttgcaatagagcaaataacaatacttggacatttgaccgttttcttttatgttgggaagctatttttttttttacccttttctgacaatgcacaggatttgtttgttcccatgaatgatgagagaaagaagaagaaaaaggttataaaaaagaagagagaatgtttgcaaatggtgtatacttttgatgatcttttagaacattttcttctctttgtttgaaagaagttgaaaagtggagataacagataatgtttattcaatctttaagagcctgtagctctaatatgagatttcactcaatccaattggggaataaaagctgtagttgctcagaatagtcttaaaataaggatagagttcaggactaggctcttaatttggttgataatggcatatttcattttattgacactgcaacagtataacttgcttgtcttttgattgatttatattatttatcaaataagaaattttcgttaaagatactataaatctggttagaataagaatgagaaaaataaaatgcttagatacattaaactcagttgatccttttacaaacttgtttgaccacctttttaagtgtctgatttgactggatcagatgatctcctatatgtaatcaatgaagtaagccaagtaatgttaaaagtttcatgatttgggctgagaaattgctttgtcattggaactaagtgttggctcttaggcagtagaaaggatctaggaaggtgagtttggcttgctcatgtatcattgtggaatatggattttttgggagcgtagtgaggtgaagaaattttgtttaaaagaataaaatcttaattgttggtaaattcttatgttctttcatgtgagatgttgaaatctttctcatccttgcttgtttattttgggagtgttggtcagtgcttcatccagttaaagatgatataaccctgcaccaggtactcccattttttatgctctgctcacttccatatgttaagctttgatgaaaattattacttgaggaagaataaagtaggttactacatgttggcatttgcaatgacatttgatttattttgttaatttaatttgaaaaacttcaggtgataagatgcctacttgcaattggtttttttaggaagtgaacaagttctgatatcatatgtgcatgtaataatagataaactgttaaaatatttatagatttggctcagttgtttgtagatttgtcctccaccaatttaatggctgcctacacatctgatagggttcttaagctggccgagtacatagctcttgatc

SEQ ID NO: 6185 - DNA, 1080 bp, Manihot esculenta
  Intron number 6 from transcript cassava4.1_010731m (locus cassava4.1_010731m.g) derived from phytozome v7.0 (chr-ID scaffold07238; pos 461417 to 462496 reverse strand)
cgtgcattgttatcatcgttgcaacatgtgtgtcatacaacagtttctttttaatttatatccttttctgactttttagaatgttagcgtgcaagaaaacatggtatcaatttcccacattgaaaggatgtcttgaattagagcatatgaaactttgctaacatgagtatgatgaattatttgtcttatatgctaggatgagtctaatgacagtgctagactaaatgtcctatgaaacttttttattctctcgagctggtttggaaaagttcgggattcatcacaccattaaatattgtaaatttgaagacctcctagtttggcatggtctcctattgaaaagaggtgttagctagataagaaagttgtatttgtctgtttcagtctctatgcctgataaaaataataaattcaaatgtagttatggtattagcattcaatagttttgtctgggtttaatattaagtaagttgctcattattaaggctgaaagtgtaacatgaaccaaaataatcctcataagaacgggtcttaaggttcaacacctgacttgtgcttttgtttattgtcttggtactcttgaataaatgttaaatgttgcacatatgagtgatgacatcttcaactccataaatactgagaagaattttgcttttctttccgcaagtcctattttacagatttcttgatttcttcaacactatttaaagctcacttttccccagaagaatctaaagaggggtattctccatcttgtgggaatgtaccctttactgaaaaatttggtgtgtgcacgtgccttgaggtctgtagagagagtatgcttgctacaaacattatttctatataaattttatgtactgggatcttctagttcttcattaaatttaatcttttgaaatatgttgaattattttcagttgctttaaaactttgtgtcgtcttagttttgcagctgatcttgaatgttgaagaatttaaccttctttaatcgcataatgtttcatactgtatttatataccaatggatgtactttaattgagcaattatgatttatgaccaggtgctttcccctgatt

SEQ ID NO: 6186 - DNA, 2529 bp, Manihot esculenta
  Intron number 2 from transcript cassava4.1_008417m (locus cassava4.1_008417m.g) derived from phytozome v7.0 (chr-ID scaffold03542; pos 153273 to 155801)
atctccagactcttaaccaaaacctcctgtcggtgagtgcttactgtaaacattctgctgttggatattaaagaggtttggtgttgtatgctcaagaatgattacatatatgtgtgtgtgcgtggggccagattttgatatctgcctaagtccatgaagtactgggatcgaacattaccgtccaactcagccaagcaaatttcacaataacctgcgaaaataagacaatcatattagcataggacttcacaagccaataaggaactatcaggcatcatagaccaataagcatcacaatcatcacaagtatgatgaacaatggaacaagattatttatgaactagctacttttcttattcataaaatataatcagtacaaggagattgatgatctgtacatcacttataggcagggggaggtgactatatatatatatatatatgttattttaattttaattccttgttcatgcttatgatggtacctagtgttttggtgatatagattcactgtttcattcttcttcttcttcttcttcttcaattggttttttttatggtagctcataatattagtatgtgttatgctttgcacccatggtctcctgttttatgaacctagcgcagagaaggtttgatgtgccttaatagaacttcattgccaggggaaaaagaatatctttattgctcattatatagctagtgatggcggtactacagtgcagtgctgcaatttgagaaagaaataagagaagatagtaatgtattggagtagtaactgtaatttgtggtcgtgcatctagtgtgaaatatcaatgggattactattatgaattaaaggtggtagttgagatgccattagtgtttttagcaggtgattaggtcaaccatcatctttgtagtgccttcttgccagttggcagaggcaataatcttgatacttctggtgtttggctaacattagttgtgaatttatggaggagatagaactcgtatgactacaagtgctattcttacatgttatcttctttctgctggaactggcatggtttcatacctggaatgtgccctttgtggaagatgaggatttactcaaacgggatataagttagtgtatggtgtgatacatttgcatgctcagaatgtttaagagtttttcttgattgttccacatgtcactgagattctatattagattatcttgatgtgtgctcaatatgcaaatcataaatgaggggaactcagttgcaaacaagaggctcatttttttcctttaccatctggcaattgataagttgctttataaagtttaagcacaataattttcagtgatctatttcagttttggagtgtgtattttcagttttcctatttggaaaatagaagcaaacatagtgttatcttgctttttaactcctcttggcttttgttgaaaaattccatgtcgtagtgggcttaccatctcggtttgatacctctaatttttggagaacaaattaaatcttagagtacagcagtacgcaataacatggcttgttaatgttgtcatcaccgtgaatcatcttattcaacagtgggagggaagacgtagggtttattctttgatcttttggtaatttattagaagggggatgtataggcactggaggagcactgaagaaacataagaaaagcttagggctagtttggaggagagctttatggacattttcaataagttcagatgattcactatgttgaagcttctttgaggaaatctattccctgagacctgttgttgtcatatggtgaagttgttctttcttattactgttggttgtggctgcacacctgacaatttagtgataactggggaactttgtttcatttactatcggtttagttcgtgctagatttagaagtataaatgcagctaggaaaaattagcatcgcctatgtcaactgaagaatgagaaagctttaaaggcacggtaggagaatccaatattcaatatttgtcatggtaattatgatgtgtttttataaattgataggttaacaagattactgcatgttttagtttttcttttttctttctaaaatgctatgagtcattttatgacttctttttcttttttaaaaaaaaaaaaaatttcatgttaccgctggtctgatactgcaacaccatggccgcaagtccacaaccaactgataccattatctaacacttgggaatgcccctagtaggtagtagctttgtgtgtatgatgcattttctttttgccaaattgaaactccaacaatcccctttcaattcaggagcttgaagttaaggaaagttctaggcaagacaatcttaaaacacttaatattgtaattttgtgtacatattattcccaacaacttgttgcatttgtggttgaaatctatacatagctgcactgaacatcatttatgaatgttttagagtagtttgtatatttctttatatctatttctaatatgattaagatgctttgctagattgttggtgcagaaaacccagtttta

SEQ ID NO: 6187 - DNA, 1669 bp, Manihot esculenta
  Intron number 2 from transcript cassava4.1_001560m (locus cassava4.1_001533m.g) derived from phytozome v7.0 (chr-ID scaffold09876; pos 149821 to 151489)
gacacgaagatcacattggtgcgttgccttgggtaaagtttccctcgacttcttgaaaattgcattttgactttatactgcaaaatgaaatacaagtctattaactttgttaactctgacatttatacaaaaagttagttgacaatctgacctttgctttattaactgttatcacttgacctttgtgatagtataactatttaaaccctaaactttacaaagtaaaactattaaacccacgaactttacaaagtgtaactatttaagtcatgaaaattccaagagagcgtaattcacatccgcgcataggtggtttagtagttacactttataaagaccaggcatcaaaagttaacaatgaaaaggtcagggtaataattggctttttatgtaaagattaggggccaaattatacattcagcctatattattttttctgttgttctctagtttcagggtgtagtcccatagctgagccaacaattagtgtttggtagagaataagctgcactattaccttggctgatggctggggcagcttggtccatgtacttgggacggagaaggtgtataaataggtgaaaaatcaacacgagacttgcaaggagcagcagttgtcaaaatataatagttttctgggtctagtattggattctagaaaattttagcttatttttaatggaggagaaacgtgaatttgaagactgtaggtgggttattatgttcaaaacctgctgatggctgctttcatgagcacattattttgttcatcacatatttggagccttcttaagggatcggcttggttcatcagtaatttttgcttgtggtttgttgtggcattgctgttaactataatttggcattgctgcagtttagatggatttactttcattatggagcacattccctatggcttccaacttttgcatctagtgcatgtttggtaggaagtaattgggaataatagaattccatagaaaaatatagaaaaagtgcatttcattatgttaaattatgtcataccaaccatgcacttatttctctggagttggtatttgataattgggctaagtagagggtttctctttttttttttttgggggggggggggagggggagcaaggaaccctagcttatgagtggttaaaacgctggtgattgagaagaatcatttgaaggattagagttgaaactgggaaatcataattcaagatttattttggcttttagatttggtagtcaggttttttgtggatttattctttttctggatggtttcagccttataggctgcatcattgatctcaaccatgtatgatgtcttaccccctgtttggaatcaagaatttcttaagaatttaactcaattgatttcttttctattaattctcttgtttagaatgacagaattccttttttaacttaaaaaaatttcatttaaaagggattaaaatcatgcatgattttataagaatttatttgagttcttttcttaaaaaatgaatttttccaaatgaagggtaaatgtttcttctcatcatgcatgcttattttgaatacttctcatctgatttcaagcattttgctctttatttatatatttaagaataatcctcttactgtccaagcaggttatcccagctctggactcccgtacgccaatata

SEQ ID NO: 6188 - DNA, 4814 bp, Manihot esculenta
  Intron number 2 from transcript cassava4.1_013555m (locus cassava4.1_013555m.g) derived from phytozome v7.0 (chr-ID scaffold06446; pos 408315 to 413128 reverse strand)
tacttttccacggagctatcctatcgtcttaactggtattggaaaaatacataacttgattatgtatcaaagtataacttgttgaaaacaatgagaaataatgcattcatgggtaaatttagaattatcatagatggttatttggtatatcagtaaaatgtgaagtgaggagatgatgggattagaaatgtgaagtgtggagataatacttgtttctgagcttaggttcgaaatattactttcctgataaatgttgcattgagttttgtttggagctttcctttttccgttctatttatttattttttatctatagtgtttaccccagagggagcaattataaaacattgattgaaagtgtagaatctatctattttcagtactagtttacatctctttgttgcagcaattggtacagcccgtcttggtgttctttgtaagcctaatatagtggttttctggtcatcagcaaaaagtacagaacgttgatggtgagaaagatatagccttgtagaagggactagaaagtaaagaatacaaataaagtgatgaccttagatgctatacttcatgctattgtcttgtagcacatttgatatcaacctcactggggtggtaaggggattcaaactagtatatttgtgatgagtagggagctagcctgtcctagttggtcggcaagagaaagaaaattggataagaagaaaaaaaatagtaaaaatgatatttcatgctcccgtctgtttcacttctttgtgattatacctataataagtttaatgtccatgataaatagatgccatctcatcagcttatgaaggagatataattggcatgaaggtttttttgcatgttgaattttgtaggcaaagatggtggctttggtgtaatagtaaagttactttacttgtgacctaaggccatgggtttgatccatggagatagcctctcttcaaagcatgggaaagactacatacatttaccctccctagagcccacaattgtaggcagctttaataaagttattgttgatttcctgcttttggagttaatatggcaaacttgcagcatttttgaatgtcctcaactcctcacccttttttgcaacttctatgttttgccttttttttttgggttatgctgtaaagaatattaaatttcaaaacatgggcaacttcattgatattttaggttaccgatatttctagttggtcctgtaatgaaatatagaatgtgaaagaatgcatgggtttgtctatctatattcatatactacatcaaatatgctacgaaatacatatgaaaggtgcactcttggtgaatttcttttggatatatgtatttccagaagtgttggggcagacttatcagaaagagaattttttgtgttatggataagttgtcctctctccaatagatgctgaattaaggaacaaatatgctgaaaaatatgttgcatcttctggaaacgaaggtgagaaaaatgtggaagcaagagttatagaaagaaaacttgaatttacaaattgaaaacattcttatcaaggaatagaggaagaatgctccaaactattacatagtgtttagttcaattcaattgcaaacctagaatttctttcaaatgaattttatttgaaattccactatttaatttgacacaacttaattaaattttatttatactcacttcttaaactacccttatggtaaaacttaaaaaaaaatacaatttcattctctatcaaatatacttaataaatttataacaattaacaaacatataaatcaattaataatttattaataaatataaaataaattcagatgtcttgtgatataggagatttatatagcataaatagtgtcagttcaaaaatgtaaaatatcttatacagttgtttgtacaagtagaaggtgaaataactagaagctggatggttgagagattttttttcttttgatataggtattttggttaagaaaatgttcttgtgtgaaattctgaatattttcaaactaaacagagaaaatatagaatttaattgaattccacaaaatttgtagaattgaataccaaaaggcttttaaaatgagaaaggaatatattggaagttgccaacaacaagagatggacaagctattgttaaatataagatggtaaagagagaatccaggaaagcagttagctaggcttgtggtaaatctctagctaatttgtatcataagttggggacaagagagggagagaaggaaatatacaagctagcccaccttaaggaagagaagagtggaggactaaatcaaggtgagtacataaatgatgagatcaataaattttgtcaggagacaatgcaattaaagagagatggagatgctacttgatagttatttaatgtgagtcctgaggataactctgcatatcttaatgttccctcgatagagaagaacattaactacactcgcagaatcagatttgacaaagctgaagtggtcttcaatgaaaaaagggagagcttgcggccaagatggtaatatggtatagaactatagaagtatggaagtgcctttgaggttcaaatatcttggccaaccaagttaatggctactaaaatctggaaggaatcaaggatgcttaaatgagtggagtaagagtactttgtttcctatctttaagagcaaaggcgacattcaaaattgtgcaaactatagcaatattaaactgatgattcacatgatgaagtcatgggaaagagtggacgagtgcgaacttaagcatactaccaaggtattagagagaatctattagctttatgctcggtctatgcatgacatttatttacctagaatagagtattgagagttctctgatagatgctagagaagaaaatattctatcccaaacatataaatgttattaaggatatatacttgggggagagggagggggagggggaggtcacaagtgcaaggacatgggaggggacacaaatgagtttctcataatagtgggtttatgtcaggggttgaattgagtccatacctgtttattttagttatggatgtgctgctgaccagtcattctgaagatgatatcctatgatgcatgtaatttgtagatgatataatcttaaaagataaaactaatgaatgagttaaattaaaagatggaattatcgaggactcttgaaagcaaagtttttaagctaagtagaagtaagacgaaatgcatgcagtgaatggaggtgagatttgtttggatggagttttagtacctaaatgcaatcaattcaagtattttaggttcatcattcaagttttagataatggtgtaatccacaagattaatacaggatggatgaaatggagtttgataggtgtattatgcaaccataacaaagtgaaaggtaagttctgtaggactgtgatcaaacaaattatattgtatgggagtgaatgctggacagctaagatacagcatatgcacaagatgattgttgcagaaatacagatattaagatgagtgtttggtaatatgataatagataagattggaatgaccacatccattagaggatgcatgcagcaaagagtgaaaataaaacgagagaggctcttttaagatggcttggcaatgtccaacttagagtgccaacgatcccaatatggaagtatatattttagtaggggaaggagtgagaaagggatgggagacgtaagatgacatggaggaaagtaacatcaatggatttatgagtcttgaatattaatgagaatttggtgtttaatagagttgaaaggcaattcatatagctgacctctagcttaagattaaggcttagttgttgtgaattgtactaaacatagcctacctttattctcctgtcttattggtgattgttatgaacactttatgtattttgatgcaatcattttgttatatatatatatttaggtagagcttgtcccccctgccctcccctctttacttaagacaaatggaatttcatttctctggaaataattcactttcttaagcaatgggagtgtgaaatcgaaaagcaaataactgaaatttatgctgaaatgatatgcctttctggataattggagaagtcattatgggttgtctttaagtttgtttgctccttgatggtcagaattttctacaagtcataaagctattaaacctgaacctaaattaggttgtagatttgacaagagaatagtgaaaaggagagaattaagagatcaaagaccatccaattttactgaatgttttgttatacaacgaggaaaaatatctacctgtaactggaattttatcccagaaatctgctctaaactgagtaatgcagacctgtatagtaagaactcttgaacataatacccttgtgaaagtagggtttggacataaaatctttatagaattaggttctgaccaaaataacataataaaaaaattaagagaagatgtgaataaccctgatctgagaacttctactatagtttgaacagtaactcactacattaaaatggatagttacttttaaaattaaaaagttctatccttgcatcaataaggctgaggcacgtcttttagaagtggattaaatggaactgaatgttgaaaatggatctgtatagatgataacaagttgccagttagtataggattgagccttcattaaattgagtaaaataatgttttttaatggtgttcctttttcgagttttcttttattttacatgtgcttttttcatgacagtagtcaaatgtattaaatttttaatccaaaagttttctgcagagggtg

SEQ ID NO: 6189 - DNA, 2857 bp, Manihot esculenta
  Intron number 1 from transcript cassava4.1_001226m (locus cassava4.1_001226m.g) derived from phytozome v7.0 (chr-ID scaffold11998; pos 1182405 to 1185261)
ctaacggggttgtgctctctgatcaaggtgtgcttaatttattccctgttgagttctaattatattagttttatctacggcttattgttgttagctctttaacttttagcatcaggagattttctaaagtaatcgtagtagatatgcaagatttttgcatattcttaaaaattactaatttaatacattaagtcagtaggttttagtacttgtaaatatcttaaaaactttttcatttcttaaataaaaaatcatagattaaaaatttttaaaaatcttacactgagaaccttattttactaaactcttgccaaactcagtgttatggacttgagcttccaaaggatgtaaatgagcctagtccctcacaagttgctcaagctcggcttaactctttttcttaactgtcactaatgctctgtttgtttaagttgacaagcccactcttttataggttcatagagtaggcttgtgaactaactcaggttaatagacttatgagcctagttattcataggttcatggctaagcttgttgataatatacaagagatggctcatttattagctcattacaagcttataagcttagctcatgaggttgaaatttagcttattaattattatattttagtgttataaatatattaatttggtttgtgattattctataaataatatattaacaattattattatctaaaattatgatataattaagttaaatgaaatataattatgaaactaaaagtataattaactcaaaggttcatgacattaattgggtcataattatttcaaataaagttagaaagttagatgatatgcatctttctcaacttttaatcatatagaaaaacatcatacgtgcattatataatatacattctaattctcagtttctagttaaaggctatataattaatgtcttgctgtaagatatattatataagatacttaacaaataacaacttataaatatgcaattagttttgttataattaaactgtatataaacacattatataaggtattatgtgtgtatagactacaaagagttaaatactagaagtgattttaaaattaaatgtgtaatacacgcacatatatttctactgcttattttgacaactttacatgcactgaaacaatgatattcaatttttctttcactaaaatttacatgtaactaaaggtatgtaattagtatattattcctaatcattgaattaagaagtgttaatatgtagaagttatgattaatcatctatacaataataaatttcagtcaaaataattaatatacatgtatcatgtgctaataaaaaaaagaaactaaatatttatctaggaaaaaaattcaaaaagacctctagaaggggggaaaaagaaaagaagaaaatagtgcatagccatgaattgaacctaggacctcacttgggtgaagagcattgctaaccgagctataagtgtattggtgattttagaaaggactttttatgtatagcaacatatttttgaaaccttgaaatatgatttttttataaaaaaaatcaaatctattcctcaaaaattcatatgcattataataaattttaattagtacattattaggttttataattttaggttatttatttaagatgaaaatttaaatttatttattgattatgaaataaagtacaagctagaaaaaaaaaaagaacaagtgattggagacatcgttccacatcctttgaatgtaaatggggttggggtggctgggtgctaactttataaaaagggaaactccctttccttctttgtgaagatggcaatgaccattatgtgaggcctatttgggatccactatatttgaattttttaatttaaatatttaatattttaaatgatctaagttcgagtttgactcatttatattataaacaagttttaagtaaaacttgagtttattaaatttgaaatgatctgagctcaagctgtatgttaaaactcgagtcaagctcgagctcaagaaaaaattgacaagccgagctagagttatttaaagctccgtttttgacacccctacctctctcacttgttccattctgatatttggatttcattcaagaacttgaatttacgagcttggtattttaccatgttatgtagaaaaaaatcattcatcttgaagtctatccttccagtttttaaaatgtcaactgttcattgatttccttatcattagataatagattctgtatgctcaacgtcaaggtgaaagactattgaatgtgactttattcacttgggatgtttatatatctacatgagatttctatatgcattggatagtaattcctttctaattgtcattttatcagtataaatttttcacatactagtgcattaaggattgaatccttaacatatcaggaagagaggaaatgggagaggcatagaagaaatggtagagcagggaaggggagaattgcagagtagatagaattagagagagaagagaggaggagaaaactagagagagaagtactttaatttttggatgattctacagttataatgctccctatgtatagtttctcctcctatacattaccacagcccctattctctttattatcataacatagtgttgtgattcttaggattttgctgcttggatatctgctgtttaacctgcaacccaaaccccgtgcatgtcatgtcatatatcatttcgtagttgtggtattcattaccttttttttgttttctattttttggtttttggtggttttctatctgtaatccttggatgtgaaggtagtgcgtttactccttctcttacaggtcttcctgccattgtggcaagaaac

SEQ ID NO: 6190 - DNA, 2961 bp, Manihot esculenta
  Intron number 3 from transcript cassava4.1_008499m (locus cassava4.1_008499m.g) derived from phytozome v7.0 (chr-ID scaffold04246; pos 211460 to 214420 reverse strand)
caattattcaaggtatgcaaactattctcataatttttggagattcacttggtctatggctgtacattaaaaaccaaaagattgggtttgtgggcatagttgtcaaatcaagattcgaattgtgtatcaaaatgtttattttaggaattgagaatcgaattgtatcgtaagatttgctaagacttccaaaaatcaattaaaaataatatatgttccaaaaataagtaaaaatttatcataataacatattttgataaatatataatacttatttatttaattagaaatattcttcataatagaataatatgtatgcattattttatatattttttgttataaattataaactttggaattgtagacaatagttgtcattatacatatactgaaactctcatttaaattggatcaaataattaaatagtaaaaaagatatcaaattagaatattataaatataaattgttataacttaactataattagttaagtaaagtaacttaaaaagaaaagaagacaaagacaatgaggggaaaagagtggttggttaaagaaaaatagctaagaggaagttttatatacacttctttatagcaaaatgaataaggtcttaaatttagaaaatataagggttaacaaactcttttagataattaattgtatcgggtgaaaagtactttgattcaccttattcactatcaactttttgatttagtcacaattcatgcaccctattcatgtaccctatagatttgactaggatatagaattcaagtcgagaatcataagattagagtaaagaatcataagattcaggcatatttaagattcacctatagatttgaatcaatttgttggaaaatagattcgaattgagaatcgcaagattttgacaacaatggaatcaatacacttgttttgacaagatgaaggtaaataagccacctttgtttcaattgctaaaaggctcttttttttctttcgctagcttgaaggcaaaattcactatttgcttaaatgataacaatggaattgattaaaaaaatttatgaaatgtatttgctttttcgtggaatcaccagcactacaattgtttctatcatttctgtttccacaagtattattgtggttgctaacattaaagagttcttttttcctttttctttttttttttttttaagaagcgaaaactaaccaaattgcacataattttattgaaattgggagcaaatgatttttttcttttccttctctgggcgatgacacatcaactgttatgtttcctgggttttatattgttggtgttctccacatatcagggaagaccataaacattatatggtgcatggatattcatagtttttcctttctgtaaatttaatgagagaagaaatggaggtgttcagattctcttatcttcatgttattcactccttaatacgaaaattcaggctagaaggtttacctacatcaaggatgagatttatcatttattttcttattctagaagagaaattctggactacagatgaactcactctttgttgaaatatatgggaagatcaagtgttgtatcgagttgaaagctggcacaaattagtttgtagtatctctaactttaatcctctgagtcatttacttttttgggtgtggtcctcctactcctaaattttgtttgatcaagtagggtgctttttttttttggggcaccaatttgacaaacaaaaatttcatttattgtcacaatccataaatatattttggacaaaaaaagtggagaggggaaattttatttttattacactaagtaaatgtaaaattttattttatcaagcaataaaatattaattttgactaatttaggtcaaacttaattagttgactaattcaaatagtaaggaattcaaaccttttcaatttgtcatttatagccaattttaaagttttatttatcaacctctacgtctgtagccttcaattcttagttttgacttcaagctataactaaaataaatatctcaaattaggctaaattgataaaaattaaaaggattgaccataattgataaataatgagaaagatgttgcttcttttttcccctttggccaatttaaaagttccttttagtgtagtgaacaaaatacaagcctatcgtccactttttctattatgaggccaagaagaaacttttacttgtaagaacatatttgacatgattccaggtatgttgacatataatatcaatggacatcgatttatatttgatattggtgaagagggaaaaaatcttccatcattaaaggtgtgcctcagatgcaaagcacaaagcatgggggttggggggtttaatttcaccctaaatatttctgagcttctatattatcattaaattcctgttacctattatcatcaatttgcaggttagcttatggctaaaattcactcactgtctcacaacttagatgagtgtaatttgaccatccctcgatgtcagtttgtattataaatccctaaatttcaaatttaatttatcaatatattgtaatacaaaatgtgccaactaataatttaattggatatactattttgctaacgtagaagcagcaaaaatcatacataatatctatctgttataaagaagaaagtaatatatacttaattagagtttgaatatcatcaattgaaataaaataatagttatttgagattttttgcttatattaaaatacaatgaagcacttaagataattggaggtgaatctactgaatattaatgtgaaatcaaattagaagtgaaaaggatattatcaatttttcttcagaaaaccaatagtaattgtatgaatttttagtgagataaatgaataaataaatttgagtgattgaattaatcttaacatcaatttttgtgttctaagaacaggtcccagaggagtcaaggttgatatttcgtgcctc

SEQ ID NO: 6191 - DNA, 1168 bp, Manihot esculenta
  Intron number 4 from transcript cassava4.1_011250m (locus cassava4.1_009974m.g) derived from phytozome v7.0 (chr-ID scaffold02994; pos 309536 to 310703)
aacgtggtaatctactgaaagctcttggtacacaggtttgaccaaaatattgtttctttctagaatataaatttcaatggattaggttctatgtgtcttgcaatgtagcaagcacttgcacatattttaattgtcattttatacaagtttttatactgaatctacaagcattaaaacatataaacttcatttcttaattgaattgtgctccagcttttggaagctgaaacttgccatgcttgcaaagattgttaggctggaagtttttactacaaccaagggagagcttagcataaattcattgggattttctccatttttagataattttcttattacagtggaaactacaaaagttgctgtatcattctagatcattgttcagagcatcaattttgtgaaaaggtctttagacacctaggaatttttgccaaactcctaggtccttctaccagggaagaaatgacattctagttcattgtctaagacacctagcatgtttctagttcattctatattattgctccattagtaacaaggaattgtattcactcataattgtgcctttcttcttaagttcttcaattgtagaagaacaaagattgtattggtggtgaaagataggaggaaaatccccctccctccctccctccctccctctctctctctcttatttaaaaaaaaatgtagaaaaagcgcctaagagaaggaggtgcaaacctggtgcatggaaactaatgcctaattaagacacctaggaatcaacaaacatagagataggcctgagagattggtctttggtggaaaaacaagatttctcatgttttgagttttagctaaatgttttaccatgttttgcatattgagttgattgacaacaaatgaaattatgtagaataacttgttcatctgttgttctctgttacttagtcatagtattttccccatagaatttaatcactctttgtatttcatttcaacctagtttaggttcttttccttttgtgttaaattctgattattttgcttgggataatgtttatttgacttgattgttaatatctactcactatctttgttactgtaatggatggatggacctttcaattagatgaatgataaagtcttgaaatgttttgattgttaggttgctgagccattgagagca

SEQ ID NO: 6192 - DNA, 1591 bp, Manihot esculenta
  Intron number 1 from transcript cassava4.1_016354m (locus cassava4.1_016354m.g) derived from phytozome v7.0 (chr-ID scaffold12794; pos 356630 to 358220 reverse strand)
cctctctgctttacaagctgccacttacaactctggtaatcgcttcatttctcgaaaatgctttgatcttttttgcttgttttaaagttctgttttgttttttgagaagccagaatctatttgtgaggttctgtaatctggttgtgttttgagtgaatctttgtctagttggcatgtctgaagagctttcttttattattattattattttctttaaaaaattttatatataataaattgtctgggataatcttttgtttttatttttttttgagggatttcaggagaatcatgggtttgggaagtagtgtcgtattttttcttttttgtgctctggtgttgttgtatgagctagagcgagtttgagtctcatctatctcagattagtacacaagttgagacaaaactaattacttggtagaagcatgtgattagactcgtagattctccttgacggctgtggaattttgttactgggtctttggaatcttgggaatttttatttgatccgttaattatatactggaattgttaagggtctttcagattgatttaaatatgtcaaagctccagaggactttattctatgaacttgatgcattaaagttgttgtttggttttccaaggagaaaagatcaaagctttcaaatgcaaaatagaaactttcaagccaaaatcaaaccttttgatcaagtcatctggttccttgaatttaaacaggacagtgatgtaacttattttgtgttgtatattatgctaatagcgaagaagaattttaccatgatgaatcagaagatgaaataagttttgggaaggtgggaggtctaacatttcgcttgagtagcctagtcagcgtgcattaaaaggatgaatttcagggaattttgagtagaagctttagaaggggaatagttccataagagattcagtttgaattggttcatcagtcttcatagattcagtttatttaaatatttactgctcatttgagtactttttctaggattgtttattgaaggttcagaggttgagatcattaaggttttagtttaaagcaaagtggttgaagtttatggctatttactttttagagatttgcttggttagagcatacccatgatttgtggatttataagtatctgcatgagctcattcctccgactagaattacttgagatatatttgtagatactattacctttatgggaaattcttgtttagatcctgtctacattgacctaaagtgcagttatatagatcccattttcttttatgtcggtccaatgttattgtcttttagattcatgtagactaggttgaagtaagtattttccgattagtgcaacaattgttttgaaaaggatattttccttctccttttttctttcacttccattcttttgatttgcatttatagaattggtgtttagtggaatcctagctgtaccttgctttcgaaaccattgtatactctttttgtccttactggtcacaactactgctagattgatgaatatgtcattcatataactctttcttttttgcttccatccattttgtaatctgtcaacagataatcatttggcaattg

SEQ ID NO: 6193 - DNA, 2423 bp, Manihot esculenta
  Intron number 7 from transcript cassava4.1_005448m (locus cassava4.1_005449m.g) derived from phytozome v7.0 (chr-ID scaffold12865; pos 664905 to 667327)
tgctattgagcgtgcaattcggagatcctttcttggtattgttcaattgtacctttttgcgcttagaatattcaattcttattctttagattttttgttttgtttgacatttgttggctacacagcattttctgatagggcatcaagatagccaatatgagtttgtgagttgtgacattttatcgaaaactagtgacgacttgaatgaataggagaattgtataataatttaattttctttttttaagaaagtatgactccgctctaagcaaccttgtcaattagtaacttctcaagagtacaacacttttaagaaatgttgctgagaagaccttatctcttaggagaacctcattaggtgtgatccaccctaaagaaagtttgcatcttactgttagcagtaacccactcaagtgcacctccttaaggaactcctttacctaatttttaggctaaattgagaattgcttatgtttgtcttcttatttagtgtgttggtttaatattttaatattttagggttgctaaccataatataattaaataaggctagattttctattattcagagctttgattattatgatattattgataattgagaattaataaagtttagataatttatttctcttcctaaaatcttagaatttgtttctattgatctttttattttcctgttctacatccctaactaccctgaggcattgttaaaacaaaaacttccagtctttattcttgtgtatgatgaggtcctacaaattggctttgtcatgtatcttttccttatgtgtgtccctggggataccctagcatccgcactggcctagttctatgtgttttttttatttttttgagttgttccctcttagcatcaacttatcaatcattttttcagtccccattcaaatatgcacctttttttttcagttctaagtttgtatataaccagtaccaaatgtcatacaatagttttaatatctgaactaccctaataaaagaaatctagacctcaggctagattatcaatccttttttatcttcagcgagcaatgcctctgtgcaacctgtgacaatattttctagtgttaactgttgctaaagcctttttgctgaagttattacttagcagagtaagaacaaaggattgaaagaaaaagcaaacataaaaatttattctcccataagacttatcaagtgggatttaggaagttctctttcccataagacttacagctatttggaagtgtgcatcacaacagacatggtggagacaagtaaaactttcggatgttatgctctataagtggaggaagtttgttgtagttttgatttttcttgttattcttcttcatatggcacaggctttcgggaacgttttttttataatggtctcagatgtagggagattttcataacttttggcaggaggaaagaaagaggcttcaagattattttgtcattttcttctgggacagtgtatctgtctttaagaatcagagtttcctctatgacaattacaggacaatcagttttgggggtttcattgtgggttttggctttgtgggtctgcaagggtgtgtttaactatattcatgactagggtgggattcctttagttttgttctgttcggttcttttcttcttttatttttgcccataaagttgtattggtctcctatttccatagtaaaatcttgttctgtcttaaaaaataaaggaatctgcttgggaaatagaaaaaaaaaagaagagaactgcaacctcataaggatttgaactaccaacgcgtggaattcagataccctgcagacatatgtatttcgtgatatttcccatgagaagtgtgaacttattacaggacatgttaaagtaggaggaattttggaatgcaaaaaatcattaggttgaaaatggtttgtttaagtgcctgtctgtttaggtggagaggctcaggtttgttgaagttgtggcagatagcttattagtagttcattgttggtgaagctatgaaaagaaatgagatggctagtgttcaatctccactgtccactccattttttcctgattttgtcgatgtaagattggttttcagcacctatactgcgtaactaaggaaacaaggatattatgtggaatgaactttttgtatctagagagtgcataggctttattattgtggcattaattatgcaaactgtttgcctttcagtcagtctatgaaattaatatctgagtaccatgtttctttctggagctgctgtacatttttttgtgatagggtgtttatttagagctagtacctagatattgtctccagttcacaaccttttttattctcttctgctatatgctaatttaacagaatttttgaggtttcttccggaatcttctcttattttatttttatagtgtctgcggac

SEQ ID NO: 6194 - DNA, 1557 bp, Manihot esculenta; identical to SEQ ID NO: 5593
  Intron number 1 from transcript cassava4.1_016387m (locus cassava4.1_016324m.g) derived from phytozome v7.0 (chr-ID scaffold09434; pos 147580 to 149136)

SEQ ID NO: 6195 - DNA, 863 bp, Manihot esculenta
  Intron number 1 from transcript cassava4.1_012647m (locus cassava4.1_012647m.g) derived from phytozome v7.0 (chr-ID scaffold09180; pos 397096 to 397958 reverse strand)
tcctgatagtatcgataagctgagggcggttttgggtatgtgattcctttatccgtttctgtttgatggtgggttagattggtgagagggttttaatcaatttgatttaagtgttaaaaatgtcatttgcttaaaaggggcagacattagaatttaataatatggctgcattttaggattggtttatgggtttaacttgtggcaattctgattaagcaagttattcataccataaaatgaaaatggttcattgttagttttagtttttatccgtatatctgttagtattcaacattgacatgattgttcttgatggagacttacattttacatgtaaagattgccatagtaaaattaagattttttaagcaattaggccttacattaccttttccattagcagccagttgtcttgttaatcatggtttattttaactatgtttttctatcggggaatgggacattgatatcttcgtattttgtctctttaatagtaaatttgtgtattttttaatcttgttgttgtactaatttattatatagaaactggtgtttatttgtaccattgttcatcttgtgtgttctccttggatcaaagttatgctatttacttggtgactttgctttcatttattctgccagttataagttttattttaatagcaagtggcgattatatatatgtgtttatggatgtgagatatatttgaaattgattgtttattctgtttgtaattgattgatattagagctcagagcacagttaaaaatgcaaatcaaatcttggattctgattctgctagattaatcttgtttctcatttactttgtagttgattattaatggctgtttcctttttaaag

SEQ ID NO: 6196 - DNA, 2145 bp, Manihot esculenta
  Intron number 7 from transcript cassava4.1_004398m (locus cassava4.1_004398m.g) derived from phytozome v7.0 (chr-ID scaffold03332; pos 962064 to 964208)
agagaacctgatcggtgtcttctggttaaccataggtaactataaacacatatttgaggtttagcagtagctaagtattgttgagaatagcaatcaatgaaccttggtagacaattacaacttaaaacatcctcgtacactaagctgtctaggtgcaaacattccctgtagcaaaattgaattgttttctggtaacctcaagaaaggtccaagattacatctctgtctcggtccaagctaagccaatccacaggatttctcacttagttttccatctattgtctattaattattgcaatttgttatgtagatctccatatcaatcggttctcacatgaagccttcccctggagttaattcagcaacattcatactccttgccattaataatagtagagttacaagaatcaggttgaacaattgaattgaatatgtggacctacaaggattgaactacaatagaggtgcagctatccaaattcccttgctgactaaatgatggcaaacaagtatctatatttgaagcttgccaggaatagcttccgaatgtagtaaagcagaaaatgaaggatcaaatgctaaaccaggaagctagatggtagcaacaaataggactccagcttctaataaaactgtccaagaatcttccttcaggattaggccaatgtagctctttcttagaagactggcatgaatcagaacgtaaatgagagaactgttaagagggaaatgggcattgagattgttgctgccgtaaacccggctgaggctttagaattgtcggtgggtagagttggagtcatcccgtttccaggattcagtccagcagtaccacctccatatgccggcgtagtagttgtcggcatttgtgaatttgggtttgtcgttgttgtgtttgtagttgcccctccagcagttctggaaatttgcatgatttaagtatcgtaagcaactttcaactagtaaatgcacacatagtacacccaacaaaaaaaaatgtcagacaacattctgcatacagaatatttaattagcacagcacagataatcaagaccagcaggatagacgctatcttaggtatatgtcagaagatcataaacagaagaaaaattgtccaacatgggcataagatactttattcatttaagtacaattactgcagtagcataagtgcacaaagcacgatctacgaaattagttaaaaaatgtgtaaacagaatttaatacctgctattgctaatatgacaccaggaaatgtatcaaggtatagaacaaagacattaggttttgaggacagattactagttttaggacccatgtgaaattgtcgccaagaatggtcctaacataatattctttggaatgcaatcccatagcatgttggaacattttgaataatcataccacctgctttttccagggaacaaattgtaatagcaatataccttgcccttctattcatgaaatcagaaacaggtcttgataatcaaggatcaggctgaatgatgaacagcagtagtttatatcaggctgaatgttagctcttctgtttctaaaatgcatatcaagtttgaaaagcatcccaaaaagaaaaaagaaaaaaaaagcacataagcatctttggcaagccttctcagccccagccagtcgagtagcactggcaaagatgcatttcacgatgacttttaggaccaaccttagacctggatcctatacttacaagcacccttacagctcacatttagccttaaagttttcctttctgatctccaattttatcccatgcgattgcaatgaatcatgtccaaaatcaatataactgtcgtattaactagcataagaggtaactggagctcatgaccggagcaccaaagctccaggagattttctcatgacccaaaaaaagaaaatggttttatttgatagttttggtttgatcttcgattattttttttgggcccctattaatactatcagcagaggtaaaaggctaaaagggtaaatctacctccgatctatatatcgaatatcaaatatatcaaatttcaatttttggtaggagtaaatttgaaaaaaagtataaaatttggtatttttaaactctgccagggcaaatttcgtctttttgcaaggagtaaaaggtg

SEQ ID NO: 6197 - DNA, 3265 bp, Manihot esculenta
  Intron number 1 from transcript cassava4.1_016940m (locus cassava4.1_016940m.g) derived from phytozome v7.0 (chr-ID scaffold04165; pos 15349 to 18613 reverse strand)
attgctactcacaaattgagatttcgtcactgcaggttagtggcttgcgattgttaattttattttatttatattttgacaatctctcaactcttttagccaatgtaggatgtaatgcctttatgcttagttttatatataaaaacaatttgcatttaagatattgtgggctaagataaatacggagaagagaatgaaattgcatttaaggagctaattctgctcctgcatacccaacttgaattgctgttgaaatttagagcaattgtactgtttttgagaaggtatggttagcttgcaatttattgataattaataggaagtttttgtttttaactatgagttttgtgttttcaacaatgcatgaaagtgaaacacatgaaccattagccaatgatctactgagaaccagtttgttagaaattattattttgtttcacttgcatgaaattgcattgcgtgggcttatgttttttcttgtaatttttttatttggtagtatatgctttcaatcatgagaattaggtagtttctgatattgtctatttattaatatgatgttaatttttagtcactgttgtatgaatgaatgcagaaatttgtgttttgagattttagcatttcaggcttagctattgaattaaaaaaaaaatgtttaaggcatggttgtagacatgtgttagagatccttaaatctgcgattgaacataatgtgaccatgctgagttgagttgatatagtgtactattttgaactcaatttgtttcaaaagcttaaggctccattcttatttattaaccaatacttggttgagtattattcttcatatttgggcataaaactagaactctgcactgttgtttcataagttacttgacagtccacttgattacgatattttgtgagtcaagtctgagttgcttggttcatttacacccgggtttttgggaggtagccatttaattgaaggttttcttagaaggccagtaaatataccgctctgatgattggggttttgcatatcactatattggtttaagagctgtatgataaaataacagcagcaatttgataacatggttgaagtttatgctcttaggcgtaacaagaatatttggaatctgacctagagttagtggagataaacttttcttgactaacagttgttttcgaattgtaaaaattcagggtgcctttccaaaaataaaacttaggctgatgcaactggaaaagggttaaagttgtaggtccttttcatattttggaacgtaaagttcttattgtttgcaggtattaattacttacgcagacatatttgatgcacttttgtgcggttgtaccaagtttagaagtggattagtttgagcgtgatcatgtggattagtttatgccaagtttatcggtctgatatggattagtttgagtatgaccatgatgaataccttcagaataaaatatgttcttggttgagacaagcatgcaaattagatcacatgccagtcctgttttagatcatatgcaaattaacagtcatgcacttgatctttagatcaagtttctgtacattacggctgaaataatattatcagtaaagtttcagacacattcaccattgaagtaaatgttcctacgttaatatgcagcagatatgtcttttttttttgaccaagcaaaattgacttgtatgtgtactcccaaagctttacctctataattatattccaataactgaataaattttatcctggaaaagaccagtcaatctgtgtgttctcagtattaatttttactgtgcaatgcagctttaaagtcaacaaaactagttctttcatcatatcatgggtacttctactttctttttttgactaaatgttaaaaatcatcgtcaaggattttctgcatcatcaaataatggcaatggtttcgcctttctgtctgcagaattaaatatgtaagcatattcacatcaaatcctgtctgtttattaatgtttgaattatcatcctacagctttagattacttttttaacatgagacccatgttcttgataaaaagctgcaaaatttgtcgaggaaaaattgaaaaaaaaaagattttgaaagaagatttcaatattgcttcaaagcttatgtattagcgaaagtgtttaaacatgaataataaattcatcacggatctaacagaagaatcattaaaaagtattacatcatactctttattttacaaatagttataggtttcacactataaatgatgttgctaaccagtccacgatgaatagtgatatttgtattcaaggattagcgattattccaattactattatggtattttgactgaagtggtttggctagagtaccttgtattaccaataaagagaatactcttcaaatgcaagttgtttgatttaactccaaatatcgatatggagtctcacaaatagtacaacttagtagatatcaataattggtagagattaaataaatatgaattgttaatgaaacatccttatactgccgggagaagggacaaggcgaattggtgtgtgatatgctaagtgaagccaaaattcactgccttggtgcttaagttaaacttgacaaactaaatgttggaccaaacatttcaatctatttcttcaaattgatataaatatagaagaacaagttaaaaatttagattattcctttaatgaatcctagaatattgaagctattgaataagagaaacaaccaggtgaatcatatctaagttcttttaatggaaatcgaggatgaagatggacttgtaaaatatgacgatgatagcaatgtatttcttttatgaaatttgcaattattgatattttttcaatagaatttttgttatgaaatttgcaactattgattttttttcaatagaaaatatcattgtgttggaatttaattaaacataaaatgcaatttgatttttgtttaccttgtcctactaattgacatttaaatgtaacttgatttaacatactatttttaattaaaacgtgatgtgtagatttgagaaaatgagatacttgtagaatgtactatccatgttgagttgttgataataagtatggggatgttcattttgagaggattccttgtccaactacctatacattcgggataattcttcttaaaattttacttgccttttaattacatatatggttagaaacgggctcgttttagtaaatacccataatttgagtgcaggaactcgttcaacatcctaagggagcattag

SEQ ID NO: 6198 - DNA, 2571 bp, Manihot esculenta
  Intron number 4 from transcript cassava4.1_009982m (locus cassava4.1_009982m.g) derived from phytozome v7.0 (chr-ID scaffold07991; pos 108921 to 111491 reverse strand)
ttgaaaaagctgcaatacctgaggaaagacggcaggtatattttaaacttttgcatttatatctatgtccacttcttttattgaattgcttgactggggtaatgcctacatgccatattagttttcttcgtcttctcttaagttttgcgtttgatatcatggattggttttacatgcatttgctcacattcatagatagataggtggctgtgcaagtgattgttaagtccagctggaaaatagaatggcaacataaaagtgtaattttattagtatagctacttgatactgtggatgagcttcatattgtcaacttgtatgcttcctgaagctgtgcctcaaatttgggtcgtctagtagttttatcaatcttaagttcttaaccttagtgctattttgactatgactgaggaaactgctatggttactggtatatatatttttttgcgcagtttatagaaaatgattgatattttttattctaaactgtttaaagtattggctataacatacgtgcttatctgcataatccatcagtctacctctagtgcacacacttacattgctcgctgaaacatgcttataagaaaaatagttgaaatcatgaaaatttgttgaatacacttgttcaaaattgtttgacatgaagtgtagaaaaggggaaccaaacaggcctgatagtaatttcaaatagagacttctgaattaaaatgtgagattttgtcaacaagggccatatgctctaattaagtgcatatggaatgtgccttttttactgtacttttatagcacccgttgctagtcaaatcttgacaatcatatttcaaactagtcttcgctcctcacaacttctcaaatttgtttgtttccaatcaattttttccaaggatatatgcagtaggaaatttatagaagttcaacctgaagattataaataatttaaattggactatttacatgaaaaatccaaaacttttcactatttttgcaatttaaccaaaacttcaaaagttgataaaattttgtaaaattgtaaactttgttacaatcatatctagcttaaaacttgaatcggggaggatgtgtcttgctgacgtggcaaggcaagatgatgtaagttattttattatactcatatactacgtagataaatgttattgatacaaaaaattcaaaacttttaactattttgcaatttcatttaaaactttaaaaattgatataattcaactgaaaatctctaaatttatcctctttcgctactaaatttataaaaccctattattatacttcattttcgtctgtttggtgtaagaaactataatagaatttcttttctattttttaattccggttctcttaactcttttggattttaatcatgcctactcttaatgcaatgtttgtgcttgtatctttaagcgctggcttatactattaaacaataacagaagatgaataacacaactataaaaagtaaaactacaatatctattttttattatattaacatggtttcttataatgaatatagcaaaatttattatgatggacacctagtaaggtatttagaatgtaagaaactaataaatacgagacttgtttgcaatttttgttggaattagtggcaaatagaaagaagttaaagttgtgattttctacaccaggccaaacggagatgaagaaaataaatttatagatttttagttgaattacattactttttaaagttttggattaaattacaaaatagctaaaaaatttgaattttttttattaataatatttatttacatggcatgagtatagtaaagtaatacacgtcatcttgccacatcattgaaatacattctcctcaattcaagttttaaactttaatataattgcaataaaatttacaattttagataattttatcaatttttaaagttttggattaaattgcaaaataatgaaaaattttaaatttttcatataaataggccatttaaattttgtaaaactaaaaactaagttcagttcttattgaaataaaaacgtgtgtattttgaaatgagttttctaagaaattcaacactttcaagttaaagatctttctaaacaaagcataatattgattgtagcttcatacatccttttaattttaacataaatagttttacagcatactcttaaggaacttttttcacttaaaaaaaacatagttgcatgctccttctctgaccacatattataataaaagcttttaatagtttcatgttttcctttctataagaagtgctgctactgtaagttagcatggagaattcatgacttgtttgttttgatatgtgtgtgtgtgtgtggttttcatttcccttgaaacttctccagaccttgaaatataaattatatttttcttttgcatgaaatcatcaatgactgtatccttcaactgtatcttatttcctacagtggaatgatgcctacttaaattaacatgcacacttctaatagcatattgtactatctttttttctgctatatcttcttctagggacttttaagaagattacactccttgtactctgc

SEQ ID NO: 6199 - DNA, 1248 bp, Manihot esculenta
  Intron number 5 from transcript cassava4.1_003058m (locus cassava4.1_003058m.g) derived from phytozome v7.0 (chr-ID scaffold06918; pos 62468 to 63715)
ctggttggtgttaaatactcttggttcagtagaatgtgcagtcacatgttgttttttttttttttttttaaagaaattatatgtaaaccattatgtggtcatggatgtctgtttgtgacttttttttggcttggagttgatcatttatgtggtatctagagatatatatattttgtatatatgtttgtgcatttgtagaaaggtttggtccctttcatctcctttttttacttctatcttcctcggtgagatctttgcgcatgacatattgcaacatatgctataaaacctaagttatttggtttttgttggtctctcgctttagttgtaggaagaagtttaaattgggattctgagacttgcaatgtaggacagctccgatgctcagtttatgctgaaagttctatgaagcattgattctgcagaagctctcatagaattggaggaaatgcaatgttcaactcagtgtcatactttatttggattagatagtttattgagctgctgccaaaggtcccatgttagcaagtttgggtttgaagattatggggcttgagttgatgaaccatgttgttgcatcttgatgattgactaggaggatttggagggaaaaagaaaactagttaaaagcttctagaatacaggaaacaagcaaaggaggagatgcatagacaaacataacatcactcaagtggttcaagaattgttaggcattgcgcgtaagatgtatgaactagtatcacttgcaaggttattaggtatcatatcttaaagaagcatgcattacagataccattcataaagatcccttcacaaaaagagcacagctgaatttcttgctgaaaatccccatttgctccagtcttactttagagtttgcttgaactgtctcatggagtctgctatagaactttctaaagcccctttgactagtatcaataaattgccactaaattgcttttaggtcttcgtagttttgcctaattaggaagggaaattatgcagcaggaaaatttcattttcttttcatattaaatattcttatccctttttgtttttctggggagaggagaagcttcaacttctcagtattttgtatctttacgttaacatggtaataattgatatttttggtcaatagtttgcttcgtataaattgttatttttgttcctctctgtcattttctttctggtcagacattctcagtaactctcagaaagggacttatagttgcctttcaggtttcg

SEQ ID NO: 6200 - DNA, 998 bp, Manihot esculenta; identical to SEQ ID NO: 5940
  Intron number 1 from transcript cassava4.1_013057m (locus cassava4.1_013064m.g) derived from phytozome v7.0 (chr-ID scaffold00935; pos 97482 to 98479)

SEQ ID NO: 6201 - DNA, 3189 bp, Manihot esculenta
  Intron number 7 from transcript cassava4.1_011028m (locus cassava4.1_011028m.g) derived from phytozome v7.0 (chr-ID scaffold03834; pos 116124 to 119312 reverse strand)
gtgtctctgacgaagtggtattgttctgtctgattctggaaataagcattctattttaatattgataaaatcatagcttattgttatcctgtgaatgtattctttgcatgatccactcaatataaggatacaagtacatgtaccttcatgtgcgtggatgtggagtcggaattggaaatttggaattgctccatgccagaatatgagaacctggaagctaaatttagtatcacgagcatttttttttggtatcttcatttggttagatatttaaacctagttgacgaatttttgtaggttctgacattcacataaacttcaaaaagaattcagtagaaattgaaagtacaaatgtgaattaaattttaggtagaaggagatggaataagttaaactaatgtttcatgatcaacgtaacattttgaaagaaagtgatattagatagggaaaatgacattttcatccatacattatgtcataattaagacttcattccatgtgttttgagaatagatgattaggtccctaagtttgcttttgttaacattaggttcctccggccactttaatgtctaatggctgtttattcagcaaacaaagctgatatacccgtaatgagatgagggaaaataagggaaatttgattctttttctatttctctctcttgctattgcaaactctccttcattttttgtgctgctgaaaatggccataaaccagtgaccctcccaaaatcacatcacctctagaccaccgccataatacttgtggatcctcctcacctgagttgcttcttcttgtcaagacaggagaaaacctcatccaggctcgatcatctcctcccacggcaacatgtaggctctttcagatgtgtctcctctctccttctccctgttttttctttcccgatcaattccatgagttcttcctctccctggagacatttctcaatcttgaaatgggtaggctgcaatgggatgtttatcttctttcaattctaaggctgtcgtttgaaactggcattctaggtctattttctaacaattttgacttcccttgaacttcgggggttaaacaatggaatgcaaaaaggggaaggtggctcatggaagtaggaaagggggaggcgtctcatggcagtaccagagttggccatggagttgtagatttgtttggtttggagttgtaatttgggtttatggagttgtcatcttccccttaattttgggggtaaacaatcaagtgccaaaaggggaaggtgggtgaggagttaagagagggggaggtatctcatgtcagttgcagtgttggctatatggagttgcaaattttggtttgagttggaattgcaattttggtgtatttgatgcttataagataggaaaaatgtgtttgccaaagcaaaacttgccccatctgaatttttttaagcttgctatctctctcagttagctttcttcttcaatttttttcagtttttgttttgtttacaagtatttatttttgttatgcaatatataatgagattgcaatggatttttgttcatggattagattatgattgattggttcctttcaaattattgcatttgttgtggttcctaattgtattgatacataattttttttgtctttggatccagaggtgtctacgttcggagggagggaggccattgtttgcttgattgtcctgattccctctttatcgtttatttgctctgttttttatttggtaaaattaaaggaattgaatttggataagcaaatgagagagagagagagagagagagagagagaggtaaaaggagcaaggagatggagatagaggggaggagagacaaaaatgggatggagggagatagactggagaggggagagggacagaaggataagggtattataggttagttccattataactgaccagttctcccaaatctacaaatcccattcatgacgcttcattttaatcattacaaaaacataagcttccatactacagaatcaaattacagaatttacatttacaatctccataaggattttaatcagataattcctaaatgaccataaaatcaaaccaaaaaacatgtgaaacaagatttgttatgggtcgatgcaatgtatatgaacttcacgaagttaaatggtggaatattcaacattaattagctgggtgaggattactcgagcttatgtctgaagtgtacacaaaattaacttgggatggagggagatagactggagaggggagagggacagaaggatgagggtattataggttagttccattataactgaccagttctcccaaatctacaaatcccattcatgacgcttcattttactcattacaaaaacataagcttccattctacagaatcaaattacaaaatttacatttacaatctccataaggattttaatcagataattcctaaatgaccataaaatcaaacaaaaaaaaaagtgaaacaagatttgttatgggtcgatgcaatgtatatgaacttcacgaagttaaatggtggaatattcaacattaaatagctgggtgaggattactcgagcttatgtctgaagtgtatacaaaattaacttgttggaatcctgattcattttgaattttccagatttaatattatgctactgcctgttgttactatctgtaatcaataatcataattttgcttgggaaaatgaccacaaatgtttgcatccatgtttctacctcaaggagtttagctattttgagtttgattttttataggattcttccttagataattgttgccaaccattttgttctgaactgtgtttatgccattgtattgttaaaatatggagtctaataatatattatggactgtacaccatgccctactgtcgcagatccgccgggggtgtgtctccagggcgaatttttttgagggctattttgtctttttgtattttctttggacatataaatatataatattttcctagtgtattctgtttcaaaactcacagagaaagaaaagtctagctgttgtggacgtaatcaaattggtgaaccacgttaaatttatgttttaatttcttttcatacttattttttagattgtgtgattgttcgattctcaacacatatattctcaaatttttctgcagggtgcctacgccaatttctgttctaattagtgccg

SEQ ID NO: 6202 - DNA, 2614 bp, Manihot esculenta
  Intron number 1 from transcript cassava4.1_022502m (locus cassava4.1_022502m.g) derived from phytozome v7.0 (chr-ID scaffold03846; pos 39651 to 42264 reverse strand)
agactgtcgctgtgaagatcatatcgaaagccaaggtacaatgttatcaatttgttactttaatcgatcgtttttactcaccgttcttttcaattgatctgcgaggctctgtttattattttttcctcttatgtttagattagaaaatttatgaatcccttaaaacgtgaacttcattgtagtagatcttctctagccgcatttacaatgtagctactggtctagcactttttgactcgggttttagttagtagatgatttgcttgttatttacctgtgctttaatttgaatgaatatgatgacaagtaaccatgcaatcaagtgaaggttatatgatggtatattaatgtccttgtaaggacctatgtcactgattatttgactggtgcccattgaatgtttttacataataatagatgcactgtgataaattcttgtaactggtaagaactatagtcaattgtcccaagatactgtcaatggtttgcaaagacatcaatgatcttgatgccgttatgttactttgctgttgtgtaacgttgcaaagatactgtcaatggtttgcaaagatataagtccttgtagtggaatcgtaagtttgtgtcactttgctgtagcccttgttgcggtggacatagaaacacatttgtgatggtaagtttttaaagaatagtttttgcaaaggtatgtgtaattcatgcctgccatgtgttgcaacggtatttttaatgctctgaaaatcagttgcaagttcaattaaacttatgctgcttatggagaagcatactgaagagagtattattataagatcaaatggatgtaggcgtggttgtcttatttgacaatgatacaaagtatctgacttggacaacttgcatataaacctggaatataattgaagcctcgttgcagtatgactgaactcatgttgctctatgctgaatactcttaggtgccttctagatcttctatgtcgagtattttgtttcttttagttttagccttttgtttataaagcagaaaggtatgataagcaagcctgcaactgtcccaaaagtttgaccgagtctattgaggacattgacttgatcatcaatattttcaaggttttgtgcaaacatataacctcatatttattgcaaatagtaagattttgttcatcctttaatgatgagagattctttgataagtatagtttaggagagttaaggtgttgcatgggaactttccacttttcgtcaataggtgtatgtggtggagtatgggatgtatgagtgaaggcttctaattctacaaataggatcctattgtagatatgttattgtatttccaattggctagcatgaaagtggaatctacatagaaaataaaatattaaaacaggagtcaacaatagataaacacctgcccataattgtgtatctttcaaaatttcgaaaccagaaactaagatcaatattagttttttgctgaatgtacccattagatattcttgttaaagtactctgaatattaattatgtcagttaggaaaaatcacattaacatggagaatatacatggcatagttgttgtcattatataacataacaggtgtatcagtctaactatatctctggtgctcatctatgagaaatggcaacgtcggtctgcttgaatcaatgatgattattgagttagtgtttactgtttcagcatttgataattatatggtcaatatttttttagcctcgttattaataataaaattacacaataagtatgattttagaaagaagggatttgatatagttcgatggcatttgcattctagggcagggcatcataagtcctacttagacttatatttcaagttgtcatcaagtgactagatcttgatttttttttggaaatactttttttttataaaaagatgcaagatgatatttagggttaattaatttttaatctgaaatttccgttaatcggattgtcatttgtttagcaaaaacacttaaatgggaagtaagaaaatttggagaagatataaaatgaatttttaagaaatggaagaagtttctaagaatctgtatcaaagcacattcaaggcattacatttgagtatcataaatatcaaaagagattgggttgactgattggctggtagttgattcgtttcagatcaaaacaactgattttctacgagttattgcccaacttaatggaattacatgtggatccaaagatcacttgaagtgactaatacattccattacactgtttgattggtttctctcaataatagtaaacaaaaaacaacaatgatgattttgtgccttgtttgtagcccaaaccaaaagaacattgtgccttcaaatgatttggtaattagcaaatctgtgccctcgtattctcttaatttcattttttacctgtgctggtagttgaccctcattagtcaagtttgtgtatttaaattctatgctatgctcacaggtgttttcatccttgatagccagagttataatcacttttccagtatagtgcttgaatttatttttagcttcttcttaattattattagtggcaccattggttctgtaatatctgcgtattggtgatatctttgtggcag

SEQ ID NO: 6203 - DNA, 4476 bp, Manihot esculenta
  Intron number 6 from transcript cassava4.1_002489m (locus cassava4.1_002489m.g) derived from phytozome v7.0 (chr-ID scaffold02891; pos 93405 to 97880 reverse strand)
agggtggctcgtgaggggtattatcgttataaaaggtatactgcgcacttcaattttgtatttgatgtctgattgtcacatacagggagattaggaggttagttattttggagggattgggaaaagtagttcaaaagttagagagatagatatagatgttggaatcagttatcaagagtagtataggaacagaaacacttacctatggagattcattcaatgatcaataacaaaatatacttctctcattctctggtcctttccttctctctatcatctctttccttctgattctttctggtatgctttctttctattttctggttccagatcactattgtagatctggttccatgacagtggcatcagagccctgctcgaggatgggctttgcttccaatgaatttattggagttgcaaacaagtcaaggtcagatgctgcctttccaaattccaggtttctctttcagttcttacttttttccctctattcttattcttctatctttccttaaactctctctctatctttcccttcttctttcttgttctcctttcttcttgaaattatctgcttcttcttcctcttctcctcaatttctattttcttgattttccctcaaatccttgatttcctattcttctttctgagaatcaggtctttattctgtgcttgatttttttctcttgaagttcttgaatttataatccttggattcttttctcttctttttttaatttcttttctaatctgagcttttcttcagacaattctagggtttctgtttctatttctttctctgaattattgttccagagctgatattgttttggctgtttcagctactttttctattccattctggtttcctttttcctttaatttctttctatttgctgcaacttggtggtctttctcgaaaattattcttcttccataattgttacttccttgtttttctgattatgggagaccaatcttgggaacaacagctgctggaattacttaggacaagtcatgtgtgacattattgacagggtatttggaagatatgagaagtttgggtaaaaaatgggagaagttggaaaatagcatttgaagagaaaatgcaaattgctccagttcaaatatggaaaatgttatagaggagcaagtgcgtgttaatgatgtagaagcaaaggagttagttttagattccaataaggaaatatctgatgtatcttggagtgaggaccttgaattagaagtatcaattcaagacagaatacaactgattttaatgagagaaacgaacttaatcttgaagagaagtgggattagaagttggtttctgttcagactttaatcaatccaattcatacaattcaatttggacatcatggtgatatggattatggatatcaagctcattgatgaatacatatttgggaagcaaattttaggataggaatcttgattgtggtaattgtaactaaaaaattagagaaagaaaaaaatgaagatgaattgtaagaagatgctagagagaaaagacagaaagaagatggagagaaaggtagagaattgagagagaagatcgaccaactataacaacttttccctccaattcctagcacacaatttttgacttttctaacttctttatttgtgtactacattcctttgatgcgtaatagcatttagggtcaattcctttatccattctggagaaaataatgtttcaaggggtggggagcactggtattagaattttatgatcctcgattcaaatcttactattctagattatttcccaacaattcaattcgaatctatgagttgaatcttaaatgtacctaaatcttataattctgggtttgaatcttacgattttctacatcatctacatcctagcgattcaaatctataggatacatgaattttgagtaaatgaaaaaaattgatagctaataaggtgaatgaatatgaattgatattcaattaattattaataaagagtttgttagatattataatttcaaatttaagatattattcatttttgctataaaaaagtgtatataaaacatttccttagctatttttcttccactaaccattctttttcctctccctcttctgtcttttttttttctttttagttaatttacataacaattatagttgtcaaattatgataatatatattaataatattctaatttgctatctttttttactgtttaattatttgctcaaatttaaatgagggtttcagtatatgtataacgataactattgtctacaattctaaagtttataatttataacataaaactatataatatatatgtattattctattatgaagaatatttataattagataaataattctatatttaccaaaatgtgtcattatgatatatttttatttttagaacatatattatttttaattgatttttagaagttttagcgaatcttacaattcgattctcgattcatgtaatgaagattttgattatcgattcgaatttcgatttgacaattatggtgtggagtacaaggagatgagatgggatgagttgactgagatgagatgagctgactgagttgagatgggctaattataatgtgcagtaatagatagggcagttgtgcggttacaagtagggataagcataagtaggagggaagtactcttaatgacttcttatttttatcaccctctattttctccccaatttctactattgcctataattggaaaaatggctatgcaactcaagaggtccaagtactcatttaggacttgttctctcacttacaaaatgttatttgcttggcatgtgcctatcttgttttcatatattagccatagtggctttgtgcttttgtaatttatggtttctaagttgcagttttctttagcaacgacgtctggttccactttttttactggatgtactttgctgttttcccatttctactgctgatatgtatgaaaactctaagatcatcattatcaattggttgggcaaattagtgattattgtatgttcaaattcaggagaatattaccatttttagtccttgtagttatattcttttctataagttgatgagaccgtataatagaagaagagttgggttgggggatgtttggcttagttgtcatggtcaattgatagctgtttgagttctaaaaattaggtcaacatgtttggtactgaggagaaaaaaactgttaggtgttggaagtcctggcagctgatgtatttttatctttatttgttttgattttatgtttggacaaaataccctatcaaaagttgtattacatttttatagaataattaattcgatgtgataaaacaaatatactttttaaaactaataaatagttcttgaaatatcatgtgtaatatttgctgtgactactaagttcatatttacgataaaagaaatcatattacaaacatctcaataattataattttcttaattaatagtttttattactttttttaatatctataacacattaaagggtaaaataatataagatgtgtgataatatatttaagaaagatcatatccttgttgttctttgtcatattagcaaccagtaatatttatttgtaatgggtatatgctatgggctacatatttattagaaaaggaagttttaaaaattttataatgtttaccagctcttggcaacatgctattagatatcactaataactaaattgaaagggccttattgataatgagcatctgctgtgaatatatgagggaggaaggatagagtcctttcctcccgtagctcatagatctctcacgtgcacacacacacatgtagacacatgcatgcatgtgtgctagacactacgcttacatgtgctttgctcataccgacacatgcatacgtatgctgataaattcctttgttaaattgttggctgctttagtacaatacatgcaaaataaataaataaaataataaattaactaaaaaaagagagattttttcataattcttatttgcttatttaaatattactgtttttacaatatacttttcccattatcaattcattaattgtaaagtttaactattctgtaccttgtatttagattgccaactgtggtaatagcattttagtgtttactcattcttggcccagaagagtgttcttcattcggacagtgcctctgatgattgtagcatatgtgtgaatgtgctgaactttttttttattttatatatttttgcctcttagaagtctcatgtcattgatctgacaagtgcagattcacacctttaagtgatttttttcaattgatggtttgagtgactggaggtttcatttttttttattttttatggtagtcagtttggaagactgccttcaattttgaattctaattttgtgggattgtacttgattgttttttgcttatctgatttacttttctgcagtgagtat

SEQ ID NO: 6204 - DNA, 1298 bp, Manihot esculenta
  Intron number 1 from transcript cassava4.1_002449m (locus cassava4.1_002449m.g) derived from phytozome v7.0 (chr-ID scaffold03329; pos 133848 to 135145)
agttcatttgcaatctggcttggaggaaataaaaggtctatctacttttcatgtacttgtattctttgttagtaaatatcattttctttcagttttctgctggaaacaagtattctaagaaaccaatgtttctttttcttattctttttttttttttcatttgctctatttcctcatcttcaatgtatttttcactttccatccttttttttgttaatttcattaatgaaaacttttcaagttattcttaacatatttaagagtttccaacccaatatgctgagtgaaactacagactgttctggaggatttataagatgtgatatatatatttgtctttttgggtttcaggtaaagataacatactctgtgattgcattagtattagttagtttggaactgctatatagaatttatttgttgggtgtgaacatttccagtattggttctttacatgttgcttttccttcattttgttctactaatgtaagtcaataaatcttgtcctttgttcagaaaggtagaatatttgctattatttactacaagaatcttcttccaatgcctttaaattggttatttattgcacattattatgctgattaagctaccaaacccacttttttcactttcttgaaccaattaggtttggtatgtcaatttttctttgtctccttttgtctaggaattcctttgtcttattcattttctcttttggtttgcatgtctaattcttctcttctattgctttggattatcttttatcttccactgatattatgactttttaactcctatctttttaaaagatctatggttggcctttagtttctttttctttctttaacaccatattgttaagaaaatatgaataagcaaaagtatatacaagattgattagtgatagaagttgcgttttgctgacaaaattaagaccatctgctacatttggtttctctgttattcctaagttataactcattgtttgttgaccttctatctgtatcatgcttctgtttcttttctgcttccccatcttttccttggtgataattttgtggatattagagccaatatttcatgagatatacctgagattcattagtgaatttacactctaatgatcaaattgaatgtttctcttgatttcttaggctgagtttatctctctactttcattctttctcgagtttttctatctgctatttatgctataatttgttgaatgagcctcacaaaactagcccttgtgatttttttattgcagagaactcaacaaaactcattcaagctattac

SEQ ID NO: 6205 - DNA, 4837 bp, Manihot esculenta
  Intron number 1 from transcript cassava4.1_008535m (locus cassava4.1_008535m.g) derived from phytozome v7.0 (chr-ID scaffold03303; pos 221824 to 226660 reverse strand)
acatccttggaagtaagccttctcctttgttatactgatatgaagtgcctctttttatttttgtgcgttaatttgattttgcttggcatttcattaataatattttcattcattttatcagcttgtttgagtaggcttttcttagctggttattattggggttaatgcttcagaagcaactgttccacactcacacaacttgtttttgtgttcataggctttgattttcttatacatacgaattttttttggaggaattttgtttttcacttttcaacaattatatgttaatgaaccatatctaaaggtgcatataaaaccaagttttttcagtctgttaactaaactatttatgtatatgggttttttttctagttcatatatttataggctttaattatcctatgcacgtgtgtgcacacacacacactcttttttttggaggaacttttggttttcacttttcaacaattatatgttaatgaaccatatctgaaggttcatgtaaaaacaagttttttcagtccgttaactatttatgcatactttttttttctagttcatatatattgacaagtgtgctactttactggttagtttatttgaataagtgatgactttattgccactctttgtagttagtttagagtcaaaaagaaaagtgttgaatggaatcagcagctaatgaataatgactagattcagggaaaaagaaaccattggctgaccgggttgaaattttagctatcatttgttgattctaatcacatgacaaatagtcacttttcagatgcatgatacatgagtggtaagaattcaaaagaatgttcatttcgctcttgcataggtttttcttcaaaagtggcaaatcaattttttttttgtgtttgtttggaactttgtattaaggatgtcaacatggtgatttagttgtgaatgaaatattttcgtaattataggatttgttttcatcagtaaaaggtctacctgtttgaaaatgttactgcagaacctcctttggtgtttgtgtatgcatttgcataacggagccttttgtagcagtagtattcatctggtttcagagctacataaagtttggtttggcaggttgggatgaatttatcaaatcaatccaatatggttgattgctatataattgaaactacaatcaatgttgtgataatatgctaccaaatatgccattaaaaaatttgcattgtttagtcagcttcatcaatttaggcttcattagagcccataactgttgaattttgcaactatattacgtctctggaattttactcagacaaaacccttcacaactaaatattgttcctttctcaagaaatttatttgttattgttgaagttagaataatagaagagagaagaaaataacacaaaaagatttacgtggttcgactacgagagcttacatctacagacacaaaatcttaaagggctacatctttattaaattggattatctcctcataatacaaaggcctttcaatttataatataggatccaagacatatatgataatatgatactataggttaagagattctccaactataatagaaatatactaaatccttctaaataggaatacatattatgctatctatttgggaatacaaatccttattaaataggaataactttccgtaatactctcccttaattgaagtatggaatctcattaattcatgaaatctcatcaattctaacacgctcttttaatgagattctacgtagaagacacgaaacttcatcataacaacttacaaccaacaactcatgagcatattcaaaaatactcgcacaaaatactaaaatacaaaataatccttagaattgcactttcttttccaaaggcaatgtcggcgaggaaacatcaacttaaaatccatctccaaaggcaataccagcgaggaaacatgaatacaaaacccgagggaacctatcctatcaacttcaaattctatgattttcagttcatctgtcaacctttcttgttctgaactccactttttggatttgagaaagggttgaaggtaacttaaaatccctttccgactattcttcttggtccatctccataggcaatattggcaagtcaatattaacgcaaaatctctctcgacatgcaatatcggcaaggaaacatcaaaacaaaagaactcgtaggattgaataaaccacaccaatcaatcacaaacataagtgtgaacagtgcccataaaagtaccggtaaatggggcccattaatagtaatgatgaaccgtacccgtgaatagtattaatgaacaatactgtgaacagtactaatgagcaatgccaagtcttaaagaatttaagactatgataccatgttaaagttagaataatagagaagagaagaaaataatacaagaaaattttatgtggcttggctacgcgagcctgtatccatagacacaaaatctcaaagggttacatctttattgaattagattatcttttcataatacaatggctttcctatttataatggaggattcaagacatatatggtatgatactataaattaaaggattctccaactatattaggaatatgtcaaatccctctatttttggaatatattattctatctatttaggaatacaaattctatattaaataggaataactttccactccccttttaattgcagcatggaatctcatccattctaacaattataaaggttaaaaaaaagaagaaaaagaactaaaatgcaaatgctgtataaaattctacatattataacaaaatatagaaactaatagtataaaagttcctaaagaaaaaaaaaaagaaattttttacttatattgaaaattcacgaggcaatatcctgaaacaatgacaaaatgaactaagatatgcaaatataattttaacaatttaaataaaatgacaacttggtttgttaaatgttgcctcattcttggtttattagattttttgtgacttttgaaatattgttgttaaagtccagaacttcaaatgctttagttggataatgggtgcaaatgttcctgggccattgtcttaatttgggagctcatgtatatagtatttaattttactttctgttgcaacttggatccactagatttcccattagtgctattaaatgcgctggtggggcgaggcaaggcctcttgtaagagcgagcgcctttcctcgcctggctcaaggcttgaggcgcgaggtgaggcgtcacatcctgaaaataacatttatggcttatttttttctttctttttgaagactaaaccctaatacatattttcctttgaattagagaatatatcctccgtaattatgctgattaattagggatttatatcttataattaggctaattaattggagatatattcttaattagttagcataattatatatatatatatatatatatatatatattaactaattaggaaaaaaataattatctacatacttgcagtgttattaaggcaagaggcgatactaaggcgacaaaatctcctatcgctttaggcgagaggcgagggaatgcctttttgataaaggtgataaagctaaaattttttcatatattttaaatatacatatatacacatcaattagcacccatattcaaaggaaagaaacatatttaaatgaaaagaaaaaaaaaatattacttgcaacaataatgtaaatgggcatattcatttagttatatagtcatatttcatatatcatatacatatggccatactcatatattcatatttcatatgcaaagcaaccccaaaatacatataaataagcaaaaacatccaaaaattacaacatccaaatatagtcatactcgtatcatattcatatttcatatacaaagcaacatcgtaattcatatttcaacactaaaataaataagcaacaacattcatcacaaatcaataacacccatttgaaacaaataaggaagcaatctataatttctaataatcaatgacaagcaataaaaccaacatgaatacatcaattaataaactaaaattgcaggggaaaaaaggaaagaaaaaaaaaactttactggtaggcgtggggccggggtagtgaaagggagaagaggagagaaaggagagaggaggagaagagaaaaggggaaaaaagtactcttctgtgagaagaagaaggggctagcgtgaagaagagaagaaagagaggaggaggaggaggaggaagagagaagaggaagcaagcatttccgatgcacatatatatatatatatgcattatacttgcatatatacatatatatgtgcacatgtatatgtataagcatggtgcctcacttcaaaaaggagtcaccttgcctcttgcctaaggcgatagtggaccttgatgcctctcaccttgataacattgtttcccattgaattgtaccagtacgtgctttgttttagttttttttttttgtctttttttttttttttatttttatcataaagggcaattcattgatcatgatctgaaaagagtcattacaaacttaaaaagattggaggaggatttgaaatccaatcctaccttaacatattaactctaacttgtcttgctaaccaatctgcagagcattttgcaattctggtgcaattccacattattttggcttgatcatgtttgtgctttaatgtatcagttatacctacatttttgtgttatttactactgatgcttatattctctatatataatgcttacttagtgctatgtttatgaatgggacaggtacaaactcaaaataaagtcgaagagttgtcctt

SEQ ID NO: 6206 - DNA, 3360 bp, Manihot esculenta
  Intron number 3 from transcript cassava4.1_016246m (locus cassava4.1_016246m.g) derived from phytozome v7.0 (chr-ID scaffold11378; pos 76990 to 80349 reverse strand)
ctgttcaaacgcaggaaaagcagaaattacatttggtatgtttctctacccaatttggtgtgaaacctataatttagtcatgtccaattctcagcgctgcaaactttaatattgatgtgaaatattgtttcactgctgttgagtgttgagtcaagatctttaatcctttaatccaaaacacacgtcttgtttgtagtttattttctcaaaaatcaaaatagaggcagaagattttttcctttttctttttctttttttttttttttttttgaaatggcgaaggttcttatttgcagtttatttgcgtcgtgtattcgttcaattgtttataaaacatactttcttataattgcattttcttcttagcaaaattttagtttgtagatattacattttaagattaatggaaaacaaaaagcaagctaaccaattcgagccttaatttattgtacttgcttctctcttgcaactacctatggtaggcattgagaatccatcatgttcgtggagtgaagtaataacctttttgctgttttaacatccatgattaaaattctaaaatgttttgaagaccaactccaatttacaacatgggagaaaatgtgcaaaatggagtgaatgtgaacggtgtgatgtgcaattgtaagattcatgtcaaagtgagattaagttctataaacctatgttcaagccaaataggttataagggagaaaatgttggtgctggtggatgcacttgattcaaagaggagtaaattgacccctctttttactaaaaaagaaaaaaaaatccttataaatatacacacttgtttagattgacaccttatatatttaacactaaactactccttttgttaaaacttaatgctaaataagggtaaatatttttttttctttttaacttatttagaatatttaagtgtcaatattaattcatgaatgttttgattgtatatagagaaatgaatctaataacattaaaaatgtataattcttgatagtttttaggacattagaccttgtggactccaatgtaagatattaatacacccttcctcccacaatgatgtatagttattttgacaaggattaagaaattgtagttgatatagttaaagtaataaattttaatttcttttttctgatttacccttcacttattttgctcaattactaaattatttttagaagtaataaatttttaatttttcaatgcatattaaataagagtatattgagatgttgatgaataagttatcatatcaaaaaggaaattggcctatagcttaggatggatgagaaaggaaagtaagtatatctttgtgagttgaatggagtattatgttttcttacatttttttatcctattttattatttacttttgatatgttgacctaatttgtttttcatcgatctacttagcagtatttggcatctatggtataacatacctataagatgagcatgaaatatacaggtgttaagatacgcaataatggataaaattgagaatgaacacatctgtcagagagcaaatgggaataaaataagagatagttaattaagatggtttattcatgtacaacataaactataaaatgccttagtacgagaatgtgataagttaatcgaggaatgagtgaaaaggaaaaggtgaggcctaatatgatgtgtagaggaagtaatatcaaaagatttacaatttttggatattggtttcaaaatagaaacagcaaaaaggaattcatgcccaactaacttagattaaggctttgttgttgttgttgctgctgctattaatttttgagttgcgactaaacgtgatttttttttttttactgtaaattgtggagaattggtatgccatgaaagttctctgttaagtaactttggggaactagacaagtttctaattcaattaaacagaatgaataacttataacaggacatataatgatggtgtgaattgtgaaattttgtgctttttgcaaatctcttggacagagaagatgcacctttggagtttggaaagaagttgaaggtcctagaagtttttagagtgcttggtttggttcatcattgagataaatattactatacgcctatgcacacatgatgcagataataagtcaagaaattaaaattatggactagttctgacatggaaactatttgacatgtgttagatggtgaacataatgatggggaactcaaatggtcttgttttgatattttaatgcaagaaagttcaactttttgcagaagcaggggcaattttgttattttggattcgttggaaaagctttctgcatgtccttagttgtattttggacacttaacttgcctctttattggtttcagatgaaattaaaccttttaagttttctttggactccaaatccttgtcagttttgcgagtccaatgtcatgatgtttctggattagtgttgaccaaattaatacttaattgtaatgcttattaattagttttcagtcagtaagtgtttcccgcaattgttgctcttgggttgtaggatacaattcaaatttactatgaagtttgaatgtgaggcttagaccttatttagttcacagggccttgtccacacagctaatactaacccaacaatctgttctcctcccacttattttctgcttagctactcttggttataaattctggttgtttatgtagtcttctactcatttagctttctaataaaccaaatatctaacttaagttaccagccttgcgagctgtcctgcttcaatactcctttaattaattgcagagcaatatcctctaggtcattcaaatggaaagtatttccttctctccatattgtgtttgtaaagaggattaattttatcattgaagcaaggttgggaatttatgatcttgtttctttttttggtgatatgaggattatcaaataacgacgcaaaaaacaattgcataaaaaaatatgaggtaattccaactccgagtgcgttgaggatgtcaagtaagacactttgtcatggccaatgtaatggggttcgccatagctcaaaatttcgttggattgaagcactggcaatgaagactgaaaaagaggaaagaggttaaaaatgagacacactgtgatctaagttgtttgagttgcagagttagacatgataaatatgcatttatcttggcatcgtttattttaattatttatttattatttttctttcatgtatagaagttcttttacttgatcgaattcgttttttttcttacttcatgtttttttcctgataaatacaactgttttttctgcctcttcccttcaaaagactgcaacaattcaggtgttgaagaaggctggtcg

SEQ ID NO: 6207 - DNA, 2649 bp, Manihot esculenta
  Intron number 1 from transcript cassava4.1_003159m (locus cassava4.1_003159m.g) derived from phytozome v7.0 (chr-ID scaffold05899; pos 66592 to 69240)
attgagatctgtgacgtgtgcaatcacgaccctgcgtaagcgctgcgctttattataattcgttccttatcctgttttgctgtttctggttgctttgtgatcaattttgatttatttttttatttataattatttccatgatgtgttattatgattggatttttcgtggatggcgtagtttgatcgaacagttaatttttggatgattgttgataaaactcaggaaacataaaacctctagtaacaaatagaattagattctgaatttgttgtgcctggggttttgaatattttctgttgattcacattctcaataattgtaaagctgcagttgttgtagcttgaattggggagaatggatcctcgttgaagcactgatgaaagaaaaggaagtcgacgttaaattctgtaattatctgtggggtttatgaatgtcttgccttaattcgcattttcagttgccataaacctcgactagctctatgtggatattccatcaggaacgtcgaaaaggaaacttaatggtctctcatctcaaagccattaatttggttcctgtatcgctgggtttcaaaggctgccagtggaaacgttattgataatgtcaatgtactggagaaagagaaaagatgggttttgggtctctgtccctcttgctctgcccttaattcattggttagcttttcatatatgtttcttgttagaaggagattctatcacattttgattcccataatataacttgagttaattacaatagtttctattgagtaaaacatatttctccatccttaagtctctaacaattaaaatttcttattccaattgatttttaaaatttataggtgttgttctactttaaaaaaataaagatacaattgttttagcaagcttctggaactttgagtgctaaaaggctcacctacctgatagtataatacactgactgagagattagcataacaggtacatgaccgtttgtgtatatattgaactaaagtgacacaccttgccccttgcccttgacttagaaagtaccttcttcctggtaagtatgcttttggatggtagattagtgatttttaaacttaactgtgcagtccaaaggaagaacaatggtaagagcataatcctaatacttcatctcaagaaaatgcaaattcttaaggttgtttcttataaaatccatcaagctgttggaaaagccattcaaaccaaaagctttatcttaggctggcaattcttgacatgatccttttaaatggcatgacatatccaaccaaagttaagctagttagggttgggcacaaacaagtttgcgtcataaataggtcaacctgtttagacataaattttgaataaattgattttttttctaatatttaaaaagaaatcctttagttttatttgtaacactaaaagtcccgaagaaacttttttgatgaggatttgaaactcctctaaacttcaataaattatgaaagagaacctcatctgaggttagcttaataatatttataaacatcatttcaggatcatttgtctattcatttaacattttggtgtttgtgaaaagcttattattaaccaaatttaagttcttaagtttcattgttataatgccaaaataagggaattccaatttgctttgcattatattacaagatctatgcaatgataggttgcagagtagaaaataaaattgaaatgttatttgtaaaagttactataaagaaaaaccaaggataagtcatgtgtgagacaaaagccccactctggtagaaaaggggacgggaggctatgctcatctcaataaaagcgccacctgcatcccaactttttaatgtgtgaagaacttttgggcttttaatggttctctcaggcttttcaagtaaaatattttacccacttgatggattaaagtaataaaattcaattaaatggttatttgttgttaaatatgttaaccttttaataggatctatttaacaaatgggttaatgtagttgtgttactttatttgttcaatagatagatactataaagtttaagtgtttatgacataagtattaatcatgtcatggtcgggttgaatctaattatgtttgtgtacagtgacatgaatccttgtagacacaattaggcatgaattgccatgtctagtttatcttctccatcttaaggactgcattgatctcctctttttcaatagaatttttactgaagtgccttttcgtaagtaatagtgcactagtgttaacctttaactgcggatctgagcatgccatctctatttagatccacataaaaatggcttatatcatttaaagtgaaaatagtatccttgatgatgtcacccttcaatggtgtcaatttttttgtaaagctcttcctttcactgtatgaagcaaaattcagtatattctccccaaacctaagataactttttcaaacttgttcagttatgttttcagattcaactaattctcagaaagcaatttataggtcatcaagctggcaaaatatctacctgagctagttatatttgctatgtgaaaagttatattgtcgatatttaatacaaaaacttggttggtttcctaaatgtggactttctggtttgattttgggttggcagacaagcgaagg

SEQ ID NO: 6208 - DNA, 3005 bp, Manihot esculenta
  Intron number 1 from transcript cassava4.1_020244m (locus cassava4.1_020244m.g) derived from phytozome v7.0 (chr-ID scaffold10563; pos 1150195 to 1153199 reverse strand)
aataaactcacagaggttttaatatttgaaccaaggtaattatagtatttcaccttttttttagtgataatacttttcacttttaagttgagaatttttggtattttggcttttcttttgctttttctgtttttatctgatgtttggtaaatttgtcagaggtcttggtttttggttttattttttttaatacttggtattcataatttatgtttatgggttacgacttaggactaccgaatcctcattctaagaatgtaatatgtatgcatgtatggaatgctatagcaggatctgctctgcttcagttcgactgatatatttgggctatatctgggtggttgtatgactcctctaagtcctcttgtatggctgtagttattgctataccaggttattgaattctctcggtatttgaaaaaaaattccctcgatatgtgtgcgtgcttatctgatagcctagtccaaaagtttgtgctgtgtatctctgtattgggttatgttcaagagattgaagtatgtatagccggaactaaattggtccccaagttactatgtcattttgcgtcctgggtattaccattaacagaaaaatcaggctattagagctagagttggttgacttaggtgatactgttttatccagaatattttgcattaagtgctagtctacactaatttttttttcttgtatttgctttagaaagttgataatctcagttatcacgtgggcagcctgttttcttttattttgattgataggtaacccacttttgtactagagcacctattgagttatgcaatggatgactgttaatgtccttgttgtatgtaatcaacattagtatgttttgtagaatcataattgaagcctatgtcaaccctttgccttaatgaaaattatggatcctttcaaccagacctcttagagcaaaagctttgcaaataatcacctactcaattaaactaaaggaatctcgattttttttcttgatcactgtttgttgattccagcagtaatggcctaacttttgcttggaaacagtgaaatttgaatttatttatgtttcttctaagtgtatttatatttgtatattggtctaattcattatccactctttagaaatgcttaattatcaggcttgggtactcccttatgcagtggactgctaacctaattttacatttttatgagggggatatctatttcttatctttacaaactaatgttctgtaaagaggttgcaccaagtctaagatatgtttaattgaagatttggctattgagaagaggcaattgccgtgctgttggctcaactcctgccacattagcataagttgttctttaccaccaaaattcttacttgtacatatttgagaagggttttcctgcacagtcatgcatgggcctttgttcttattaaatcttgttaccggacttggaaattcatttgcatgaagttgaaacagttattgcatctaactgctcaaaaggtatatttttctgcaatgcagttgtgattaagagttatgagtttgagtattttctgcaataacacagaataatgacatttgaaagttgaaagtataatatagattatcagggtctcatgttcagtacctgcgatattatctctagtacctgtgtaagctgtgaaatcctctagcagttgagctatgtacttgaattgctgtatatatatctatatatatcaaatagatgttagcagcaggggcttctagttttcctatctgcttatatctttcaagagacccttaaaagggaaaaatatgagattaatagttcaagttaaaaaagcagaggataatttagttttcattgaaatctagcttatatctattgtgttccgtgggtttgattagaaacatagaaacaggttttcccctttcactgactacccttattgtgttacatttacttaaacctaggaagcaaagaattgtcaacagcaaggttctctctgttggatttgtgtctttcaagggcttcgtatggtgttttggtggatttgtgaatgtctctctgttttgtgctgattcattgcaaattattgggatagcttatttctttattttggttatcatcaagtatgcaattagaaagcatggagctagaacttataatctactaaaccctcactctaaaaccatctaagctcagtcctttggcatcttcatgaactggctcaaccaagtagatgactcaacttataacttttgtcttgctcacaacatagtggcttcgtgcatgcctccagctgatttatgctgcaatattcgttgctcatgctaatacagcatgagaatgaaatgagtgatttactccctggaacttcaaatcccattgcgttttcattatataactaagaaggctgagattagggactggaattgcagaattagagtttagaaattttggatttacagcctggttgaagaagattaatggttagtctggtaattttcacaaggatctccatatgtttaaaaaaaaaggggaaaatgagatttaggaaaagaaaattatattcataaaaatctacaataacttgtggtttcctgttgtaatgtatttatagcttctgttggtggatctcactgtaattgtcagtagacatagcttcaaatgttggcctgccatctagtgtgacatgaatgagtgtggaaagaattgagaatacattttaatgaaaacatttaatagttaatgcactagttatccaaccatgttatgggcaaagctctgatgaaataccaattgaaaacaattccatggttcagttgctttaattatttgaggatcttcaattcacattgctttaagaaataactgaaaattggcagcaattcacacttcgattaataacccttaaatgtaggtcattctcttgagcattaaagagttgttcatagatctaatggtagtgactttgtatctgactccttgttttctgtttgtgcctgcagtgataatagtgattctg

SEQ ID NO: 6209 - DNA, 837 bp, Manihot esculenta
  Intron number 10 from transcript cassava4.1_005340m (locus cassava4.1_005340m.g) derived from phytozome v7.0 (chr-ID scaffold06656; pos 704496 to 705332)
ggtacaattaacatctcaagtgtgtactctcaagggtgagtttatgcttacagttcacactcatttagtttgtggatcctcttgctgggactttgaccctctctggggcttttgctttatcgtggcttctgaaagctgtgctgtatgtgcaataattagcactgaaagctagtattgagatctccttaggaaatcaacaaactaaattgcatcttgtggctactgtctgttaggggtcagaaatatctagtcttggttcaaatgcatgcctgcttattgatctgttcttttggtagtttatatctgcccgcatgcctacagaaattagacaatcctagtaagggctagagatgacaaatgctactaccacattctatgatattgattcttcatctgtacaacttacaatgctgttgcattatcctgctaagaaggttagaagacactatacttctggattttggcaaggctacttgtaggacttgtttttcatgtatcttaaagttttatttggtggacagcctactcctttgccataagaatatgacataattccaaatcttttaaaaaatgttgtgctaattcttacattagttttttaaaaatctttatagtttaccaaaaaattttgattgctttgcttctttgtaatttcacaatccatctggatataggtttggctgtcaactctagaccgagaggtgtctcgcactcgtttttcccattatgcaagcctttctctctaccaaggttttagtttgcatactgaattaaataacagacgttatatggtattatgcaggttgctaaacactctgacacaggcactgcagagtt

SEQ ID NO: 6210 - DNA, 4862 bp, Manihot esculenta
  Intron number 9 from transcript cassava4.1_008459m (locus cassava4.1_008459m.g) derived from phytozome v7.0 (chr-ID scaffold03581; pos 910916 to 915777 reverse strand)
aaggaaaaggtgttgtgaggggccaccaaatactggtacggatccattcttcttgagtatttatattgattaacagtgattgaactggcagtgcagctttgaatagcacagggatttaaatgctgtgtgcgttagacttgattgttatttaggatcttgaatgttaaaacttgcccatatcttggccaaaatgaatgctccatgtataggtggatatctaaagctatgaagcgaggctttcagtctggtaacttgggtagttaattgtgtaattatgaattttgctttataagttctggatatctaaagtgatgaagcataattgagtaatatcttagtggcaaaaaagagaaaaaaaaatctcgaaagttatgtgcaacagaacaaggagcaattgagcaatttctgtgtattttctttatttaagtaagtgtgtttatatatagattataagaccttgttaagacaactcctaaaaatcctttattaatcaattattatcaattagcttatgattatgtaatctcctttaattatgtatagattatattcacactctaacactccccttaagttggagtataaatatttattatactcaacttgttagaaaaatattctattcgacatccattgctttggtgagtagatcatccagttgctctcttgtattcacatatatggtggaaattaaatttttttgaattttctcacgaatgaaatgacaatcaacttcaatatacttagtttgtttatggtatactgagttggaagcaatgtgaagaatagtctgattatcacaccaaagtttcgcgggtgacgcaacattcaaaccaacttcttgaagcagatgatttatccataaaatttcacaagtggatgagtcatggccttgtattctgactcggcactggatttagataccacattttgctttttacttttctaagatactaggtttccttcaacaaacacacaatagtctgtggtcagtatctgaaaaatactcaactgcagtatgcccatagttactgtagagtatatcgaatttaggggtctctttagataatatagaacttattctagagcgatccaaggttttaccgtaggagcagacatgaactggtttacaacgcttattgcaaaagtaatatctagacgagtcattaccacaaggttgttcatcttttaaccaacctcttgtacctctctggatcatcataagggtctccgtcattctttgtgaaacacatattaggaaccataggtgtgttagagggtttagcttccaagttcctagtttctgcaaataagtcaagcatatacatcatttgagatagaaaatttttttctttttactccttaagacttcaattctcaagaaatacttaaacagattcaagtctttagtatgaaaactcacatgcaaaaagatttgagagaagaaatccctacactatcattccttgtaatgacaatgtcatcaacatacacaataaagaaaataataacagtatttgaatttctatagaaaactgagtggtcacacttgctttttttcgactcaaatttttaaacaactttgcttaacttgctaaatcatgcgcggatgctctgcttcaaatcatacaaagattttttcaaacggcagactttttcatactctccttgagcaacaaacccatgtggttgctccatatatacctcatcttagaagtcactatgtaaaaatgcatttttgatatctaactggtgtaaaggccaatgctgagaagtagctaaggggatgaacaagcaaaccgaggttattttggccataggagaaaaagtgttaggatagtcaacgccataggtttgtgcatagcctttagtaacaaaacgggtcttaagtctcgccatggaaccatctggattgactttgacggtaaaaatccatttgcagtccacaaccttcttgtcagaaggtaaataaactagttttcaagtatgattttcatctagagtctttatttcctcgaacattgcattacgccatctagaatggatcagagcctctttaactgtcttagataaaaaaacgaaatctagagaaacaattaaggaggtagaaggagacaagtgatcataagaaagaaagttagcaataaaataggtagacttacactgtcgtttacctttacgaagacttatggggaggtcaaggtcactcgatggtggatccgatggcgaagaagattttagtgcaggacatgtatcatcagttactggcctccgagagtaaacttgaacaattgacggtttaacaagaggctgagtactaggaggaatgccaccatcatttgatacagcagaaggcacatttgagaagtttccaccatcagatgtgattctataaatgagccactcatcgtcctcctcttgaccagtaaaggtttgtgcaacaaaacaaaaaagaatttgtttggaaaaggctacatctgttgagatcagatatatattgagctctggagagtaacaccgatactccttctgaaggtaagaatatcccaaaaagacatttcaaatctttaagataaagtttagtcacatgaggtttgacatcccgagtatagcaagtgctgccaaaaagtcatggttccagagtaaataataacttcttaggaaagaggacattggagactattacaatttagtactatggagggcatgcggttaaggatgaagcatgcagtagagacaacattggcctaaaattgcttaggaacttgcatttgaaacaacagagctcgagcaatttcaagaagatgtcgattcttcctttcagctatcccattttgagagggggtatcaattcttgatgattgttaaaaaataccatgttgaatcatataagtctcgaatgattctgacatatattctttaacattatcgctttgcaaaatttacacagaaatattaaattgagttttgatttcagcacaaaaggtagattatccaagtcattatagagaaatcatccacaaaagtgataaaatatctgaatttagttttagacccaatcggacatagttcccaaatatctgaatgaactaattcaaaagcagactaagtttgtttattgactttaggacttaaagagtttcgatgatgcttgacaaaatgacatgactcactccagtaaagatttctcatgaaattgagggtatagttgtttcaaaacctgcaaaagaggatgccccaatcaacaatgtgctttgaacggagacacgacattagaacatgcaacagactgaggcactcatgcatccaaaatatagagaatcctggatacatgttctttatcaataatttgcttcgttataatatcctaaatgaacaatatttaggaaaaaaaaagacaacaatttaggtttttggtaattttattaatagaaattaaattaaaagcaaaattaggtaaacttagtacaaatgatagggtaatagaaagagtaggtttaacagtctcagaaccctcaacattatagattgatccataggtgctttatgagattggaagcttgcaaaaatatgaggatcatctgcattgtaattcatggcaccaaaattaatgacccacttgtatgaggaggagataaggcaagttttacctgactcaatattagctgtactagggtagactctctaaacagaacttgataccgagcatatttttcaactgagatgagaacattattctgagaggaagaattggttgcagcaacattagcagtgcttcgatttctgttttgtagtttcttataatttttagtgacatgagacttgctatgggatgtcatttcaatcaatactaacaaaaaataattacttcacaaaaccttctcctaatggttcaagacacaaaccaggccacaaaaaaactgcacttaaaattaaaaagccaaaaacagaccttaatcccaaaaacagaacttgatatgtgaataggaaagaagaagtccaattgcaacggtgtcggatgacaaactcgacgttggaaagctgtcggaaaccattgggcaacctcgaaacaggaatcgaaggctcgtcggaggtgtcacgctccctcacgcgccggtgtgtgaaagttgcaatagaaattttggacggcgtgtggagctcactcgcatgtccccggtcaccaatctttgaggatcggccaaaaactcacctgtgctcctcactacggtggtggtgagacaaaacgatcatcagaaaaggtgacacacgctaacagtatcctcagggaggaaacctagattttcagaataagccgaaaggttatgataccatataataagataagaaacaattggtcaatttctgtgtgttttctctattgaagtgaatttgtttatatacgagttacaagattttgttaaggcaacttttaagaatcctatatcaatcaattagtattaattagcctataattatgtaatctccttcaattatttacggtttatgttcacactctaacattatgctattgaatttggaaaaaagggtgtgctgtagggactaaaaaattgatgggccttgtagtctgtgcggataaaatatttgggcccaggtttggcacttgtgccagattaatctgaggaaattttaacccctttaagttgccattgacaggaaatattcattgcattttctttgttgtttgtcttgtatggtcagtttcttgacaaacatattcatggctgcttgactctaatacatactatatgcgtgaacattcttgtcaaaattcgctgttatgggtacttacctattatatgtacgtgatcaatatatcaacaggtggagaagtgagaactgaa

SEQ ID NO: 6211 - DNA, 1573 bp, Manihot esculenta
  Intron number 6 from transcript cassava4.1_023967m (locus cassava4.1_023967m.g) derived from phytozome v7.0 (chr-ID scaffold00802; pos 61306 to 62878)
caaattgaaggggagggtaattttgacaagaaaaggtgcatgtcttggtgatttaatgatgattttctgtccatgaaacttgttttactattacattatggacgtgtgaagcttgcatttgtttctgtattttcttgatgtttttctctacttggtgctttgttaccagctttaatatgagtgaattatgaaaagaatataggattcagaccttacattatatgcacgggccttatctcccaaaaaaaagagcttagtcagatccgttctgcagttatactctattaccataggaggcatatagtttttactgtcaatttcttatttggcaaaaacgttagttatttcttaggcaagtgccaactatgaaaataaatagaagtctaaaacaataactttctgcctttgacaaatgtgttttgaataattatgcttataataggattttgttgcccatttgattgaaggttaaaaagtatgcagttagttggtagttgtgaaattagtaattttcattgtttaataaatttaatatctaaatctacacgtcatgaccaatagatgcatggatgaggcttcaacagggggatggttgatgggaaaagagctcattcgaaggaactcttaacatttcagactcattgataagagtgtcttagatctcaaatatgtttgtaattttttcatataatcatcgtacttcaaattagacttcaagtctaatacaagtaattattaaacctcctaagataagataatagaaatttaataaaaataatataagataagataatagagataagaaactagtagataaacataataggtttgttatggatttggtctattcattatccataacatggctgcattctttgtgcggaaggatacgaggggttctgttgttacttcttagggctcaaatttgctagagattgtcttattcattttgtattattcttcattattatatttttcctagtgaaattaagaactgcattatcaatttgtcattaataaagacattgaacaggggataattgagtgtgcattagaagtctacattataatcaaattcgctaaagccaatagaataagaaaagcaatttcctgactacttgttactttccggaggggaaaaataattatactctctttgttccacaaagataggcttgtttctacttttgattggtccccaattacaggtacttttttttcttttttttttggtagtttatttgttaccttactaatatgcccctctttaatttgcattgaaaaagtgaaattcatcagtttcaagaatagtttagtaacatgacatatttaattattgaatgatatattaagaaaaaaataaagtatttatttcactatattggtaatattttttaaaacatgtgaaagtagaagcaaacttatctgtggaatgagggagtagcatttatattgtgcttgcacatcactgtagcagcatgaacctgactcttacaaaaaggacatgcaaaactggttttctttctctctctcattgacaggggcattgctggtgatttgattataactgtcc

SEQ ID NO: 6212 - DNA, 1399 bp, Manihot esculenta
  Intron number 1 from transcript cassava4.1_007592m (locus cassava4.1_007592m.g) derived from phytozome v7.0 (chr-ID scaffold09856; pos 33633 to 35031 reverse strand)
acttggccagaggtgccgtcattagggccactcaggttagctgtttgctctgcttccccttcgacttatccttgggtgtttgaattcttttttcttttccttctaagaaatataatttcttttattaatttttccaattatacctaagttttattaaatactaggataaaattaaataaaattataatagttaatatataagctacggacaataattttggaaaaagaaaaaagaacggagtgcttatttgtttaagcaaagcaaagggttagagttaatgctgcagttactgtggcactaatttttgtcctgcaacggggttacattatttgtaagcgcgactagtagctcagtgatctctaggatcttgtagaacttcttcagtgagaatctcaatgtcatctgttaaatttcatcaaagggacttacgaaggcctttttctggtaattagcaattgaaaaagtaagagtgcttaattgggtatttgggaatttgaacctgctttcgtgcttcttatcttcctcccctaaaaagctatagttatggaatataataaacaagtatagttagtccccatttactaaatgcaggagagggtacggagcttagacaatttctagtgtgatttttaggtaattaattactgcattttaggtgtgtgcgggtggttcttttgttatggtgttttgctaagtccgagtaatccaacggaagagatctgcatgaaccgtagtggttccggggttctccaacaataatgaataaataaatggtggggctggcggagaagcttgcatgtgcaattgagcatgacatttataggtggtagcaaataatgtaagtggacgtccaacaggcaaatagctggcaagtaatgtcgtttcattttttattatattatttagctctctagtgggtggtgctagaattcattgctagtaaagatgaaagtgacctgtctgcgattactcttaataagtacaagcgaataaacccgaacatcctgcgtgtgatgtgattattttatttaataattattgtcacataaacaaaaatccaaacaaccattaaacaaagatttgtgtaaatcatcatgcaattatctgaacatatgtcatactaaattgtgcaagtggactgcaggctaacataagcaattttgcctagactaattctgtgtaatctaattgcttgtttgcaaatggaaacaggtttgggctaccttatatgtttgtgatcacttcataagtttataaatttacccaattccttttaccatgagctgcctatctgacattctaatttattctttagtcttgatttaattagttcatagtctttctattttcctttgtggtacaggattattcggattggcctttaattgctcccttgcc

SEQ ID NO: 6213 - DNA, 1528 bp, Manihot esculenta
  Intron number 2 from transcript cassava4.1_015352m (locus cassava4.1_015351m.g) derived from phytozome v7.0 (chr-ID scaffold12455; pos 323247 to 324774 reverse strand)
aggagtttgagagcttaaacagaaggtaagatctccattttgcttctttatttatttatttattttttgcggtaattaatgcgaaaactagcagacatgtaactgattttgttttattgtggccgttttttcttgtctgtatcttttcttcacggttttcaccgcttgtttgtgcgacctttctttgtctttcatttattacggttttcagatttttcccctttacttgcatttgacttgaaatctacgtgtgtgtataatattttgctcctaatttccaccttcatctttctttctagtttgatctccttctaaaatttagtggatctcttcattttattcgtagatttgggtgttgtcatttcctttctctcaattatacaccttctaaatttagcttgattacagatttttctgatagtctcgaatagtatgatctatttggttggtgtttggatctcatgtcgccagtttcccgattggttttcagcaatttctttgaaaatttgaacatagattctccaaatatttctaattccagtgtttataacttgagttttcatatgttcctccaacagtcaaattcttcacgatcttaaaatcatttgtagtgcaagatcttcacctgaaagcaaggaagatctattctagaattgggacttgcaacttatagactccaaggatcaccaactttacaattttctgctaggtggtgacagaaaatcagaaagaataattctgcacagacaatatattcattgaaagttgaattctgtggtttaaaacttctaatttttagactagttttctgtacacactgaaacaatttgatagtggcaatctcaagatagtaatcttcctttctcatagatggtgaaattcaaaacttttaagttctcattgtttgtgttctcatttttgcagtaagtggctttagcatagaaaattttgggcctcccattcacagcacagacaactttggctgttgaatggaagtcaacatttgtctttttttttatattattttttttgcctatatcctaactagtttgcaataccttttatggtgcctttcaacaagagatatcatctgttaatatgtttactgtgcttaaagcatttggattgatttagaacaggataatcctagagttgctagctgttattgttgagtagggtgtaggacagaattccggttctgattttttattctcattttatcttttttaaaccatgagatatcaattttcaacttttcttctttcctccaatctctttctcgcctatacaatataaagagtgatggaactttgattctattgtgtcaaaatactaatgctggaaaaacctcaaataaaaaaatattttgataaaaatctttaatatatttgtatatggtaattatactttttccctttttgtatctcaaggtgttggcaaactttcctctttatttaaaacttgttcgtataatgtctctgagcatgttggctttgcaattttcaggaaaccttgttcagggtataaa

SEQ ID NO: 6214 - DNA, 1511 bp, Manihot esculenta
  Intron number 6 from transcript cassava4.1_009073m (locus cassava4.1_009073m.g) derived from phytozome v7.0 (chr-ID scaffold08265; pos 3413475 to 3414985)
attgacacagctggtgagctttgctcaaaatctaagttgctgcattgttctatagaaaatgcatgatacaaatatctcttaacgtcaaaggaacaggttatagctatgattatctaactatattgagcatcaagttgaggaatgcctggagaatttttcattgacttgaccattgatgacttttgttggaatatagactacatgtatgtgcacattgcatatattttcataaaattatgaattttatttggttatcttaactctttcttattttagttgtaaattgtacaagtatatagtgaacaattttttatattaaaaccaccatcacctaagtggcattggtcatttatgtttatgtgagtttgaatccagtcataactcaataagtcgaggttcaagacttgcctggaacttattttgtgtcattttttaccttgatgaaaccaaagagtggtgtccctcagaggggaggttccagtatttcacgtttcttggtggaaggaccactaaaagtagagggaaaatggtgttggggcctttgaagtatgtcctggccttgtgcatggtttcaagtaacaaatggctgttatttataggtttttgaggagtcggttacctgttatatggataatatttgttactactgttgcataatgatgttgaccggtatttgatgttaagtaacagttgctgtttccccaattacgcattatctaagtcatatacaagttcttcctttctcttcatttctgagtatttcagccatccaaagtagtggtttctattgtattctctcaatcatatttctcctcattctacaaatctctccttttaagctaagaatcatcatctattccattacacaacatattctatgaatgtgttcgtcgaaaaagttgaaaaagatttgttgtaattcttttaataaaaaaatctgttaggtgaattattcactatctaatagattattggctataaatcaattagtgctagtggtctttaagaataatagctttaatgtatttatgcatattatatagttgggtgtcttagttttacttgtatctaccaatatctgtctattttatgaactttgtaatttttttaaaaatctgcatagcgcttggctattactgttatgttacagctgttatatgtttgtttctattagccgtgaccatgaccgcatttaaaaccgtgatcttgtgtagtaaaggaaagtggaaggagaggatgagaaaattaaagggaacttttttctttttgttattaaaagagctgttggtctcactgtgtttgacccttttgacgtgtatatttctcatcagtaagagaaaagagtttgataccatgtttcatggtttaactcatttgaccactaattttggtcaggttctgataagtttttcagtttgtctttgctgttgctatcatttaacaccctaatccttgcttcttgtttgtttggtgcagggactatcactaaaggtgcagctttattgcatcag

SEQ ID NO: 6215 - DNA, 1325 bp, Manihot esculenta
  Intron number 3 from transcript cassava4.1_029623m (locus cassava4.1_029623m.g) derived from phytozome v7.0 (chr-ID scaffold10563; pos 1227115 to 1228439 reverse strand)
cagcaggctcattgtttagctgttccatgtaatttcttcaacttctattgtagtcttactaaaactgctgtttattgattcaaggtttgtagtgcttcttactgtctcctgctaatgtgtcagatagatttttctttttccccttatcactcttatttttatggaagttgatttggttcttagacaagcttaagcaatgatgaagttgggatcgaatttaccctaaagatttttcagtgttggtgaggctagctggtagatcctcttcaaacaggtctgggaattacataatctgtagctcagtaaagctcaataagtcactcatcaaaataaatagattggttccaacaagcactcaagcagttacaccaccccagagaaataccctttttgggggttccatattttgttaactcgtggagctttactctttgaaattgtggtagtcatatgtccccttggttgtccccagaggatgggggtctccctttctttgtgttattggttgaattatacttttcaactcctatgcctgattaacaggaaaattttgtatttattgatttcaagagttttaatatgtagggatcctttatgtgagtcctgtatatatattccagaggtcatctattgcagtttaattcacacgactaaatgaagatctttaggagccattattgcattcatttgcttaagaagtaagaagggcaatttatggttctgggcaagatctgttatatgatctcctttcactgttatgttgttcctcatttgttaaccttggtaattactttctatctagtgtagttttgattggtactgctgttgttcactgtgtctgaaaattgatgggtgatttggttagtgctccttatgttggaagctcactaacataaagtagcatataacaaagaggtacatcttaggaattcctcaagttgggcacctcttgtgaatacactttcttatgcagcttctatgcagagcatctttctatctcattttcctttttatttactctctttctgcaagttgccaaaaactagcatcagtttccttctcaaagtaatctgattggttggttgttatgatttatttgatttgtgttatacatatatgtgtcaggtgtatgtatgtctagacatacacatgcagatgattttatattctgtttgtttaatgatacagtatggttatcttggtatgtggtgtccatcgctgaagcatgcatgtaaacaaaactaatctgctcatacatctctttgtttattcttttcaattttcatacaaattttctgtttactatttgattcctttttatgtag

SEQ ID NO: 6216 - DNA, 941 bp, Manihot esculenta
  Intron number 2 from transcript cassava4.1_005640m (locus cassava4.1_005640m.g) derived from phytozome v7.0 (chr-ID scaffold11297; pos 869942 to 870882 reverse strand)
ccactgagtcccagattggttactgtgcgaagaaggtactaaattaccgtttgatgctgttgttattgcaattttttaatttagcacaagtttaatgatgtcttctgcagttgttcgaagaaagttgccgacaggcaaactaatcattttattaacagtatttgcattcaaaagaaaaaaggaggggcaaaacaatgatccttccagacttcagtcatacatttgtggattatgctgtttaattttaaccatataagcctaatatcctagtcttatcatcattcaattgaataattttggtagattgcagttgtaatactatcctaatcttatcgtcattcaattgaataattttggttcatttcagttgtgatactttccatcatattcctttttctgactattaccatttttggttggtaggataatggtaatgactgacatcttttcgtttgttggattggattttctcaatgagattataaaataaatgatatgttcgcaaaaaaagaagacaaccatttattcaatgcattcttgaactacctcattgagttcctaacaggtctaatctaaccttgttgaaaacatttttaataatcttgttaatgtcggttgcatttaatacataatagctctattgtgacttgtgatatcacttcgcatatttccaatttagaaatttgatcccttcttccacttctaaaaataaaagatgaagaatatgagaatggaaaagaaaggaaaatgatcagttgcttttttcacattattctgcaacattggtgatggaacactggttttggagttaatgctctgttgatgttttgaatttctgtagctgcacaaataaatttgaattatgcacttctataattctttctgcttttgcccctatttcttcagggtaaggtgccattgttatctatagaagcactaca

SEQ ID NO: 6217 - DNA, 730 bp, Manihot esculenta
  Intron number 1 from transcript cassava4.1_013871m (locus cassava4.1_013862m.g) derived from phytozome v7.0 (chr-ID scaffold03307; pos 773 to 1502)
tgtgtttctctctctccagcagacgaaacaggtcagtcccttgttcttttcttttttcgttttgcttcttcttctctcgcgatgccctaactcagcctattttttttcctgattttctctctcaactccatcagtaaacaggttagttcctccccttctttattctgttcttctctttcctgcatcttttgattcaatcttgtttcatttttccttgctcatttctctttcttcttcttctgttatgcttctttttttttttttgtagttggattctgcttttgtatctttaaacctagacctgcatgtaatctgtatttctatggcaatctccttttttaaaaatgcttgatttgaacgcttgattgaggactgtaattgaatatcattacgttttatccgatgaatgcctcttgaagattttcttgttcaattgagattggcatggaaacaagcaaattctagggtatttaagcttcattttgagaaacatacccttgtttactctgttgctaacctctctctccatttggaacttgtcatgccttatttgaaagaagagtatttaactctctactgttgattcttatcttccctcaattggcatttatttcctgtgaatttgtttaagcgttacgctcgcatttgttgatggtatggttcgtgaattgtttcattcttcttgttattttaattacttgggatttaaccctttttttttatagccacc

SEQ ID NO: 6218 - DNA, 2933 bp, Manihot esculenta
  Intron number 5 from transcript cassava4.1_017382m (locus cassava4.1_017382m.g) derived from phytozome v7.0 (chr-ID scaffold12865; pos 222653 to 225585)
aagattggtatgaactatagcccttaaattttttatctttaatgcaaatatgaatccttattatgtccatgcaaaaatacataaatacattgttggttggaagcagcactctagcatgtatttaagatgacttagttttttttttttaaatccatttttttagtttttgttatagttttatgaatgttgtacctgagagttggatgtcctactcactttagctaatataaaggtaggaatcccaaaatgttgctttgaattggacagcattgttttgtatcagatcatgctatgtaatttccctctaaagttctctgtatatctaagagcttatttggataggtggaaaagggagatgaaagaaaataacaagtgaaaaataaaatgagatatccacttttcattgtttggataagggaggaaaataaggagaggaaggaaaataaacattattttccttttagacactttctctccattttggagaaaatggaaatgtgagatagaaaagtgtataacaaagtataggggatggaaaaataaaaatttccccataagaaatttaaaattccaaattggaagtaaactttatccaaattctatttatgatttgtttttgcaatattattaaatgcatcaccaaatttgaaattctaaacctaagattacaattttttacaccatatgtaacaaatccaatcaaatctgttccttgagtaacattataattttatggatctaaacatctatataaattgcaaattaatgcctaaataattaaaatatgcttagataaattacagttatttggggggagaaaaagaataagcccctcaaattcaacaaattaagtccaaaatatgtttgttgctttaaaaaccagtcatagagttgaagaagtgtggagaattgaagtatggatgttggacttgaaaaaggagggctcttttaccctttgttggcgattggcatcttttgttataaaacaagtgagtcttgatgtcttccccccccccccctctcccgtatttgatgcactgcatagtagttcacagtaggaatatgttgttatggtctagttcatagtaggcatatgttgttatagtccgacgattagatgggaaacgagcttattggagagtgcttttaataccttagactcatcaatgagagtcttaagtttaaatgtgtttgtgattaatttgcttgttttattaatggaaaaaaaccacatatagtggaggttcatataatcatgatgcttctaattaaagtaaaagtttaatacaaacaatcattagatatggaactactaaacttatgtaatagaaacctgataagaaactattagataaaatgcaatttgttcattgctaataaatataatgtactacagctaatatacttattcaatatttgaactttgtggaataacaaatttagtctatctgttatccataatataactcgcctcctagagaaggaacttgtcctcaagtgcaaaggtaggatatgcagtctacaaattattaataaactcccatgtggctttggatttaggatggttcccaactaattaatatttttcaaacccaagaatctgcatgcatgtgcttgttgtaagtgtatccaaatttcactcaaaactgaattacattcttttgaagtatgatttactacctccactcttgtagatcccaaaatgtacaatattaatgcgttatccatgccattagatgaggggaagtcacgtttggcatattgggacattatatgtctttttgtcttctcattaccttgttgacaatttgctggtttctactcattctatcttgattctagtttgcccctcctattgaaggtgcgaactagctcagaaatttgcttactagaatctttccatggtagaatttagtttctcttctatttttgctgatgatagacgggaaatgagctcattggagggagcttgtatttataaataattaatttaatataaaaaatatattttacaataataattataaattttattatatgctttcatttgaaaattaaaattaaaatatttatttagaaatattaaattttttaaatggaaattattgatgaaaaatattttttatataaatagttaattaaaatatacaagattaaaccgagtcgtgttttattcggttaataattaagtttgggatgagttcggataatttaaattaatttttaatcgggtctgaaatgagttgagatattgttaatataaatcaggttcggattcaatcataataaatgtctttggaattctagcaccctatcaaatgcttgatgatttgaactattatttggatccctgttggttttaatatttggcctttaatataatataagttgtttctttggattgaattatggacatatgatgaagtgtaaaaggacaaattgaatgggtcaagttcattttcaatctataatccaatataatatgtctactaccatgaattgtacaacaaaatcatagtctctactctctatattgatgctacagcaaattacagtctctatattgatgctaatgagattttattaatcaacacataagactgcatatctgaatcacctgtctataaaatattaaatgggaacaggtaatagtctatgaaaatatttatttccagattaaaaaaatatatgcaatatgctgattttttcatttgagtgggttgcccctaggattattattattattattattattattattatttttatcttcagcttgaaatatttggttaatatttttctaactatgtttattgaggtttatccgctaaatgctgctgagttcttttccttttacttcaatgtgcttgtgtataatttctgcataaatgtgtataggtgggacaagaagcccattagcaatcgacatacga

SEQ ID NO: 6219 - DNA, 616 bp, Manihot esculenta
  Intron number 5 from transcript cassava4.1_010989m (locus cassava4.1_010989m.g) derived from phytozome v7.0 (chr-ID scaffold03454; pos 66530 to 67145)
ccatccacatttctcatatttacagcgtatcagaggtctggacctgaacctttaagcatacttgtagccagaagttgtataaccatattaatgattcccctctgatatttgaaaacttgattctgagaagggctattacatggtccaataatcatattctttggctttcaaccacgagggtgctatgggaatatgtgaacctgcaattggatcaagttcacgtactggttttgaatcgatattactgtgtgatggcatgattgactagtttctcctgcttgttatatcacaaaaggaagtattggccttaggaccaagcttatttattcatgatgttattttggaatcaacaaatacgagttaccagtcgaatgggacaaaattctattggtaggtttcttggtcatgcattatatgaaagaaacatgctgattgtttttttttccattgactaatcatgaaaatttatgtcatactagtaaatgaaatgtagatgccagtgattttcctgcttattgccattatcttgattttactataagcgctgtaacctgatctactttattaaatatccctggcaggcaaatctcgccttttgtgctattagagatcggaa

SEQ ID NO: 6220 - DNA, 1498 bp, Manihot esculenta
  Intron number 1 from transcript cassava4.1_015742m (locus cassava4.1_015742m.g) derived from phytozome v7.0 (chr-ID scaffold01072; pos 106574 to 108071)
ccaaaggtatgcttattatgcgttaaccttcgacgtttgacctaattttgttcgtatgataatttatttggagtattctgggtaaacgtccctgtttttttatgtaagtcttgtacatttgattcttgaaaaattaaggaaggaagagaaagagcgatggaaaagaagatggtccaatccgtgtgcttttttttccctccccttctttctgggtttagtaatgagctgacccaaattatggagagagaatatcaagaggagaggaaaaaaagtttcctaaaaagaagatctttttcacattttagtggataatatgatcagaagccttatccaattttgacttttggttgtcaaattgcaacttagtgtcgtaattcaataaccaatgtcgtaaaggtagtgggcaccaaatttatagtattaacagctacgtaccttgtttgcaccttgaaatttattttcttttcaaatgtctggaatgtatattccccgtttgacttcatccaaaaccaaagttgatgttacaaataacggaattcatacttcacatttagaatttaaagaaaaatctgaattatagaattatcatcatagtggtggtagatttttaggtgaaaatttgagcaaactcaggagctatggctgactagtgattgctgcatatcagaatatggttgaaagtgttatggagttattagagtggagatttttgtaacaaacgtataaattagatcatgccacggttaatatcttttgtatcatttttgtattggcaatattgaaagggaattatgtgctgttgttcggtctgaactaacaaattatgggttcctgttttgcgcatatgagatgtaaaacaatgaatttgttgtacattttgcattatgctgaagcatagttttgaagttttgaacaaagtagtcggtgcattaaccctaatgcttgtttatgatgaggatttgagtgtctcaattttgttgacaatgaaaaattcaattgacaagcttcaaacactagctggcattcatgggaataatgcagacagtgttatttaaacctttatgagtatccgtttatcaccacttctgtttcatgtctctctatcttatttttttccaaaaagcagtgatgagatagaaaatcaattgaatcctcagttgatgaaactaatcttttgggacgaaaaagttcatcattttggtttgacgtgatgatcttgatttacagtctagcatttgatagaactcaaattcattggcaattgtgaacttgtgagcaaaataattctgtataaacatcgaatggaccaataacaagtggcttgcagtcttgctatgcattttggtatggctgtatctctttatgtatgcctagcttaagcagaaccttgtgggatgctttcttttgtttatttattggagtttaatttgttgatatttggtggtaatggagcattcttccacatgtgaataaattgcagctgattgttcaccttctc

SEQ ID NO: 6221 - DNA, 1479 bp, Manihot esculenta
  Intron number 6 from transcript cassava4.1_006409m (locus cassava4.1_006409m.g) derived from phytozome v7.0 (chr-ID scaffold02975; pos 39556 to 41034)
tgaaacgattggagaagttggacaatcttcttcaggtatacttagcacacgaaaaaatgtattttacgatgaataagggggagcatttagtcaaaccaaaccgaaattgaaaaaccaaattcatttagaacaccaattgatatggaatcaaactaaagaagaatcaaatcgaaccaaattggttcggttcaatacagttggttttgtgtgatgtgcagatctagattgtgtcctgaattgcattcctagaaccccaaattgccaaattcattccaaacacccatatgcatggatatataatattctcaaatcaaaggcattatatgcaaaatgcaacaaatctaaacccataaatgaaatgaaaaagcattgttttttttaatagcttaggttgagattacccttatgaacaacataaccacaatagtgaccaactctttcccagaagcatcgaggaagtcatcattctacaaatacaacaaatctaaaccataaaaaatgaaaacaaaacgcctacacccacaagccatcacaaaataaaattaacacaaacccatagcttctagaagtgggactcagagatgttgaccttcctcgaatcctcttgatgtgcttacttgcttgctcttacaaggagaagaagcaccaagagttcaagggaagaagatatggaacttggatttgccggcctttctcaaatcctcgcatcacataaccggatatagatttgaaagggaagaagctgaatttgaagaacaagaaggagcgacagcaataaccagcaagcaaggttaagaaactgagagtcaatggttgggttgagagtgggagggatagaggaaaagcagaatcggagaagggggcgactttctgtataggcagaggagagagcatgctgtgggtaaggcttttaacattggttcattcacatatatgtataggtagaaaaagcagacatggttttacaaattggtcagtgcggttttttcagtttttgatagaaaaaatccaatagaaccagaaactgaaattatttaaaaatgtaaactaaatcatacccaaaaactgaaccaattgaaccgaactggtactttggtctaaactgaaaactgcataggtctaatgatgaatgatttaggaactcagatgatatgataattaaaagtagaaagtattgcgatttaaggtttaatgatgtgtcagaactggtcatagtttaattgatatagtacatatgttagaagagatggtagtgcaacattagaaattccttttttatttggggcaaggcaacatattaacttccttattccttctcttttttagttatgctacagtaatctctagttggtataattccttttacatcaaagagtggagtctattgcctaggcagctgtttcattttcacttttttattctctctttctaaaactgaatctagaactgagtgctggtgccaccctgcaatttttcagg

SEQ ID NO: 6222 - DNA, 1819 bp, Manihot esculenta
  Intron number 10 from transcript cassava4.1_000876m (locus cassava4.1_000876m.g) derived from phytozome v7.0 (chr-ID scaffold12211; pos 239153 to 240971)
aacttatcaccttcccctgtcaggtctaggagaaggtactgcttatcagcatttcttttctagtatcattgttattcaagttgtacatgcaataactaagccttaatgccaacctagttgggtcagctacataggtcctttttcgtcctttgattctgtttgacactaaatattaaaaaattgcaaactttgatacttccatcacatcactttaagttaagtccctctcttttccttctcaatcctttcaccactaacttaccacatttcttactggggatttaaagttctacgtaagacatgactaaaccatcttaatcaactctctcccagtttatcccactacgtgctacatgcactctttggtggatgtgctcttttttaattttatctattatcgtaatgctagacttccatcttaatctgcaacttgttaagttgccaactaattggctttcctttttttaacagtagcaagcaactaggtttgcatacttggatgacaaatcaaatgtagttgcattgatatagacaatcatttgaaatccactaactgttgtctgactacctaaattttcttattttgggtacttattgtattaatttatatatcgtgctcctgtaaagttgtttgtgcttcagtgtgtagttttggtgaacctgatattattgtttgggcataactttttgtttgggtaatggtgaatggatcaatttggttgtttcttatctcaaattctatatctactggtgcaattattgagttgattttcttgctatactgtttctgttgccaaatgcatgcattgaaagtcgctttgccaagaacatttttgaagccagaaaataaatatccgcggaaatgtcattttgctgccataggaatgaaattgctgttgtctgtgacatttaatgtcaggagcagttctctttgtattttcaagatacatgacctgactttctctttgaatttctgaacacttttttattattattattttttattatatatagtagcttgtatcattctatttcttttcttttttatttatttctttttttaacacctatcaagtagtttctttttctctgtactgcataaatgggctaacctttctctgttacatccacaaaattcttacagttgatgtgataattggcagatattttaaactatttgtaacttgcagccactaggggagtgccatgcactttttctggggagtgccatggacttcttcctttctggccaaaaagttcctatggttcaaaccactcgtgtaatatttttactttatcattctatgtttgtccttagtacctgcattttattcttcctagctatttgccccctatgttgtgcttttggaaataatatagtgggttgataagagctagaatgtcaaggtatggttagctggtagcaacacctccattccaagacgggtttgaattcaaaccttcctttgtctaccaaaaagaaatggctgcaatggatgtattatgtacgtgtcctcatatctatggagcactatgtttgtttcatgggtttaatatgatatgtcttgatacttcatgaataaaatttcacttttgtctgaatttaccaatttggatagatggtggtatctgattatatagatgctttattatgccattagtagctgagaagtgtatgttcaggacaactattatcaagtttgagttataaaggctaagaatttctctcgagttatgaacatctaactcaccaaacaagtatgatgggtgtttttcatttctagacaagtttcgcggtcacctcatagcaagcattctc

SEQ ID NO: 6223 - DNA, 1949 bp, Manihot esculenta
  Intron number 1 from transcript cassava4.1_019487m (locus cassava4.1_019487m.g) derived from phytozome v7.0 (chr-ID scaffold04526; pos 21624 to 23572)
atctggggtatgacatacgactcttatacaaacttttgtgggttcttttgggtggtgaacttttcacctgttgttgataatgtgtagttcaataaaaggtttttttgactgttggcattccctttctcatatggagcttaatgaccgtaaattttattttgatattattgatgttataagctttaatgagtttcatttaagtagcaattttacggattgtctaattaattggatggattttaattggatgattgttgagctttgatcagttattaagagagtgtgaactgcttctgattgtctgcctaattttattgttaaattatgtttgtcataaataataatctttcagatatatctttttttcttctgcaatttaactggggcttttctatgtgaatatgtaagtcattgtgttttgaagctttgttgatatttattaatttcaattttgacatagaaattattccaatagatgttgcttatctcaaccacattgagtcaacatagtgattgtggtgatcctcaagtcttttttgttgttttattgacctgaactcgttttatttgagatttggtcagatcaatttctttgtaattgtaatctgggaagctgcatgtttgggctattctgtgtggcttggatagtgattgtgttattgatgctgtgtggctaaataaggtttcctgtatcctgaacttgtgttactttttttttttttgtggagcctgattattgttttgcacggaataacttttagcaagtttaaattggatgtttataccctttttttggtgttcaataacaatcttatgattttttttttccctacttcatgattgttagtctccttaattggataaacctaaatttgtatagttactttcaatatgatttaatcatatgtaaaacatttggccatgaattgtaatcctcttgggtcctggcatttcttatgtgattttaagtcatctttccaacttggtcatgatgcatgtaatattttcagaaattgtctattacaatattttgattatagtatacattagtgataaggtttactggttttgtcattagatatagtgaaacctttctaaatatagctagaagagtacgtaatatcatggaaattatgcaaggatagtagatgatatatatatatatattagcatcctttaagatttttcacttcaagcttatgatggcacaaattcaagtccattttcatttcaaatgcacatatattcagaggttttaccccctggatacatataagcatattctcaaaccactcctttccagtttcctcttcgtagaacatattgcctcttgcttttttgtgtgccattgtctatgaagaattttggagaattttagagtattcttctatttcaatcttaatctttacgattagtttacatgactatttatatacaaagaattaaaactaaataggaaacaaataatcaaataataattacagagataattaaggatcctaatcaaatcaaatcatatctctagaatcaacaaataagtcaacactccccctcaagttagtgcaaagatatcgcacatacccaatttgcaaattagattatggtagatcttattattgagccctttagtaaacacatccacaagttgcagtagaagtcatatgaactaagctcaaactatcgtctgttaatttttctttaatgaagtgccgatcaatctcaatgtgcttcatttggtctatattgatggcaattttgttgtcacaatacaaagttatcttgtccctctcgggcaaccttagctcctctaataacttctgcaaccataaaagttcacacacaccttgggtcattactctgttttctacttcagcatttgatcgagtaacaacactttattttttgctcttataggtgacaaagttccttcccacaactgtgcagtagcc

SEQ ID NO: 6224 - DNA, 2633 bp, Manihot esculenta
  Intron number 5 from transcript cassava4.1_007910m (locus cassava4.1_006202m.g) derived from phytozome v7.0 (chr-ID scaffold04260; pos 215291 to 217923 reverse strand)
tgggtgttttaaatttggcaattgtgattccacaggtttttctttttcccttatctactttcttctctctctctctttatctctgtgtgtgtatgtgtgcacatgcatgtatgtttgtgtttttgctgtgcaatcttaaactaaacctgcaatatcacaacaagaactcctacaaaaatgacaagcaaaagtaaaaacagtagtttcttgatagatgtaattgtccgaatattattttgcagcctcgaatgtgaaagtatgaaattttgtaatcatgctacatatgaagtacattattaattactttacaagcaaaggtaatactttttatttcaactctataaggaacacagttaaaatggaaagttgcaaaatccacagacttagctcaagtagttgggtggctggggaagagggggattgaaggaggtcaggtttgtatacaaattctaagtttgcgtgcatggtgatagccatgcaacatgtgttcctctaaataatttaactgaattggtttggccagactcagagcatggtatcaaacaacggccgttatgtgatgggaaatggagagttgtttcctggtatcccgttatttaaagggtcccctaattcataggcgtaatgtaatggccgttatggtggttagtaaacggtaatgaccgttatctaataataaaagttgttaccaataactcggtccttttattcacatttcaaacgtgatgtattctgcatattttgaggttccaatgagttccaacagtttcagtgcccttttccttcaaaatctctctttcttttcttttaaaaactcattctttttcctacatctttttcctataagcccatcatatactactccttttagttttttcttctaaaaatgagttttctttttgcttttatttttataatttgctgttttttgcatttctttttttgtatttttgttgattaaagaacattttgatgtcaactttgagttaaaattatactttgagttattagtttatccaatctataagattgtgtatttttttttctaattttaaactatatttcggaattgattacaaaataacttacataaaattttatgcttgggttgtattagttatttgttgatgctaattgtagtttaatgtttgggacaagttataaatttaatatctctgttagttatggtaataagatatataggtttaaggttaaaaagttgaaaaataaatttttgttaataaaaatcgtgctttgtaaaaagtaaaattaattggaatttattgcttaatttcatttcattaatttgcttatgtttaatttaagttatatagtctattacttgatttatttatgcgtattatatagtcgtgtacattattctgatctatatctattaatgtcgattcattttataaattttgcaaattgttttgaaaattttgcgtagcactaagccgttaccattacgttatggttgttatagacttatttctattacctgcgaccatgattgtgaacatggctgcgatcatgaccatgaacacgaccatgatcacgatttaaaactatgactcttagtcttcatgttcttcattttaagtcctcctgcaggaataactcgaaaattattgttagatgctaacaatatatgaagcgtagaaagtctcccttggcctcctgaccaatggagaatctgttcactgcttcatttgtaacttgtgttgctccttttcatgcatacaaaggatgcatgaagtctgttcgtgtgtgagactatcatattcgttcatctgtaagattatctgattatgatttcatctgtaagattatctgattaggtggatgtggaagctttcttctgttatggcctccttgtttccgttaaaattgcaacctggattagatcctacactttgcttcttcatgaagatattcaacaagttgctacattatttgaattgactcaaagaggatatgcaaatgcctttgtttatgctaatacttttcaatctttattcaaatcatcagataagttggatgtgttgagtgtgcatttgaaattttaataccttgagaagtgaatccacctttacaaatatttgagtatgattgctttcctcttgctgaaacttctggaaggtaaccaaatactaattttaaccccctttcgaccagtgtcagaaatctgattaattgcttacttttaattatgcctttgatatatttaagaactggtgcactgatgtgcatcatgaatatgtacatctagttcaaataaataaaaatatagtctatgcactatggtcaggagaatattatgataattttttttgtttttcttatcatttattatgatttttgtgcttttcttatcattcaaaatattgcaatctttcagaaactacagcaaaattacttcttttgctagaaaactatgattaattcacaggattgtgcaagttcctataaaattactgtgcaactgtactgagcgaatttcctgcttatactttcttatgggaataaaaattatcttgaaaaacagtccattagcatgtcattttctttagccattgggttttaaatctttgttccccaaaacaggtgattgtgtcacttggaagtggacc

SEQ ID NO: 6225 - DNA, 1349 bp, Manihot esculenta
  Intron number 1 from transcript cassava4.1_029890m (locus cassava4.1_029890m.g) derived from phytozome v7.0 (chr-ID scaffold00752; pos 39280 to 40628 reverse strand)
tggtaagtagccatattattatcattagatctttaaatgctgattttactgtacagaatcattattttggatttaatgtatagtccaagaatgcttatgtgattgtagcaatcttgttctccctgaagggttgtaaaactgaaggagtaagttgtcttttaggtctttcatgtctttattttgagctgcttgtttcctttatatgtgcctttattttttatttattttttttgcaaacacccagtacttcacataattattgaatatcaatgcaattgatcacttgaaatttctcatttcagtgttttgcaattctaagttttattgtccttatagatacagtctagaattggtttaaatttacctatataaatcaagtaatcagctatgttgaccaaatgtctagtgcttctctatctaagatttcttgaatgctcccccattccacactgaaaataaagggaagtggttgcaaacatattgtctagacaatttcattctgatcgttgccatttaaagcatatcctccggtgctttgtagtccttttactccctctgtcctgtaatttttgtccactttgtttactttgctttttcacatattatattgagataaataatttttatattaacttctcaattatacccatattaagcacattaaattttattaaataccgagagatgttttgtgaggtctcttggaaataagataaaattaaatagggttataatagtcaatttatatattactatagtttagaaaaagcaaagcggataatatttttgggataactaaaaaagaaaaggtggacaaaaattatgggatggagggagaattattttttgaggcttgtggccatattgaacttgggatcaaacccaaaagaaacaaaaatgtaatatgttaaagatgaactgattatacattcttgagagcaactataaatcagctattggtagccgtatatcatcaaccaaatttcaccttacagaatcgaaaagggttcgtggactatcaaaagaagcttaatgggagaaacaaagaaaattgacagcaatttccacaattatgatattgtgcatctgaattttatttcggagattcatatatagaagaaatggtgtagtagcttcttggcaaatcatgatattagagcctttaagtgctatctgaatagttttatgctttcaaagtttcaagtatatttgatcaaccttctctttgttgctccatttcttttccctctactcccttattttatttttcaacctttttattctttcctcacaaatgctttctgattggatcagagattggatcttaggggtcacagagttcgtagtct

SEQ ID NO: 6226 - DNA, 3063 bp, Manihot esculenta
  Intron number 1 from transcript cassava4.1_016290m (locus cassava4.1_016290m.g) derived from phytozome v7.0 (chr-ID scaffold06274; pos 33183 to 36245)
cttgcctattttcaggcggtagcagcagcagagaggtactatatgttttttatttatacttctttctcagttatatgagacttttatttttctgcaattgggaatattgaattgattcttattggtggttttagctttctggtgtagcttttgatttggattgggagtggagatcccattttatcagttttagtctatatacgcatggtcatggaagtttagatttaaggaattagtttgtttcctttttagtgttaagtttttaggatttggttgtttttttatattgttttcaaatttgcctatgcatagttcagtgtaaacatgcctacttggtaagaaaattggttactaggatttgatacttgctaggaaattgagatggacaatgcttgtttagacatggtctacatgaatccaaaagaacaaatacatagtcctatttattaggttcatgtgaactgggtctaggcgagtattttcaattgacgttgccttttctttttcagtgtttggttcctttctttccaactcttttggggttcattaccaacttttcaggaaggatataagaaaatataagaatcaatctattatatcaatatataaatttatgtaggaaaatctctacatatttatgagctccacatgctgcatctctctccttttaaaatatttccaatgctggaaacaaataaagaaagcataatacacatatttcaaaatatgaatctttggatataaattccaagaactggactcaaacacatgagatcagccgagactacatgaatgcatgcaaaagtaaacatttgcctctcatgttggatgcccattgttcatcaaatgtcaaatgtgttcaatgtgaaatttgaatactatatatatggaattactgatcgtaagactagtccttggaatatgtatctggggatttaaattgttttatgcttattgttagggaaaggtattcctaacaggctgttagatatgaaagaagagaaggaacagaggtagaggggtaggaaggaatagagaggagaaaagggagaaatagactaggaaagatagatgattctattagattcttgatagtgactaccgatgaccaatgcaggttcctaatagcagtatttatacagccttcaactgatttcagttggaatataacttttctgcccaattttttttaacttttaaacagagtctcttacccataactgcctcttacaaactctcttccatttaacagcttttccctcctttccttttaactactccctcacttatttctacctattagctaatccttctatatgtcacatttccctggcatttgtgtaacatcccactaagcgctggtcctaatggacaattcctttataatgtcctagctattaactaactacttactaaataacttaggttaaccatcttaggtttaggggtccaaaagttatttagaccagtctgggtttttacattttgataataaaattgagtatccaagattgcaccttctcaactcgcttctgctatgaatgatagatatgctttttgctaatagggtagggtttattgatagttgactcatggtgtttctctatacttgagctttatgctcttcatctttttttttatatatgtatttttttttcaagaaaaagaaaatagtatttgatttatatgaaaggtatgcacctcctctgtttctctctaacctagggacgagtttcagcgggaatcaagaaacagagaatgaaacacagcaattgcacttttattgatagggcaaatctgttacaaaacttcctattctgaatacatcaatacattcttctagcaatttcaaaaggacaagactcgaagcataaaacgaaatgataataccccaggagatatattctccttcgcaaaattctaggaaattcttctctgtcttttttctcacattctcatcatttaagctatttcccacctggtacgattctgctagcatctcccaatgtcctttcctctgcatcttccttcaacagaatgagacatcctctctcttctgatttagaactatcgaattctgcttattttcttccagttggcatattggcgtctgaaccttttgctcttttattgcttccgccatacaccttaagcttccctgggtctgaatcaaccttccctgggcctttagcaggattcaaaacattttctccttaatttctgttactacatctcacttttggttaataacgactcaaggcaacactaaagcacaagtgcacacctgaatgaagtgaggtctgaaaagtaaacttttataaaaagatgaaaagaaaataatagatgtacctctatttaaccaaacttatcaaaattaccaatctacaaagcattaatagacataaaaaagtataaaataaagattttggcatcaatatcctttttttttaagagcttgttagaaaatagaataaacacaaattttggacatttaaaatactatttagattttttaagtccaaatattgccttgttagagttggggaaaaaatatgagaaaaaacaattttatataacctagaaatagaggacttaaatatcatgttaatattactatacaagtaaatgtcaaataaccaaaaaatacctaaatagtatgctaacatatatatttgttctgaaacaaagaaaagaagaaatgtcatagaagtactgaaataaggaatatgcatagctatgatctaataggcccaaatgctggagatttagttggctgaggtggtcttcattggctttcttgagttccataaacgtagaataatttattgtgagggactatgatgagctaactatttgaaggctttgattgcatttcttagtcccttcagtgatcttggatctagagtctgtatttgtcattttaaagtagccttaccttttctggagaaggatataaatatactagaataaaaggacttgaccttgaatgcatttccatgaattaggattctttgtatatgtgatgcaggaacaagctaggaaagcattagaaagtgcacttgg

SEQ ID NO: 6227 - DNA, 1646 bp, Manihot esculenta
  Intron number 1 from transcript cassava4.1_007815m (locus cassava4.1_007815m.g) derived from phytozome v7.0 (chr-ID scaffold02196; pos 235400 to 237045 reverse strand)
ctagggtttttgcttctgcttatcttcggctccctgtaagtcctgaatatttcttcaatttcgcttctgtatcattttgtgtattaatgggttatgcatgcaagctaggttggctttttgggttctttcgtttctgttcatatgcttactttcccacttcttaaaactgtgtatttagatttgattattaggatttatttgtttctggcttttttttttgaaaaatgttttaagaaatgggtcgaaaattagatggttttgaaatattatgcattctttttctagtgggtcttggatagccaagggaatcatgtagttcaaataattttattacctgctctaggtgatgaactatgagattttttgcaatcatttttcatttttacgggtttcaatttatttcctggaacgcagtttgtttgttagtcttcccctttttgtcagttcatggggttcttgctgattctcgttctcacttaaattaatagccttttaagcatttgaaggcttctcttttcctcttttccccttgttttgcatgtttatgtttatgctcacttatggtgaacttaatttacaatccccctttttgtgcaagttggctgcatttcttttaaatctgggattgtttttccaatattgagcttatttttctgatattccttgggatttccatcattcttcttcttttatagaaaaggtttctgtctgtgggttactagtgaactagttaaatccttgtcatcaatgaatttacacttgcaatgtcaaattaaggaagtagagggataagacataacgatttattggcatttatatttggaacaatactttggaaggtgtagtacgacatagcttggaagataattcacaggttttccttgttcaatggcctaattagtgttatagatcctttggtcgatctttgtctttgtgttaccagctagatttagaattgaaaaaaggaatctggctgtcctggaatccttgatttaataaaatgacaacatattgaaggctggaattttatttattttgcctggttctgtttttttggggatggaaaattaataagaaattacttggcataaattcttgagatatcatcccagtgttcctgttgcataataggttgcaacttgcaagtgatgttcttgactagaatttttgagtattatttacatcctctacatggagaaacagaacattgggttaaattcaggatttcaagcatggtatttagtttacataaacttttggcaagttatatatgttcagaataaaataataacaactactaagccttaatcctaattgaggttcacatcaatattcaaaatttgtaagcttagaatgagtctaatttttcttagcacttgctttaaaaaaaggagataacgtgaggatttctccagagctaccatgttgaatctctttctgtgatggaaatttataggggatgatatcatacatatttggtttacacctttttattctcagcagtctttccgctttgctttgtatagataactgctagttatcctatgatgagtgagtttgtagtagtttggtggtcttatatttgagaatgtatgctctttggatatgcagataaaacgtgcacttcattttgttaaggaaaagca

SEQ ID NO: 6228 - DNA, 468 bp, Manihot esculenta
  Intron number 6 from transcript cassava4.1_003337m (locus cassava4.1_003337m.g) derived from phytozome v7.0 (chr-ID scaffold11328; pos 209117 to 209584 reverse strand)
ggaaacaaggtagtggtttctatcgtgcttcttattcagcagcctattcataaaaatatcaaattactaaatataacaaacattaaacagaaatggtggtattgtagttttgcaatgaaaaaaggtaaatcccaaaaagagaagaaataaatgaagtcattatcgtatgaaatctgcagaattatctgtaaatgcaatccttgcagcagtgccagtaaaatacatctagttgcttcatggcatggacggtgccgtaatttttacagtactggtaacaaaatgtcttacaagttatcctccatatagtgatgtcttccaacatgattgaactcaggttaagatttttagaatgtagagaagataacacatcatactatgtatgcattgatgagtaactgaacatacttgtctttgcattaccgtatttctcacaggtggttgctgatgcagggatctgtttctgtcagc

SEQ ID NO: 6229 - DNA, 2860 bp, Manihot esculenta
  Intron number 6 from transcript cassava4.1_002022m (locus cassava4.1_002022m.g) derived from phytozome v7.0 (chr-ID scaffold10831; pos 29773 to 32632 reverse strand)
aatcaggttgttatttacctttcttagtttctgcactgttcacggcctagttcgttccagttatggcatctattgataactatgttggttaatctttgagcagtttgtactttgtagttgtattattcatttaattgttatgttgttaaattttgctgaatggttgttgctgtctattttaatcctttgtgaggctctctagtaacatgagactaagaattgaagaatctaaaaatgtgatattggacttttcctagtgattaagtggtgattttaggtgtttcatgcatgatgttctttaattccttaatcgacacgtgtaagatatcatgagctgaatttccatttgtcttctcgtctgcttatttcagtttcattatctttttatgtgaaggactcatatgccatttgtctttcaagtttgctacctgtatgaatgggtgcttcagcaccttggtatgtggttttactttgaatagtggagtctctttggatatacttttgtttaaaggtttaggtatagaagtgatgagcttaaatgtgctttcttaacaatgatgttaagtataaaatgcatgccagtaaatgcagaagcaaaacatttccctaatataatagcagtttggtgaactttattggcttcatctttaagatcaaactgaagggtggagaactgcaaaaatttagacattccttcagaatctaagacctttcacatgtttcttcttttgaaataggattctagcatttgcctctgggatcacacctaatgttttgtgtatcttgtttgactggatcaatgagatgatggtctgtatctctggcttttccaagctacatgcaattgaggatcatgatttgttttgtttgcacacctcgttgtccatttgaggaaaggttgtcatagtttctgtgggagtgagagctaattacctgatacgtgggaatttgtggtattgatgaatgatccattccaaggtcacttgaatgctcttaggaagatcatacatgcagtccaagatgtcggttgccatgatttatttatgatgaaggtgccgatttcgaattggttgactttaaaaatgcagatttggcttttgcctttcccatggggtcagcattgctttcttggtgtagcaatagacaaccaccattcactttcatccaccgaagagaggtatcaggcattaaatgtcgcaattgctggatgttgatagttggtaagattgctttgagacttgaacgttaaaaatcattcagtgagcctgtattctgttaaccttagtgctctttagtgccccttctatgcatgagacattgttggaagaagtataattcctggtgaagtcaatagtgtacaaagtctttttcaggctgacatatactaattcttatctgttactgtgcttaacatatgaagaatgtggtacatcttctatgacatgtattaggctgctgcaaagttgcaattaagattcatttacaaagtaagatcagtacaagaatatgttttgttgcttctgtgacatgccagttttcctgattcgtgaatggagtaatgatgtgttgatgagttagcatgcacagtttatttaggaagagatgtctcgacacttcagcatttttgtcctgttaactctgacaaatttccacttcaaaggctcgtgaaatctaaatattgttcttccatgggttttctatttgagtttaccttttatgcaagtatgcaatgctcatcctggctgtgctgaagtgaacttgagattgtaaagttcgcaccagttctgcagttgaacatgattatgtccacaattcatgttcccccattcatttggcttgtaagtttctgccaatttcatgtgttaaatagtagtatgaaagtggacatgtggtagacttcctgatgaactatgggcatggtgacatattaaggttttgcttcactagaactagatgggaaatggattatttaacgttcttgttgggaattcatattgttttaacttgggacaggtttatcatgtcaattgagtagctacgtagaatggcctatgagctttcattacaatgcataagtttatggcagcattttgtgaattcccattgatttgtgaaaatttaaatggatggacaagtattatcttagataatgaaagatcaaatcctgcaagttgttaaaagcaatgtgtaatgtgtcttgctctcaaagtatcttatggttgggtggtggttttcttttcgtttttttttttgggggggggggtgtaatgtgtgacctcttcgaagttttctcttttttgcagttacattttgcttgaagtaatcccttccatttttttttttggcttcttctgctttttaaattatgtttcctagttcaagaacataattcaagcatgcatcacacggtaaggttattgcatcttaatgttagacttgttattgaatgggaatattgtcagatcattttttttcttgtaattttcatagttatgtgcatgtgttgtcaatcatgtaagactgtttggcattgtttagttgccaactgttacgatgttgatgagtaatattattattgaagcaatgggtatcctttttttaatttatgttttctgttttaagtttttatattttgtatgtgttacttgtcttgcatgttattgtcaaggtcctacccaggtgtgtttgctttggaaaaggaaacatgtttagtgaatttaagctgctactgtgccttgcacattgttcccttgaactttttaataattatttttgttggataatcgcctttaactaactttacttttgttatttgctttgggtagaccgtgagatcatcaccttactctggcagtttcaa

SEQ ID NO: 6230 - DNA, 923 bp, Manihot esculenta
  Intron number 5 from transcript cassava4.1_027153m (locus cassava4.1_027153m.g) derived from phytozome v7.0 (chr-ID scaffold07762; pos 548440 to 549362 reverse strand)
ttgctcaactctccgtttttgaggtagcaattcagaaacatcctctatctgctgttatatttaaagtaaagcggaaacaatttcttgcactatctttagtctagttgattttattttattttatttttgtccacattctttactcattcaacatctgaaattgaatggatatgtacaaagcaaaaatttgtagtgagttgttgcttgtactgtaaggtcagaacgttagaggaagacaaatgatgtttgaatctaatgattatgttatgacttctcaattttgtgttgcgatctcttttgttggacttggttaatctaactggtatacactgacttgagtaactaattgttgttgacactggtacataaaaatgaacattgtactgtcatagtggcatgctattgaataaattgactaaatcaccgagataatcatcatatggccttaggcagccttttacacaattctgtctattaagttccatatcttgtattctgtaaattttatttttgaaactgtttgatttcaaagcaagactatcatacaggaaatgtctattttagcaaaactgcaacaaatggtgctgagatttatttctctttctaattaatgttgctttgtgagctgagattagtcttacttttaaatgttcagaaccactttatctagtctcgactgtgcaataaaaatagcatttggcctttttcaagtttttctgagaacttggggcttccatttatttttatgagaaacgtagcgtttgatagaatattgaactagttttcttgtgttgccctccccattgcactggattttaacttgcactttgttctcttccttgtcaacagttgcctctttcctattctgacttcatttcatacaggtagatctgtgaagctgaatcaaggagattattggttgg

SEQ ID NO: 6231 - DNA, 558 bp, Manihot esculenta
  Intron number 1 from transcript cassava4.1_016746m (locus cassava4.1_016746m.g) derived from phytozome v7.0 (chr-ID scaffold06656; pos 1145108 to 1145665 reverse strand)
ctagtaagctcctgcagcaaccttttgtctgagtagtgatgctgctttttattttttttccctactcctcacaagtgaagataccagtcatgatattggcttcagcttaacattttttatatatatattttctttttaattttttcaagtgcaagtgtgctactaataattaccttttgaccttttgttttttggctaaaatatgttatttttactcctgcatattttttaggcacactattttttcttctcataaatatttttattcaactgatttcaggaaatgctctgtttcctagtgttgaatgccctgtttgttttttcttttaacaggattttttcccctctgtgagctatttatgggggctgaaaaatctcaacttgtttctcttttcagaatcctctcgcttctctcctattctctaatatatttcttctcattttattttctgtagctcatattcttcatttgaaaaactcaccttcttattctttgttctaacttctaatattttttattgttcttggttaggctgcacgtggtgtgtttgcaaggat

SEQ ID NO: 6232 - DNA, 805 bp, Manihot esculenta
  Intron number 5 from transcript cassava4.1_032561m (locus cassava4.1_032561m.g) derived from phytozome v7.0 (chr-ID scaffold08245; pos 23949 to 24753)
ttccacattcaaagaagctggggatcttacatcaggttatcctcttatctgatttagtaagtagtatatgaaccggcttctcctaaattatgctttgcattattgtaatttgacttgtagttttctccttaattttttcattcttttccagagctcaaatggttttatagatctcagtaagttgtaattcgcctgtgaagagtagtgaattctttcactactttgtttagcaagaaagaagacaggtcattgatttgagagattttgttggctacccatatggtcccatatatgaattcaatgacgagatgttattaaaatcaaattactttcaaatattctgtgcaactgttaattgttttttaatagtgcagcccttctggtatttgagttctgaaataaaatgacaagtggttacttgattttgtttttatttgtaccattcttatacctttgctgctttctgatgtaaatgctaggttttagggatcatgtcctcagtgtttgttcattggcattaaatatgtgagaattacatttgcaggaaatggagtgcttttgtagggagttgatagtatgatatatatatataaaaaaattgtggaccttggatggtatcactttttatttctgataatcaatattgctattgatgctggcactccttggtctcccttttttcctttatggttcaaagagctattacttttgcttttaacttcaggatgcctgcttctggttgtgaatgtgatgaggtttttaatactgaaacacggcaactcctgttattattcaacagatcttg

SEQ ID NO: 6233 - DNA, 1737 bp, Manihot esculenta
  Intron number 1 from transcript cassava4.1_031976m (locus cassava4.1_031976m.g) derived from phytozome v7.0 (chr-ID scaffold03410; pos 97134 to 98870 reverse strand)
aattttctctacactgctccaatttctcttatcaggtgctttctcttaccctcttttcaatctaagggtttctttcttccttccttcctttctttctttttgtatttcttttttatcctaatattaatctcttttatcgtaccctttggtttggttacttacaatttcattgataggtttcaacttaatcggacacagcatttgactgttactattcgatttcccttttctgttgtgatgagattgtggaagaacaaaaatgaagaaattaaccctaaagagagaccataaaaagtggaagaaggataatttgatgtagaggtcgagggtttagtcgttgattttggccctctgaaaacgctacaagaatctctccctcatgatttcttgaattcttataatattcctctgcctacagaaattggaacatccaatttgcgttgtattgcttaactggtatagtttttttttttttttttggggggggggagggtggggggtttattcttggcagcccgattagttatattcttcaaagtaattttctttgttagggttagagattataagattattgtgatatttaaaaatagagaataatttgaaggatattattgactttttctccttatcaaacagaatctgttaagataaattaagaaggatcaaatagtggttggttgctctgaaagggaaggaaagtttgaaatatttgtcggcgtcgctatttcaagatcagcgcagagttgcacctttaggaagttgaatcccagtgtttgatcaatggatgccaatgaaacatctgaagaaacgatctcaaatgtcgtatgttcaagtcctctcttttcccccaattagttgacctgtaattatgtttggactttgaaattatgctccgaatttaggattaggattagtggtaattctttgtcaacatgttgcttatcaagtgaaattacagacttaagacaccctagctactttttttttcatggatttatttccttctctctctctctctctctctctctctctctctctctctccatttctggataaaaattgagtatgatagtatggttatcagtgtatgggcttcactgatggaatgaagtagaatcgtaatttttttattggttccatattttctttggcaagatcagtgcaggtaacacatcaataagattatcaaactagactataagattttttttttgttactggaggtttttttggttgccacaatgctgtctcagctgtgatggattgagaatttgagaacttgtgagttgtgtttttagtagatgatgaaagctactttttatttttcagaatctcaagaaggtcaagagttcagatcattttgtctgttgtaatatctgttattagcagtaaaattaagttcagttgtccaaagttgtgtccaatgcagctggttttgatggaaattaccgggtgtagattttgctaacttctagtttgtcatgccaatgtaattggtatattagatgtttgtgaagcatctctaggcttacaacaacttctgcactaaatgccaagttctttattaaccatgcaatttgtcacaacaatttccttgtttgtgcttgtccagcagctattcctaattttcatgcgcataaatctaatataatgcctatctggtaagcttaactcatctcttttttccttttccaatcaggcaagtccaaaattggctggaactgttaactgggg

SEQ ID NO: 6234 - DNA, 864 bp, Manihot esculenta
  Intron number 12 from transcript cassava4.1_003775m (locus cassava4.1_003775m.g) derived from phytozome v7.0 (chr-ID scaffold09508; pos 145302 to 146165 reverse strand)
catcggcccccagttggtcgcaggtaagagtgttataatggctgctccttgggtacaattgttaaagaaatgttggataatctacaaaaatgataaaatgtagataatatatagatgggaaggtgagctctgtctgttggatggacttattatgagtgggaaattgaagtgtttgttgtagtaaggctacttaggtgcgttggatttgggtcccctgatacttcgctttattttgtgctcccatcccatccctttggatataaaggatgcacgtgggtagcaggagtgaccatgtggttggtactcaatattagccttttattcaacatcaagggcttgatattggtcctttttgtaaaaaaattaaaatcgtgtcaaacatttttaaaccaacattattccctaaagattaggtatattttttgatgggtttggatggtgtacttgtgcttttcatttgtgcagactgctaattatctagtctctttttgttggttctaaaacctgattgatggctctttatttgttacaactcaaatttgcctacatccttcccacggttaacctgtttgtcatctttaagctgttaactctttttcatgaaacatattcaggtaacatgtttgataatttttttttggcattatgaaatatttctattgcttgggtattactgatgaggcaggaagttactattgttcatattctgagaaattgctcattgatttacattttattagtgcactgttcatattgcagagattcacctgctaccaaaccaactaggaaattccatttttcattttaaatattctctaaatttctagtgtttttatttgtagggaacctctaataacaaatatc

SEQ ID NO: 6235 - DNA, 4261 bp, Manihot esculenta
  Intron number 2 from transcript cassava4.1_018976m (locus cassava4.1_018976m.g) derived from phytozome v7.0 (chr-ID scaffold12767; pos 27746 to 32006 reverse strand)
gtggaaggtaatttaaattatatttccattttacctactacatagcttgattttgatttttggtcacaatgcacaaatgattgtctcattcagtaaatattttttttaaacttcaataaatgaattctattgcatgcaatatggtaatatcatttatggatttgcatacttagaagatggtggttttttcttattctaagtatgccaaagagaacttatttgcttgacaaaaggcccatgagcaatattatgtttttagcttctgaagactaaatttctctccctagacactaagtttcaggaaatcttagttctatgttatcaccatttaacaaatacatgtttctggtattgtccttttggtgtaccagtcaacctacatagaacatagttgctcaatttcttatactcaatttttacttgtgactgtaattcccttgtgatgccatgccatgtggaaaaattaacgccatgtcaagattattggccaagtttgtgataatcatattatgctgcatggttggattaccttgggtaaatatctaaaatggatctaaatggatgtagacttagttgcttattatttttagatcacaattcaatagtagcttattgatgagtcaaggaagattcagtttagcaaccattcttataagttattctttttaattgtaaatttatgatctttaatttagaaattttagtggtgggaagtttaagaattctatttttattttgtgggaagtttaagcattctatttttatttaggaaacttaagtctgatcctcttggaagctgctgaatttcatgttgctgttcagtgtgcttgtagataccatgtcagttccatgtcaacagatcttatgcagaacccttcctcactaattttgatttttcaactctaaactcaaggctgatccacatgctatattagttcttgagaatataattacaactctaaaaagaccgagtaagaatttgataatgaagagcttgaagagcaacttgaagagtctaaagctttaatttttgagctttacatgttgaaatcaaggtgataagattgagttgtaaaattttgagaaacatattacagagaattgatgtgaatgagcaagagtttgaggctttgatcctaagggaagaagaaaaacacattgtcaagaagtcaatggaaattaaggacttatctaattctcgtgttcttagtgaatttagtcttccaactttagtcttgtgatggattaactatgttctattatttctaaggatgtgaaggaaaacaacttcaattcttttttctttaacactaaaagggttgagattgagtttcttcaaatcaggagataatgatggagtcaaggaggatttaattaaattttttattcaattttatattttaaaattaggattgttagataacaacaactaagccttaatcctaaactagttgagattggatgtatggatcatttttcacggattgatgtgttagacaccaagtctgaatcaatatcaaatttggtacggtttggaaccaaaataaccaaatgatcacctctacttccattcaacatagctagtataaccatagtcctgcagaacttactctaagctttgttaaggatcttatagtcacataatacacctgtctcattcttccgtttcatccatcctgtattgaccttgatagacacttaatacttgaattggtagcatttagccaccaaaaactctatccaaatgaatctcatttccgttttgtttgtgggagctaaactcacattgcatatacttaatgttatttatagtttaaagcccgcttgcaagagtccttcatatcttcatcttttcatcaactccactagtataatccactaagattataccatttgcaaataacatgcaccttggatatcatcttgaatgtgactggtcagctcatccataactaagatgacttcaatgcctatccctaatgtaagtccactgttgtgagaaactcttctgtcccctcctgatgccttatagttgtctgtctcctctttgagattggcttgtatctcccttagcacccacaaaataattatcttaggtacattagtatgctttcttctaggtcaatgatcaccatgtgcaaatcctttttccattatatatttcccgttaaatctttttactaaaattacaggctttgttgtagatccttcatgtaatgaccattatttattggttttcaagtagtcccttacctattaagtaggtatcagctgttactaataatgcattcgcctcactgttctcttccttttcatttctgagcagccgtccaaagcagtagtttctaccttctcaaaattttattcaaatttctcctcctaattcttcaacctctccttttaagtttggaattaccataaatgtctgtattctgcatgtggtttttgtaaaagttgtgttgtttttttttaatatttttttaaatttcttttcattatttgctattctattaatttacattattaattatataataaaatcttaagttctgccaatgccaagtataatttgagacttcggataagcaaatttaataataagtttagaacttctaaatttaatagtaagtttaaatcttgaatttagatttaatacttattttagttattgtacaacatttttaatgaaataggaagttgaaaaaaatggaaaatttaagctataatttttgttgataaaaatatgtttttaacagttagaagataataagttttgctatttgctaccttctcaaactaatttatgcttattaaaaaatgttttgtgtttggccgttaatgttatgtgatagccattacaagcctgttctccaatgcctgcaaccacgacctgcaaatgcagctgctatcgtgatttgaaactatggatctactaggcataaagtcaaatggttcttcaacactttagtagtgtcccatgtctgcatgtaatcaatttctcaaagtttatcgtttctcatttagtttatatacctctgaatatctccttctattcttaataacaggaactaaagtgctcctcatttattcttaatagcaggaactaaagtgctcctcttttactttttttattcttttctattttagcatgccattgtatagcttggttagccaaacttgaacctttccaaagcacttccatataaggaccattgggccacaggctcatcctatcttttatgttcttcaagacctctttaacttcagagttattattaatatctttaatttctaattttaatatttggaagtttaagatatcaattattatttaggaagtagtaactcgtcatactaaggaagttattagcattgttgttattttatttccccccaagttctaggactaataggattcacaagtctactgaaaatatctataacttctttgtctttagataggatatgactgacaattgattttgaggaataataaaaaattgagaattgtttaaatcccctttgagagttatattgtattcttcattaattatctatttgcttaggggaagaggtattttgatgtcttccttgcatgtgagacaaattcccggttgttatgtatgctgagtacatctgagtttgatctgatgggatttgcctaacaaagtgagttcagtagatttttttaagcttttacttgttgcttaatgcagtattgtcaaggcatgtattatatttttcactactactgtcagtgtcatttggttgaggggaacttaaagacacttcttgagtagcccattactccctctattttctatcatattccatcacagcagaagggggaaaagagaaaaagaaacccaaggtagaaagcaagacaacaagagaatggtcagaccaggtccagtgagactagcaagagaatctgactggcatatattcttttcatttgtgtccttgagattgtcagactgtattttatagctggtcttaatcaaggtcaaggtttgcctatgaagtggtttcttgaatctcttagcatgttatgggttatgctaagatgaaacagtaggcccattggggtcattttgaggacatctaagtttaaaggggaatgtattgtaataccttcatattggttcaattagctgtgttcttctgataactgtatgcattggcatctctgcttgcctctaataattagatggcattctgatgtaatatcttaacttcatcttgtggtaggcttttcttg

SEQ ID NO: 6236 - DNA, 2903 bp, Manihot esculenta
  Intron number 1 from transcript cassava4.1_012799m (locus cassava4.1_012799m.g) derived from phytozome v7.0 (chr-ID scaffold02431; pos 436046 to 438948)
gccctctctcgatctctccatatcctcctctcgaggtatgtttccttttattgtttttattttttatttttaactttgcataaactttcgtttgttagtaattattctgatttaaaaaaatcatctattggcgtacatattttgttgttagttattttgtgtttgttcgtggattgagaggcggttgttattggttttatatattaacttcattacatttcttgttgtagtaatttattttgatccagttgttgattttttttatgggtatttgggtttttaggttaatttgccagttattgttgaacattgaacttgctaagtgttgaatttgtgggggaatttttcggattaaaataaaggctaatgcttggatgaccttagattttctagtaatgcgttgtttgacaggatggcatttgtgatatggaaactgagaatagaagttctggttttctattttaatccttacttagggaagggaaaattagctgtgtgagaccacttaaagtttgttgatcagggtcgtggaaccttgaaagtgctatttggattacaaatgaccttttatactagcaaattctctgggagacatgcagtattgtaatgcattgtctagctgcaggaacatgtcatttttgcttcaggtgtaagctttaatgtttaaatcaagatgtggccttgatcttgatgataatgatagatttctaggacattattaaggtatatcttatgtttgtatgcattatgagcgaggatgtgcaatagcaaatgcataaaaggaaccaatgaaattgggattttacacatacaactggagaactttggattctgaaaatatatgaattgcctccaacatttttaaggatatcaaggtttcttgcaccgtgtttgatgaagaaacagattacaggcttagtaaccagttaagcgcacacgaaagcagtttactaaaaaggaggatacactaattccaatttagaggggaatttaaatggtttgggcttgtagaaacataaaaaaaaaaaaaacttactggctggcccctgcttcatagtatcttcgagcttatactctttagcttcttatttatgcattgattgttcccagtcgttgcatcttcaaaatgtcctcatcttgctatagggagttcagataccaacaaattgtatttttttcctattacatattctacttaaattagattggtgtctactgacgtgaaagtaaagagatggacatgaatgaaaagaggaatagctagaccctataagacaaggtggccaaacctaagagcaagaggtgtgaaacatttggctttgagtaataagctattacaatatgacggcagaacctggagacaaatgtgcaagctatgtttgtggacttggtattgtctacaatcattaaaaacatagccatgaaatcttggtaaagtgatgagggagaactgaaatggagaattgttgtcttagtcttgataaaaaaatcgtgattaaaaaatgatgtatgattttgatgcgaaaaaacaacatgccaaaatgagtgtggtagggataacactaagatggattatgtgagcatacatggaaggatccagttaagaatgagtacatataaagcaaaagggatgtagcaccaaatgaagatgtacattgcatctaactccactaaaattctaaaatcttcatagcattttgtaaatagatatatatgttttagttagatgcttcaaatagaagttttttttgccccaaaattaatagaagtatagttcatgtagctcgaggactaactaaaagtgtggatttatttattatgtttcaggattccttttatatgagttgtagtggcattgaaattttaatcatgttttggtgcatattccatgaaatggggtgtaatgtcaagatattcctcaattcctgttgaaaattatgttatgtccattgtgtatcatagaagttttagaggactagccacttttctggacagtccacattatggctccatcttcaaaagaccacagaatgtctcctttctagtttcatcacttcccaagaattgcctttgctactgtatatttgcagctttggtgccataaagccttgttggaaatggatgattgtttatgttgactaattgtctttgacaaattcatgaatgtattgacattaacttcatttgttttattatgacaagttgaatctgcattcagtttagtagttggaacttggaagaacaaagttaaattgacatgaattttacacagcactggcaaaaaatgcaaataaaagaacaaaggttgtgagcatttctgaaacaatataaagaggtaattcaaagtgaagcatgttcataaataaacttgtgatcgcatagaaatatatagtaattaatatttgtccactttatgttgaattgcaatttcagttcatatcccattaattagtttgaatccaacagaatgaattggtctaaatgaaattgaattttattcattatgctgaagtcaagttgtgaaaattggactcagtttttctattatgattaattttttgaggcattatagtcttgtatctcagctccatctgtttttcttttcttatagtttcttaaaaataactgtaacactgtcagctggttccccctggatagtctgtctcttgatcaagtttgtgtataggcctttcttgccatgttcctttttccctgtttgtcctcatttctttccagcatatcagtcactggcattttcactgctgttactagcatacagttcaattgtttggttttgattgcactaaaaattcctcttgttttactttattgtatagtgctgaattatgtgctccttgctgtcaataggtcagtgggaacttcctggacagagctttgacttc

SEQ ID NO: 6237 - DNA, 4094 bp, Manihot esculenta
  Intron number 3 from transcript cassava4.1_004057m (locus cassava4.1_004057m.g) derived from phytozome v7.0 (chr-ID scaffold04065; pos 209742 to 213835)
gcaaagagttcggtaagagcaatgcctttgagttatgagagcttgtgtaataattgtattgtttaatagtttttaatctgtcatagcgttattatacactgagtatattgccgatgtgtatggaataatatatttttttgtcttttctgtttgtttacatcatctttaatgatttgcttatactacatgcaacatataataagagcgttgctggagcattatgatgttggaaatttgtgggtgttgtctccccctttttaattgaatttgggccatctctgcatcaagaagtattagcaaatctatttgcttttagctggttcatatttcataaataagaacacatgtgccctttcttttgattctattcttccaacttttgttaaaattggggagcaagtaagctaatctttggaatttcatttgaggggataaacctcttgcaaactcttgatgcatataagaactcttaacatcttttgagggttgccttgaactgttttgtatggtaaaatagctctgtagaaaacagctagctaagattgattagacgaagaactaatggaaattggaacattaagctgtgaaccatgaaactcttatccttctgaaattttacaaatatgagattttaggaatttatccatctgattgactgatctattcagtcaaaatccataatcttaatactgtatgtgaaagatttgaatgatatatcattctatctactgctgagaatttaggtgaactgattgcttatatgatgaaccaaaatatactcgatggtgtatactagttattaaagtcatgcttttgcaaattcagggtcttctacattttcttgtttgttgagttgtgttgggaatatttattgattggttgaagtttatgtttaggtgttttcctttttaaaaattttttttggtctgtggggcaggggagagggtaggtggcatgaaattctgtttatattgtcttctctctctctctacctctctctcttatatgaatttgatggtatgatgacaaatatatattgagctagaagttagagttgaccttgaccgagtccatgaactaaatgaattgatggtatgatgacaaatgtatatttagctagatggtagcattgaccctgactggagtacatgagctgtattgcttcctatgttacactttgtgttatacccttttggcccatggttgtgaaaggcacaaggcgcattaaggcacaaggctcaggtgcactcctgagcaacgcaaggcgcaaaaaaacccctttaaaattcaagtaatataaagccaaatgcaataaagtaaattaccaaaacattaataaaaacttaagaagttcacaaggtaaaagctaaaatttaaaataaaagcaagtttctccatcacataaggaaatctaactaatcttcagccttcattaaaatcatcacaagcatcttcctcttcttcttcttctgaaactgcatcctcttcaaactcatcttcttcatgattaaaatctttttcatctttcttgtctcctcgtcttctatatccaaatcttcttctttctcatctttaagagttgaaggagtaggagaactaattctcaaattagaggataatgcttccccttttccttatttggtgttattggtatctttttgaactcccatagcatcagcaaccacattcgaagtcaaaccctaatcttcaaaaacaagttcatcgttttctatttctttctctgtctgacccaataaccattcattgcggtcatgtgcatcatatcggcgcctcaactctagattatacttgacaaacacaaagtcatttaatcatttttgagtaggcctatttctctttttagtgtgaatctgcaaaatatgctaattataataagtatggtttattaaaaatgtagttaaacacttaaatgtataattataaaggaacataatgttccacttatatgctcaaacatgctccaattatgctcacaactagatgcactgcaagtgaggctaagtactttcataaacacattaatgaatattttaaaaaaattacaagaaaaagatgaaatacttaattgtttataaaccaatctagagatatactcatgcagttgagttctccatcttttatcaataatttcaaaaacttcattgtatttgatctcattttctctaaatgacttcattattgtttctttagccctatccatggtctcataaatataacccattgcagtcattttgtcaccatcaaccaatttaagcactcgtaccaatggaccaaataactcaagaatataaattgttttactccaaaagctaggcatcaagacaatactacttcccttgcccacttacttgaagtccattcttcagaagtaaacatcttttttaaatttgtcataagttgttgaagggtgagaaaaacagttgcaaatcttgtgatagcaggcctaactataacctgcggatctccttaaattattcacaacactaacacctgggcgtacatagatgtacccatttagagtaactgccttcttaattgtgttgtgaatttgggatgttttttcaatatcctccaggattaaatctatgcaatgggcagcacaaggagtccaatacaaatgctttcgcttgacttctaacaattttcttaaaaacataacaaataaacaaattaatttaaattaacatttaatgaacacataaactgaaaaaacacaagtaaacttaattagaaatatctccaagcacacaattgctaacattgtctatcgcaatttgcaccacattttcttaaccaacacgttgcacactttatcaataagctcacacatttttttaaccagtatttgtgtactcttaagacatccacagactcccgaaaaacagttcggtccacattctcttaaccaacacgcagcacactttatcaataagttcacacattttttcaccagtatttgtgtactcttaaggcatccatagactctcgaaaaacagttcggtgaattcactaagaaattaatcaaagccctgtgcctcttatcagtccgaccatccaccataatagaacaaccaaattttttccaatcttcttcatacaatgccaatgactttctcacattatcaacttctttcttcaataaaggcactcacatctcatgacttcaaaccaatctcatattgatcaatagattctattattatttaaatagttgggtgatttaccacgttaaaaggaattgcagtagaatagattcactgagctatatctttgcaagctttctttcacaattccttcttacaagcgtcattgttagtggttttggccttgactgaagtgagttattttacaatcagaaattgtgtgcttttgcagaattacttaaatcaacatcatagtatcctacttgaaagcagagattttgttttgttttgtttggtttttgccttttattttgaaagagttttttatttgcccttccatttccaccccttcttttcatagcatttgtttactttttcatgaaaaatgaatcgtggacttgctgtcttttattttgctaaaattttgagtcttgaatactaattccaagttcatttatcatgaataaatgttgattagcactgcagttgcttgtccgctattgtctctggtcatgccaagataatctatttgcccagttgaaattttttgtaaggttgggtggggggatgaaaaagaagcttatgatttggggttccttagtacttactgtgatgggtttttggtatatggattagtagatattcaaatggattttgaggcaatatgtcaataaatatggtgcatttaatcagtatacaatgttggaaatgtgtttgttttaaggtgcctttctctcttaataatcattggataatgtgattgctcttgattgcactagtgtattgatatgatgataagcaatctaatagctgaggctaatagttaactgttttcttagaggtgagcttgagagcacattgaatattaggataatcaatgccttctcttttccaggttctcaattcatcggaaaaatcaaaacccaaaac

SEQ ID NO: 6238 - DNA, 731 bp, Manihot esculenta
  Intron number 1 from transcript cassava4.1_022068m (locus cassava4.1_022068m.g) derived from phytozome v7.0 (chr-ID scaffold03199; pos 60877 to 61607 reverse strand)
tcagttcaaggctcttccgatccctatctcgtcgggtaattttgtcttctttgatttgctgttcttgttctttcatggtttgcattgatgggttttcgttctttttttttttcttttaataatttgtggttaatcttcatgaacgtctaacaattaatgtatttcattggtaaatttggttcaaggtctttctttttattgattgggctaagcaattatcaacatattttttgtttcctacatatacatgtgctctttgcacaatggccaaaagtataagaaaagtaaagaaaagtaaagaaaaagattcagatgttagttcatgatggtttgtgtaagaaaaaatggattctttgcttttctagttttcttcgtaattgtccttctctgtaacaaaaaagagactttgacaattgattgagtttgatataatcaaatttattgcttgatctttatcatctgaaattgatttgtgataatgcgatttatattgtagacaaatgtttttgttggactaattttgtttttgctctcctggctttgggtgcccttgtaatacatctgtctcggttcacttcagttttttctgcagtttcatacttaaattaggacaatattgactacttgtgtttttctttttggtagttaattatgggcattaactatattgttcttggtttctttgttttgttccagactctattttacaaaagtgaaattgggctctcctc

SEQ ID NO: 6239 - DNA, 1964 bp, Manihot esculenta
  Intron number 2 from transcript cassava4.1_001798m (locus cassava4.1_001798m.g) derived from phytozome v7.0 (chr-ID scaffold07520; pos 1097199 to 1099162)
gtttttactctgtcataccggtgaggattgataagccaattctgtctcattgatctttactattaatttttgctggatcttgagttttctgagggaatcttaagtgacataggtgcgaagaaatgagttcaattctctttctctctctctcccgctgttcctttacactgattttcaatgattatttgctttgaaagattcaattttttagaaatttgctatgttctgcttatgtactttgtgtgtcagacacatgttactattgtgcttctctctgtctattttttttgaaaagatagatagatagatagagagacagagagagagagagagagaaagagagagacagagagagagtagtttttacgtgtcaaactattttttatttactggtaaatttgtagataattcttactttctgtttgaagtagcatacaaattgtactaggtggattgccccagaatagaacttcttaagagtttcagttcagatgttcaatccagttatacaagaatattgtacgtcctcatttattgaactcatatgaacacacagagacaaagagagacggagaaagaagagggggggggggagagatctgatatgggcaagtgagttgtgggtcagtcacactttgagtggctgtatttattgtaaaccttttagttgtggagattgtcttgattgcaaaatttagttgcaagatgtccaatcagtaaaaaatgaaataaaaaaattttgattatcaatttacatagcatgggaaaggaattgcagttattttgactaatttatttatttagattggtgtaaaaagagttttaaatttctaatttgaccatctttacacaattgcaacaaagttgccaaaattataaggtttagacataattgcaaaaatatccaaatatttggattttcctgacaatgaagccaataacaaagtgaaatgtttaaagttttgaattggcaatggagttgtggttattcaaactaggtaatggaaggctaaggttttgatttattcttttaatgacatcctttttggtagttaataaactttggaaattaaggtcttacttaaaggtaaggcttgttttatttgcattctcgataagatagacgttttgcaaaagtggaggcacaacaaggccttatctctggattgttgtgtcgagagccgaagcacggatgaatccattttcattgtcttggtttatttggtattggcaacatggtgtttggggagaattgagtacatctagagactcgatggagaggttttgcagtttgaagtaggtgaaagtactttggaattgtgttttctatgcagttgtatttgggtggaaagaatgcctgaattttaaaagattaggctttgttgtggattaggtggtttcttcgtcttctttgtgggtatatgccttgatggcttttagaggaatgttttatatattttctcatgatgagaaagaaggattatttgatggctgtatcagttatcattgaaagtgattgacatagctaggagctaatgttaagttttccactcagtgggacaactctaatttgaattttcaacatttaccatgagattggtggtctatctcacagtgtgtgccctcttgtacattttaatttgtttgtagcttttccactttgaaacaggatgctaagattttcttgctttctaaaaattatgtaccatgttgcaggaatttttcttccttacattgttgaaaattatgataaatctaatgttatgtgtgcatttacttattcctctaaatattacatgttcaaagaggtgatgttatggattagttatatttctcttcccaccttaaactgtttatatcggttttctgctcgatttgaagcatctgattcttttgattttaaactgattgttatgtgattgtggacaggataaaaggctaaaggagctctttgatagtattcc

SEQ ID NO: 6240 - DNA, 3105 bp, Manihot esculenta
  Intron number 2 from transcript cassava4.1_017191m (locus cassava4.1_017191m.g) derived from phytozome v7.0 (chr-ID scaffold00631; pos 34595 to 37699)
ttgtgggtatgaactattgttgatcacatctgtaactgaagcatgctgcatcatgatcaaaatagcagctttttttgctagcttagatgttttacacttctctctagtttcctttttatatttggaatggatggtaattctattgattttagattggaaagttcgctcacatttgcttcaaattaattctgaactcacatggcatcacaaattaacattgtactttatgaagataaatttgaatggattgaggaaatatagtggtttgaagttgcagtctccttgttgatagatatactgcattatttagtttaaagtttaatctatgcctagacttttgaactttgatatatctatttttctatgtagatatttgagaagaaattaacaaattgctgagagagatcataggataggaagagaaacgatggtatcgagagaagaagagggatttcttgataattctggagtggaattacgaaacgaaactacagtatgcagttatttagcagctgtctgattgtaactaactcttcaatagcccttaacaacatctacttagaggcattcagtttcagttttggtttcagtttctatatggttctagctaagaactcgaataagaaccaacattcatttgttttaatttttaggaaccagactttgaaccaaactttggctctggtttcagtttatttttaagcaatttcaacacagttttggctcgatttttgttcttgtttcaatattattgtgacttgaatgttgttttcaatttcagttcagatcttggtttttacgtacaaaattgcaatattcttatgttcattttaaaatggtaaacaattttaaatttctaatatcaaacaatgataaaattaaaaatattaacataataataataataataataataataataataataataataataataataataatattttattatcaaaatatgttatatataattcttaataagaatattgtattatcttaataagaatattatattattttctatgtatttcttaattaatgatttttatttaaaagatgaatatgtaactaacatctaaaattatattttatgactaacttgtgattcaatcacacaattggagattagaagataatttaatgcatatataattgaaatcttaaaagtagaaaaatatatattatattatacactaacaattaatgataaattaggttatatatctatctatctatatatataaatataattctatcaaaattataaaaatatctaaaagtatatttataaaattagttcttcagtttgtttctgatttggaatggttctaatcatgttccaatttcagtccttgatgaagaattgaactgaaccagtaaaattagtttggtaggttcttatagcaactcttttttttccaattccgatactgtacggtacaatcctccgattagcttctgaaccccaggaaatgtacatagccctacttgtcatagcagtttaatttccaccaaccacactaactgattgagctactattattctttataactgaaaccaccataaccctatctacttcttattctttttataccttcttctatagcatgatatttcagttagatttttccttttggctctaatatggtctcccaaagcttaactaattattcaggttggggaaagacttggtggttttggagaggttggggaaaggtttgggtttcttgccttctattaattgttcttgcaattttactatcttcacagtctgagacagggagtcaggcttcaacattctcaccatcaatctgatctcatctttcaatccaccaataaaattagacaaagaatagccttccctcaactctggcattattctctccattcttaccttaaatcctcaaacatgctttgataatcttgtattgttccttcttgccttgacttattaagtttctctgctacgtcctccaatcctggatccccaaatctattgcatattaccttctcaaattcatcccaggtacgagttcttcctttgttctagttatggaactaagcatcacctttttttattaaaagaggttggttatgttcactctttgtttactaggcaaaactttgaagtatttgatgcatttcctcagccacctcctcatatcatccccactattaaatgtagctagttcaattttaggcaagagaggaaatttcggcaagaatggagacataccttccgtagtaagaagcagattagattagagttgagatttaggtaggagacctctgtcatccccttgatttattgaaggattcacatgatttccagggccaatcccttcttcagaggaactgccggcttctttgttctttttcttggccaatttctcagccctcatactcaccatatacgatcgcaattctttcagaattacattgttgtcttgggcacactttgaattcttccgtacttcctccttgagatcttttgattctccactgttcctttgggtcatttcttgtagctcccgtagctgttcctctatttcttcaattctcaccatttcttgactgattatggcggatcttgtcatcgcaacttcaagggaaattgagattctgctgtcggattcacagctctgatacgaatgttagagttggtctctaaatgtattaggatttgggaagaaagagatttagataaagagaataagagatgagagtaagaagggaaggaagattatatatatatatttatacattcttctactgttacagtcaagtagttacaagtggttacaactaactattattcctgccttctttaactacttctagttaagtagttacaagagagagagagagagaggtatttatacattcttctattgttacagttaagtagttacaagtggttacaaccaactattattcccgccttctttaactacttaacttccctgagatctttccagagttttttccctgttaactattaggttaatctgtttacttatgggctactttgcatgcatggatcggtaatattttttcctcattatattctggatatcgttttcaggaaaaattagttc

SEQ ID NO: 6241 - DNA, 1713 bp, Manihot esculenta
  Intron number 1 from transcript cassava4.1_003945m (locus cassava4.1_003945m.g) derived from phytozome v7.0 (chr-ID scaffold07069; pos 206191 to 207903 reverse strand)
gcctctgttcctcgccgcgtcctcagtcactgcaggtttgaatgggttttgagagtgtggtttgagacgtgtgctttctaagatttttgatattttgatgcgggtttctgaaatttgtggaaatgttaagatttattgaatgtgcttggggctgtaattgtgagatttattgaaacttctttgaaataaagactattgtgaatggattgagagtttttttagtgagattattgaaatggatttctgaactttattgaaatggatttctgaattttattgaaatgttaatatgagatttctgaaattattgtgaatgccaagacttatgtaaatgtgctgagggttataattgtgagatttactgaaatttgttgaaataaacactattgtgaatgaattcaaagttatttttgtgagattataatggatttctgaattttattgaaatgctaatgtgagattttgtgtcgtttcttttttttttttttttttggattatgagttaatcgggttcgtatagtttcgggtagtaaatgggtaattggtaaaagggtttgggacagataggagtagagaaatccaatttttaaacgggtttggatagtgtatctgtaatcaggtataccctacctggtaccatccctaaataatgattgaacccttaagagtttcaagataatttcaattcattgagctatttgttgtagtttgtgataatattgctttaaaatgtctttgtgattctctttaatggaacttttttctatgttctgtacttattattgtgttgatgaatttagatggaatagattgataaatgcggatgaattgtgttgatgaacttggatggcttatgtaatgaatttaggtggattgtgctggtgaataatttaaatagcttgtgtttcatttatgatttattaatgttaattgttttgattttatcaaaatttgtatttttataattcattttctacatatttgtagtcatatttattgctctgtgggttcaggtcagatatttgacccaagtgggctattttttgtgttagcatatcagcaaaatcacttacatttagtcgggttcggttgggtttgggtattatgtggataattttaaatgggtttgggatcaacatgggtagtgaatcctttaaacgagtttgggtattataattataagtgggtttggatttgggtacccataattttgcagtaccctacccggattccaattcttagtatttcttctccttacatctatttcccccctttgattttatgttgactgttgggtgaatgagttctcccaatttggtgattctgataggttcctgcagtgttttgggacgcatgatctgagtcgccgaatacaggggagttggacgaaatgtgagctaaattcttatgtttagctcctatgaaaaatcacctgggaaaatggagaattctaatgggaatccctctaactgtctacaaattgttagtgtagaagctatataaaaacgcttgcttccttgtagaatgatctatatgtacctatacagttgaatggtcaggaaacatatatcttgtttattttaaaattttaatttactttggaatgaaatcaaattgaatgatgaaattaatggagaatgttgtgtttctggttaagctatttttgtgtttaactttgatattaggaagtgggggaagcttttgattctaact

SEQ ID NO: 6242 - DNA, 1619 bp, Manihot esculenta
  Intron number 2 from transcript cassava4.1_028573m (locus cassava4.1_028573m.g) derived from phytozome v7.0 (chr-ID scaffold04137; pos 28805 to 30423 reverse strand)
gcacaatcatttgaggccagacatcaaggttaatttctccccctcttcttcttctattgctttttcccccatttttcatagatcaattttacctttctgaatcacatcgatacacatctgtgttttagagatgataattactctcaattcgactacaatcacactcaatttatttaagttttaatattttgaggtgattataaatttttttttgttttaattctcaaaaaacttttttccatctctcatcgatcaaattcactttcctgaatcatatctgtgtttcgaaaatgataattactctcggttcgaccataatcacattcattttattcaatttttttaatcatattttagcttaatattgtgatacggttatgaaaaattttcttcattttattttagaatttttttttcgtagatcaaattcactgttctaaatcatatcgatgtatatttactttagagatatattttttctcaatttgactataattgtactcaatttatttaatttatttaattcttattttattttaatattatgatgcaattgcaaaaatatcttttttacttcaattcataaaattcttttcatcatttttcatcaatcaaatttaccatcttaaattatgtcgatatatatttatcttttggaaatgataaatatttttagtttggccacggtcatacttaatttatttaaattctattttatcttaatattataatgtaattttgaaaaaatctttttgtttcaattctcaaaaatcctttttctattttttatcgattaaattaaccttcttgaatcatatcgataaatatttatattttaaacaaaaatgacagttatgtttgattcgaacacgattgcactcaatttatttaaaattttgatgttattttatgttaatattataatgctattgtggaaaaatctttttgtttcaatatgctttttcccatttttcatcaatcaaatttaccttttcaagtatagagaatctctttgtttcgattttcaaaatgttgttttgataataatataaaaaatcaatttatttttatagtattttaatattataattttaatacaaaatgcattgttatttaagtttatattacaaatcaaaattttaaaacatttcttaagcaacttttgtagattgcttcactgaagaattagcgaaatactacacaaaattgataaaatggtgttaaataatactagagaagacctaaaagaaaatgaaatgaatagagattattacattggttttgtgtccttttgtgaaggatgtaaacacttgccttgttaattattttgtcttttcgaaattgacaacgcatggacatgcaaagtgacgagtgccagattggactaggattatctaaaacagatttcgtcagaataataaactataaaatgccaaatttatccttagaaattcttctattgtcatgtaaaaactctccatttctatgggtattttaggtaatatactcatcataaagtaaagaaccctagctacctagaaacctttttttttttttttggaagtttttaaaggttgctagctagattgatgacaatgtgttgatgaacatgcagaaag

SEQ ID NO: 6243 - DNA, 1315 bp, Manihot esculenta
  Intron number 1 from transcript cassava4.1_007503m (locus cassava4.1_007503m.g) derived from phytozome v7.0 (chr-ID scaffold07520; pos 1242481 to 1243795)
gagaatttgaagaagaagaggtgagatcgtctaggatataacttggtccttattttagcttaatttgctacgcatgtgctttttagttgaattaactgaatgatagcttttgtccctcagaatttttggtagaagggaggggggggggggagttaagttcctagctgctgtttcacttgcaggctcaaatttgttattgctgacttgatttatttcgtgcttttgtgtcgattttttctgattcttttgattgattccttgcatattctttggcaaacattactactgattcttaattatctttttgtagtattttgcaggtgcttttgcttagaactctgctattgtttatttattaatttattgctaccttatgtgggaatataggtgctggatattctttgtttgatgccattgtttgttgtcttgttggtaaatatgaagtatttgtttaactgggcaaatccacgacatagtcaatgtggttaaatgttcttcaaataatagaattgtaccctgttgttttttatgtgaaagtatagccttctagcacatgtaagaggataagatgcaacttttttgttttgtatccaatgctttcaattcttctattttctaggcatgaatgcatttgagaattttttgatttatttatttattctccataattcctgtagtgatatgataactagtaagtaaatccttggagagttggcttcttagctacatctcctttttttatattttattatttcctaaaatgtggttgtatgaaatgatattttctgtttggtttcagtacagttgcacttctctttaattttggtcttattagccactggatatattgttgatgccttacttttgcttgccttgtgattgcaaaatgtatttttgtctattagcctgctcatctgtttttgttttcagtatgaagtgtttctcatggccagtttcatgtatagaaatacagttgtatacctgattttttgtgtaatggagtagtttgtagttattgactctacaattatagaaatatttcatgtcatgtgtgatgttttgttcatttttcagttaacatgaattcacaatttagtaatatttgatgggtacagagcttcttagtttatttgcagatattgttattattatgttcaaacttctttgctttataaagcaataatgtttggcatttttgtgtatttggttagtcttttttgtggtggtgatctatttttttaacttactgggattcatgtcttgctaatttttgtgacatccttaactgactatggtttctaactatgatggcagg

SEQ ID NO: 6244 - DNA, 2044 bp, Manihot esculenta
  Intron number 3 from transcript cassava4.1_033827m (locus cassava4.1_033827m.g) derived from phytozome v7.0 (chr-ID scaffold02998; pos 100682 to 102725)
gtgcattgcgagggttggaggtattaacgttacctgtgaattgcataataaaatggccacatgcatattgtccatattgcatgcatacaacacgtgattgctatgttctgttttgaaagttggttgctgcttcaatgtagattaggggagagagagagtgtgtgggtgcagggaggggtgcctgcaacttgtgaatcctatgcgctgttttgaaggttggattgctcctcccatgtagattaggagggagacagggagagtgtgttggtgggggtgggggaggagtagactacctaattcatttttattcttatttttctacaatggattacatgtgcagactgttaatttatgtgtggggtctttcaagaataagcacaagaggtggtgccaaatactactctctctctctctctctctctttcgtgtaactacctttgacctctaaagttttctctgttctggtctaaaactttggtcagttgggttttgcggtgctaaggaagaattctctaaataacatgatatctttgtaatataacttttatgatgcagtgtcaacgtgatttcctttaacaaatgaaagatctgtatgttttaaatggacactaaaattttagtgaagtgtggttagatgaccttggagccacaaattggctaccaaaaacttttggctccaaacatagttgtatataacgaaatttatgaataatgtattataaatcatcggaagatataatatagcagaataaatgtgaaaaacatttgactgtattggtatagactaggggtgagcaaacggttcgctaactgaaccaaaccaagaaaaagtgaaaaccaaattattgaagaataaaaatccaaactgattctagtatgtatattgaactgaaaattttttgttatttcggttcagtaaattggctttcttcacaattcacagtttaaaaatacaattattattcatagtttagattcctaatttcacattccaaatcacaaaacataattcacattcacaaagaggaaggctttattcgcaatttcaagaacaagaagaaatttcaatgtagcaatttcataatgaaacagacatctgaatctttgaataacaatctctaagcttaatacaagagaaatcgaatctaaacaatgcaaaacaccaaaaatgcatggactgtgttcctgcaatggaggcatcgctgccctgcctataaggctcggaggtaaggtcacaatggaggccacaaagcttcaaacaaggggctgtagctgagaggcaaatctgaagatgaggttgtgatgggtgggtgtggcaggtcaggtcaaagggcaaggcgctgctgggtgttgggccactgttggcaaggctacaagaagaagaggctgtcaaccttactcgtgaaaaagaagacttaagaagaagaagaagaagaagaagaagaagaataaatgaaaaaaaaaaaaaagaagatgcctgaaagaagaaaatgaaaaaaagggctactgggtgattgggaggaagacttcctggaagagtgagagagagggacgtgcagagagggaaaaaatagattatgtagtggtaagttaactaatctagtgcaaaatggtcagtttaagacaggttggtcccttttgtttttcttatttttaaattttgaaaaccaaaccgaaaactgaaaattatatatttttaaaccaaatcaaatttctgaattaaatcagttaagtcagtttatttggttcaaattgaataatgctcactcctagtataggcttccaagtcaaactgtgaaatacaatacatttttaacttgtacattttctaatgggtctgttactgatgattgcatttacttaagttgtttgatggtgattgcttagagagtaaaagctaatctagctttcaagcatgaaacaaacttctattaaatattgataagcttgcaagtagcttgaggcatgcggctcagctttcttcatttaatatatatattttttctgtgatctcagacattcagccaactgtgtacatttgatt

SEQ ID NO: 6245 - DNA, 556 bp, Manihot esculenta
  Intron number 1 from transcript cassava4.1_008020m (locus cassava4.1_008020m.g) derived from phytozome v7.0 (chr-ID scaffold07806; pos 79345 to 79900 reverse strand)
ggtcttggagctcgtgatctgtggatctgcattatgtgggtcttgagactcttactttatgtagttttaagtgcatttgacacctaattgcttggttttgtccgcagttgtcactctagtttcaaattttatgttcctgaagtttagaattctgagagattttagttgctttagcttgatttttatctgggtttgtgtattttgtttttggagttaagggtatgtatctgaggctatgaacggattataattagctttgttcctctataatgagaatgctgcattgaggattttggaggttttccaatttggcaaaaggaactggggatttagatcttggctattcaagttgttagagcaagtgatggaagtgaatataatttgttgcaatgtgatttgctttgagactcgacttcgtctttgtcaactgatatgatttttgttttttggggtcaatttctcttgttttatcttgggaacatgaattacaagtgtgttcttttgtcagattactttctcctaatgatattaagctttctgtttcatgtgtcaggtt

SEQ ID NO: 6246 - DNA, 734 bp, Manihot esculenta
  Intron number 1 from transcript cassava4.1_001477m (locus cassava4.1_001477m.g) derived from phytozome v7.0 (chr-ID scaffold02620; pos 121324 to 122057)
ttttcttcggggttttatcagattcctagtgtaaggtacttgtctgatactaatctctgtatgtatcttttgatttcatttcactaagagatctgcttcttatttttcatttttcatttctttttgcgtttgtgtggttttgtgtttgatgttgtggcgctacagtgggctttgtgactttttggggttttgggttttgttactacttgaaggatcctgttcctgactcttgtttttatgaaccgcctcttgttgctgttgtttttttttttggactgttcatgacttgcttgctagtatttttttcgctgctagtactgtttgtctaagagaagtgattgctttgattcaaatccttggttgtcattatgatatggatcatttgtagttcattttgtaatctgctgaagcgtgcttttactgtttatttatttttgtagaaatcgtagcattgcattgtagagaatttagatgtttaatttcaaccaggtggaattagattgtaaaaaatgtgtgcatatgctatcgtaactggatataatttaaagtcactttgtcattagtggggatttatttttatccatgtactcgtttgcttcttagctattctgtagttctccaacttctggaatttttctttgctctgttagttttgttcatctgtgttcccttttattattagtatttatgtttattgaattttgtgtatttcttttgttacagtgttgaaagaa

SEQ ID NO: 6247 - DNA, 2834 bp, Manihot esculenta
  Intron number 2 from transcript cassava4.1_016716m (locus cassava4.1_016716m.g) derived from phytozome v7.0 (chr-ID scaffold08673; pos 209877 to 212710)
agttctgcacaaggtatctagttgtgcttatatatatatatatatatatatatatgtctgcaaatccgtatagccggtagagaaaatgattttagagccttacaaacacattttgcattgtttttctacgtttcctttgatttgttggttctgaagttttacaaattatggagccgaatgtgctgtaactgatccttgatttccatctaaataaatgtgaatgtccactgacctgtagatgagtgcatgtattatgtactgatagatacttttacatggggtggtcaggggaggttggttgttcttacaatcccagtggtctaaagcgccttcatgaagttattcagtaaaagatttttgtcattattgatagcttcataagttgtatttatataagttgaaaactgaggcatttttctcatgcaacttttggctagttagtactagtttagagtttagctaggtttaatgggtttataatagatggcagaagaatggattgatcttttatttgcaggatatgattgtagaagatagatgaactcgttattttgacctttcatgtgaactttgtgtagttcgaattcgaatattagatttcagtttcttctccatatatgactcattattttgacctttcatgtgaattatgtgtagttcgaattcgaatattagatttcagtttcttctccatatatgattatgacttttgaatgagatttgttctttgggtgtcatgggaaggggaaggctaaaacttatatccaatgtaatggaagaaggcgaagagctagtatttaaacacaataatacattatatttgttgattgatcttttacatatcatagttgagatatgaatacttaacacattcaccattttgtaaattacattgtgataagagaatcttaaaggcaatgttatcaagacaagggtcgacgctaaggtgatgggattccttaaatggatttaaatcgcggttgcggccacattcatggtcgtaggtaacagaaataggctcatcacagcagcaacataatggtaacgacctaccactatgcaaattttttttaaaaaatatgcataattcatgaaattaaaagatatttaaagttatgagtataacgaagataccagtcaaataatcaatattaatacatcaaataaatacattcagcccatcattattagacatctttcactataattaatttatagctaaaataacaatatagataacatagatagtaaaagataattcttcatactacaatattgacaaaaagaacttgacatccaacattattttatttaacaaataagtaaaataaggatgaataactcaaattttatgaggtataaatatatagaattaaaaaaatagttgatgatcttagtttaagagaaaagaagcgagaaatttatagaagatagttaacttttgatagaaatttgagaaaagtgatatataacagtataaagctttccaatctaggaaaaaaattttgagttgttgcttccgtatggctttaaaaaaaaggtctgttacttaacggtaaataacggtccgttatataatggttgttacaggaatacatttttcttgccctttaaataacgggtgtaatggtaatgggaggatcaaaaacctataaataacagcatttatgtaccataacagcctttatttaaaaccatggtcccttatcgccttagacgagatgccagagctgaggaacacctttttgaagtgaggcaccatacttgtatttctatatatatatatatatatatatatatatgtatgtatgtatgtatgtatgtataatttatagatattgtattaattccttcttaattagttaattagatagcatagttgtaaggttatatatatacctaatttgttagctgaatgataggcatacttgtatataaatatgtaatctttttcaatattggaatatacttgaatattagaagttaattacatatatattgtattatttcttttctaattagttaagatatttatatatatatatatacatatatatatccttataattatgctaactaataaagaatatatccctaattagttagcataattatacggatatacatctgtataattagccttattagttattataggatataaacccctaattaattagcataattatgtggttatatcctctaattagtacctaaaatttagttcttcaattagctgcttcaaaaggaaatatggattaggatttagtctttcaaaacaaagaaaagaaagggcatgcatgttattttcaagaggcgacacctcacttcggtctcgtaccacaagctaggcaaggaaagtcgctcgcctcttgcaagaggcctcgcgccacccggcaccttttgtcacctaattaacactgcttaaaggaaataaagattgaagaaaaactgcacattttcattttctgtggtcataatcagatactttagaggtaatggacaagccaagttggtgattctgaccaagcacttgtattgactaacatttttgttctagttatttatcaattcctttgtgaccaattaataatgctgcaacaaaattttgtatttaaattgataaggttgtgggtgaaaactatgttctttccatgaattcctttcactagtgatttgttttatatttttatctgttgacatgtggtagataatagcaactataataatgactgtcacgtattgctttacacccttttcacccttgctgctgccttattcatttttgtttgcaactagatcctgctgctgctacatctcaagcaagtagagag

SEQ ID NO: 6248 - DNA, 1070 bp, Manihot esculenta
  Intron number 1 from transcript cassava4.1_005009m (locus cassava4.1_003792m.g) derived from phytozome v7.0 (chr-ID scaffold05749; pos 76084 to 77153)
gcaggtgcttgtaattttcattactctgcattttcttttcattatttttcttttctagttccgttcaccgtttcaaattcaattaccgagttgatttcaaattatccttttcactggctactctataatcctatatgttagttgaaaggtttagcttctctttgctgtaaatccatggcacacgagttggtttagttttgatttgaactgtttgttgactttttgatatttgttatgcgaagataagcttttttgatgtgattttctttttagcttcttcctgtgtaattcttcttttttaatttattggtgtaaggattaaggattgcataatttggaatcaagtattcaatttaaaggaagaatgataaccttttctatatgggctgtgtttatttttttaatcaatttattctctttatttatatgtaatgaagaatggaaaaagttagcattgctaggaaaatctgcaacattaacaacacatggttccaacatattgaataaggaatttacggatatgggatctaataaaattccaaattcttatgcagcaatgtcagggaagattgttcaaaatatttttgtagctcagaataggctgtccgggacccaataccgaagggacttatgtgccccttatacctgcaactcgcttcccttttgtggaggcaagttggcatggactagcatatcttccatgcaaatgcacaaattaccacaatatcagaggggttttgttaaccgtggaaatgtttactgcaatggtctgttctagactcttattatccaggttgatataaagagtagtaattgcattttgaactcctatgaatacattccagtttctttgatcgtcatgattcatcaacatatttctgtattcaatctatgcttgtgcatatatttttctagttgtcatgacagacatagatgtggagtggcactcactctagtttttaattttgaaagtcataaggttttcatatttctatattttgcacttaaatcattcttttgggactcttcttgcagctgcttcgtccacaactgcaataccacatctagac

SEQ ID NO: 6249 - DNA, 2201 bp, Manihot esculenta
  Intron number 2 from transcript cassava4.1_000073m (locus cassava4.1_000073m.g) derived from phytozome v7.0 (chr-ID scaffold04681; pos 531243 to 533443 reverse strand)
cggttattttttagctgctgtggttatttattggtgtaagtttatcccactcataatggttacgttggattatcattggctttattgttattgctagcatcattgttgttaagtagaactgaagtattgagtgaaatttatagaattgaagtattaattgtacctttattggatcatgaatggctgcatgctgtcctgcatattagattgtccatctgcaataggataagaccgaatccacttcactacttctgaaattgagcataacaatttcttctgctttgttcaaacagtctgttcattgttttgaagactttgttgtttcagtcagcagtactaggtatttatgttgtgatcggtcctatgcccatgcatgagaatccttgttttctcttccggattaccaacatgcaacatctagttatgcagcagaacttgaattttgaaaatttgtgatttgtgatttatgatttatataagggagaagaatgttatgcaaaaaaaggacactatttttttttttgagttgttggttttatatataattaaactcttccaattttgttattgtagttgaaaattagatttcaatttaactggttgatattacctaataaactatgttttaaactaaactgtaactggactttaatatccataaatagattactttcatagttgtcaaaaatcgagattcaaatcaagttttcatttatgaatcaagaatcgagaatcgaatcggattgtaagatttgataaaaattctaaaaatgatatatgttctaaaaataagtgaaaaaatatcttataatgacatgctgtgataaatatataattatcatttatataattaaaaatattctttataatagaataacattcgttttctatgtcatatagttttatcttataaattatgaattttggaattgtagacaatacttattattatatatatgttgaaactctcatttaaatttaatcaaataattaaatagtaaaaaaagatagcaggttttaatattattaatatacattgtcataacttggcaactataagtagtcaagtaaattaactaaaagaaaagaggaaagaaagaatagggggagagaaaagaatgggtggttcatagtaaaaatgaataagatcttaaattttaaaaatataaggtctaacaaaccctttataaataattgattggatcaggtgaaaactcgatcaattcatattaattcactatatttactattgattctttcaatttaatcataattcaggggcatttgtaatttaccttgtatatttgaaccaccaagatgcagaatcaaatcgggaattgtaagactcgaataaaaaattgtaagatttgaatcaagaatcgtaagattcaggtatatttaaaattcatcctatagattcgatcgatttgttggaaattgattcaaattgtaagatttgaattgagaatcgtaagattctaacaatagtgatgactttccaaatgtaatgtgcctttcatttttggtgtgattaagattgttatactatgtcacaggtcccctattgccctagacgagaggtgaaacgatgtcattttaaagtgaagtgccatacttatatatgtaatgtatagatattatattaatttctagttaattaattagcataattataaggatatatattcctaattagttagttgaattataggtatacttgtatgtaaatatgtaatctttttcgatattatactacacttgaatatgagaggttaactatgtaaatgttatcttttctaattagtttatatatatataaaagatataaatccctagttaattggcatagttatggggatatatcctttaattagcacctaaaaggaaacatgtattagggtttagtcgttaaaaggaaagggaaaataaaagaccatgcatgttattttcaagaggtgcctcaaaccaagcaaggaaaggcactcgcccttgcaagatgaggtgaggcaaggtgaggcctagcgcctcgcccagcgccttttgacacctttaataacactatatggaagcagggtggcatccttcttatgtgccattgttatgaaagcccttatattataactgcatttttatgtttcatcagcatgtatacttacttgaaatatcttttttatttattgttgatcttgcaggtcagattc

SEQ ID NO: 6250 - DNA, 1919 bp, Manihot esculenta
  Intron number 1 from transcript cassava4.1_002007m (locus cassava4.1_000659m.g) derived from phytozome v7.0 (chr-ID scaffold00847; pos 1304282 to 1306200)
attcggatagtggggtttgtgctcttagcttaccttttggctttccattttttttttatttctttttaaataatctgtttgactgtaactttgcttgctatattgtgtgtggatctgagtgttaactctgcgggagtgactttttagctcaaattctgtggtctttttcatatacttgggaattgggtattgggtctctgttatttttcgcaattcagctctgatcgataactgattgatacgacagtaacacctaagccttagtcttttggttcgagtatatatttaattgattgctattgatttttatttaccgagcatttttatgtttagatctatttgttaacagtgaaagagaagtcttcagttggatgttgaattctttagttggatccgtgatcatatattgttctgaatatttgtgtttgatatccgttttaacaattgtttctgaactagttattccttcttttttttggaacgcattgtgatcatttgatctgagagttgtgtgagagtgagtgtggactcaaagttttggtctttatgcctcgtttgtcagattttggaattcgagttggaatttaaaattatcttctgattatcttctcgtcgttttactctgaaaattgaatggtttcttccgtcagtagtctagatgtcagtaccatagttctgattttgattgcaggacctttttgaggaaatatctgtttggttgactttatttgtaaaactaataggtcaccatgttgttaacctgagattatgatagttcacttcactcagttctgtctggtactagccatctgatatctactttaactgaacaaagttgttggttctgagattacgtttccctttctccctcttagctggatttgttggtatgtgctgtatctgtagataatatctccttactatatgaggttttccttctaagattaagaccatacattgcaaagtgtccaagctagattaggctccaagggacaaggaagatgttttggcgttaatgtagagccaatagaacaaaggggaagaaacaaaattcttagagggtagagactagagactagagacatgagaaacacattctcaatttattagctcaaaacaattgtcaatcatagcaaaaatctctaaatatgtaggaactaattaggaataaaaaatcacaaattgcgcaaaattataaataaaacaagaccccatatatttctcaatgaaataagtaatcctaagatccctagaatttctaacatcattctcctatggtggacaagaacttgattttggagagttgaactgcaagtagtaatctaggagagaggcgatccaaagttagaaactcctcttcgataatccaagaagcttggaatcaggatgaccatacaacttgacaagagatcctcaaaaaccaccaggagaggaagtaacaaactcattatctagcatagggtcaacggaatctctttgttgaggaagagacggtgatttggcagattttgacctaccaaaacactagaaggaaaagttgaatagcaggaaaaactcgtgttgtgcttcttgtccttttttcttccttgtgtgagaaaagctttgaaatggtcctatctccttaaaataaattttccttctggaattcttgtttcctgacttgtctcacttttgtacttggagaattctagtttcttatgttgtctcacttttgtacttgtttatttctttctagtgggcttttgaattccaaccttgtaatatattcattatttaaaattgcttaattttctctgagcaaaattggaatgtaatggcgattttgttcaaatggcaagtacagctgaatatttgctttcggagtgctaattgttgcattgtttgtggactattgcagccaaaacctctcaaaaatttga

SEQ ID NO: 6251 - DNA, 657 bp, Manihot esculenta
  Intron number 1 from transcript cassava4.1_012424m (locus cassava4.1_012424m.g) derived from phytozome v7.0 (chr-ID scaffold01551; pos 3221960 to 3222616 reverse strand)
agcctacctcttgaggttcgcttcttcaattcctaagcgctctctctctctctcgtgttaataatacataattaaatttttttaagaaaaaaaatgatccccttttggatttaacttttcgtttatgaatttctcaattttttccccaattgagccgcagatcttattgtttctttgtttctttgggagatttggagggttttgctgaataaattatgaaattttttgaaaatcaattgaaagatgtttttatgtggctatcggccattgaagtatcaattgttcagaatcaatgttaactttgctcttcgagttaaggaattaatatttataaaaatggtgattttccttgtgaatattacgcaatataaatcattttttttccttgggatgaaatgaacatgatttagataagttttttttttttaatatgttaagtaaaaaaagacaaacagcgtcagtgttttaattggtttccctgtttccgttctagctgattcctgtttgttttcttaggtttgtagttgaacgatgtttacatttgtatcccaatcccattcatgttttgctgtcactttgagttgcaacacctactcttcttgctatatcttataggatatggtcttttggctattatttccaggagaacatatttga

SEQ ID NO: 6252 - DNA, 1436 bp, Manihot esculenta
  Intron number 1 from transcript cassava4.1_026634m (locus cassava4.1_026634m.g) derived from phytozome v7.0 (chr-ID scaffold06814; pos 999373 to 1000808)
acttcagttgtgggtttactttaatttctgcctactttcatccattaattcctttattttttgtagaagatattcaattatatacttatttgttcttcttcgtatatatgtttgtccagaaagcaaatcctttttaataattctactatcagaatgtacctcccattatcttaaatattttgagcaatatctattctacaactgggattatgttcccttcttttgtattgcgaatctcaaacttcatgtttgttacctttttccatccttatttgttatgcaatgtaatattagtgacacttagagttttctatgatcttacagttctaaagaaagttttttaaatggatatagttaactgcacacatactatatggtatttgatcttgttcgttgttaaagcttcatatagagcattagaaccgtttaatcctactttatcctgcaattttccttgagtgaatgtttgctgttatttgtgagctctaatatttggtatactaaggatttagcagctctagatctttttgaagattacgtctgaaattggatgaatgaaggaaaatggctcaaatggcctaccacaactagtttaggattaaggtctagttaggtatttggtgtattagttaattttaatattgtgaaagacatttgagtgcttgttaacacgtgcttgtctatctaaacttattttagataagtagtaggaacattttgtggacattagttcataggaagattgattttgtggcttctgttacctataaacggtgaatatttatgcatgaataaatattagggcttgatacttgcataaaattctggacagatccatacttatctgaaagttttgatctcaaaaaggaaaaaaaaaatcaaagtgaaggggtgtcattgaaatgaagcgctgatattggtttgctgcttcaatgagtgttacggaggaaatccttgatctccctttaatttattcttaagtttgatgttcttgcctccttgtttactaagttcgatagtggataggattattgggaggagtctcattatggatagtaacttagggatatagaggatgtaagcgaggtagtgaggaaaagaaatgaaaggcacttgattcattggagattgcatcatacttttttttagcttcttttttcttttctaggaagaaacagtatattcttgtgaatttaatttcctttttttttcaaaaatataagtgacatgaaagtaactaggacttttattttcttgtatgtggtggtgatattcaattatgaccgtaagttatgaaagaaatgattttggcgtttggcttttctatcatatgtagttaatttagataaactgcttatcgtttgtttgttcacatcttttactgcttatgattttctgcagctacaacactaactggtttgcattttgctaccaca

SEQ ID NO: 6253 - DNA, 4537 bp, Manihot esculenta
  Intron number 11 from transcript cassava4.1_001741m (locus cassava4.1_001741m.g) derived from phytozome v7.0 (chr-ID scaffold09151; pos 362698 to 367234 reverse strand)
gctatagtaaaaggtttcctgggactggctctgaggtatgcttgctgctttgaactgccgtcctctctctctgcctgggcaatgtaattttgaccttttagcctgttaaattcacttctattttactaaaaagcagttgactgtatctgaaattgccctctgaaactcatcctttataatcttttttgtagaactatgaagcagcaaaagtaaatgtgatagagaaaggaaatttaacaaacaaattctcaggaaaaaaattcacagattagagtactaatggcaatttggcttgtattgattcaattgaaccagtagaaaggcataaatcacaggtaaaattacatgagaaattccccaagcagagcaagccgtgctccccaagctactactagctggaaccactccataataaacttatgaatgctttcccgcacctctctttattccatgtattgctatggctgccctgcaaaccgaatttcattccaactaatttccaccccgttcatctagaatcttcttggatcttctggaatatactgtccatgtttcttggctctccctttctgctcagctgcatgaggatttgtaacaataaggaaggaaaataacttgaaatagattaatgcacctttttcctgcgttgaaggtttggcaattaaaatataaggttgctaagaatactggttaactttctttgtcttgcaacgttggaggaaattcaattttggcctcattagcccttggttttagatgtggaattgaaataaattttgtcgaaggcttgaaccatattctaaattatttaggacaacacttgaggaatgagggtttgcctgtactgacttctaagcaccataaaagaaactgcttcacaatggaagctcaaatcacggaaaaacttgctaaggacgtaatatagtttccttgggattatgttttaggttatgcgaggtaaactctgatatcaatagtcatactttctgctgttgtacaattactgtagatttgtgttaaagccttcttccatgtttaattgtgagaagcatttagttgaaaaagataccatttataatgtcaaaggaacgatctgttggcttaatttaacctcttgaaggaagaataattgtcttggattaaaaccatgagcatccttcccccttcaccccttccttatatggggtttggcaatggttgtgtgggattatcatatgggcaggtgaaggggcttgacagaacgtaaaactcacaagaataacagccacacactcacacaagtaaaaattaaaagaacaaactctaccagaaaatctgatattaattaaaagctgccgaattgtatgcaagtctagggtatttatcatttctcctgaacacaataggaatatagctctacaaaatagaagtcaaaagatattaaatacctaggtaaaaatatgataaactaatgctaactaaagtaggatctaacaaaatgactcctatattaaaaaaaagatgttacgaaactaattttaaataatatttatgctaaatgggaagtctaaaaggagtaggagtggattggaggcaaatttggaacaaaatagaggaaaatccatctctcctttgtgctgacgtgccctacacagcattctgcatcatactcccccacttgaaggaaaaaaaaaaagaaaaaactcatctgaagttaagatttcttgcaatgaaccacaaggattgtgttgttaccttccatatcattcttctccacttggaactaagtcttcttgattcttgaagtgaaaaagaatagaaatcttcattgggaaagtatgcattctcttcttcttggttattaggaattgaaaagttgaacaacattgaattatatccatattttgtttcctaaaactcctgaacaaataaaatgaaaatcaattgaaacactaggatataaaaggttaggaaactttgttattttaataaccatggttaaatggggtatgaccatggctcaaactgtgatatcatgttctttactctcatgaataattgatgtgtcttcttcaatattttgtgagaacttcaatttctttccgatggatcttcatattgaaatttgtcatgctcattctcctttgagttcacaagaaatcttcatttgcctttcacaagattaacaattttcctcctcagacactcatgggaatttttggctgctcgttgcatttataacatttaatagtactggatctagtgtggtgatttgttcaatttggcagattggggactacttgccttgtaagtcttactagttgaatcctcatatgcattcatctccttggtaactttaaaagcaactcgggagctctcttcttcctccttaattacagcttgttcattgtccccaccaattctttggtgataatcacgaagatcttcatcatcttagctcttacctcttagtgctatgttctatgcctcacaaggtttttagcatttgcagtccaaatcagtctttaatagcaggccttagtcccccatatatcttgcaacttcttgccctagggattcatgaatattattcatttgggattttttgaactcgactgtatactcgtagatggtattgctcccttattgacatctttggtattattggaagagaatttgcctataattcgactataggaattcttgtttcaataagtacttcatttgaaaccaagtaagaactagcccctttccttctccctctctttctctcccttctagcttgcaaaagctccacactaaacaaatgcacctcctttgaaccggcagtgacacagatgcacctcctttgaatcagcatgccaccacttaattcatctttctgatgttgtcttcatgtctctccacatatgctatccaatccaagaattcctcaacaatgaaattcccattgaaattaggaatattggcttttagtctgaattctttgttatctctttcttcttattcatcatatttgtgtaaccatgagtaccccttctcccataatttttccatgttgcctaggatggtcatgatggtcaacgttttcctctttagaaacttcaatcgaaaactctttgcctaaaagtaaagataggtagataaatagcaccatctttggccgtttattttgctcacatccttgtttgcattgatttcccaagcatcgaggacgtccccaatttcttctttacgtcattccatatgctcgattctgtggtccatttattactcgagaggttgctccaagcattgcattgtgttgtccctatgttttagggctctagcctctagcctctagctccctaatcaatgttgcgagcaatactaccatattggccatattggccactaaggatagtgttatggataatggatagaccaaattcatttttcaataaagttcaaattaaaaagaaaaagtcttatcagctaagattatattttatgaacgataaatagattgcatttgtctagttattttatcttaatagtttgttattagatttcttgtatcttgctttagtagtttgttatccaatggtagcttgctttagatttctatttttcttaggagtatataagattgtgagaacctctactatataaggggattctaattattcaataaaacaagcagattgattacaaataaatttgagatttaagattatctcgttaacgagtctgaggtattaagaactccctccaataagctcctttgttatccatcatgcgtgactcgggacaatgatagttagccatcttgattgggttgattttttcttgctctgacgggcatagtgtgaagcatacaagaatacaaacactctgtacatgagtgaaaaatgagaagagaaacttaccaaaaaatcttacattaattaaaagctgcctatatacttgtaaatctagtagtatttatagagtttagttccccctaataacagaataggaatagaactctataaagtaggaagtcaaaacatattaaatgccaagtaagataggaataaactaatcctaatcttaactaaaataggattacaaattaactcctaaataaagcaaaagatgttaaaaaactattttagaaacaataactaagctaaataggaagtctaaaaggagtaggaatgcataggaggcaaatctggagcaaatagaagaaattctgtctcacatgccctacataatatgctctgcatcaggccttctcaaaagccttacacatatgagtatgtgctcacatgcacttgcatttacataaatatgcatgtttcagaacatgaaagaaaagatcaatcatgttatagtttgaactctattcctcttcttctctttgcatgttgagtagtcatattctgttggctttaatattgttttggggctctgagttctttggaggttctattgaatatctaataacctgcactgtggattagatgataccctccttcctaattaacagaatcattcaggacatttgccattcttggttgcgctttgagaggga

SEQ ID NO: 6254 - DNA, 3818 bp, Manihot esculenta
  Intron number 3 from transcript cassava4.1_005880m (locus cassava4.1_005864m.g) derived from phytozome v7.0 (chr-ID scaffold10501; pos 117986 to 121803 reverse strand)
ttattcaaagagcacttacactatactcgtgagttcttctttatcttccctagggttttggttgattctttgtagtttatcatattttcaatttttgtggttcataatcttgatgctgaatcttatggtgaaatttattgatagagttagggaaaataatctgtaaattatgaaagagcgaaagcaacaaagtttggcaatgaaggcttgtattcgttttctttcaataataacagaacagtagatattggctcccttccactaccagtataacacaagacgaaagggaaaaaaaacaatgaaagagcaaagatatgactgaaacagtccccagagtaaatgtcctcccgtgcagagaagaaattctgccccaatgaattcttgatagccaaaaagatgcctcccaaccttgcctgatcccccttatattctggaggtgaatcttctgctcaaacccatttttgacaggtgttctttgtaccctttaatgtacctcagcaatttccacaccaggagaattagttcttcccttgattctttcttgtccttcctcctagaatagacctgaaaaggcctaaatgaattctctgatttgtcttggtccttctctgcttttcttgggctgcactgcaaactatatcttgggcttctctatcatatattcatctaataacaaagataatttggacaggaaaaaggcatacaattttaagacattaatgcgttaacttaatatctgctgcctaaagtttgttttttaatttttaataatccaaacatttgttgatttaaaattttctcgagttagtttggttcgcttttaccatcaagattatttgagcatgaatgacccagtagcatttgtatgtttggtacttttaccatgattttggatattttattttttaaatttaagggttgattaatttcatcaactgcatggaaatgattaagacttagtgaaagtataaatattttgcgaagaactgtgtcaattttgtggattggttctttttttctatttgcctattagatgtctagtggaaacagaatcgtgtttgcatggaattttttttattattctcttttggatctaataaatattgattaatgcattccttgtcttatttttgaataatgatgcttctgcaagtagatctgtagatgtttttgtgatgtctagttagcgaaggtactataattgatttctattgcaaaattcatggattttgtttaactgtggtgataatgtgtcagtagagcagagttcttaatcacggaaattagggagaaatagagaaagattaggaagaaggaatagaagaagatataaagaagaaaatttgcattgatattgattcttgaatgaggtatacaggcttcccttcattttatacacaatctattgttggtaactgtcaaacagacatactaactgattacagcagattccataatagttctataactacttccttcttctctattgatacttatatcactgctccaagaaattgcaatgtctatcaaggttttcaggagctcagtaattttccatgtactggaaaggcaattctgtagcatgcaagaacctcattaaggccttgacagaaattgtggtgttcctgcacaatattgaaatgctcaagagattctgaaatttttcctataaaataaagttacgttcattatcatctttattaccagaatcaatagtagcacaaccaataatatcaacctctttctcttctccatcagcaacaacatcaacctcttccttttctccattaccaataatatcaacctcttcctcttctccatcaccaacaatatcaattatcatctttactaccagaatcaataatagcacaaccaataatatcaacctcttcctcttgtccatcagcaacaacatcaacctcttccttttctccattaccaataatatcaacctcttcctcgtctccatcaccaacaatatcaattatcaacttcttcctcctctccaatatcttgaattgcaattccacaatcattttcttttataggcttcaggaatggactatattctggtacagatctaaagattgcaacatttcccattttcatttggatttgttcacctaattttttcaatctttgaccctattcttttagcatctcattttgtctttaaagtcctctatctaaaactaagatacaatatttctcttttctaaagttattgtccatagttggtttacttgattgtgttcagattctggttctgaaagaacaaaaatttcaaggattcctagaagcaggttattgagatgctggaagtggaagaaaagaatagaggaaaacagaaagcaacagaagaaagaatatgcttcaagaatttaagaaagaaaagagttttcatatgaaataaaggagtgcaaaaacatggttttgccaagaagaaggaatagaacaagaacagaaggaaaacaaagggaagaaaattcagggaaagaaagaatacgaatgaggagggagaagaagaagaagaagaagaagaagagaaatagagaaaagaatagaagaataagaagaaaaagaagaaggagaaggagaaaccggtaacttgggaagactgctactgatctgcacctgattgcgactcccagaaattcatgttggaggaaacccattctccagcggagctctgatacctattgtcatatatcaaaattcttagtcacagaaatcggggagaaatagagaaagattaggaaaaaggaataagacaagatagaaagaaaaaacaatctgcattgaattgattcttgaatgaggagtacatgtgccttctcttcattttatacccaatctactattagtaactatcacacacatactaacttacaatagatctcataacagttttataactacttcctccctctctattgatacttatatttccctcactaattcattaactactctactccctagtcataacaaaatggtaagtggtgggcaaagaaattggaaaagtgaactacaagcttgaaaccaagagaatcaagctagaaaattctcatcttaactagtagatcctgcgtttagcatttgttttgggaaaactatgtatttttgtcctgattagatgctattttttcttactaaaaactctattatttaggtttgattaatattttgaattagatttaaataacaaaattgatttttttctctcggaacaatagtagaacgaatttccaactagaacaactcgatttgatctaaataaaaattggtttgattggttaggttttaattttataatttcttgaaccaaaccctttacttcacgatttggttacaccctgtaaattatatcatatatgaaactgttgaaaaattaagaatatgggatcttctagattgcctatgaaatttgggggtttataaatgtggtatccaatgggatggaatggctctaaaatgaccaaatcatgtttatgtgatcagatcgagttgaccaacttgtgcttctttattacaaaactaattaaggtgtgcaataggtaaaaaataaaagacaggagtttctcccaaaatgaaaaaaaaggtgtgcaatgcatcaaaataaaagatgggtgtgaactagatattttccatgtagcaaaagggctaacctaggccaaggcaatattgatcttgttcaattgcatttatcatcttataaataattctaacatcttgttgcttttcattgcaaggaaatgtatctacttgacatacatattgttccccttacaggatcgaagaggttgcctttagcttta

SEQ ID NO: 6255 - DNA, 1353 bp, Manihot esculenta
  Intron number 1 from transcript cassava4.1_000827m (locus cassava4.1_000827m.g) derived from phytozome v7.0 (chr-ID scaffold09788; pos 103950 to 105302 reverse strand)
ggtcaaggtttgcatatcccacctatctcagtacttttgcaaatttaagtagaataactaatcaatattgagagaaatattttcaagttaaaagatagctccatgttgttctttctttgtgattagtattctctcatatgaggaccataagcaaaaaataatgcacaagcttgttttgaatataatgcctctgtttaacttgcacaaattatttggctacaataaaatacttcataatttatagaacaaaaatcattggctccatttggcaataattttgaaaatagtgtttaatatttcaaaacactagtatttagtgattgaaaaagtggattatgaaaaaactatctcttagaacgtttgattaaccattacttgaataactatccattacaaaaatatctaatagctaccataagagttagtattgccaaacaaggccgttatattagtagtctaacagtggattagctagcacagaatttgtgagatgaggaattcaattagcagcttttttcagtattctaaaaaacaaatttatagtaatgcttttagacccttctttccctaaaagtgatgaagaaaaggcaggaaaaaagctcacaaggcatccatccaagtttgtgagacaatatttgcatctaagatgaattgattcttttggtggtccctattagaccaacacttgatttgggtctttttttttccccaattttttaggtggtatttacttttaacgttgtgcaatagcttatagccgttctataccaaaagttatagattaactgttaacaatttattctagtctcaatcaattattgatcatttaatttcatttttagagctttttctttgcaaatggatagttgattttattttatttattatctaaaatttattattttttaaaatttaataattacaaatttttattaatgtaatatatacctttaatagtgattcacatatcaacaacaataacaaatgcttagatatattatttaccaactactaagaatagttatatcaactatatccacaagctaaattaaataagtatttttttttttctaaatcaacatgttttggtcatgcaagggcaaataccaaagcttataatcacaagaattatgtttatggaccataaaaaataacttagattttttaaaaataaaaggttattttccttaaaatgatttctaggaaaatatctatagtttctgagttacttgaaaagcaattactttttgaagagctttttctttttttaagttaaaagttagggggtgaaagtgaattttgagtaaattgtgggcaggtgatagcaacaaggaatactcgtgaacggagtaa

SEQ ID NO: 6256 - DNA, 2088 bp, Manihot esculenta
  Intron number 2 from transcript cassava4.1_002276m (locus cassava4.1_002276m.g) derived from phytozome v7.0 (chr-ID scaffold11001; pos 144544 to 146631 reverse strand)
ttaccagagcttttggagccggatttctcaaacaggttttcaatgaatttccattatagatattttcctttagattgagaattttcttatcaaagtgttctgcataatgaaagaaataaaacctattgcacatgattttctgtcttcttctttcttccagtgaattgtgtatttattcatgattaagagaattcatatccatcatttaactgttatctatattttttatattgttatcaaacaagaggatttcatacgggatggaaacgggtcgatattttcatgtaccaattcacccaaattttactggtttgggtttgaacaatgtataataagattttgttaggtttgggtgtaaaaattaattcttgtgatggggtcgagtcttgtgtaatggatacccattatttgaatatatttatataattattaatttaatataaagatatatttttctattataattgtaattttcttatatatattgtatttttaaaacagaatttaaatatgttatcaaagtatttaacttcttaagctataaattattaataaaaaatttatttttatatagattttagaagtagaaattaaacaggtttggatatcatttggttaaaatgttcgggtattgaaaatattaatcggattcaggtaaggtgattttgtaggtagcttacctattattatcctataagttgacagtaaacaagtatgcatatgatacatacataaggataaacatccatccatgcatgcatcaagaacaggttgtcctgttaatgacgtaatggaatgtgtaacaacaatttattgtccagtatagccacttgaagtcttctgttttgaaattttgtatattcttttaaactttgcaagttgtgataatttgaagtaatgcatttttgatgttgcacatttttagtgaatttcttaacactatgtttggttcaatccaatcttaatttttttttgtgaaattcaattgaattccatattttgtgtatttggtttgaataaaaattagaattcaattttagaaatttaattctatggaattagttataactgaaaccaattcctttcaaatttgatggaatttgaaataaattccataaaaattacacaatatcttttggactaaaatgcccttttcaaataattttctctcaataatttttcctttaaactttattagttataaaagatgagaactataaaactagttttctatttatttactattattatatgtagacaattatataatatatttttctttttctttttctaatattataatatttaagcttattttctcttaccagaaacactatttattttattatgtaaatctccaagtcatgaaaatttattaatatatttttaatgggtgtatagttttgttaattattataaatttatcaaatataaaatttttttgatagagtaattttttttttttacgcttaaggtagtttaggaaatgaaaaaatgagttgtgtagaattcaattgaattcttcattttaagttatgtcataccaaacaatgaaattcatttgaaatgaattctatttaaaattcaattgaattccccatagttttgtaagatagttttgaaccaaatgctatgtaagtcttaaaagtaattaccaggcagcattatcggatttggtgcttttcttgtcaaaataaacaagtgatttccccctgttttgtttgggagggcaagaagacaaaaacattagcattttttctgatttttcgtattttatggaacacttattttcattcactaatgaaatacagtatttgcatggttctgcgcctcttcagaattaaccacttaaattcctcaggtcatatgattcagtattgacaatgaatttggatgcatcaattcgtgccaattttatttgataaaattgctttttctattgcctgtggtgtacagaaaatatcacatccacatgctcaattaaaaagcagttgaactcatttaaggacgtgtctgtgctatatcattgcctagcaatattatgatttatgtaacaatatggaacatgtgttgtgcagcccaagttta

SEQ ID NO: 6257 - DNA, 1019 bp, Manihot esculenta
  Intron number 3 from transcript cassava4.1_013876m (locus cassava4.1_013876m.g) derived from phytozome v7.0 (chr-ID scaffold03735; pos 412588 to 413606 reverse strand)
actccattctagttaacattggagatcaccttgaggtgcattccttttcatgctttcttatatataatactctcttcttcataaaggtaacttgttccttatttaggaaaaaaggtatcttcatatcttgttggatctctataacagcctgagttaaaattagcctacataatttttgtatacatttttttactattatgtgtacatgtttttactttgttcaaaagttatttaagtcggttttactcgggttattataattggcataagaactattcggaattataaaaattatatgggactaattggtaaaaaagaaaatctgagatgtaaaaaatatagtctgaaatctagaaaatagggtttaagagtgagcttaactggagaaattactcctttcactcagacttgtacaagcatacttctctctgtaaggcggccatttaattctcccgatgcgcatgttaaaatggctgcgaggtgactgggcctgctctcttacccttattgtgtcaccggactaggctatcatctagtggacctgcgtgtgtagccagtccggtctgctttagacacgagctgaagcatgtgacgttggatcggtttgttttagagggttctgatgagttttgggtctacattctatatccgggtctaccttcacccgaggtgggagaagccaatgatcattggatgagatggagtcatctaagctactagcaaatcattatattgagagtctggtcctactttagtaagtgtactcaattcaacatagcacatacaacatagtagagctgctataaaaatgtcgcaaaattgagggagaaaaaatgttggattccattcccgagttagggatattatatagaaatagctagtttaaaactactaaataatttgagttaatttttattaagtcatatgaaaaatgagtcgaaaatttatttgaatcagttttagtccagcagttttttcgtgattctgacgatttcatttttgttgatagattttaagta

SEQ ID NO: 6258 - DNA, 693 bp, Manihot esculenta
  Intron number 8 from transcript cassava4.1_008437m (locus cassava4.1_008437m.g) derived from phytozome v7.0 (chr-ID scaffold07478; pos 512200 to 512892 reverse strand)
gtgcatctggtgcggagctcaaggtatcattcttccttatatcagtgaaatcttctttatcctcttgcttttgacattcttgacttttggcctgtaattgctttctaaaaggtataccatctcaatttgtgatctattcatgttagatgctgcatggacagccacttgcatatgcatatgatccatggtgtaaatctactccttgagtttctatccattgggttgtgcctgttgcatatattctgcggctttaacaaaatagtgcaatatgcaagttcaataaggtcttatttaaagagagatgaaacaggatagaagagaggttctttgtcagatagtctgacaaagtgaggaggggtgaaagtgagagataagtataatgttttatatatacatatacaaaacaataatcgactgcaatcccatgcatgtttgaacttgtgcaaatatatgaaaaatgattcttcttctacttatcagaaccactgcttttattaagacaccttgctttccacaaaaatgattttgttatatgcccttgaccaaatttagggggaagtatttacgcaaaacagttttgtagcatatagttaagagatcagaaagtggcatcaaacttcttttctatgtctatgggttgaagtgtccttgattcttgttatgcttccataggctgtgtgcacggaggcagga

SEQ ID NO: 6259 - DNA, 1255 bp, Manihot esculenta
  Intron number 2 from transcript cassava4.1_003427m (locus cassava4.1_003427m.g) derived from phytozome v7.0 (chr-ID scaffold09294; pos 197947 to 199201)
cagcaacctgagcgaaagcgccctgctttagctaggtaaattagtgatttttttattgttatgtggatggtcatttagttgttatattacgattaatttcttgtgcaattttgggaattagtgctcaagctgttgttgacatcagtggcaggtgggtaattgagttgtgttatgttgcaatgcgttgactctcattttgctgcttgttgagttctgttctcttcatcttgaaaatggaatcagctcttgataattcggaaaactggttttattcttgttggttatggctgtttactccgcttgctaagctcaaactttgtctaagtttattctatatatagttaatttttattttttaaacacttgtttagtttctaaaacccttaattgtgacccagaatgttaccgttttggcggtgtatttgggatgctcaaccagcattttatgggactttatatttcttgtttcatttacttctttatttttctgtagaattgggaatactattctatattgccttgcataatttcaagcacctagaaactagaatgactgttctagtgtttaccttgtaaagttagacttactgggtggtctagggaaaaagaaggatgtggttggatcttattgtcaacacaaagtacttaatttatcaggttggatatatctttatcatttccattccggcttgggcttttaggcaaggttcacaagttttcttgcttcctttgatattcctgttttactcttttactgttaaagtaagcatgaaagaggaacctttcatgagtccctagcacagatgcaaccaatagtgcagtcattcttcaaagtgtttcaaaatttataggattttgtagttctgaagttgaagaaagcatagacgcatgatgctgcttctttatccctctcaccccttttactatcaaagagttacgctttcctcattactctatttaattctatttatatcaagaaattcatgatttatcaatgttcttataattattagttttactaatttaggtgtgagatgatgttttcctttggcttgttttgtttgttttgtattagcttcttgtcacgtctctcctcttctttcaaatgctaaaattactatgaatgttttgcttttgtttaaagacatgattattattctttctaatggttattcattctatggagttctatttaatgctaattgatatgcatcatgcagtgtcatcgtagaagctcttaaggtggacagtctgc

SEQ ID NO: 6260 - DNA, 1179 bp, Manihot esculenta
  Intron number 1 from transcript cassava4.1_014992m (locus cassava4.1_014992m.g) derived from phytozome v7.0 (chr-ID scaffold09086; pos 215530 to 216708 reverse strand)
gctcttgaagctgatatccaatttgccaatactctgtaattttttttgcctttcctctgatttttatgctttgttatgtagaatatcggtttctgggttttaagccatatcaaattttcgatcatgatctttgagattttgagtggtagtttcgatcttggtatttaggtgaaggacatcttatcttgcactgctttgtgttaaactttgtctcgtgcggttgtctgattgctgtgtgatttttgagttgatccaactttattaattgaggaattttaagtgaggattccctatgaccatgtctgtaggacatgatacgacgacgtatctcttacgtaaaagattctgctccatttaagcattcattgactttgtcggctgctattggagacacagtaagacatagtagttgattttgatattttcgaacccagatataattagaagtatctggtatgtcccttgagctaggcggcgttaatgaatggttcagagaattgaaaaagattttatgtttctgaattctcactatctagaattcacgatttgaagttaagtttctgattttgtaacaagtatttgggtttgctttggattgcttgatccatcaaatgtttgcaacttgcccaagagatcatgtagataactgttagattttgctggaaagaactcaacttaaggttattgagctgaaataagaggatgatcagacaataaaaaggacgagaaccttgtcctttgtcccttggcagtcctatgattgctttttaatttgggcagataaatgatgccattgtaacttgttctgtttgaaggttagagttcaagttatgtctaatcctgttcattgtgatattaagctgtttactatgcattttattttccttaaatttcccacgggatttccttgtcaaggatttcctgctgatccttacaaatcggaatgtaacctacttgtatagtttcaagatatctgtggccagtatttgtgtgcttcggtggggttcattcagctttctacctggttgtggtcaaccatgaagaaatctgattattctctgctatccaatgtttggactgtaatgtttagttcctactgtagctaccgttcagctggctgtgttctactgatacatgtagttttattgtgacacagggcttcctattatcctagggaat

SEQ ID NO: 6261 - DNA, 1198 bp, Manihot esculenta
  Intron number 1 from transcript cassava4.1_002896m (locus cassava4.1_002896m.g) derived from phytozome v7.0 (chr-ID scaffold06705; pos 92257 to 93454 reverse strand)
tttgtagactttaatccgaagatcttttatttcaggtgagtaaatcgaattccttgttgaattctctgttcttcaattttttgtttgaattattgttttgttttgttgtgaattgttgttgagcaagttcagatcgataatccggcgggaattctgaggattttgagttgtacataatgttttgctgaattgaaactgagatcgggatctgatccttgaagttgtgttcttgttggttgggtgcaaatttattgtatttgagcgggagtcggaattctctagaattttacatcatggttatgaattggagttctccgtttttaactggactgctttggggtttaagggatttagatgtcgctctatttttggtggtgtattcagaaaattgctaatggatttgaattttgtataggagttataaattcatcaaatttggtaaaattgagtatgtagattggggttttatggaagttgaaatccaattttagttcaattataatgtagagcaaaagccaaatcctggatttggaagtagcaccttgaattgtagttaacggaacagagttccagatgtattattcttgactacgctggatcgatcacggttttgaacttgagattgatctatgttgggagttttgggatctcaaaatgcgaatatgatgttacaaaggaaaatagtttttatttacattgatgccaattatctgaggatttttattctaattgacgcgatgcaatagttgcatttttttttttttcaattctagtaatagtcttagaacaatttagcgtgagcgcatgtttctttcattgttttgttgatcattaagcccttatgtaatcctatcagatgaccatctgtgtttttctttaaagttttattgtatattctgcttctcatggagccatgatttatggatctctgttttttggtggtggctggtgggtctgctatggtaattatctatggcgcatgtgaatttatgtagttcataacatcgcttgctttggtgatctctcaagagccaatgctgataaccatatcacattgtgtggttgtgtttattattttcacttgatgatgggacttttttttccactcttataccatgcagttcaagtggagttgttaattgcatctataattggctgatttggttatttattcttgtgatttgatgccagtgaagga

SEQ ID NO: 6262 - DNA, 2623 bp, Manihot esculenta
  Intron number 11 from transcript cassava4.1_003309m (locus cassava4.1_003309m.g) derived from phytozome v7.0 (chr-ID scaffold06512; pos 518401 to 521023)
gcatcaaaagaggtattatgtatgatagtttggtcaaaaggaacacatgaacattttattgttagaatcgttgtcattgtcattatttttcctgtagcatctttgccacattgtttatgttaaaatctgcattacatcttgggttcctttaaaatctgcattacatcttgggttccttggaagatttacgtgattatggccatttgtcccagcttgaactattcctcatgcatgtttagcgaactcaagttcccttgtcaatggtggtgtcaatttttaacttgatccaatcatgctagaaaaatgaaggatcaaaacttgccataattcacattaaactagaagtgcaaaattggggtcaagcccaaataatttcagtgacacaaagcagttacttttaaaatggaaaataaaaaaatgacaaattgcaagaaaaacaaaatataaaaaataaatgaaattatttgaaatgaatagctgaaagataatagatgaaaagtaatcagttgggagggactaatgtgcctgaaaaggatcaactgattaaaaacaacaagaaaagaaaaggttaacgtccaaacatgtcttcacctttgttgagagaatagttgtttatggcttgactaacaacatgcatttgcagcttaatttgctaacctgatggctggaaactgttcaatgaaacaaaaaccatttcgtatggcactagctatactctcaaacacaatataggaattgttattggttatgatgggatttaaaagaaaaaggcttgttgtattgaactaagaatatcttgaggtaagactaaatctactagaagttccctcaaagcctttaagtgattagttgacatataacagtttgctgggcttattattgatggtagacttgggatttatttctcagaatgagttggaattcaggtggataatatggcttgtagaggaataggtttgagaagcagaattaaacaaaaatgatgtggggctatttgcagtgccagttagtttgtatgagcagtaaaattataggatacaaggcttcacaactatacttgggcgtaacacaatttgaggatgcattttgctagtacttttttatatactgaatattgaatattaagatctaaaattatacttatttatcaactcaaaataattgtaaaccttaaggtaaaggactggaaaactagcctgaggcatccaagggtttgtaactcagaatgaaaaatagaaggaatggtatcatcttaaggacttaaattagttctataaaatgacaatgtaaacgcctaaagacatctcggcagattttctggcaaatctggaattttgcaaattatctgagatttaaagtattggaccagcagctactttattcaaatagacatataaataagaatatagaaggactagaaagtgttatataatattgcaaataaacccaatttgacatttatagttcttgtcttgaccctaattctaagtttccttgagtcttctaattttatttttcttgggtttcttgtcatatgcttattatggcattgaataagcaagttcaagtaatacacaagtgaacttgaactgggtgatctcagcttatttggaccctaaagccagctagtttatagacttgtgcaaaatttttcttgtggaaacttgcctatgaaaataaatgttattgtgaatgatcacttaacaatttgttcctaaaattcatacattctatcatgtacgactacattataagagcaaatgtcaagcaatatgtatccttcagggtctgttcaacaaaccaaaaactagttcatagtttatgcttttaggtctaagaaacgagtcaaaacttttgccttctatttctctttttctcacatctcacctgtatcaactaccaaatgatactgtttctttcatctccttcatcaccattaatccttgtcagttgtcactatagcaaacccaaccattatgtaacgagtgctttcaaacaattataactactctctcccttctacatcaagagttctccaaatcatgttccaactatagcgcttttccttttggcgaaacttgcatggttgccattaaataaattcatgataagtcaatttacaaagtgtttgtgatatttgtagttgcttgcctaatgctgatccaaaaaggaaaagaaaaatgaaaagccaaattgtcaggttgaaattgatttccttatcgaaaagaaggaaaaatatatatgtattagatctcatgtctaacaagattagcggatctgaaactggtgacctccaataatgacaaaattaggcctgtgagaaagtgatgaagctttagatccatgtggaaagcaatgaaaagaagggtagtaatttatatctaaagctaccaactcatgaatttctttttggatgatgattagtttgtaggtttgaaagtgcagcttttagataaatcatgaccatttagtagggttttttctgggagggcggatctttactggattatttgattaaacagcatgtgcctttggcactcttgtaaagttattattgtatgttttaacggggatttggtcggttttaggttgctgctgttgaaacaactattggtttcataaa

SEQ ID NO: 6263 - DNA, 1806 bp, Manihot esculenta
  Intron number 2 from transcript cassava4.1_019517m (locus cassava4.1_019517m.g) derived from phytozome v7.0 (chr-ID scaffold06607; pos 19317 to 21122 reverse strand)
tctcttggctcttggaatccttgccttcctgccaggtgcgtagaaacataatggataattgattgcttaaaaatcttattgggatcttcagtaacaatttcttgcacttatatgcatgatctggcccttaagttggaacttgaattcttaaaattgaggaaggaatgcctaggccagattttcttgtaaattgtcatttagttttaaaagggtgaggtctaaaacttgaagtataaattgcaatggaatttatctaggaactgttatttttttaagcaaccttaagatgcaagaaaagcatagataagaattggtttgctagacatttcaatcaaatgaacctcttccgccttctatgcttatgcaattctttcatgtataaaggacatttaattagaaaagcaaaatgtatttccgaaattcagattgttgctggttaaatatatgaggtgaaagtttgattactcatcaatgttgtaagttggataagtctggatgcctaccattatatggaatttgtagtgaggctctaaaaccttattactccatgagttcaagaattagcactatggtttttaaatttccagatgtcaattgtcaattaataggacttagcattatgactttgccgtttctttggtcttgtggagcattatttgattgcttttatgttttgccctttttaaatggtagatgaatacaaaattctctttaatttcttgtttccatttccccccatttcttttgcattaaggtccataatctttggcttcattaggattcacttctctatttctccctttataccacatttaacctttatgacttgactaatttgtagtttcaccttgctagagatgaagagaaaagagtccatgctatattctttaatagcactaattcctattctttagtgattgaaatctatagacacttttgtacatatgtagaaatagatttaaaaaagatcatagttagatagttacattttatctcgtgaattggtaattacagggcttggtgtttaacttggtgctttttttttttttaaattattttttttttatttttttagaagttatttgcttcccctcattatccattattctgtctaatgttatcagtttaatcgttctgcaatagtggatattttattttaaattttactcatgaactttacctttaacatttgttgattaacaaaaactaccttctgattctttttttctgttcagtaattcttttccgttcagtattctatgtgctatctgctttatattttatgtaataatgctagaaattaattaataataatgattaaaagagcagggatcttgggatgggccatcgtgcatgctagagcctagtaatgttatttgggaatattttttggggatttgtggaacataaagtagtagatttttgtgatgcaatttcccattgtttaatagatttttgtgatgcaatttcccattttaatagatttgtatgatgcaatttcccattgtttggtttagtggttaattataatctgatagcattttggataactataacatgactggtgtaccatcaaaagcgataattgtgatgtagttggtgtggataggcttctagctcttgatgctctcagttacaagtggtgtcctttgtgtatgttttcagtttcttttgcattgccttttctttaacttcagtcagtttttggtcatttgcacaattttcaagatataatgacacattacttaactacttttatgtgaggtcctctaacactttgttctctacttatggctgcaggctttt

SEQ ID NO: 6264 - DNA, 2598 bp, Manihot esculenta
  Intron number 1 from transcript cassava4.1_000373m (locus cassava4.1_000373m.g) derived from phytozome v7.0 (chr-ID scaffold01131; pos 81549 to 84146)
ggaacacgtcggggtcccatattgtcaatcacctggtgagtatttgtgcttgtgtgtgtttctgtttgatatggggtttcttattctgatgtatttatctattattctttttttttaaattttttttggggtgaggggtgagacatgttagattatttcaatttattttcgtacatgtgtgtgttataatttgagcaactagctcatcattgttggtatttgtaatgtgaaacttgttttgaatataaatgcgtgatataggaggagaaaaaccggcaagtttatttggaatttttgcgttatttgggcatctgtaatttcctcttttttttcctccctttttttttctgggaaagttttggcaagtaggtaattagtgaaatttattgggtcttgcttcatgtggacgtcattgctattgaactgattgcactgaaatgtactgttgagtttttctggaggtatctggtgcttatgccaggaaaaaatgcagtggaaatacaacaaataaaaaatgaaaggttttatccttggggttttttaactgacgggtacttttctgagtatttatcaaaagcttagagtggtatatggtgaattctcttataacttggaattaataggcttgaagatatggggatggtaggttgtagtaccagtacaggccaggaatgtttattgtctaaatgcatacttgcacgtactttagtacttttgcctatcaaatacctcaattttgccaaattcatagttttaaagtagtgtttaaaagtaaattttcaaatccatgggtaaatctatggttttaaagttgtgtttaaaagtatttcaaatctatagttttaaagttgtgtttaaaaatatatattcttttaaattttaggtgtttaaaataatgtttttaaaagtttaggcgttcaaaagtaatattttttaaaatttaggtgcttattagatcacgatgttgataggcaaaaatgtcaaagaacaggtgtgtaaatatgcattttgccaatgtgtattacacataatggtgcttcaagttgaggttgactagaagcaatccaaggttgcgtttggcattcttgttttttttttttggtttctttaaatcgtaaaactagtgaatttgcctgttattttcattctcatatttcttttttcccttttgctgaaatctatttatttttctctcctaaccaaaaatagttaattttcccccttcctttcttttcttatcacaactaccaataattgttctattttgcctttccatggttttcaaattcatcatagcactatcatgggaccaacatatcaaaatagattatcagcaatggtgggcaatcatcagaaactaccattgcaataccatcaaatttctagagacaatactcaccatatgatcacccaatagtcatccaaattcatgctgttacaaagaaggaaaagcagtgttgatatcaattaattcttagctattaggtgagagactaagggagatagcaatgttggagagagcaattggaagatgctgatcatcattggggtgggttgggttgtgcatgtttgtgttagggcatggttttaaaaaacggctggtatgtaacaggttttgggggttcgttacccattaccccgttgtataacgccccccttgagttgcaagcgtcgttacccttacatattgaaattcttttaaatctttcattttctgcccctattctcatttttatcagtttccacatgtttcagcagcttcaaaggcaatattttttaagttttctcttccctttctctttcaaatttcaatcttctttgcatatttctcatatgagcttgatccatcataaactaatgtatttccaattttatttcctctaaaaagttattaaatcttttgaactttagtttttatttgcttttttttttccctaaatttttgtgaattaaagtgttagttttgagtttaaattgtactttgagctattagtttactcgatctataaagtttgtgttagtttttcttattttaaattatatgctgattaacttgagttaaataatctatatttattgtatttatgtttattatgcatttgtatacattattctaaattaaatctaatcaatattatttcattttatgaactttgcaaatttgtttgaaaaatttgcgtagctccaggccgttaccattacatcacagctgttataggccattgcgaccgcgatttaaaaccatggtttagggagcttctcctcttaaaaatgtttttgaaaaaggtgtaaaaaaatgtctggagttcgtctaacacaagttccatttaatgaaaataaatcagaaaaagaagccaaagttttatggttcatagtaccataagcaaccttttccgattctctgagttatctctcatctcatccatgttaacattttgaatacattaacatgatatgttagtttctggatgtattttaaacggattgaatttgcaaagtagtagcatgtttttatcttctttctggctgcaagagaagttcattttgttggatctttttacaggttcgtgcaaaacataaggaagtttgtctccataa

SEQ ID NO: 6265 - DNA, 2140 bp, Manihot esculenta
  Intron number 2 from transcript cassava4.1_018651m (locus cassava4.1_018651m.g) derived from phytozome v7.0 (chr-ID scaffold07391; pos 79984 to 82123 reverse strand)
gagcttcttcacccgaatctttactcagttctttggtgagtcttttaattctcttgttttttgctttttgtttgtagcttggaatattatttatggaattattaacccgttttattgagcaagcaaccaatttagaattttttaggttttttcccctgaattttgttataattggaccatcctctgtagaacagacctcttttctttctatacgtgagtttcagctctctgcaaacccccatgtttttgggtatcctagaatttctaacatgtcctttgggactataaagattcatcttttgtgcactgccttaaaaattttatgaaaatagcattaagtggccatttccttttattttggatttttctatatgagaagttatagcatataacattgtttctatgatctaaacctagattgtgttgttgaaaatatgccattagctttgaaagtcctaatagggtaatcctcttttaaatctgagtcattcatctcttaaagatagaagtatccatgtattggatattccttcatgaatgacgaatgattatgcaacaatttcaatttggattcttgttaaggccttacaatgttctagacaaaaaattgatcctcctatgatctttgtacaaagatattttacgcagttgtttcgattatgtgattgcttttgaaataaaatttttgttttgactgactgcatttattagtgccattagtatcttccatttgcaaagtattttatcagaacttgaagttctgatctcttcattattaaatgcattgccacttggtttgaattcgagtactagtcgatccaatgtacttaaaaaaaatcattgctactttataagtagagtaggaaaatggagattttttacagtgaatgaactgatttcaatgttatttcagtgaccccttgatcaggccattaacttggtgtaatctttcaatgtttaaaatactaggtacattgggaccacacgccttcaaggcttcaattagttatccataaattattgctcaaccgatctaatattgtgacttcccatggcgatgaaaccatggtgtccagttatttaagagctagtttttactttcacccatatgctggtgtaagtttttcttttaattggaatttgctggtgcagttagttaaccctttaatgttggtatagttggtgctgttaatcctttgactgttctgaatcaagttgtaaatgtatttaagctcccatcatttacaaactgtaagtgctgtagctgaaagagaaccagaatttcacatttatgtgcttaatgttttcaaaggaaaaatttcgtgctcatagtcttaggtataaaatatgacttgaacttgaagttctgatctcttcattgttaaattattgcctcttggtttgaatttgagtgctagtcggatccaatgtactaaaaaagagtgcatttctacttaagtagagtaggaaaatggagatttttacagtaaatgagcttattttgatgttgttccagtgaccccttgatcaggcaattaacttggtgagatctttcaatgtttaaaatactatgtacattgggaccacctgtgtgcctttgaggcttcaattagttaaccataagttattgctcaaccaatctaatatgatcgcttcccatgttatgaaaccatggtgcccagtaatttaagtgctagtttttactgtcacccatatgctggtgtaagtttttctttcaaatggaaatatgctggtgcagttagttaaccctttaatgttggcatagttggtgctgttaatcctttgactgtcctgaatcaagttgctaatgtatttaagctcccgtcatttacacactgtaagtactgtagcttaaggagaacagaatttcacatatatgtgcttaatcttttcaaaggaaaattttcgggctcatagtcttgggtataaaaatatgtcttgaccccttggtttcatgatgtaaatcttctttgataaaatgactctccctgtcaaaaattattttaagggtcggttaagccttgttagtggttaattttctttatatgcttcattttcttagttatttacattgttaagttgtgatttgtttgtaatacagatcctaaaggcattgaaa

SEQ ID NO: 6266 - DNA, 913 bp, Manihot esculenta
  Intron number 1 from transcript cassava4.1_025466m (locus cassava4.1_025466m.g) derived from phytozome v7.0 (chr-ID scaffold06825; pos 357314 to 358226)
gagcttttcatttcgtatttttgcgcttcatctatgtgagttttctatcttctctaattggtctttgtagtcgctgctcatcctgaattccaaatcatgccttgaaagtcagcattacctcttcatgaactttgttctcagaatcaataagactgcaaattactaggaatatggcttatgcggaaagccccttaccagaaattgcatgttgtatctcaattattttctagaggaatgagaaattttgtgatttggcttatttaggtaaatcgaagctggggatgattgatggcaacctttagcgaaaacccagtttagaatgtcagtagattagatcaaacagaatgtacaattatgtgctttgcactgattatgggttattctgaatttaattaatggatggcagtgattggcagcaaaatccaatttagaatgtcagtatattaaatcacagaatttagaagccttcttgaagtgaagggaaccactatcctttaaatttagggtcatggcctacttgtataactgctgagaaatgatgtaacttgactgtataaggtacacttcattgtcttaatctgaagcctgttctgcctaagaaacactgggaaacgagtgtgttctcaaaatgtgtgaatgaaccttagcatatttctgagaggggcattccttagggacactttgtagtatcagatcacccaaccatacccttgatgtctggacctcaatcagatttcctattatatgattggtttttctgtgcataatagttgctcattttccatgattgggaatgtctaatgtagtatggtgatccatcctacctgtgacatatttcaaaaggaattccaagcatcattattgttgcatcttatgagttcttctgcttgttacaacctgcttttggtcactt

SEQ ID NO: 6267 - DNA, 2298 bp, Manihot esculenta
  Intron number 1 from transcript cassava4.1_015317m (locus cassava4.1_015317m.g) derived from phytozome v7.0 (chr-ID scaffold04233; pos 46907 to 49204)
ctcttcgaagctcgttgcctacttcaaattcaaaggtcattagcttttttactcgattcgatccctcacccgcttgcatttataatttgtctctatttgcatctactctcgcatggtatttcttaattcttctcatatgtgcacatacgcccaatttatcccaatgtatctgctcgtttggcgagaaaattaggatatttagaaacgggaaaacctgggatctttcccatgtcttcctactagtctttatttggttatgcgaattggttaattatggtaataggttttttgctccaatttggtgatttgggtttatatttaacctacatattttgatatttatgtgattgcttcgcttgttcgtgcatccaattttatggattgaacattagcctagtggtggaacttagttcatatttaacattgctttataaaaatctgttgagggttatatagttttgttttttttttttaagaacttatagcatttggaaagttaacagtttttaggcaaggtgaagaggaacttggatgttgttaaagaaaacccaaaaagtgatcctcagagaagctgcttatgatgaagtttttggcacattgttgttgatatatttctagaaccaactagaatgaaacaagcagtaattttgttcatatatgatctttttatatgggattaatttcccttttcacatgggcatgctttaagtgttgtttcatacaaacatccatttctgtgatgtgattctggtgagtcaaatttacttttcaatactttcgaccaaaaattacttggtcagcagagttgggcgggattctgcggataaatttactgaaaaataatccacctaatgtagtctcatctactcctcccctctgttgtggggctttgaagttcactatttgacttctcagatagtaaccataaggcttgtcactgataatgccttctttagctcattctatgttgctaattcatgcttctacatgtgtatctttgctattccttcataccattagcagattcttgactatttaaccagcacagtctgggacttttatttgattgtatagtgtctttgtctttacatggttttcttggatttttgggcatggcagcgagatttccttccaaatatgattttgttcaagaaaataataagattattataatattatggctgattttgatgattaaaccagtttgggtttgctattggagcaaagttaaacggttatgataatcaggatgggtgtctaatcatatccaaaaattattagttaagtaagccctattttgcttatgtggttggataacactgtaacaagtgcttgagtttgatggcgtatacattcgctgaatgcaattgaaggagggttccacatagttagaagggtatcaggcatcttgtattgttactttaatatatgaatagtttatccttatggttatgatttatgagtggagaccttacctttccaaaaaatttcagctttcattctgcgagaagacgtccaaagcataatgcttggctattttaaatagtaccagaaattgttatacatccctaacatgcttgggattaaggcttagttgttattgttatagaaattaggaaaaaatacaaaaaaaatatcatgtggttccactcattttcacttcggagtatgtagttcaatttgtgtgaaatagtacttgtatcatcccgttggcaaataggggcaattttctaacgccgtcaagaaatgctaacttgacaagtaaaatataattgttaattaaaaaagaacactttatgatttcactcctttcatggtctgtggttcaatttgtattaaattagaattttgtgatatgagtttcacatcaatattcctgacattgtctaaaaattgacgcaattttctaatagcgtgatatcactgatattatttcgatacaaattgaattatagactctgaagtgaaaaatcgataaaattataggatacttttttgtactttcccttagaaattattaaatatccaatgaaagacaaaggatgagggtcaaccatatgttccctaggtagtttttctcctgggcctacatgagcttaaaatctatttcagtaaacagctaactctttgttatttgatttaattgtatatgttcaacgttgaagcgtagccggaagaattacaaatgcatattgctgaaactttgagaaagtaatgccaaaatgtttcactgtgataaagtctttcattctgtaaaatgcaggtagagttcattggtttccctggtcggggatctgg

SEQ ID NO: 6268 - DNA, 1851 bp, Manihot esculenta
  Intron number 3 from transcript cassava4.1_004884m (locus cassava4.1_004884m.g) derived from phytozome v7.0 (chr-ID scaffold04209; pos 71924 to 73774 reverse strand)
tcatctacctgataagtgcagccatcgaatttctggtaattactctctctctctctctctctctctctccttagtcttctgctagttattcgatgaattggtttctctctctccctctctctcttgattcgtcctgtttatctaggagtttgatttatttatttctttgctaaaatgggaaaacgttgatgattctgaaattcctagaagaactgtcaagtacaaacttatacaggaccatgtctcagccagaatagtagtgtgtgtgttgcaggaaatggaacaaatcccaatcataagatttaggaaaatgttggcaaattttttcttcattagctccaatcatgacattgcaacagaaggtttatttagtccatctcttatcctagattttttttttaattgttgattgaatactaaagaaataatatgcttttttagaaaattatacaattaaaaattatataatatatgatagaaaattatttatacagaatcacaaatcaatataagttatattattttttatgtttaaatagtaattgatttgcgacagtacacagagtatagtttgcctctgatgtatatgaaaggtcgaggtgataagggcatgataaataaaataaaaataaaaacaaaaaacaaaccaatggaaaagcttatcctaagactcgcagatgaatttaaggaagagcaggcacagttaacaaggcaccgccgcgattggagatatatgagctgtgatgttgtcagcttccactttttaacaccaatttgcttgtgttgctcaactttgatccctaatcaatggaaactttttcctcagcataacctccagcccttcatgatgtaatttgtcataaaagcatttatttaataaataatattatttatttgctatattttaaataaaatttattttaattttaaattatgtgttactataatattgaatcgatatagacactccgggtgttataggatttttctatttatactgtataattttcataaaggacttagtgggccatagtcgtgctgtgtttttgctgggacgaatagaaacttctaaatttttgttcattgatgtcgaaattttgtcctttttgcttccaaatattgtctctactggtagccaaacaccactaaggtcacctaatgctgcttgacaagtgtccctttccagtagtatttgcacgccacgtgtatctcctcagctgtggaggcaccaggacccgtctctgtcgtagatacggtaatcttggtctgcccacccttggccatgggggctatgggaattgtggattaattattcaatttttggtatttgtgggcttacatacaagctactgacagccacatacacgcatgtataggcttaggtacgtcattcaccattgcagggattaaagtttttattcatattataatcaaaatcatatgaatcagttttcaaatagtaaagtctagaaatatactctctcacatttacgaaggagagctcaagaagcaaggaatctcacgtaacaggattggaatttgtgtgattggaaattttgttttttttttttagtagaaagtaatttttgtgccttgtatttagaaatatcactaggtagcacaaacattttcaaatgtgacatttcatatttaatagtcctcttctatatatgagtccaacagctgaattcgtgatcaacacgtggccccaggaccacatttgcttatttaagctaactgttggtctgttgaataagatgcttcaagatcgagtaatgatgatgataataataataatgaattttgattggaacaggggttggtgatactcaccgtgcaagctcgctctcc

SEQ ID NO: 6269 - DNA, 2510 bp, Manihot esculenta
  Intron number 2 from transcript cassava4.1_032288m (locus cassava4.1_032288m.g) derived from phytozome v7.0 (chr-ID scaffold03823; pos 194543 to 197052)
gtttttttcagaggatactcggttacccatttcaggtgtgcaattgattttctaactccgctttgtttctgattgtgattgaattccttctttgttatttttttccttttacttttgttaatacagtttcatattcacgtcctcgtgcttttctgctttggaaaaaaaatcatctttgggtttaacctttttaattcataaagtaggttgtcttctcttcattgattaaatttttaaatgaagtaattgattgttgaattaccactttcactcatttcaggggctagtgatttagtattaattaattgaacatcccaaattgggattatgtagatgtcttgccttttatattgggagatacaacaagcctttctgaaggcagatgtaatccttttcattgtgaaagaagacatagtcaagactgtaggactaaggtttcaggtcgagaattggtggggattaattcataatttccaatattcaaaaattagatttgatatttagttgttaatttttcattcttattccttcattttctagattttaatcatttaaataaattttaggattttttaaaaatatttgatatttggttgagattttgtagtttttgaattttgctatataaagcctattaaaagacattagaactcaatctctatgtatggagttttctctatgtatggagttttctctatgtatggagttttcatgtttatttttgtctgttctaaattttcagttatttccattcttattttccttcgtaataccataaatcaaattcatggtatcagaaacttaatcttatggcctgagaaaaaaaaatgtttttttttcaagagagctgtgataaacactactaaatatgtttgcaccagtataaaagtttctttgaaaaaaaaaaaaagaagttccttgataggaactgtgccaaaatttttatggattattattggatagaaatacatgtttgatgagaattgaattaacaaaaagaattttttaaagataagcgctcaacaattgaaagatgatgagaagaggcgatatagtgaaatagaagtgctctatagagttttaattttctggaaattttgaatggagaatgttggacttggagattcattcaaaattttcagtattcaaaattagatttgatttttagttgttaattttttattcttattctttgattttctagatttaatcatttaaataaattatgggattttttggaatatttgatattttattgaatttttttattttttaaattttgctatacaaagcctatttaaaagcatcagaaatcaatctgtttgtatggactttccatattcattttttttctgtctaaatattcagttatttccatttaattgtactatttatagcactaaatacaaaatgaaatcttaacagttaaataagataataatcttattttaaacattgaactacaagaatcttgataatatactctaaaatcttgaaaatattttgaataccaaatcaaacttgtttgaattaagttacaacattccctctcttaattcaaataaggttttattatttccgattacaaatttcacgggaatacttctctctaattagcaattttatatacgggagcacttagagtacttctttctgaatgataatgttgatgcacttcttaccaatctcacatagagcacttatgaccgaatcaccaagcttttatggttgattttttttttgtttgagcacttctttccaaacttaattcttgcaattttcatcaaacatttatttggagtatttatctctaataaccattaaatattctggtgcactcttcaccatggaactttttcctttttctctctagtaatagaaactttcaacttgtgcaaatatatatactagtagttctcacaagctctcttaaaattttttttcttacaagccccataatatcattaaagttatgatacaactatcgggaaaaaatatgctgaagaatataggcaaagactattattgtaagaattaatttttgttacaatataataagtctaattgtattatttatagcactaaaaacaaaataaaatcttaacagctaaatcaaataataatcttattttaaaaatttaaatacaagaatcttgaaaatataataaaaaattttgaaaatattctgaatatcaaatcaaacctatttgaattaagttccaacaagaattcttaatattcatagaattatctatacatttatgtatgcatgtcagttgatggtgaattaatctccctttctatctcataactgatactgtaatttctctgtgattgttatctatttgaatggtaagaagaataattattggagcttactgttgctccttggcaagaatcactgtttacttcattagaagcaaatgggggaattccttctcttattttttgcctgtgtgtgatggagaaaaatgtttctcatgtgtttgatgtggtctcaggggtggaca

SEQ ID NO: 6270 - DNA, 2698 bp, Manihot esculenta
  Intron number 11 from transcript cassava4.1_001895m (locus cassava4.1_001895m.g) derived from phytozome v7.0 (chr-ID scaffold00341; pos 44201 to 46898 reverse strand)
atagcaggtatactgcttttaagaatgccatctccgacaaaatgttggggaagctcatggtggtgttgcttcttctcctcctttttctttttgtatgttctatgcattcattttgaaaagctaatggccttttggtactgttaaaattcgaagctcatataagcttaggatgccatacagtagaaacatagttaattaaactcattgaagaagatatttaaaacaattttccttttttggggtgccattctcttgtggttgcagtttgatcataattagttgacttgattctcagtttaccatcatagtcacataattaatttgttgggaacttgggataccattataatgtgtatgaaagaaagaaacttctttgttgaagatcctgggcttacagtatgatacatgaatgagttctgaaagcaacaagtttcatgcaaaaatagtgaagggtaggattttcttcaaattcttcctgctaggatcttttaagaacacgatctagggtgtaagccaattattttactggcatactgtagtctaagagctggcgcgtaaaactagccccataaagaaaaggtatttaatagttgtaaaatattgccacttgactacatgatttttatacagttgttttaagtctaatttaacttattattaggttcctgctgatcattcaaattctgggtcccaaattcatttgataactagtgctatttgtgcttagtcattaagctttgaagtttgagccagatggagctgattaactctattataaacctcttttgggaggtcatgattctggcaaatattttttgctggtttgctaagaggcccctgatcccgggcagaacttccatggtttcttgactgttatataatgataaactaaattggtgacaaggtatgaccgctagcgtaaaattagtacagtaaaacttactgttacatgccagggcctgtacatttttccaccatgatagaattttgaagctgccttatgttggttgaatcaacctgatgtgttgaccacagaattacatcttttagtttggattttataagctgtgaaactgcgttgttcttactcatgttgaataacttagacgagattccaaaagttgcaactgtgtaggaggactgctgttaagcgaatgtgactccagctttgatacagaaacctaaattattctgtgaaaagctagcatttagggccatggattattcgatgttgctattttgctatgatgcagatttgatgtttcagtcttttatttacttatttattatttatttttcagttgatgcttgtatgcagatgtcattgcttttgcctttcagtaggcaactaggcatgcattaattatgtttgcccagttcattgttgtgaactctttgattgacaagcagaagtttagcagtattatagttattaaaggcatgcttcaagctcaaggctcaccaggctcctgtcctgacgccttaagcgtgttatgtatcagacctgcaccaattactgaaacagagaaatagggagaggaagagagagaaatagactgggttgagagaagaactagaaaggggagaggatttagagagaactagaggaggagatgttgaaagggagaagaaaatggagagtgaaagaagaagagagaacagaattctgcatattttattgattttttgaatctcacaattacaagtatgtccctctcttttatactagtaccatacaacaagataaccaccagttgacagggtgactacgcactttttccttccaaactcctattctcaaatccactcggcatctaggaatgccactttctccaatcagctcatcccatctctttatttataacaaagtgcctaggcgtgcgcctgttccaggctcaagactctaggatggcgcatctttatttccacctttggaaaatacttacattaacaaaaaagccttcttgaataaaaaatttgccaatctacgaaaatctaaatcgatgactaagaagtgtttggacttaatgtcactggtgaattgtgaataatcagttgcttttagtatcttttctcatacgtcatttcaatattatcttattatctttatcatctcttctttttgtactcctttatttctattctatttgaaattatcttttttaaataccattagcaatggtatatgagtaatttattacagtattatgatattactttatttttttaaaaaaaaagacattagtaatatatttttcgattgtatgccacatatgtctaaaaaaagaaatgttaacatgctatttaggccatatgcttcttggttatctaaaattttgcttttttcattaaattttactacttgtgcctcatttcatttaggctcacacttgcgccttgcgtcttggccccaagaacctttgcacctttagccttaataacgatgagcagtatgctcttgaatttccctatctttgcaagaactaaaatctaaatgcaattggctacgttcaatagttgtttttagcggctctggttagtttataagtttgaggaccttatgttaacttttgggatacaagttgctaccagctatttcagattgagctgttcaggctggtcttttgcctgtatctgtttctttacacatgcttgatatctttcagaatgaattaaactctttttttttttcagagat

SEQ ID NO: 6271 - DNA, 1841 bp, Manihot esculenta
  Intron number 7 from transcript cassava4.1_005307m (locus cassava4.1_005307m.g) derived from phytozome v7.0 (chr-ID scaffold10305; pos 552263 to 554103)
atacacagactcaggtacttcccattaggggtgagcagtatgtggtttagaacagaaaaacctactgaaagatccaattcataaattggtttgggtttaataagaaattcagtttgttttggattttaaaataaatagatttttcatttcattttggttttgtttgaaaaagtttaggaaggaccaaactgaagtaaataaaatttagcaagaatagataccatgcattagatgtattgtacagtttaatggcagagagctttccacaggtcatgtgtgccctgtgttcaattcctatcgttataggctttggttgaatttattgacgacccactcaacttggtttgatccaaactatccatctgtattcatctcagacgtccatattctagtatatatagatgagttcttaccctagctgcttcttgtttcttcttttcctctcaattctttctgctctctcagtttgggtagtctctcctcactttcttgcttctcctcaatgtaagcactaaccacatatttcttttcacttctttgattctttccctctatcaattgtcatctctgttcttttctcctgtttgctgttgatcttcttcactgaaaattcaaaccccaatgcccatttgttttgacatggcagaaggcataagccaaaatagcctcctaatctgatatgtataagagaagaaaatacagtgggaaacagagagggaaaagcagtgattggagaggatattgactgcaagtgattggaaaggattttgatatccaaaaggtggttagaagttgagaagtggctagtgtgttgagaaatggagggaaaacagttagtaactgtcaaatagtagcataaatagaagggaagctgtaaacagaaggattattctggaaattaatgagaaataccttctgattctctattcttcctccaaatcccattctcctatccttgatattctctgttcttcttcttcttcaattcatctttcctttctcttggatcttggaatcaacagctgaagtatataaagttctttttctagggtttttggttacataatcttacagcaattttagtttagtcaatgtgtagaagtcataatctggtccagaagggaaagcttgttgattgttggttatcaagtggcaaaagcagtaatttcttgtatttttctttctggtttgagaaacattttgctctcttgagatatgatattttatcgtaattactgttaatttgatagattgaagtgttagattaaatgtattttttcttaaatcgcagttagtaaaatgatgttaaagttttgaggtagggtattgatttttctttttctatatgaaatttgattgaaaatcaatttaatgtttattgttgtttcactgaagtagatcgagaactgagaggagttcaaaacctaattttcaaactaaattgaactgaatatttcagtttgattcggttccgttccttcactaatttcagttttattccatttttaaatttctagaatttcagttaccatctgcacacccctatttcccgagcttgtatgcttgctatttagcagcttttacagtgattgataaggttattctttaaatgagttcaacacattttgcatgagtttttgtcaataatttaacattttaactgaaatttgtttgagtagccagactagtattagtagttattaggaatatctttatcatgtatgtgctagtgtgtacatttgatgtaaaaagtttcagtgctttcctttcacatcactcagtaatccaccaggtgtgtcttttcagtttgtaatcgacaaccaagctcttccacgcctcta

SEQ ID NO: 6272 - DNA, 721 bp, Manihot esculenta
  Intron number 3 from transcript cassava4.1_001699m (locus cassava4.1_001699m.g) derived from phytozome v7.0 (chr-ID scaffold02477; pos 123159 to 123879 reverse strand)
aagaagtgcaagaaactccacaagcatctgtgctggtattgtctgattggagttgccatgcattcttgttttctggcattagtatgaagtgtgctatttttctgagtcctgttggaaaactgtgcttttggaaatgaaatcaaaatgctctaaatgtaagatgtcattatagttaactagtcttatatagataaggacgaataatgttgttttacttgcaatgtttgccttatctttttctaggctgttatatagtcgtaacaagcacaaaaactatgtttagtttttctcctggttcttccgagcaaacattttacagtgctccattgcattttaatgtttgcttaattttattctaactcatacttgtgctctttcaaataaaaaatgctcgtccttaaacctcaaagcaattgcatttttggtttggcacctgtttccttcttcctcatgcaagacctattcaacattttgctggaatttttattcttttttcttgcacatgccaatggacgtaggatttatttttggctgtctgctgatttattttaactagttgcattttgtttgtctatgcattttgtttgatttgtattgtttttgttcattctttttagtagaccacagaaatctctgattcttttgttttgagaatctcataagacaccatgcactttattcgttaggccaaggtcaaaaaagatctcactgctgaagaaat

SEQ ID NO: 6273 - DNA, 4792 bp, Manihot esculenta
  Intron number 5 from transcript cassava4.1_008565m (locus cassava4.1_008565m.g) derived from phytozome v7.0 (chr-ID scaffold08655; pos 269013 to 273804 reverse strand)
atttggtggtaggttcatgtatgaaacctgtataaccttgtagtctgacctttctataacacttatctaaagttttcctgaattattgtatatggtggctagattggaaactggttatgcttttgctttcctatgttcttgcatttgaatgtgaaatcatagctgagtacctcgttaatggttatataattcttgttcatttcataagtctaaaattccaaagtcaaacaaaagctcaaccaacacttagttccaactaaatgaaatcaccttatgatcttcatggctcattgcatccttgttaagtttggtaaagtgaagaaaaatcagaacgatctttattgctattattattatttaagttcataaggattagatcattaccataaatagttcactttcgtatcaatttttagttagtcttcatggtagtatgcaaatagtataaagatgcccttggaatattcatatttttgatttttttcaagaggagtttttcagactgatttactgtcatggtgacttaacaataacaacaacaactaagcttttaatccccatgctagttgcggttgactatatggattctttgtcaccattcagttctgttagatgtcaaatctacactaatatttaagatttgtaaatcctttagtattatttgtctccatgtcatcttaggttttcctttttctcttcctcttctcactctttctctattaacttatcattttccatactggggaatttgaagctttatgttagacatgactaagccatcttcatgactctttctcattttatctccattatatgctacatgcatcctatgaaggatgtgattattcatgttctatccatttttgtattaccaaaaccttgatgtcatttctaccacattcttcttatgtgtatattgtaccttaaataggaaaatagaagtttcctttatgatcctattaataatggtccttgaaactcttgcctactgaaggtgaatagtaaaacaagaattggaatagtaaattttatgacacatgtaagacgtaactctcgtacgagtcaagctttaaagttggcttactgaaattcctgatagctccttcgtgcctcttaggggatatatatctcagctaattatatcttgcaggaatatattcagcttgtgatctttaaattttagcttacatagaatatagttctaaggcatgaagaaagcaagctgctgtcagaccgtggctcattttaagaagttgcttgtctaactgttgttatgactaataaggagaatacggcgctgtacttgtatgtgagggtggtctgtggtagttggctgaagaactgaggttgttaagggaagttgtattggtgaggagtgagaacagctttaggaagggctgctagctgtataaataacaactattgtagctaaagaaggacattgtgaaaatatcaggaatctattcaatctcccttattctctctatttctctctctactttcagtttctatctagtttctctccagtttctgccattctctggaatcaagaatcctcctcaacaacagttggtaatgaaatggattttggttggacaacgttacaaatctgcttaaggagagttgcaataatggttcattgcatgtcaggcactaaattccaggttcttctttcttgaaatttctcttttctctctttctctttttcttcttatttcttccctctaattcttctttcttccttctttaaaatttcttcccttctttttcctttattttcttgtttcctcttaacagcacctgccattttttctttcttgaaatctagaattctatcctttcccaagaacattgaaattgggttgctttcttccacaaatttcttgaagttgccaaaagtatttgcaattaaaaagcaaggccttgcaacatatattcagctgaaatggaaggagggtggattctattccaatgataagtgaaactccatagaggatgaatgggaaatagcaataaggcaaagaaagaaattcatctccttggtgcaaaggggaaaaaaaaattcaattcaacattttgattccactggttttttcctgttgcatattgaagttcactttctggagatggaggccctagtttttctgcaatattgtgttcctattgttcgtacttcaggacaagaatgatttaaataagctgggaatgttatgactaataaggaaaataaggggctgtgattgtatgtgggggtggtctttggtagttagctgaaggactgaggttgaagggaagttgtattttcaggcacagttaagggctagaagctgtgtaaataacaacataggtatttgaagtataataaccagtcctactgctaccagtactaagattaggaaactgtaaataagaaattactgatccaatctaactagtaatataaaactgatccaatctagctagtaatagaaaatcatctctaactagcaaaataaatggaactctttaaatattccagtaataaataagatttgtaagaattgttgtatattctattctgaataaaggtgtttatatactgattataaggcattggtacgataactaatcaatctccaaaaaatcctctctaaatcaatgggtatcattggccgtgtgattttgctatctattaattatttatagattatgtctacactataacaattcctgaataataatatcattcctaaattatatacatctaaacttcttaattttacaatgaaaaattaaatcaatatgattcctaaattcaatattatgattgcataaacaaatctcaattaatgggcttatatggaacgtgccaaaacaatgtaaatgtggattacttggatgcaagtcatttattatgcaatatcttcaaatgggtttagggaattgatgatgcgtacaccatagtggatttgtaagggggttaatgacatttcatctcaaacttttttatcttgtaggttattgcttcaagaagtttgactttgtatttttttgcaaagctcactttactttttcaaagtggttaatatttttgtaatgccagtattatttgtactttgatgtatgatggaggagttttggcttctttatccatacaacataaaatattgatgaggttcttcagaaaatcaagaacttggttgttccatatgcatctaattatttaagaaaggagacttcttttctctctctctctcccctttttatttaactattagttgccccaagtaggactgcgcatggttccgggggttccaaactgaaccgaagaatcttaccaaactgaatcgaaattgaaaaatgattgatggtgtaggaaccgaaccgtatcgaaccaaatttatgtagctatttggttatgtgtgtacatgtacttataattgttgttagtagctatatgtatatatataaaataataacataaagctatttatgttttagtcactagtcaattattaaaggtttataatggtataattcaataaatttaattcgttaattatagttcattctatttaaataaattatattatacatcatctccatactaaaaaatataaattattaaaatgagttacatatatatgtgtgtatatgtacttgtcattgttatcaatacccctatacatgtatatatatatatatatcaaataatacatatatgtatgtaattgttaactagattatatatattaataaaatataatttggtaaaattaaaaacaaattgaattaaaataattataactattttagaaaaatatactatttagctaaattacatagtttcatctaaaattatatagttatgctataagaaacaaaggaaactaaataaatttgcaacatatccaaggaatgataaaagctcatttagttagagtttatttattgtggaaacaaagcaacaaagtttttagaagctctatgagtttgttcttttcatttttatttttttaagagtttgaaaattataataggaagactatattatgtttggttattagtatcttgatatattttagatgaaaatattatatgatattgtggatctatgatactgttttgaagttagaatgtgagacttattaatttgatataaataatattaatactatgttagaagtatttaattgtttcgttctagtttaaattttattatcggaaccatatcgaaactggaaccaaaataagaatcaatactagaactgaaccggaactgaaagcacatggaactgtaccggaaccgtactgaatattgattttgattctggttctagttctgattccaaaaaattcaaaaaattgactttcagttctggttctggttcctgcaaggaaccatctgacaaccagaaccgcacacccctagcaccaatatctgtttggaagttgaaactataataccagttgcacaaatctgtcactaaatttttcttccctcttataagatgctcaattttgtgtatcaggtatgttttggttaccacagacaattttttgagcagaaacattatttcttataagtctaaagtctcatataagctgctgaacagatctgtcatagccacttcttttatcattcatgtaacctctgctgctagtatggatcacatgcactaggtcaggtgtttttagcagtagctattgttagctcatagtaaaataactgactgctccatttttggttacttttaatcctcaaataaactatgttttcagagtgcaggagtacagtttccccaaaggcctc

SEQ ID NO: 6274 - DNA, 1453 bp, Manihot esculenta
  Intron number 10 from transcript cassava4.1_007433m (locus cassava4.1_007459m.g) derived from phytozome v7.0 (chr-ID scaffold02295; pos 12749 to 14201 reverse strand)
aagagacgaaggacaaggtaaatcctaaatctagttcttcaggctggggaaccacctataacatgtcattatttctataattgtgaagttcaacctccttgaacttgccattacttcctgatcatgctaaacaaaatactccatcctacaaagatagacttctattttcacatggattaagaaaatatagttaaagcataaattttgtttagtcttttcttagtatgtcctctattcatattgtttcattaaaaattaaataactcatgttactaaattgttcttgaaaccaataaatgttacgctttcaatgcatattaaataggggcatattagaaagctagtaaataacccattattttaaaaaggaaaatggcttataattttggatgggtgaaaaagaaaagtaagtctatctttgtgggacaaagggagtactactttcatgttaagactcttaatgctggtttactatattaaataagaggttctcatggaaccatatatttgaagatttaaaatttcttatgcaatgctctttttgttgctataaataactgtggtagtgttgaccaacataaaaggttcctaattaggaggattcagatatttgggattctaattacgcatgattataaggcttgattatatggattttatttttattgtaaatattcctaatttaagttgattctttgcgtataaaatactcaaaccttgtaaagatcaaagtaattggaatagaataaaaaatttctctcaaaattctttgggtagtcttccttttcatccacccactgtctaagattctgcgaattaatacaacgtatgagaagcagatagtggacaggatagctatgcccttgctgttttaattttctggcagcacgttgtgggttccacactccacaattggactgtgattgaccttactatgaaatcaaagagtggagaagtacagaactgagctatatgatggtgtaaataaaagtacttttgcaagcacgttgagctgtggaacattattcatgtgcaactctttgcttccataaagtgaatccctcagtttcaaaatccatgatgaacctcaataacaatggatgaaagggattttcctttttcttttctcactagaactgaagacaaattggaataagtggagagacttatgtaataagagaatctaatataatagtgttgaagcttcatataatcaaagtttgaagagtcaaaacaatcataaacaagttcaatatggtaggaaagatgtccatgaattgagggatctggtaggttttttgttgaagacagtaacactgtcaaggtctaaatagaccctatcttaattgtatgatgagcaactgcaacttttattattattagaaattgtgttgaactctagtttataactagtgaaatctctgacagggtgaggaagttttagaaggagcat

SEQ ID NO: 6275 - DNA, 3044 bp, Manihot esculenta
  Intron number 3 from transcript cassava4.1_015253m (locus cassava4.1_015253m.g) derived from phytozome v7.0 (chr-ID scaffold12004; pos 681811 to 684854 reverse strand)
attttagtactatcagtttgatcttactattggaggttagtcatgacactatttttggtgataatgctaggaattacttttatttgaatacatgagaatgagctgcctttagaatatgcttcttctttttcatattggatttgagtttcttgttttctatacaaggactacacatttgaattttgctacaagtttaacattatatacagctaagtatttgaagctaaaagttgaattgattctatttaagaaggggccaaaatatacacttaacaagtttaaattgaatatacttactttgaactaattctaatttaactagaattagattttattaaaaatataattctgatttattaaatttaaatgcattaaatttctatttagctaggccaataaaaaaaataaccttatctggagggctaaatgtggtagtctattgggaacaaactcatattcaatgtgctctaacttaaaacttaaaatttcaggaggaggatagtccataattggtgcctaatggtaccattgtttagctaaatcctgtttgttttctaagcgggaagaaaaatattgtatgtctaaaataaagatgattattcctatatctcacatgctgtaaaattatgattctgttttatccaatgaagttttgctttgaaaattaattgatcttatagtagtttgttaagtattgggagattgaaaagaacagaatgtgagatgagaatagaaaagtagaaattagagatagagatgagataagaacatgatatcagtggagagaagaaagtttttgaattgattcattgaatcctcttccaggtatatttagctgcctcttatacacttattgtaactgctacaaacaaactctaatttccatttgttttgtagaatttactgatatttgggatacactactcaagaaaattagttaatgaaaaatattttttctgatcaagggaattaggtaatttttgaagaaaatgactttcttttttaaaaaagaaaatcatttctgcactttgaaaattttattaacactattatatataaatttattaatattgattatacttttaaattaaaagcaagtaatgaaaaataagttattttgttagaaaatatctttagtggaaaacattctccacataatatttttttcaacaaaaatattttcaaactcaagttattttacacaaataaatggaggctagtcaattctaactttcccttcaaaactactttagctgctacttaacagcccctgttctcctcctcctataagatgcaaggaattgagaggtaacaaaagagtagtcctcccaagtggcttcttccactggtaaatggcaccatttaatatgaccctgagagactttttggtcctgcctgctaattacccttgttcttaaaaccttctctagaaagacaatcacattatcctcttgaaaagaaggcaaatcctacacaataacagccttctccaccacttttttattcaacaaagagagatggaaaattggatgaacagtggaatcatgtggcaattgaagcttatatgctattaccctaatcttagctacaacattatagaatccataaatcctggcagagagtttaacatttctcctgacagccaactaattatttttcttcttcatgttggctagtacttgaaaggaactaatctttttgggaaatttagtgtttagtccttatattatggagaacttcattagttgatccttcagttttgaaaaatacactaaaatatttttaaaattctaaaaaatctacaaatctgtcattctattaagtgttttactctttaatccttgtagttgagaaaaattcactagttgatccctcagttttataaaaaaatatattaattagtccttccatattgagtgtattttaaatttttttgcaataattaacgaaaaaaattaatagagggactaattagtagactttttaaaatgttaaagatgttttaatgtatttttcgaaactgagagattaactaattagttttctcatactataaggaccaaatagtaatttttcttttttttttcttttcatgttgggaattccatctgttgtgagccttatcaattagctttactgacatatttgatgtttcttaaaataggtaaattaatctaatgtatttttcgaaactgagagattaactaattaattttttcatactacaagaactaaatagtaatttttttcttttatgttggaaattctatctgttgtgagccttatcaattagctttagatatatagatgcttgtttgtaaattaaactaatttaatgtatttttcggaaatgagagattaactaattagttttctcatactataaggaccaaatagtaatttttctttttgttttctttcatgctaggaattccatctgttgtgagccttatcaattagctttactgacaatttgatgtttcttaaaacaagtaaattaaactaatctaatgtatttttcgaaacagagagattaactaattagtttttctcatactataagaaccaaataataattttttttcttttctttcatgttgggaatttcatctattatgagtcttatcaattagctttattgacatatttgatgtttcttaaaacaagtaaattaaacaaatctaatgtatttttcgaaattgagagattaattaattagttttctcatactataagaactaaatagtaatttttctttttcttttctttcatgttgggactttcatctattatgagtcttatcagttaactttactgacatatttgatatttcttaaaatagagaaattaaactaatctaatgtattttgtgaaactgagagattaactaattagttttctcaaactacaaggatcaaatagttttttttttctttcatgttgggaattccatttgttgtgagccttatcaattagctttactgacatctttgatgtttcttaaaacaggtgaattaaactaatctcaccacaagaagttcaac

SEQ ID NO: 6276 - DNA, 775 bp, Manihot esculenta
  Intron number 2 from transcript cassava4.1_000195m (locus cassava4.1_000195m.g) derived from phytozome v7.0 (chr-ID scaffold05875; pos 2307675 to 2308449)
aggaatttctggagagggttattcgactgaaggaggtttgagttttttttttttttttggtagtggccgctgtttgaaaatcttaaatcttctctaagaaatgtgatttgaaaaattgacactttacatcgtgtcctcttcttacccccacctcctctttctcttcacttgccaccacattttacttcgtcacacctttgttgtagttatctcaaatttttaaacttcacaatatcgtcccttgatgtatgaaaaagaaaatttgaactggactgtatttaatatggatgtatgtgcctaacaaagtaacgcttgttcctcaagtctaaactacacggaatatattataactgccagtttcagcctgcagtaagatttaaaatcacgtgtaaatatatcggactgtaactgattgactgaaaagcattggtgtgcatatggattatttgtgctgaaagattaaagttctgctgatttttctgcttgccttggggtaaccattttaattttagttaatgtttgttgatggcgtgcttacttctcgatttctcacaaaaaccatctgagaaagtgtttttgaattttattgattaaaaaatacagtctagatgttctttttttcccctcaaaaaatgttttacaaacccatttgacatatgtttctgttgtaatttatatgaccatatgtactttggcaaagccttatagtttgagtgatcatattcttaatttgtctgcaggggagagagttgagtatagcagagaagacaaatta

SEQ ID NO: 6277 - DNA, 4144 bp, Manihot esculenta
  Intron number 2 from transcript cassava4.1_008342m (locus cassava4.1_008342m.g) derived from phytozome v7.0 (chr-ID scaffold06299; pos 59511 to 63654 reverse strand)
tattcaaggtaccaaagctggttgcacttttccaggtcagtaccttccttatatttgagtattagcataaaataaaattataaaacagggaatttttctttttactttattttttaattttaaaaatatattaaaatgtttttaaaattttaaaaaatctaaaaaattattatagaatcctaagattttaataaaatttattactaaatctttataattcttaactctaattacaatgcctaaaattattgggtcatgctgctaaatattccgttagtctactaatataatcatcgttagccaaaggaaagagagagagtattaagaaataacaaaaccatcctcagatttatttgctaagaccacatccttttccctctcatccttcttctccacctcctttttctctcttctattattgacatttccactatgcatatgcttccttgaatccctacatcgtctcttctctttttattccggagttctctttcactttcactcactcaccgatggctcctccatcccatcttattctctactgatcgtcgttggctttcatcgacattgcaacatcctctcccttgatagctcctctccattccttctcactctcagctgaccgtgctggtcttcatcattcatttcaacatcatttcccttgaaagctcctctccatcttgtctcactctcacccgactctagttggacatcatcttcctcaaaagctcctctccatcccgtctcactctcagccaaccgtcgcttatcggtcattgtaacatcatctcccttgaaaactcctcttcatctcgtgcagaccgttgttggcctacatcggccattgcaacttcatctccctcgaaagctcctctccattctgtctcactctcagtcaaccgttggccttcatcggtagttgcaacatcatctccctcgaaagctcctctccatcccatctcagagatcgtcgctggcctcaaattcaagcggcgattatttctcaattttgattgctattctgtgtgagcaatttatgttattttaccttaagactataacgacccggaaaccggaccgctaacggcgttagaattcagatcgacttataaggtcgccagaacccgtagcaagtctactatacatcctgtgtacctgataaaaatctcatatatgatcatacattttcattaaaaatttaaatatttaatatactaaactcgacctgtgcatacatcataaactgtatacataaaatcccatactagagccctcgtcaaatgctctagtatggtcaacatcacatatatcaagtttagtttagcataactcatcataaaaacttttacaatataatcatgttcattgagattttccaaaacataaactagggcaaagcacaaatctaatccattacatagtatatatcaactactattctattacattaaactataccaaccattaactgactctcccacgctatcttcaatcctgcaaacctggggttaggggaaagggataagctacaagggtttagtgagcagaatataaaaataatttaataaacatgtgatctcatgaaatgcatcacaacacaaatgatacacatcaaggatggatttgtcaccagtaaccctctacatattccaaataatgttcggccctcgacggaggtcctcgggacttcctcttaaacataacataacatatccaactgtgccaggggcgtagaatgggcagccctggtgttttccttacgtagtgccagggagcgtagaatgggtggccctggtcttccgtatccgtatccgtatcatatcataacctgctcgagggttagtgggtcatccaatatccatccacaacaatagtaaatgtgcaatgcatcatattcgtgaattctaatgcaaacaacctattacataacatgacattcgtgatgcatgaacgtgctcaaaaagcttgattacttaaaaataagagattaatttagttttactcacctctggctggcacttgcctaacaaaaacgcagctagctcactgaaggcctctacggtctccctagtccgatcctatacaggtggacacaaatgaaggaccaaacataactctaacaagactttaaacaactacccaaaaactccctaaaacatcatataacatgcatataaaacaagcaaaggaaggctgggtagaggactttcggcggcaggttcggcggccgaaggtcctttacagatccgaaagtcaaggtccttcgggggtaggttcggcggccgaaggtcctccacagatccgaatgtcagggacttttgggggcgggttcgggggccgaaactcccttatagatccaaaagtgcatgctttcgagggcatgttagatggccaaaaggcagcctcccatgcaggttcggcggttgagccctgcttcggcggctgaacttgggttctccagaacggtagaacccgattattcctcatgcatttcagccccaaaactctcaaatcctctcacccaacacctcaaaacatgcatactcactccattatgcataaggggtatacaaactagcctaaaccccaacaaacaataataaaacacaagaggaagcatacattcatcaaaaacacaactcaaaccctatatcattagatctacccatttcatgcatctttagcccttaaccccttttaaaacttacttaaaacatagaaaaaggcaatgatctatacatacctcttgaagatctaaggtagatgcgacataagcttagagttgaggagaaagggtctccaaacttcaaaatcttggatttaagcttaaaacttcaaaacaagagaaatactcatgaaaatttgaaagatttgaaggaaaaatataaaatcatccaagggagggcaagaattcacctttgcccgaaaatggaaagagaaaactctcccattttcggactggaggcctcttataggtggctggccagactacctttgggggccgaaaggagagctcccgcggcagcaccatgttcggcggccgaacataagattcggcagcagaacctagcttttcccttcctaaacttttttctttcaaaaactcttttcttcctttcttaaaaccttaaaatattcaaaatacattttataaaaaccttattttacccttttaagagaatccagtctcgagatttcagattccaacggagattccatcggagggttggaattctgacgctggaacttagacgggtattacaatatcgatggattgtattttgtaaattataattggattaaaatgaaatttctccttctattagaagagatgttcttggtagtgttagttgttatttggttgggagatttattgattttaagaattatttgaagaggggaatggtggattgaattaggttgaaattggtatagaattgcaagggttggagggagagtaacattgcaaattagaggatagatgaagtctatttcagacatttcacataaaattaattaaagtaattaacagtcttttagagaggaaaccaatagttctattttaaaattatgagatatattttaattagaactaagaattataagaatttaacagtgaatttcattaaaattcagggattttacattaattttttttaaaatctatgaattaattattatattaattttaatagttaaatatttagtttattcctttgttttgttttgtaaaaatgtccgctatttaattttccaaaacaattaagaatttaattgatttcttgattttattttataaaaatattcactatttaatttttgaatattttaaatttttggataatttattagtaaacttttaaaatttaaataatgttttaatgtattttttaaaaaattaaaaactaattaataaatattttatatcacaaaaactacatagtaattttttctatagaatattaccatactaattaaaggtctggtcttttattagcacaacatacctctgtgatcgatcctcttgagtgctgattaatgaattatgtaaactttattagatgagtcgtgagataaattgtagtaatttgataatcccatatgtttttgtagagacgcctttctagctttgcttatagggctt

SEQ ID NO: 6278 - DNA, 1754 bp, Manihot esculenta
  Intron number 2 from transcript cassava4.1_023273m (locus cassava4.1_023273m.g) derived from phytozome v7.0 (chr-ID scaffold11821; pos 182003 to 183756)
caggggatccttctctttattttgatttgggtgagtagtttctttttcttttaatctttcgcatattcatgatcttggctattattctaatcacgtaaaatttaactattaatttatgattttataaaattcaacaaaaattttaatttggtaaatttattatgatagtgtgattacatgacacctatatatttaaatacattatgaatttatataaatttgatttaaataaataatttttattataaatataagtataatattccattaatgatacatgggcatccttggaaaaaccaataagcatccctctaactgggaagtctaatggaattttgaaagctgaaaaactgaatgacttgaatttcaacattgaaccgattttgtagcacttcagtgaaatctgaactatctccaattcccaaatccctaaaaatctattaataaaaattgtagatgtgcatcaacaattctagcgattcaaacctccatcaataagaagaagaatacaaataaacaaaacaaatccagaaatatgcaactcagaaatagcaaacctataaaagaatcacaaacccactctattggttaaagtcaacactaattataagacttttaatatagaagaatattggatgttttgatgtatttaatgggttgtttaataagggtagatggtagttgtattaaataggacttttgcatggttataaatagtcattcttgtgcttagtttttatgtgagtgagtgaaagtaattgtgagagtgaaagtgagaaaagagctagagagctcaagtgaagagaagtgtgatagtgttgtattaagtttgtaagcattagtatgatataaaagtatactttataattgctactttgatggatcttgtacattagaaataattatactattgctattatcttgatttaaagtttctgcaaactgtgctttcctatcctaaaaaatctactcaacatgtctaacaagtgatatcatagtggaaggtcaaggactagaaaagaatatgcagttagggattgtaaagttgctgtcagagacacagcttgcttatttgttgcgtttagattatatgatatattgagctattaatcacacgtttaggaaaatcctatctaaggagattggaacttaagtggaccattgaggcctccaatctttcttagaaaattttatcgtataattcttggtacaattatacgtatactatttttcaacattctaaattactatgacagatctaactagttcatctagttcgattgaaaagttcaaccacaataattatagtacatggagtattcacataagtactatttgatggggcaagatttatggagtattgttggagaaatgaggtcacaccactaactgacgatgaggaggctagaaagtggagaattagatttagaaaagctacgtatacgttctcaatcacagtggaagacgagttactacatcacattaaagatgctaaagtactaaaggcagcatgggacacttgagcagcactattcacacatataaatgaagcaaagttgcagtaatttgagaatgagctcaagtcaatctcacaatgcaacataataatcagtcattctttactaaagtgaagtctatctctattgatatttcaaaacttgatccggaaaacaagatttgtaattcaagaatatgaagaatcatcgtttatggcttaagaccagaatattgctctagtaactgccaccagagga

SEQ ID NO: 6279 - DNA, 1221 bp, Ricinus communis
  Intron number 1 from transcript 29092.m000457 (locus 29092 .t000016) derived from phytozome v7.0 (chr-ID 29092; pos 1 28451 to 129671)
ctattgctaccactgtttgcgctaatattcttgaggtgatccatccccacagtttgttgttttgaattgaattgtaaagttgaatgtgattgaaatatagttccaaagaaaaataaagggtactagtatgtggtcttgtttgtgatatatacatatatacatatatataagagtgtaaccacacattaatgataacttttgagattctacagttttgatgtttacgacaattgtcatgaacgatgtcctggatgcaaaaaatcacaacctttcgcgtggaattgcctaactatctaatttgaggctcttcttgattagctaatatagtgaaccttttaagctcgagcagttcatacaggtttcttgaaaattgcagtttctcagtggcaataagttatgcttgttgccaatcatatgaatttgtcatgctcttgtggttttgctttctgtacggacttgctcagagattatctgccaaaatatgttgctgtgtacctgcaagaggttaatattatgtacgagctttgtaggtgccttttaacatatgggtttattcatttgtggacctgtttgtattgggtgcagtatttctttcaatagattttgacatgtgacaatcgtatattattaaatgaattcgtgtcctttttactttttcatacaaggaattctcattgcttttttagttctgctgaggtggtgagactctggaccatatattatcaatcctcaaggcaggcttaatttcatgtcgtagttacgattgagtaatctggttagaagtgctgcaaacagcacaccagtgcaattggatggcaccaaaggatcaaactgatcgaaagtaatggattgatttaacaaatcagttgagagttgggttctatttgaccatatatcttgtgtagaataatgaaacacattgcttctttttaactcaatatggattccttcaacatgagagcaccattctttctcattgtatatatgttatcttttccttttttttttttccttcttgcttctttttcttatggagatactactaagattcctctctcaaaaaatcatttgcagcaaaaataattgttaatgtattttgatcctctttctgcggtgttaggctgttactcatgctccacgaaactttactttccatatcatatctgatcattaaattaatttgcaggttcccagcgatcaaaagttgccatcactttatct

SEQ ID NO: 6280 - DNA, 1767 bp, Ricinus communis
  Intron number 10 from transcript 29636.m000739 (locus 2963 6.t000004) derived from phytozome v7.0 (chr-ID 29636; pos 19655 to 21421 reverse strand)
aaagattcatagattttaagcgcttcaaaaaggtaatgccattatcttttcatccttttttttttttttctgtaatagcctgaccactacttggtccatcttgacctgcaacagcttggccgtaggcttgagattgagatgaaccatttaaaaaaaatgcagaagaagttaaggatgggataatttctgatattccatcttatgtagggctatggctaaattatggcaatatatcagttttataactgaatttgcagattataccagctagtgtctagagtaatttgatttgtcctcagatgaaagataatttattagaggaaaatgagaaagattttttatccccagacaagacataaaaacagactgagtcacaaacttgttgaaataatgtagtctgtggaatataagctaaatacactctctaaatctacctaaagcgaatacctgcactaagtagagtgcactgtaaactacccaggtataccatgattcttgaaaagcttgcccaatcaaggactttaaattgaaataattactgtttcatgttataaaaatatacgtgctgctaatgtttaactaaaagctctgaatattgttttgaaaaaataaagaccccctaatgctccaagctaaccaactggttaatactttttgccttcgaatcggcaataatcattattattaattgcttgaaagagttcataccaaacaaaagtcttatttagataaaactttatccttcagaattcaatttggcaaaggaaatgaatgatggctaataacaagcaagacgaataccatgctcttaaaaaccaatttttctgccaaatccattttgagaccttgatttgggtaatattcgtagaatcaagtataggtttgtgatttgagctttctgattctaacaaagtagtccttgaacttaaattgaccaatcaagccttcaattcagggaaaatagtcaaattgttactttttgttaggtttccattaaattatagctggataacagaattgtgatagaaacatgtgcagctttttggtattcttacggcaaggtataataaatgtgtcttctcaatgtttgaggggtgattttaaaaattctaggtttatggattattgtgaaatcgaaaagttttagggaaaaaatatgcagtgtagttatttccatctcatagctaacaagattctctctcttgatgctacttctctaagagaagcctcttcaagctgcaacccaaacctttggttctccagtgtaatacgacgtttctctacagtctagatcactctcagatataaatggagtgaaaggatcgccctgcatgagatctctacaagctataatccaaatttttggttcaccattgtaattttacaaaactcagctactgatagacaagcattaatgctttatctctgtaataccaaaataagatataaccaataatgattttccaaaatttgaagtcaaaagaatctagtgagattgtgctttatttgttaagctttccattcatgctaggagtgtactgggggtcagatgttggtcaaagtgatgactggttgtgataaggaggctgttgattttaattgggggagttatgttatgatgaaatggatgcttgtgcttgagcttggtttaagtttcaaattctaccagtattgtgaggatcttgttcttatttgtgatgttgtattcactttctgttttattctcttgcagaaacaaactcaatcagggaatagcttcaacaacct

SEQ ID NO: 6281 - DNA, 3191 bp, Ricinus communis
  Intron number 17 from transcript 28498.m000205 (locus 2849 8.t000004) derived from phytozome v7.0 (chr-ID 28498; pos 38031 to 41221 reverse strand)
ttggcacgtgcatttctgaaagcacctcctattctgtaagagttgcattagatttatgcttgtatctatgttgtgttgagtttttgttttctttgttttgtccctttttctttcttttttttgttttcttcttgtctcttatgacaaagattgaagttaacgatattgacagtttaatcaagatcaatcttgtctcttttagttccctaagttccctccttagtatgtatctccaaagtcagtcccttcaagaactgcatatatattatacttctcaaaattatgttaattcttttggatggaaatgaaaagaagttgctaacaagaacttaactgtttttaccaaattattttgttgtcaagaatgtaagtgataggtcaatggaaatttagtagtatcaagtttttggtcatggctttgtttttagggcaacaattttgtaggttcttatctcccatatggctatccagtgtttctgataaaccatattattttaccatttaaatttgttttcaaatgaaagggttatgaaaatctagaattagcatgttcttgcaacttgtttgaaagagggagatgactcaggaaatgggtgagtatagagccttttatatgaactgaatttgtggggctctggttcaactagagccatttggatggctggccttcactgcttataagccctttcaagatattgtggatttctctagcagttttaatgttattgatgggcttaaattcaagtctgtttaatataagtgcaaaactgctatctttgtgaactgatattttccttttcagatataaaaacatatatgtaaagtacaaatagttatgacaacattaatgagtaattatgagatcacactcaataaatgagaggtttttttggttgggtaccatgttttggctgagacagtctcctttggagttttggtaaattgatccacttatcctaatacattatatattcatgtaatgcattcaacatttggaacttctcttggtttgatcccatgttttggataagtaagttccctttgaactttatgtaaattgcttcacaattatttggtctatgaaaacttgcttcgctcatcttaattcttgtttatacttagtacgttcctagtattattgtaccagccttcagaatttttttttgcttgaattcctatgttttaaagttctacaaatatatatttgacagccatatcctattctaagcaatctaggtgctgatgtaattatgctttgtacatgtccttggtttgtatagtacaacttgaatttaactaaggtaattaatggaccagacctaaaactctttttttattaaaaacacagtaacttagaaatccaagcaaaactgcaagggtattaaaagtaaaactgcaatttcttaggaaagtaaatttgaaaggtggaaaaaaagagtgataggttcttaagggaagtactgggtgaaacaaagaggtcctcgttatttcctcgggatggtgcacaaagaaagaaaaggagaatatcttgtggagacagtgtgtggaacaagaattaggggaccctaaaggacctcgtttaatgttaaggattgagtttcctcaggacttttccggattctcagactagtgagggtggaaaggaaaaatggatcttttgcaggatttgcaggtgggttagggatagtccaaaacaacttgttttagcctactactctgaggcagcaaaattttgaactgaaaaggagctttttctcatgaagctaaattcttactagagattacaatccataacagaatgagaataatgtattgacaaagaatgttagaccataaagaagatttaagttggctagcctctttatgggattccatactttgggactttttgttcataatgttgtcatgcttgcttttggtagtctggagaaacaaatcttgaacccttattttcccaatggatacaatctgctcacagtaaaacttcatataggttcgatgtaattttattttcaacaaatagtccagccttcaatggggtcaaatccaaaatttgaacttctatttggtagtttccaaagaagtgtcagaaaaaattcaaattaatcccatgttttattgtatgaattatttttagtttcgaatactaatttataacaagataaagaaataagttccttgtgaatcttcaagtgactccataggacaataaaatcagataaataaataaaaatgaagaagagtccagattccaaatgaacaaattcaaacttaaaaaaaaatatttctgattatcaaagaacgaagggacaaagggattgatcgagaaagatctctttttcttattgtaaagtcatgattggatcagcatatgtttttattagctctattgccactcgacacaataatctgatcagttggtcagattttgactggaggctagattgacagaaacctcatagtaacatgtgcaactgaaatgaaaacgaaaactaactaaatttgaaaaacgcctaaagttcaggttctttttgatcgataagctaatcagattagaacacctttctctgattcagttaatcgatttaatcctttttgagccttaaatctaatcaataaatttaaatactctttaatgatgcatctttaagaggagtagtctttgtgattcttcaaaaatgatgctaataatttttatccgttttcctagttttgattgaactattttcatgtagtaactctacaaaatggacatccttacttaatctatagtcaacacattctatgcttcccactttcaaccaattatttcatttttgtttcatagtaggtatggtgttgttatataggaaatctctctgaatatattttttttagttgtaatatctcttttcttgatagcagttattttactttgaagtttgtgtttgaaatctttcccctgagtctctcttctaacattttagtaataataatgatcatcattgtttcttatggtccattgacgatgtgatttaataatttaaacaaaggtatgttctatgcatcctttatctactttgtccgaccaacttttcagcttgatgaactggattatgcatgatgtatacagtgaaagcaaataaatattagttctcttctttctttatagttttataaattggctggttttgatttcctcaggctgtgtg

SEQ ID NO: 6282 - DNA, 4797 bp, Ricinus communis
  Intron number 8 from transcript 29620.m000535 (locus 29620 .t000005) derived from phytozome v7.0 (chr-ID 29620; pos 3 9352 to 44148 reverse strand)
tggtattatttcttctctcgcatttcttgtagttgaaatgtttatgtgtttgttaaatggttattggagatttaagctcttatatcgctaattgcatgtaacctataaaaaaatatcaatgcatattataaaggtttgatatatagatatggtggaagctataaagcacagagactcataggaggttgccgtatacatgtcagacattccaaggatacggacacgctagggacacgtatgggacatgctcgaaagtgtgctttttcttttacaggtgcggggacttgcttgggacatgggaagtgataaagtttgcaaaattttgggggcaaatttgaaagacatggggtgctttctaaaataacttaaaagttaattgatctaattataaaagcataaaacataaatctttcaagaaaaccctagccacacttaatctctttactcttcatattatttaatggacaaaaaccttgctttctacttctatctcttcgatttgttcctaacttttcgtcctcaaaattttttctacaacttgttttttctcaaatactgttgtttgtagatgaagtgggtgaaaattaagagattgaaaaaaaattagacttctagttcaagtttaatgaatgttatttatgtaattttgtattatatatgtatatatatatatatagaaaaaggaatgatccatcaggtttaggaccgatctctaataatagggtaaatcactaatattaatccattttatcccatctgtttcaagacaaggattcaataatcacataaacaaaatcaaggaactattagtacattgttgaatagaaataaggaatgtcaatctttgatcattttgtcatcatttaattgtttttgaatggatcctttcaacaatgtaataaaagaatcaattaaaagagatcctatatttccaattagaaattcgttgggccctttaggaaaaatccttcaaattgcaaaatttatgtattttaacatttaaatttaaatattaacaactcataatcggatttcagtaactaaatatttgaaacttgataatttaaaacaaactttttgaatacttaaatattatttaatggatgaaatcaggagagttgttaatcccgatccatgtagtaacagtgttttgaatccattcaatttgaattagtattttctcctatatttatcatcataattattttgaagaaagcttcacaataattagtctacgacaatttatttgcaaacaaatgggatcttatcaacttgttccgacctagaatgataagcttatgagcttggtcttacttcaccgttgagaaagaagactttcattgacaagtttaactcatatgtagctccatttttttggagtgtgaagtagtgtcaaatcaaaatactcaacaagcattacctctccctaaaaaggaggtgatttagccgcaccttctagtacggctaccttgttatgactttactccagtcactagctctgccttcggcatccccctccttatgattaaggtaatgaatttaggtggggctagctcccacagtgtgacgggcggtttatacaaggctcgggaacgaattcaccgccatatggcttaacagcgattattagcaattttggcttcatgtaggcaagttgcagcctgcgattggaaccgaggacgggtttttggagttacctcaccctttcaggatcgcagccctttgtcccaaccattaaagcacgtgtgtcacccagggcataagaggcatgatgacttgacgtcatctttaccttgcttcggcttatcatcgacagtctgcttaaggttccaaactcaatagtggcaactaaacatgagggttgcgcttgttgcgggacttaacccaacaccttatggcacgagtcaacgacagccatgcaccacctgtgtccgagttcccgaaggcacctttctctttcaagaggattcgcaccccttctcccaaagtaacaggctattttgcctatttccttagagagagttgtcttccacccctaggtattctctacctacttacctgtttcattttcgggtgaaggtacctttttgttaaaggtcgttcgagcttttcctacagcatgtcaagccttggtaaggttctttgctttgcattgaattaaaccacatgctccaccgcttgtgcaggcctctgtcaattcctttgagtttcattcttgcgaacgtactccccaggcgggatacttaaggtgggatgcttaatgcgttaactacaacactacatcggtcgatatgcacaacacctagtatctatcgtttacggctaaggctactagggtatctaatcccattcgcttccttagcttttgtttctcagtgttagtgttggcccagcggagtgctttcgctgttggtattctttccgatctctatgcatttcatggctccatcaaaaattccctctgctcctactatatcccagcttggcagtttccaccgcctgtctgggtttgagctttgagaaatcaagacggacttaaaaagccaccgatagacgctttacgaccaatcatttcagataacgctcgcatcttctgtattacaccgcagatgctgctacagagttagccgatgtatatacatatatattaaattatttgtgccctcaccatatccgtgcctcactttcttagaaattattgtcccgtacccatattcatatctgtgtctgtatccatgcttcatagggtgaaaggatagaagaaacaatgaagagagcatgggaaggtatgatttggttttcaagttgatgtatggtgtttaatggtcagcctctttttgcttttggtaaaggtgcaaaggctaccttctatccaatgatacggacaatggctttgagaggacttattgtgggttattggcatgagcacaaaaaatcatattgaagtagatatttatggttgttgaagttatttgataacttcaccttgactgagtaatggtggaaggtgtggttatttggacagaagaagttagaatgtgagagagaaacaaagagacgagcaagagagagaagaaataagaatatattcattattcacaaccgattgtttgctacagatacaagaatgcatgtgtaccatcagttcagtattgctgatctgttacaactagtaacaattctgttacagatctcatttagctagctaattcataaacttcctttcctcatcggtccatttgtcatttgcaacaactgttatttcttgataaattgagacttgatcttatgctgcaattcttcttaacatctcttgagcttagaactacttcactgcttgatttacctcctttgatcattattaatgtaacatttgccaaaggaatgatgtggagaaggaaaacataaagaaaaacaaagaatcaagagatttagaattttggtataaaattgacaatctcaatacctaaaatgtatttttgtaatttctagctttgctgaaacaatagttaaaatgttattttaagtctgatttaggagctttagttggtttaatatttcctagttagtattagtttgtaattttcttagtttaggattcctaatccaggtagtgttaggattaggttagtttataaatatctaggcttataataattgttattcagttttcaaattcaatcaacaaagctttcctatgaattgctgctctagaattgtttgtgtccattctctttaggtgactcctaaaccttccaagtgttgactcttaaaagttttcttatcttttctttcctattcctctattttagatctgaaaatctctgtcaaatctgacttttaattttaaaacctttattttccacgaaaacaaacatagaacagaaatctgtcctacatcaaggagtgaatctgcatgttaaagaaatagccaagcagcagattttaagtcttttcttagtttatctggtgcacaatgatctcaaacacaattatttaataaaaaatgaaaattcctgtatgattctattatatgttacatccagttagaggttataggacctaatttctcatgcttcaaagaatgaagaagaggtttctgttttgagatgtgctcttcagataattgatggctgaaatgaagcttaataaatgaaattttaggctgcttttactgctcctgttcagtctcgattgcttttatctgaatttgttgggtcatacttttcaaagatctttgccggattcttagtctcttcttttatcatgcaaccaaagcacagacagtgtaggaagtagcatactgcaacaccaagaaaaggtggtttaatggctggcatcaagcaattatttctactaaaccatttatgcgcggttgtttgcggatgtgatctgttctcttaactaattgagtttttcctccagagttttgggatgcaattctgtatcacatatgcacaattaactctgctatttgagtttgttatgtaagttttcctggttcaggaagttaatactcattaattttctaccaaacattttcactattattctaactctccttttcttgtttagcaaatgggatttggaaattgacctgtaatctctgcttttaattaaaaaaacttcgtattgtgtttcctttagactccggtattcaactagtcattgaactagttaaggatgtcatcatgagttctgcatttactttaacccttcatcaaggaacttggatcattaatggttatcactttgcaagtaggttcgttttcttgtgcttccaaacctcaagcctta

SEQ ID NO: 6283 - DNA, 1119 bp, Ricinus communis
  Intron number 24 from transcript 30226.m002051 (locus 3022 6.t000075) derived from phytozome v7.0 (chr-ID 30226; pos 2672204 to 2673322)
tgtaagtcaaagagatcattcgaactttttatgggcttttcattttctatgggatataagaatattttatccccctttctgtcctctgaatgtgaaacaactcagtaaaggataagttcattatgcaattcaactaattacttctagaggattaaggaaaagaaaaagttatcttttaaaggtgcacaattagacatctttgcaaacaaaacacagaacatttctatagttgctctaaaaccttgtaaggaagaatgttgagtaaaagtgtagggttttgttagactgggatttagagttcatagctaatctacaaaataggaattgaatttagaactttagtgtgctgacaatctttagttggaatcaatttagagaactgcaatacagcagtcgttaatgaaatcctgacgatctttagttgccattctccgggagatatgctttggaagaaagtgtttaggtcttcttcttctttcttttctaatattatggttctctgctgttaactttatgatggagatctaataatcagcatcttcaatttggttgctgaagtaacacagaatcctgatccctaaacatcctcataataagcgaatgtgatgctgtataactaactacaaattacagcaacaaagtactacttcctctgctgtcctaaaattccagttgtctactctttcagttagttccatttacaaagatatttgatagttccttttacgaagatatttgagtaatgctttgtaaacctgattgattcctgaactctaatcctatctctaggtcaacgacaaacccaaaatccccaaatataccacaccctgaatccctaacactccacagagacacataagtagacgatagagcagtcttatgttgcatatgcatgatcagtaatgacttcagtttcctatagtcattgctacaatagtgcaacctcaagacttcatatataattcagcaggattgaattaagctatttacgtacaatttcaatttgcaattcaaacaaagctagaagctcaacctcaacaattaattttgctaagagatttggaatttaatgtgtgatttccagcctcaagcataagataaaagacctggaatcggaga

SEQ ID NO: 6284 - DNA, 381 bp, Ricinus communis
  Intron number 4 from transcript 30190.m011044 (locus 30190 .t000280) derived from phytozome v7.0 (chr-ID 30190; pos 1 454393 to 1454773)
cccttgtaagtttattaaggttcatcattcttttctatttgtagttgtagttcatttattttgtagaatgcgtgtcagggattggatcttcaacctattctgtcattttgattaaccttttattttgcttgtaacaaaatgctgttactttattgggtgattatactgatcctcaaattgtggttttttgaacctctataagccatgtactgaaagggttgtcaatcatttgtctaggtgctatagaattttctttctgtggatttaggtttcttatgaagtacattaggttttaaaatttgttttatacttgtgcaaaatcttacttgcttttttttgttggcagtaccgagagcgtgttatcttcattggacaaaatat

SEQ ID NO: 6285 - DNA, 2030 bp, Ricinus communis
  Intron number 7 from transcript 30170.m014080 (locus 30170 .t000492) derived from phytozome v7.0 (chr-ID 30170; pos 2 694282 to 2696311)
gaggtttgtgaaactatatagtgaaattcatcaagactatggagcattcttactttttgtgaaattgaatcggtaagtgcaaataatttgacatggccatgtttgttccttaactattggtatactagtaaaaaatgaagatgagacctcatcttttgtctcacaaattataccctttctctacactccggaaagattgaatttccctacatgtacattattctcttgctatatattcctttaaaaagttccgaacacatgagagatttgacccttgagtttgagttggctagcgaatttaattgttgtatgcatttgtaagtttcggttgaaagctcttattgtttatattactttattatctggtatctgatgtgttgagaatttttcttgtttaattgattacataacccttgaagccattcatagcgaaccataccccatagaataataaacagagaccttaagttctggaatttgggcatgctactgctatggtgccacaagaaatttgagtaaggctcttcaaatactcaagtcaagacaatgatattttcatgtttgcaggagttggctatatggatgtttttttttctccttcctacatgatttttgggctacattgttaagaggcctaaaaattctaaacctagcactcaccctgaccctgtagcatcttaaatttacccctcatcaactcacctgaatgaattggatttgctcaaccttccatgcttgggcatcaggtcctgacatctaagtaatgcctattaaatactatctacaaaagcctaaaacgttaagtagtactatctacaagcaagctcacttgttgatatcagatatgatccattcagcttttattttgctatgttatttgatgcgaatttaatgagcaagaaagggtagaaagtgacaggaaatacgttttagcattactgggacaacgctatgttaaccacttctgttgtcatccatccccaagtcttggataatctgatcatttggaatctcaaatagcaaggctgattgcatttcagtgttgaaatttaagatttaagcagagtccaatggcaaaacttgagatctagcaatttatagcaaactccacttgcagatattgccgttgccttttcctataaaatggtaggaaaaaatggcttgtaggctttctcctccatttcttggtggtattattagcagtcaatcacctttactgtcctttgtgcatgattaaaaattttgggcaataattttaatctattattaattgagtaatgatttgtatgcaagtactatgttcataacaatgcactatataattggataactccttgcttggtcactgtaaaagttcctagtaagcctatcaaatgtttgcaatttcttggaatattagttacaattcagttgcatccacatttgcctgtgatggtttacttgaatatttatagagcattctaggaaattataagtgactacagagcattggtgctttgggatatttatagagcattctaggaaattataggttttcttcgtttcaactgctttctttcattgcaattcggtactctgttccatgcttccgttgggaggttattctactttatttattttgtgaacatgttctattttccagtcatttatgcttttgtattgtcttgaggaaattttactacaacatttggcatgtcacatacacatcttgagtaggcagtatttttattttacttgtttcatatttatcaaagttgctgcatttttcttttcctacaccttggcttgtgcagcagaactttccattaaatatcatgtacacctataacattgtaaatgactttcaatttgctggacatgttaactcaaatttattattatatttttaatcagagcaagtaaatttctgtacttgtgtctccttggattattgtctaaagttttcaactgaagtactaaatttcattttatacagagcaataaataatattgaagatcagtaagcctgatatcaaggcaatatttgagat

SEQ ID NO: 6286 - DNA, 622 bp, Ricinus communis
  Intron number 12 from transcript 29671.m000298 (locus 2967 1.t000007) derived from phytozome v7.0 (chr-ID 29671; pos 170374 to 170995 reverse strand)
atactggagatttacttgtaagatatatgttattttatatatatatatatatatatatatatatatatatatatatatatatgtgcacagttaatttctgattttttttaattttattggcaacttttaaaaatataaaatcaactgcaaatatcatttttactgtataatttttttttaattatgattttttaaattttttcaaatttatattgtagttgtttattaattactttttgattgttttgtcaaaaaaaatgaaaatcaattcaaaccgtaaatttaaaaaaaaaaaagaagccgttttttttttatatttatacagagtgaaaataaaaaataaaaaattataaattttatataaaaataaaaaatagggtttttctattctattttgattttcaagagtctgtttttcttcaaaatcaaaatttagaaatagctaagaacataacttcttttcaatagtcattttttaaatattaaaaagaaaaagagaaaataaagaataaaaataattatattctgcattttaaaaactgtgtcaaccttagttatagtcttcctcagaagtcttgtttattaaagttcccattgcattttttcttattgcagggtctga

SEQ ID NO: 6287 - DNA, 2330 bp, Ricinus communis
  Intron number 5 from transcript 29756.m000486 (locus 29756 .t000001) derived from phytozome v7.0 (chr-ID 29756; pos 6 348 to 8677)
aggacctgttatcctctagtcctcctgaagaggtatgcttaaaatgatttcatttcttctgactgtgcctgttgtagttgtatatgatatgaaactagagaataattatatgattctaagtaatttgtgtgattactcctttagcttgtacttctagtgactggtagtttaatcagcttttgcagttggtgcatatttctttgctgttcacattctgttgtgttacattctgttctctatgcatttggctaccaggaaatagtgggtggatagtgttttaattattttcaattgcattatctcctttaaacttttgtggtacttgcagaatatccagctaatgaattgaatttccagaattttcaattacattggatgtcacttggccccctttttttttttttacattatattgccttttgattttttcgatctttcgttgtcttcatatttcttgtagatacgataacagtcaaaatgcttatagagactatgaggcagccatttgtaagggtaaagagggcctttgccattgaaagaagaccaagggggtattacagtcaatggtatcaataagaaaaccatttaatatgattgatctggcgctttttttaaaaattctttttggccacttccgaaaccttttggactacaggtacacggtctaaagagatggtcatagaaaacatctagaatgatgtttacgattgagatattctttgcccttgaatttataaattatctactctttgttgtactgtgccaatcataatacaccttaaggaatttataaactatattcttgggcaagtaaacctacatgacaatggagagggggatcttaccttgttaccttctaattttcttctgtaccagatagggtattctttgaagtttttctcttgtatatatctttttgcattctttttacttccattcaaagcgctcctttttttttggataatcaaattatgaaggctaaatttttgtttaatactaaggcttttgttaagtcaacttttggcaaaactaacactactgattgcttgaagatagaagacataggaaggtttctcctcttgatgtatatggagttataaggatgtcaagatacattcccatccttttcttcattgattgtttcgtggtccatttagagttgtcaattttgtgtctttgagcagaattagggacgtctctgaccttggagggactttcgcaactcaattttggaggttttgttaagaaagcgaaagaggttatgaaagtaaaaagtatttgtggtgataggagaatttggcttggagagaagcgttgtcttttgatgaccaaaaattgtctgcttagttactgtaaggacaataatattattgaaatatagggttttttgttaggggataatagtgtcttcgtttgatttgatatgactggagagcttttttaaattttttttccaatttctttttggccctcaaaattggtagcaccacaaggaggattaatttttgtttcagtaataaaatttccttattttactaagtctctataagcttcatggataatgtattttggcaactttttctaagaaagtgagacataatcttttgtttcattcaaattagttggaaatctttgtccagtgtttgaagtacatcagaaaaactaattttatttcaaggaagaccttgaaaacatttggatctattttagagttaattagataaaaaaaataaatataagggtatagtatggaggttttttgacagtcagcagtgctagtaacaaactgatgctttgcagcaattgattgtggttgatgaagtagtatgcagttcaatttatacatgttctttcccttcttaaaagttttttgaagtctgaaaaatgattcttctggaatcaggtttgtcatttctttttgtaataaaccggtttacctaaaatcaggataatgctttcaggtgacaaattcctatatgcacacttgttctcaagaaatatatatattttttttgtgtgaaatgaatggagcctagagggacaaaagaaaataaaagaaggtagttaggaacaagtttggttgtgttgttatgtggctatgcatggtctaggaagagctctttgttttttttggatatgttaaatgtaatgacaaagtagtacttatctgtttcttttcatgcttctttgaacttcttggcttctttttgtttctttgtgataatcttgcattataagtgagaaaatgaaagcctagttctcttctttgaatcaactgtaacatttaaggttcttgattctagatttgagttgtttggatgctttatagg

SEQ ID NO: 6288 - DNA, 1247 bp, Ricinus communis
  Intron number 1 from transcript 29647.m002084 (locus 29647 .t000092) derived from phytozome v7.0 (chr-ID 29647; pos 5 70667 to 571913 reverse strand)
tttcttagctacaaacatctcttgacaattatcatgtaagttttctctgtgtttcatttatttatttactttttcgttctttaaatttgttttctttatattctttccatggtatttggattggatgttctgttttctaaattggggttttataaagatggtaattttcctgcttgttggctctgagttgatctgggttactttgcttaattgttaaagttcgtcttcttatgctcaattccttatgggtcagctttatttaactgcccaatttagcgtattcagttaaatattgttacttttgcgctaaattatagttaaattcccaaatcttgggaaaaactgaattgggattctatgagatttttgcttcttcgtataaataagttaaaggagcagtcgctaaatctgcgtttaatccatatctacaatcaagatttggatttgtaagttggatctaattctttgccagcagaacactatgcctcaaattttgcctctcaattgaaagatttagtgaatgggagacggatagttcttcatgtaagttgcattgaatcaattgtctagaattcttttatgacttcttagattctgataaaagtatctagctgtagttactagagagaaagggttcaaagtaactgttattgatgcctcaactacagagcttcattcgaattttatccaagatttgaactctagtagttgtgtgatttatctcatggtactttgtgtaaatggtgctgccctttcttttataatttcacaggatttgttgataatctaataaattgcattaaatcttctttacttctcattgtatacttgctatgtatctaatcggaagacaactggctgactttgattattacctttacttcccgaaaactttattagaatccttttattttctctttattatattcttgatcacatgattgatggaggtcctataatttcctttcttctttcagagttactgttaaatgattattttccttaatccaacctcactataatatatttatctcaaaccaattcttattacccttattgtgtaggctttaagattgttgcactgattattaaaatggcctgaatacattttgcaacaaactatcatcacgtctgaattttcttgtcagtccctcccttgtgttctccttgatgtgaatgtatttggtttgttctaaaataatgatggtgagcttatagctgttaatttaatgcagtgcagttcagat

SEQ ID NO: 6289 - DNA, 1376 bp, Ricinus communis
  Intron number 1 from transcript 29656.m000490 (locus 29656 .t000023) derived from phytozome v7.0 (chr-ID 29656; pos 1 29107 to 130482 reverse strand)
tctccctttcctttccctcttctggtaaaagtctcttctttttggtattaacacttctcatttctttcttgcttcaaagctgttgacaacttcttttggttttggtgaatgtaaggatattttgaatcggatttgtttgtaatgttgattgggaaatacccttttgagattgtctcaatatttgtgttatgcgttacatcttttctgacatttcggttagtcaagcatgcatatgtgaagaatgattctttgacattaattttgaattaggtttgttttggaatgtcgactgaagatactctattgagattctgttcttttcatgattatgttttgtatattttgcttatattgtgttctaaacatggaaaatcctttttctttttgtgtgttgtttctctttgggaattgttgaaatattgattaaataattccctcttgagttctttgatgtcttgaaacttttaaggttaagtgaagttgtctttcattttctgcaaggttattgctttgcttgtgggtggactggatttgtatttaactattggagctaagttttgcatggtacatgatcataagaaaactaataattcttggtctcatcttttgtttactgcatttcttattgtactttgaccagttttgttccattgttagtgggaggtaaatttatgaaaaggtagattcttagattggttgttgctgagttttgtgaaattaatgatctaaccattaagatttttaatcagcgggaattggttaggagggacagctcttttaatgatttaacgtcataacttataactattgattttttcctcgagtgattaaaattataggtgttattatggttcttattattttagaggaacaggatatctctaataatgatctaacatcataccagcatcttttatcttttttctatccatatgtaataatatctgtaatctcacttcctaaatactaatacactctgaaaaactttttttagtttgaattggaaattgcaattgtcatgctcatcccttcattcttgctagtgtcagagtgattcttgtgctaaatttcatcaaacatgttcaactgtctttcaaattagaaaattatggctctcctattatagtgattgatcacatttggatttaacatatttattaagaatctttagtagttttacgtctaattccgtaacttttgtacttatggaagtagtaaaatctggaattcattatatctaactttgatggatttttcaattgttcctatcacaacaacaatgtatcctccccccttttgacctcttcattcaaattgatgtcattccaaatattttgagtggatttttggtggattattgtttttttacataggga

SEQ ID NO: 6290 - DNA, 879 bp, Ricinus communis
  Intron number 7 from transcript 29822.m003351 (locus 29822 .t000026) derived from phytozome v7.0 (chr-ID 29822; pos 1 43545 to 144423 reverse strand)
ttcgagaggtttgttactgatcacaagttggattgttttgttatcttttgcttgttataaccatggaaaattgctttgttgcatactatagagacacttgaaattgatatgttaactatatttctttcataaggatgtttaattcaagcagctatctgaatgcgttaatgtatgaattgctgagtgaacttagttgtctgtattgtcgatcatgttacagtaaaatgctgggttatcttctggtactgtttctctggacttgaattcccataaactggggaatatatgtgatgtctagttgagagattcttattttttaaataatttttgtgtgcgcatggattctgtgctatagattttggtatctgctctcatgcatttcctttgaatctgaccaaggtataaataggcttattagtcaaggaatttatctgattgcagaaatttagtagattctgaggttctgttagtaagtcggtggttaatgcgaatagtttgtttccttgtttgttaaaagtggtagggctttaaaattctaactgacttaaagctatattttggcaaagctttccgtatgattgacttttataattattttacatctatcagaattacttaagtttgtatggatgtttcttatctgtgtaaagatacctatagaggtttgctcgctccatgaaattctgaaacacttttgaggttttatattctttttttcctgatcattttgtgaattgatcatctacaatgctaagttttgcttttggatattattcattctttgtcaaccggaattaatggtttcatattttagtactatttgttgaattcttaagatctgtaaaatgtactactgagtttttcttttatcttacagtt

SEQ ID NO: 6291 - DNA, 2743 bp, Ricinus communis
  Intron number 3 from transcript 29727.m000473 (locus 29727 .t000012) derived from phytozome v7.0 (chr-ID 29727; pos 1 11449 to 114191)
ttcatagtagagaacgcttgtgtgataattgtcatgttgcattaatgaatccaactggaaagatgtaagctactaccctttctcaaaccttcactatattaatcataaggtaaagaccattactaaatttgacagctcttttgttcagggggctggcgatcagctatctggtgctttaggtgcgcagctatttctcctccttttttttttaaaaaaaatattttagatttctttataagcattagttatacagtttatgttacttttatgtggatgctagaaaggtataatatagagatcttccatttaagataaaatcgctacataacggattagattttatcattatagggtagtgggtacattttatataaggaaaggaattaaggtattatacacaagtcttggtatatactctgttatgatatcatttcaactgagaaagaaattgaattaactggatatgtccaagtttacaactagtgtaaaagtaaaccacaatatgctagatccgttagcaattaaacatacttcatttcgttttctttaatggattttctcttatttataaatgaaagcagtttaattcaattctgcctatatggttatgaatccttctggtgggcttgtttaattcagaaaatgtgtcaaaactgactgcataccatgtgcctgttttcagaatgcaacaatttattataaagttatatggttaattgatgtctaaaagcctcctaagtgataaaggacccaaaatgcacgcggtataagattagatacatgaaatacaaacacaggaaaatccttatatctaaattcatatgaagtttacctatttattttctttgatccttgttgatgcttttccttatcgtatttatgcaaaagagaaatacaactttaaactaaacatccttttgcatccgtatgacaccttgttgatggtcaaatacattcttagtttaataattgaagcatctcatgaataatctcctttaagtgatgttgattgagccaaatttagatgaggagggaggactgatataggatagatgatgatttttaaatgtattaatggtgaatgtttattaacgaattgtctggttctattttgttactatttgtaaagggtactgagaatgcttgttatgttgattgaaccaaatttagatgaggagggaggattgacataggaatagatgatgattttgaaatgtacttatggtgaatgctgaataataaattggctggtgctattctgttactatctgtaaagggtactgagaatgcttgttatatactaaattcatttaaaaagttggagcactgcattatggtactatattacaatcgttgacagagaagatctcctagttaattgatggctcagataaggataaaacaccatgagagagcacaagttagctatctgatgataaatatttgtttaaaggttgactgtggtgaaacttggctgaatggaaaggaggatcttccttgatggtttttgtttcaagttttaagataatttataaatgaaatgctaatggtggagtaatgtgaagagggatgccttttgaagtgaaagaagcatgtatttcattgggcaaagccaaggctcttggatctgtttcttggaggggtttgctggaaagggcttggttagaagatacggatagtgccatggtagtatgcctaatgcttgctcatgtacccttttactagctaacctgcttatggatttaactaatgtcagacagggtatgagtctgcgagcattgcgattcttgggatttgtatgaccattgaacatggttatatgttgattacctaactagttttattctgttacttgagtactacatttgatatgtttgttgcctcgaaaagtagaaacattgagagtaattgacacaaaagaaaatccaatgttctggattgatttagaacagatttaggttatcttcttaggctttcctttgtctgcatcgtagatttactggttgaaggaaatgatgaaatcattattcccatctttctgagaaagtttcatgaaacttattctccttatgctaataaatatctggaatttcataaaacattatcaactagaattatttttgtgatcctaatgaagtacatatcattcatatactgactcaggatttggataacttgctgcaggtggggatggaatgggaacagtggcaggaactgatgcaacaaagtaaacttctttctctaattttgtgggaagagggttggggaggggacatgggactccaccatatccattttgaacattatatttgactagttttaaaaaatttaaatgtgtgagttgttgatatcatcatctgctgagacttttgaattttaaggcacactacgacattgacgtttattcctgcttagtttcatgtaaaacggtataaagaataatcagagtttgcaacatgagatttactaattgaacgaattatcagattgtggaattgtatatcgtatggatttgttattgtagatatttcgtggaattgttaatgatgttgatgtggcgttaagtagtgcatatgttcacaaaagtaaccactatcttgctgcatgatacagccaaattaacatgcttgaatgggtttttgcgataccctaattgcttttgtaatatatatatatatataaaattgtttatttaattacttatttattttgctttgcaggaaggagcttctgcgggcaattg

SEQ ID NO: 6292 - DNA, 3228 bp, Ricinus communis
  Intron number 10 from transcript 29815.m000491 (locus 2981 5.t000003) derived from phytozome v7.0 (chr-ID 29815; pos 24954 to 28181)
caagtgaattcaatcaggtaactctttctaacttgcatttagccagctattttctgtcaatggcatatcactctcaggtagggtattctatttgttgatttgagctcacatgcctaggtcatcctttgttttgcaatgtgtttggtagtttaaaacgatgatgtgaagttcagaagttaacttggttaagtcttatatcatgtaccaagctcatggacagtattggaatgcagcttagtacggattgaattcaatgaaacagtacaagttcatagaatagaatggaattaaaaaagaagagagaaattggagaggtagaaggaagaagaagagttgaaagagagagagaatagtagaaagaaatagatatttgtaatgataattgattgattgtttcatacattccagcaccattaataacaaatgattggaagcatcttatccaaatcattttagacagtggcaaacaaaataacaactaatttgctaactaactcactaaaagacaacgacagctaataaggcaaattaacaatagacaaataacaactttccttgctgaattctcttctattctttggccatttctgttattcccattgaaccttcctgctgtgacactataaaccatgcttgagatgtaggattgcagcctgagcttgcttggatcatgacatcttaaaactcataaaggactgggagggataagtctacatgcttctctatgttggtcttctattatttctacgaagtattccaaggagttaacaagaataagcttgatatgttaatatgcatctactgagtcaatggctttatatgcactaaaaataaactatactagatctcttatatatggttcatggtggcttgaaatggtgatgtgaagtttagaagttaccttggttaagtcttaaactcatttaaattgggagggataaatctttatgtttctctatgttggtcttctattatttctatccagaaaagtatgattacgagtttacaagaataagcttgattctgttagaaatatgcatctatcgagtcaatggttcaatctggactaaaaacaaaaaatgttagatcttattatcttaatttattcctggttgtatgatttatatgtttttagtggttactgcatgaaattgcaagaaattcaataaagatataacctaaaactgcaaaaagttctgttacctcttttagccaaggatcttgtcactggaaaatttaccaagaaatctgattctaagggctgcctcttccttttactatgactctttccttaatctatggtgaattattttcaaactcgttaaagggagtttgataccttggacctcgttagagagagctccaatctcaataattgtggttaaaatttggcttagccttttattcaatttaaaagtcctttaaataggactagtcttcttatcaacttaggaacctataatttagatgcatgtaagggaactcccaaataagagataaataacgaaaataacaagacaaagcttctaattctaactacttgatacatctttgataagaacaacccacaaaggagttcataacaaattcaaaccctaaacgtattacttcccagctatagtcactaccatgcccccttttagaaaacctcatcttgaaatcggatgcccttgcacgactagtagcagtcactgccttcctatcatctttttgaaattcaacatccagtacttcaaactttctactcctacctcgaacgagcaagagatcttaagtaaggaatctttgaagaagtcaagcaggaataaatgacctacccctagctctcaatagcctctatactaaacttttagtctagattctttctttgaacctttaacacttcctcaaagttgtctttaaacaataagtccatactaccaatattggacaataaagattgtcaaaatttacacttctaatcattgaagctcatctccaatattaagttacagctacaatgaagttgttaaagccctgctgtggatgtgtttgcaaaagtgcttttcaaaatttttgttaagttttgaaaattgtttttcaaaagaagaaaacgaataaatgcttttctaaagcaagtttgataaaaaaagaaaaatctaaattaagagaaattttgaacctgcttttttaacacctaaatgtgattccaaatagtccctaagcccacccaagcttttaagaaaaagaatgacccaacagtaatgtactcagtagcccactgctaatgacagactcgcaattgattgtctcgtaaatatcttccgctaacttattatgtttttgtcgaatgcactataaacatggttcctgttaacgactacatttatttatcgtatcttaataaattgggatttctggtttgagaggtcctctatggtgggacccacacgtgatacaccagatctattgtttgatagctttgtagtacgactgacatgcgtggactgatagtttcactgtagcatcagttaagtactggaaagtacttaggtgattaacagtataaattgccacaacacaacctctattttcttttatgttgactgtatgagttgtttaggtatcattgcaaaagagtaaaacattgaaggtaaatatagggacttattcaaaccaatcctggttccaaaataaaccaaacctgaattaaattatgctatgtgcatgttaatcttcatagtctcacagattgaacaccatctacagctaataagcagaatattttcttgttatgaacaaaaaaagtgtatatgaaagaaagaaacaaatttaactatgtttaggcttgcaagagtccgaccatgtaaaccatgagaaaattactataacatgagttgtgtggagacactataaaagttacaagtttgctgaaaattttatgctataagagaccgttgtgtagttcaaaagtatataaagaaaaaaattttatcaataggggagtttggatggtggattagagattactgtaaattaaattcttgaagttttagacatggccttcaatcttcattcttcatgtaaatgtcatactttctacatagttacagttgtgcatccaacatggttgctactttattttatcttccagagctttatctgtcatttttcatgggttcatttgttggttgaatgctaatccaggtttctttactcagctactttcaggtggtgactttgacattg

SEQ ID NO: 6293 - DNA, 1404 bp, Ricinus communis
  Intron number 1 from transcript 29816.m000693 (locus 29816 .t000030) derived from phytozome v7.0 (chr-ID 29816; pos 3 38392 to 339795)
tcatcactgttgtctgtatgtcagtcacagcgtttctatctttttcttatatagatttatataaatggtcgtacgcaatgcactagttaaaaaaaaaaaatctttatatgcaaaacaagattactgatctacatcaaacgagaacaggagtcttgcacaacatagaatgatgtagttggaatttttatttagtgggtgtaaaatatctcctaaatggaagtctttttaacagaatgaaaaataatacccatgaaaccgcacaattgctaagtaatgtgtcatgagaaacctagagagccataagttgtttagtgaggtgcatgttttctcaactaattaaatgtgctgtagcaaaactaattgaatgtggttcatcatttctaatgaatggactttttggagaaaatcagatatagtcatatggggtttagagctatggggtacactggactagaaaagagtatgcatcaaattttaacaaaagaaagaggaatgagcaaagtggggttagcttggatgatgtagcagttccacaaaatggatggaacatctttgatatctcggtgttagtgtataaaggaatggctcgggacatatgaaagacaaaaggttgctacaagggtcttatacaattgtaaaattgtagctcagttatagagcacttttgtaggatgataattttgcttgctatatttcatggcagcgattgttaggtaatgagaaaattgtacttatcaatcaattatgttagatgaggataatgcattcccagaaacatgaaaataggctaaacaaaacatgcttgcattgtaggaagataggagtggcgcccaccgactataagttgagagaggagtgattaagctagcttgggcatatgcatcataaactaacaagtgattaatgcagaaggagtggtgaaaaaggttttaggaattctgaattttaatagatgtaggtagacagtggtatgtaagaaaatgattcaattaaccaactccaactaggttggatgattgcaattgagttgagtttatgctttaccttttatagaatcaggtgaaagattatccgagttagaaatttaaaataggtttccgtttaactttgcatttacaatgcttacaaaagtatgcctgtcccagccgaatttattgggctggaaagttttgtgaatgttaatcatagtagacacagatttggttcctttaggatttgtagcttgtcaagttggatattctcctcatttaaactttataattctgctgcgatttgtgtattagactatattttgttacaacgtgtttgttaattttttcagtatcatattttgatcacaatgctaaccttgttttactttatactgtagctagcaacattccagttgtcaaagaagttgaagca

SEQ ID NO: 6294 - DNA, 6900 bp, Ricinus communis
  Intron number 10 from transcript 30063.m001445 (locus 3006 3.t000049) derived from phytozome v7.0 (chr-ID 30063; pos 641573 to 648472)
attgtagtagttcacacaggagcttgaggtaaatttcatcacatatttctcatcacattcatggtgttttctgtctgtagttgctaagttttgtgttgtagttattttctttccttatggcattgtgtcgcaagcccacccaaagctacgttttactgaatgagtagcattattcttctttcctttgttgctaagttttgtgctatagtgtttcccccctcccccccagaagtcctgctgacttttggcaacagatttgtccttcaggctggaatttattcttggccttgtcagttgttctggttggatggccacggcatttctaatctgagagacctgcatcctaatgtttactgctgattggctttgctagagcctctatgaactgttctgccttaaacacatttatgatgataatgagataaaacctatattgtcatggttaatgcccttaaaatagcaatgggaatgagaaacaaattcctttatagaaaaggcttccctgaattttgagtttggagaaataggtactctttttggataattgagaagttatttctaatcaaagaagttgtgagacggtatggctgaagtttaaactaaaattgggttatttagcaaactgctaaattgctttaagagattataacaatgttacttcggtggttattgataatcacaatgcccagtttctggaagtcgtacttccggaatagctatttatgatactatgcaatttgtgcgatcagatgtacaaacattatgcgcgggattagctgcttcaatggcatcttttatcctagttggaggaaaaattaccaaacgtttagcattccctcatgcttggcgccaatgggtttttatttgaaagaaaaaagaaaactatgccttcgccatatgaaatgttgaaatatgaatattaagtaatactagcatggcagttcgaatgcccaattgcaaacctaatggagctcaaatctctctctctagctgattacaaagttagtggcaattgagtgacagctaggttgtgtagagaatttcataatgaacagaaaaagttataattgtattatatttctgttagggaaacaagccctaatatgtacaaatgtatctagatctttacaaggaatcaactcctaaataataggaagaataaactagcctaggaaataaataaaacagaatagaaaaaaatatacaaaataataatataatttcctagctattaaagaaggaaagatatcatttagattctgagaatatttaacagtccccctcaagttggtgaataaatgtccctgcattccaacttgctagttaattctcggaatttccaagtagacaaacccttagtcaacatatctgcaatttgttcttctgatcgaatgtaggggatactataagaccagctttaagcttttcctttataaagtgtttgtctatttccacatgcttgcttctatcatgctgaaccgggttatgtgccatgttgattgtagattgattatcacagcacaacttcctagttccatcccttttaatctatagtagttcacatattccaagtgccatggccgtaaattcagctttggcacttgatcttgacaccacatcttgttttttacttctctaagtcacaagattatttccaaggaatgtgcaataacctgtagttgatcttctattagtcaatgaccctccgtaatctgcatctgtataggctttgaccattagctcattatttttctgaaacagaattccatttccaggtgtagacttcaagtagtgaataattccttgaacagcttgcatatgctcttccccttaatcatgcataaatttactgactacactaactgcataggtgatatcaggacttgtatgagacaaataaattaatctttccattaacctttggtatctacctttctcaactgagtcctcctctttctttcaagtggtggtctcactcaataggtgtatcaattggttttatttccaagacaaccggttcctttaagtaaatctagaacatattttctttgggaaagaaatatccattcttttgagtaagctacctcgatacccaagagatactttaatcttccaagatctttgatttcaaattcttgagccaactcttcttttagctttgctctgtcaaccaagttatatctagtgacaattatgtcatccacacatacaaagagagccatacttatccttgggctgattgcttgataaaaagagtatggtctcctctactttgtccataattcattctttgcatagcctttgtaaaccttttaaaccaagcacatggtgattattttaggtcatagagagccttttaagacgacaaaccttgttttcaatgcgactccataaatacctcttccaattttccatgcagaaatgcacttttaacatcaaatcaggagactaactaaaatgtgctgccaatgctgatagagttttgactgtgttcatcttggccacaggtgcaaaagtctccaagttgtttatcccatatttttgagtataccttttgacaactaatcttgccttgtacctctcaagtgacccatcagccctatatttcaaagtaaacacccacttgcaaccaaccagctttactccttttagtttatcaacaatgtcccatgttttatttttgtccaaggcactcatttcctctttcatggcttgagtccaattcttgtcattcaatgcatcttgtacagttctcggaatttctattgagttgatagatatgagaaaggctttgtgtctaggtgaaggtttgtgataagagaaagtgagaaataggatgttatgtacaactcctagttccttttctatgagctataggcaagtccaagtcatcacaagtattagaagaaaaaataggaaaattacctcggtcgtcggaactggttctcatgattgggtttgctttgcggttgattcaaccttttccttccttgagtaagttaaaggcggttccttccatttttttgtgtttagctcaattggtcttctttgttctttaatggcaacaatcagttctatagagggttaggattcagtatttgaagaaattgatgttatggatgctaatggtggatcagtgcttgtttgacttgatggaaaaaagagctagacatggatggtgactcaagaagaagaatagagttgaaagaccctaagcgatctctaccatcgacattctcactctccacctgatgatgagagttaggtactgaaaaataaggaattgattcacaaaatgtaacatgcatggagataggatttcttagaaggtggatgataacatttgcagcaaaggcaacacgtccaaatacttttggagtaggaaatccatgagacagaaattgaggaaaaaatttagagagaatatggatgggactcttattgtgaagagaacgagaaggaaccttactgataagaaatgtagcagtaagcactacttcagcccaaaaacatctaggtacattcatttgaaaaagaagagatcgagtgacattgagaagatgtcgatttttacactcggcaattccattttgttgtggggtatggacacatgaagactcgtgaaactattgctttgtcaaaaaaagagttaaaagagtttcattaaaatttgctttggcattatcagatcttattcttttgaatgaaacactaaacggagtgtgaagtaattgatgaaacgaaggaatagtggaacaaacttcagatttgtctttcataagataaagccaagtaactttagtataatcatctatgaaagagatgagccaacaagccccattagcatttggaatgttggaagggccccaaacttcagtatggatcaaagaaaatggttgaaaataacttttgttaacaactggaaatggcactggatggtgcttagcaagttcacaaacttcacaatggaaatactaacttcaacgtttcgaaacaaagatggaaacatatttttgagtaaagaaaaagggggaggggggtagaagaacaattaaaaacctgctgacattctttttgtttagggatttagtaatttgatggatagagataaggctggatgtgggattaggtacatgaagagcattttttaaagatacaaaagatggcaaagtgatattttatcctcactagcaactagcaagtgtttttcgtcagcaacagaaattgatttctgattaagacaaggtttatacgtataaagaaatactagagctagaggtctggtgatcagttgcacctgaatcaactatccaagagtctgagatacctgtattattttcattaaaacaagcagtgatcatacctttacttgattgagccaatgagcacgagctggacgataaggtctccaagaaactctttagttttttagtctcctcatcattgaatcctttgaataatcctttgtcttcattagaggattcttgtggatttgcctcttgttttatcaaatttgattgatctctttgatttttaattctgctccatacttgttcttttccatgcaacttgaagcaggtatctcttatgtggagcagttttttacaatgagtgtactagagatcatcacgagaggatcctttggttggttcccccttatttctcaatcctctgtctgccatgtccatcattgcctctaactactgctatagcagaaccaacagctgaggaatgagcatctagcgtcaccaatcactggttctcttcccctcgaacagtggaaaaagtttcatttagcgtagcaatttgtccttaccaagaatttggatcctaacctgatcaaattcagcatttaggcccaccaaaaaatcagacactcggttcctttctctatcttggagtagtatttgggtatcgtcagccgaactcagtttcaaattctgatacaaatccatctcctgccacagactagttatcacattttaatattctgtgattgaaagattaccttgtttggtattaacaatcttagtccagatctcatacatcattgaagcatcttgatccttggaataggtaccgtgcacagtctcccacacttagcagattgaagaaacataaaattgcagtgtcttccatatcccatgctttgaatttgggatcttcagtgcttggtccttctccaacaatgtgattgagtttatccttccctttgagagcaagtttcacaattctggcccattgcaagtaattcttgccatctaaacgaaaccttaaattctgacgtctttagaagaggggttgtttgctgattcaagcaacgtagtttgcggggcagcatgagttgattttgtttcagagatgtcagacatctttgagcaatagtggggatgaaggccaaaaaactagcaacacaataagacaagggcgataaaggccaagatgtgtctgcataaagaaaccctaggtgggctttgataccataaacagaaaaagttctaattgtattatatttctgtaagggagaaaaaccctaatatatacaagtgtatctagatccttacaaggaatcaacttctaagtaataggaagaataaactagccaaggaaaaaaaaatagaatagtaaaagttatacaaaataatatcatattttcctagctattaaagaaggaaagatatcttttaaattttgagtatatctaatacataataagtacacagtagttacttggctaatccattgtatatgtgaataacttgcagaatgtttacttttcttatggtaaaagaagacaacattaggttttctgtggggaatacctagagggaggcatgaaatgaagttcacgggaaattgatgtttttatttagacttgggaaaaggcattgggtacatattcatgtattaggcatgtagaaaattgtgcactttttcctacatttgaaggatcatacccaagtacctgttcctgttttaggtatccattatttgacatggatgtgttgagatgaaaagttggagcaacataacttgtagtgattgaaaaagaaagtaatgttatgtgataataaaattttaaatgaaatgggttattgaattaagacaatatccttgcctaataatttcctaccattttatttttcacacaatttttttataaaaagaagcaatgattgaaatggggccattcattaagtttgcttcactataatgaacaagtttcacattcgtatatatgaaaacagtagctgtggttccataaagtagcacatttaataagaagcttataaaatcttgaagggaattatgtcataacaataagatctgtgcaccattttttcttcttgctgtgagttagatggtacaaacaagtctttcatgtgaggcttgacttcttgttccacagttaacaagcctcaagaggagcaccgaaaggccattgaagtgtttcatcactggcattgccatggaattactatcacttgggagaattgcctctttgttataatcctctattcttttctctcagcctttcctgcattttcttgttttgtgcaaaatatattctttggaatattgctatattcaacatcaataaaaagtcaatgaaaatgttgtgttttcactctactgatcgaggctttatgccttttttttttttaattattttccttccactaaacaagtaatactgatccataaccagaggttgttatttgtagtgttttatctcactctactgcttcgtgtgttctcgtgtctttatccatatgacttgcatttttttatgtgctaactttaagatattttgtcatactatttattgggagcatataatcatttttttcatgtctgccatttgtaattcttatgatggtgcttgtgatttttataggg

SEQ ID NO: 6295 - DNA, 1494 bp, Ricinus communis
  Intron number 1 from transcript 29815.m000504 (locus 29815 .t000016) derived from phytozome v7.0 (chr-ID 29815; pos 1 21353 to 122846)
gctgcttctggaactggagttgggcaatccaagaggtaagttgtttttaagtaaaataatgcagatgccctattttatatgttatgcttaagattatccgaatttttaaaatcttaagcataataacttaatagcagtagtatctgagattgtgcgagtcaaggttgtttgcattttgggactctaattttgatttggatcacgggttgagtgtgagttttgttaacgacgggtagtgcatgatcgaacctggagctattttattgaatgaggtgaggaaatgcactagctggtaaggagcaagcttggggtttatatttgtagtgaggttcagtctagtaatcctagtgagttagttctgatgcctataatttcgtcaacttattttcatagactgttataggctgatttagctattcttttagtcagtatgataatgacatggttattttggtgattatgaaatggtgtttaaatagttggtttggctaagctttgatgcccaacagctaaaacaaatatccccttagacatagattcttcttgtaaaggaagaaaggacttggattgctgaacatttactcagtagccaattgcagagtgtcaaatgaatgtttttacgtgcctggtccactttcactctggtcttaactatcatgttttcatatagttttatttatgtatttattttaattccatgaagtcaagtattcactcattatgacctggttgttgcttgtatatttgaagtcaaaagtatatttttgcacttctattcggtttataatatggtcttgagctgtactctcataactggtaatgtgtaatgttcttgtgtaatgttctcatactttcataagagttctactattcatgtggttgaaatacattggttaaaactgaagaagaatagttctcttacttccattaataatctacatacatcatttatacacataggagagacaatgtatagtaggtcaactcccaaagaatcagaaaactatcataggaattaggaaaggaaataataaaaaagatatactagggaatacaagattatacaagatgtccttttagggaattctaacagaaactgcagaaactgaggtactagttaggcatttctgggtgtgatggtcatgtggtgcatagaagataccttgaaaataggatggactcctatctgattccattgttaaagcaactagaattaatgtagattgaaattaaaccaattatgtttcggcattactacattttaatggtagtaaaggtaaatctgactttaagaatgctggggttgtttcttgattgtatcgcaatcagtcaagatgagtgtggaataggttttctgcatcctacatttctcacctttatacatgtttgtgtttgtgatattttgggccttctaatttgtatttagattttggctaaagtccatggtgctgttctattgctacaatatgttctttatacatctttttggcagat

SEQ ID NO: 6296 - DNA, 1284 bp, Ricinus communis
  Intron number 5 from transcript 29992.m001428 (locus 29992 .t000023) derived from phytozome v7.0 (chr-ID 29992; pos 7 16034 to 717317 reverse strand)
ctttgtcccttgaagcacgtgagaaactctccaaggtttgtattatgaataatatctggtagttttaacactcttctgtaatattctctaaactcaactcaactaagtcttaatcctaagttaattttctctttctccatttcaaacaatttacgcagagccactgcatcatcttgtaccaattttctccttgttagtttaggcctgccccttcttcttgtaccaagtgttgtcattagattcatgtttgctagttacactgtgtcaatgcatgcttgtttctgcttttcttttcgactattttatttttcagtattttgctctacaaatttagtttctaatacgtgaagaccatacatgcaaggtaattttacggctcatatacaaatccgtccttttctttttaccttctagctgaccaatacatagatctgcttgacaaggttggaagcatggttttaaataacggtcgataacattacgtgtcacctgttttgtgagaggattgtagtctcccgatacattatttaccgatatgttacagggaattcggaagcaccttgtcctttaacttttcagaatctacttatgtttcctaactcttactgttatttttagcttccagaagagaaagagatgcatcattaaagagccttaggccaatatatttctaaatttactcatttaaatgggaattgttcttgaaaattacaatagcgctgatcgttttagtcgataatgtgattcggttcatatcatgtccgataccgatccagttcacgataccatcatataaaaactatctcagaaggccagtggttgccaaatgaactgctggtagtttttattatgattttttaactaagcttctttcagtacattggatttatgtagcctttctttttcttatttctatgtgggcttgttagatgggcgtttaaagaaactttgatctggttgtagcttttcatcactaccatattgcttctgaggtagtttactgataccgacaatttgtgcgaacatgcagttcttctaaggaccagattcttcaactagtcttaaccatcttaggaagaggatgtgatctatgatggaatacattacttcccgtttttctttttatttcttttgtgtcaaattgaaatccatttttttcagatagtgctctcttttactgttgaataatcatttataattttgaagaattttggtctgactaattgtaattgcgttatcttatattcaggttaggccacaaacaattggtcaagcaagcagaat

SEQ ID NO: 6297 - DNA, 1020 bp, Ricinus communis
  Intron number 4 from transcript 28196.m000208 (locus 28196 .t000008) derived from phytozome v7.0 (chr-ID 28196; pos 9 6038 to 97057)
taggattggtagagcagggtagggggtactttaatttgatgacaagtatacacaaaattgagccaactttaagccactatgcgtgcatgattgacctgtttgggcgtgctggcttgctgcaagaagcatttagtttcattgagaatatgcccattgaaccagatgttatagcttggggttcactgttatcttcttgtaaggtttataaaaatgctgatctggcaaaagttgcagcagagagattgcttcttattgagcctgacaacagtggggcatactctgcgcttgccaatgtctattcagcttgtggaagatgggaagatgctgctaaagttagaaagttaatgaaggatagaggagtaaagaaagagcaaggatttagttgggttcagattcagaacaaagttcatgtctttcgagctgacgatggccttcaccctcagaaagacaaaatctacaaaatgatggacaagatctggaaggagattaaaaagataggttttgttccagatactcaatctgtgttgcatgaccacgaaatagaggtgaaggatcagattcttagatatcacagtgagaaacttgccatggcatttgggctaataagtacaccacaaaacactacattaagaattatgaagaatctcagagtgtgtaatcattgccatacaactatcaagtttatctccaagcttatgggaagagaaataattgtaagagatggtactcgttttcatcatttcaaggatggttcttgttcctgccgggactattggtagttcctcaactcctgccgttccattatgagcccaagctgtacaaaggttggcgaacaggattctcacaaaacagaagtttctgtgtccctctctcttctactactatcaaaagcctgtcagttttatgccctttatatcaatatgctttctttctttctttctctggggaaaaggaacaattataatccgtctctgatgattgttatcttgtgtttttatagctgtaaatgtagaaggggag

SEQ ID NO: 6298 - DNA, 3862 bp, Ricinus communis
  Intron number 2 from transcript 29724.m000865 (locus 29724 .t000045) derived from phytozome v7.0 (chr-ID 29724; pos 6 82134 to 685995)
atctggcaaccacatttgcaaaggtcagatttctttgcttatatatagaattgtgcaggtgaaatactttataagttttccatgtgggttatccccatattttgcacgtttagtaataataagttttttactcatttttgtgaagtgtcctcttttacgaaatttgttgcttatgcaagccaatgtgccgatacaactactctacaaacttgcaataactagaatttagcaagtaatggtggacctctacccaatagtgtagcccaactgtttgactgcatagggcaaacaggccatatcttatattagagactgatggtaataaaattgaccgcaatgggtgtggagcttggttaactggatttgtatttgaccttgcagtgtatgtaagaaaaaaagaaaagaagaagtaatcatttggttagtgttcaattatctcttgacacatcaaatgcatgggaaaaaacaatccagggtataaaaagattactcatgtttaaattttttaattttttggctctgaaattagattatttgatgttatagagaactttgctggttgcataacgatagggaaattaaattgttgtgaaatggtatagggggttagataggagttacaggacgctggagcgagctgtagattttgtttgaactggcctatagacggaattatttgcacatgtgtatctgagatctcaacttttgggttcaaacagttcaaagggcccctagagctccaagtgacttttggggaattaaacaagatcaaacttagctatactcatccaaggaatttctgtagaagtgaacttgtgaaattgaaaacacacacacactctctctctctgtctttgaggcttgtgcttgtgacctcattttgatgaattaatcatattaaaagtgttgcaaccagtaaagaagccgtttacatgctataatttttatagttccaattgcaggctagagcccagggttcttttatttatattggtttataaatatgtgatgaaattcagctatttctattacctgaaggagattcattaatttttgcaagtccggcagttgagagtatgtcagtaatttagtcttcacatagtcttatgaagttctctttggtcttaagtttgttttatggtaatttcccagttagtcatggttaagttgtttgtggtatgatgctttatatgttcccatcacaaaaaggaaatgtaacttttgtaaaatcatgagtgattttttgtttcgtctgtcttataacttatgaaaagtgagtttaggctttggaatgttttctatgggaagcatattttctagcctggtctttctctcatctttaatctaacttcaggtgcagtgatttccctgctgtgattggtctgtttttaatcattttggaattctgctttctgtagttttagtctttgcaataaagttagacaatatgcttttaggtacttctctcctatgatgtataagcaacttactgatctggcactgtggacagcacccatgaacagtaaccaaagagcactatctatgtataataatgatgaatactaccataaataaatagagtttaagcttaacatacaaacacatgcatcatatcaggttctataccttaagggagtattgcatcatgcagttcaagaggcaacagttgcaggaatattttttgtttagtgaaaactgaataataagcattacaaacccttcatataatgtggatcatggttcaacttacattaagtgtttgattttgagttccttttttcttgcctacctcatatagttaatcaatgtaacttcagattgagtattgtaagcatagcatgtttgccaaatgcgctcttcttctgtctagttatgtttattttatctatgcttattctgcttatgattttggcatgtcattttttcattctttggtatccttgctgcccaacaaatagtgctttatcttttgatatcgcaacagtaaaattgccttctaactatatgctctggtttctcaagtattccttgcatcaagatataaagcaatgtaaacaactggaattgaggaggtagaaacaaggatgataagaagttcttgtattagttttaacaaacacttttagttgaatcaatttatgctcaaatatttggtgcttgtttcagtagttgctgaggcattgtcaatttcaaattttttaatagattaatccataatctacatacacccagtttgtgaatcctgaatctgttattttatttttatcttgcataatagtttttctcagccaatcaggattcaaagttttccctttccttttttttttttctggaaatttttgagttgtagtattaaaaaaaaaaatgtaattttgtttttagtaagtctgcaggttaaaaaaataaaaaatagaatgatactgttctattaggctatatataaatagataatgttaactttttggataaatcacttcagattaataatattgctaaatatgggatggttattgttgatacagaagccccatgtttgaggatatatttgatgtaggtgaaaaatttattagccttttgatttttctggatagatacccattagagctaatttcatttgtatcttccctttcatttttttctttccccctttttgttttcttttcttaaattggttatctatcatattagttatctttggggtgatatgaagtggcctgtccttttctcctatacgagtttcttaatttttccttctatgctgcaaagctgaaaaactttcccttgagcccaagggaaatataagagttaggtcattatctcattctctatattgttatctgacatctgattttatatgcaagttgcttgataccatgccaatcaatttttatgatcagtatctgttacagtattcctaatgttttactagtcaatgtcctatctagctttataggtgattcttaggattattaattgtccttaattgtttttcttaatattttgctagttaattttctatttacttattatagataattcttagggcctcgttatataagttttccttaattgtttgtccttaattatggcaagtgggtttaagggttaggggccagcctaccctctcttgtaactatttaaacgctattttcttatggaataaaataagcataaaattcttcagggttgcgaactcctaaagttcagagatcatagggttctctctaatgagcccttaattcaacataggtcaaaaaggtataaattcccagaaaacactctttcccttttttcgaccagataggtcaggaacgcgtcggttggtggctgcttagtctcatccaagagtctaatctctttgtactgttttttttctttgaaaaaaaaaaaaggaagggggtcgatttaggctccttccccatggtgaatcatagacccatctgatcccaaatgcagggccataacagtttcacaagaaattttcaatattattaatattttaattcttaatggattggacagctcttttttgtagatttcaatcaatttttgtatagatatacttttataaaatactaacaacttctgatgctggacatggtgaacatgtatatattaataacatgactgaccaaataaatattttcttggatgtcaatgttgctgttgttctcgctcatgttactgcttctgtgtttttatgcttgacaattctcattgcagatgcccttttcttttctcacttttcaatcttaaaatttttggatgcttgataatgctatcttaattgtttcttttttttttgaaatttatgttctcctgcacagttgaacagagttgttactggaccaagacatccagg

SEQ ID NO: 6299 - DNA, 334 bp, Ricinus communis
  Intron number 3 from transcript 30221.m002235 (locus 30221 .t000025) derived from phytozome v7.0 (chr-ID 30221; pos 9 10555 to 910888)
ggccttcaggtatgtgcttactattctgttgatttgctcatcagtataagtggattgggatatatcttatagtagtctagttctctttgtccttgtaataacataagcaataagatgaggtgatttacttaattatgatttagtaagtatgatcaattgctatattttaatttcagctaacagaccaatactgttatttttttatgctgtgtgacttgaatatagcgctctactaaatctgatttagagcacatatgactagtagattattttctaaatgatgctaaaattaaatgcagattgggaagctattgcagatcgtgcacctagtgaa

SEQ ID NO: 6300 - DNA, 7305 bp, Ricinus communis
  Intron number 10 from transcript 29940.m000403 (locus 2994 0.t000008) derived from phytozome v7.0 (chr-ID 29940; pos 300626 to 307930 reverse strand)
cacaaaggtcgttccctttccttttcctcatctctgtcacatgcactaatgcccatgtacatgcacattaacgttgcatacaaagattgaattataagaaacagccccttccccctctgaaattgtatatggtacaacagacacagaaagtgactctttccttaggctgctaagtatgactataccagtctgtgtagtaaaacaagcacagaagtaacaactcgatattaaccagtattgctgagagccggttcaatgcataggcttactaagggcccaaaaaatagccgcctcaaataattaggagtctcaattttgtgatacaaatatagtatataatctattaattttgtaaattctaattttattaaaattcttaaataattttaacttatagagtaataattagaattactaatctatttggtgaaaattcatgttagttattttacgtatctaagttaaacttttttgatgatgataatttgaaaagattatttaaaattgataagttttctaaaacaagatatgattttttaatattgatggtttatatttacttttaaaattaagaatttgtgaaagaaattttaaattagaaaatataaacgccgattgaaatgttaaattttataaaaaaataatttttttttcaaatatatagataatttatagaataatattaactattttcgtacggtagctttaatggaaaaaagtttctaagattaaaattaataaaatcttatttgtattcaatcatattataaggaagacagtaatttgactatattatcaatagaaaattttattttctaaacttaaatataaaaattaaattgataatttcatatctcaaaagtaaaaaagttaattttaaataatttctataaatacttatattatagagtctcacaaattaaatcttacctagagctacggccataaaaaaactgttgagccagccatggcttcaatggaaatatattggaaaatttacacaaatgcttaaaatattgacattattaatatttattcctcaagttttaaagacttacagaaacacgccccatgtataacaaattacttttatatcaagctccaaacacacattcaagctaaaaggagaaaaagaaaaaaataaatcgcagcatcaaattaagaacaaattgtaagacatcaaatagcagtctcatcaaatacacaacaacaaataaaagacctaaagataagaaatttcttcaagattcattaatttttgaagtttataaaagataacccaatttcaaatatttatctatttgattttgtattactttgaatttcattataacaaaatgattaaaaaatgactatactatatgatttttaaagttacagaagttgaatatcttatttgaaaactcagatctacaaaagactaactaattaaatctattttgcagaaaatctagaaaattagtatatatcaagtatctataggtatatcataagtatataattattttaaaatttagtaaatttgtgtttatattatgtgtttgatatatacaatatagattttttgtatattaactattatatgaatataggtatataaaagaaataaattaattatacattatatagaaaaaattatcatctaagaaatataaaacagttttaaaaatatatagtgaacagtatatacaaaatatacatcgggtatatataggtatgttataagaatatattttgttttaatttagtaataattatatttattttgagtttgtttgatatgtcttataaaatttttgtatattgactattatatgaatataattatacaaaggaatatgtcaattatatattaaaacatttattttctataaggataaaaatataaacatttttaagataaaatagttgacaatatatattaagtatataatgagtttatttcatatatatgatactttggttcttattaaattttttccattcagattttaagtcatttcttatattattctatatatcgatatagacacaatacttattattcttattgaaaagaatgaggtaggtaacttttaatatagcgagcgttttcataccaaaggataaaaacttttcaaacctcatgaaaataatgtcaaatcaaattaaaattaaaatggatagaataagaatggagattcagtatcaattttatttcaaatacacaaagagcatcatcgaattatattataagtatattcagtttaaattcaaataaatttataaatttaacaatatatagtatattcttatttattatgagtatataatgaatatttactaccaattttgagtttattaaaacctatatatttactacaaaatattataggttctaataaataattctaatcactcataactaattatagaaactatttagttatataagttttaatttataaaaccaagtcatgcaattgaatctaaaagctattgctattaaatatcaattgcatcaaagtttatgcatctcgtgttttctttctaatatccattgcggtgaagaaaaatagatattatgttccccccccaacacacacatacatatatatatatacacacacctaaataagataggttatgtatttaatatatactttttgtatacattaaaaattattttatatttaaaaaatatatatttttatccatataatatataattgatgtattacttttatatatctatatcatctaatagttaatatacaaaaattataagttacatattaatacacacaatagaaatataaatttactaaattttaaaatatatacttatgatatatacctatatatatattcaatatgtactattttctggattttctgaaatccaatattcatcttttataacttttgaatacttaaaagatcacataatgtggttgtttttgaaatattttaatatattaaaatgtattaatacaaaatcaactaaataaaagtttgaaatttaatttaactcttttacaattaaacaactaatgagcttatcttcaaaaagtctctgatttttagtttttctatttgatgatgtgaatttgtgaattaatgatgagatagttattccatttaactcttagttcgattgtgcaaaattctcctaaacaacctcgaaacaaagtagaataaatgtcttggaggaaacgctctaaatctcgcttcagaatctattcaaaattcagatgagaaagtttttgcccaaatcaatctctagtaaataaaataatttgagaaaaacaagtaaataacatctgacttaggactagaaaataaatccttagtcttatatcaaacaaatttcaataccaccactctttagaagtagaactcaaataataaaattaaacaactcaaaaagtaagaagaaaataataaatacacatgatcctttaacaaaaacacttgaagaagagggaggacagaaagaagaagaagaagaaatgttgaaaatataggaaagctatcggaagcttttcgctatttcttaaagcaagtgatatctagaaaatatctcattaggataatacttattttttatactttatttgatacatatacaacctgtatgagagaaaataattataccaaataaatatctagaaaaaataaataaataactctcggcggcaaacaattataaaatatcataaaaaataagacagaagctttcttaatgaataaaaaatatagaataaacacgaattttgtcattgtttcaaacacatctcataatataattctagggacatctttccttaatttgataactccgtattttgctatttatgaccaactatgatgggatctctttgaaaacaaaaaaagaaaagaacaaaaaaaaaaattcttttttcataaacatcatatcagaaatcataaaaacatgctctatttatatgataatgaaattaaacttttcataaaagaaagagaagctgaactactatatttaaataagatgtacttttacaaaaattgagcagttacaaaatgactacatataaaagaaaatctttaacttctagaatagactaggaaaaaaaaatttatactaaattaccaaataaattctagaataaaaaataatatatgataaatttaccatatgaaaataattttgatgaaaaagatatccctctaaaagcatagctcatttaaatgaatatcgaatggaacaacattgtaaaaaagaaatttaagattttcaagatctagatcaccttgcatggtgacgtgcagcttgctatgttaataaaatttagaaattgaaggaagcattccaaggttggcaattaattacaaaccattaaataattctctaacatggatcagatattccattccaaataaaagatacttattacaaaaaatccatatagcatttatattttattaaatttgatatgaaactagatttttggcaaatacagttaaaactgaaagataaatacaaaactacatttaccattctgttcgaacaatatgatcagaatgtaatgcgtttgaattaaaaaaatatgtcttgaaagttttattaaataatgaatgatgtttttcaactttatctaaaaaaaattgtcctataggcacagatgatgttatagtatttttaaattcaatagatcaaaattttaaacatctagaaacattgttgtatgttataaaaaagatggcctagttatgtttaaataagaaatgtctttattcttcacagaagttgggttttaggtcatcatataactgaggaaacaatcacaactattgacatatcattgaaatttactaataaattccttgagaaatttttggacaaaaacaattataaagattcttagggagccttaaagacatcttcaatttgtgtcccaatattcatccccttgcacaatcattacatgacagattaaaaaagaaaagaacctaatctcattgattgatgaacatgtaaaaattttccaacaaattaaagaaagcatgttagaaaaactccttgcctaaaattaacaaatcttatagccccaaagattgaaaatgcggaataaacattcaagaggtagtaatttttctagctagatatcttacttgttcgttagttgtttatggaacagttttgcaagagttctattagatgcctgatgcaaactgcacatatatctaactaagtttagaaagctctttgttaaatacctacagcagtaagctaacttttttaatagatatctcaactgctgtaacttgctcactgttctataaattcttctagattatgaggatgtaaggtgataaatgtcttatccacatttgaaaacagttagatgtctaattagataactcttatttataatatgcaatagacaattaacaaagtagatagcagtatcagatgtctaataaatgcacaagttaaagattttaaatcaaaaatttattttggttcaatactaagacctacatccagtcttttagaattacacattaagagtttctccactagttgactctattaacagctagagatcaagctttataaggttctagtactaagacaccttatatagtttgagatatcttctctctaactctctctcagaagttattaggcttttatcaacttcttgcttgctatattaggttcaaatggacctctcacagacatttcaaaggaaggttgtgccataaaacaaataataagtttttataatggtgcttggggaccttataagagtttgtacattgagacaagaaaataaataaaccaacataattcctatatggatcaagagcaaactagattcaaggaacttatattttgaagacaacaaatgtaaacactcaagaatagaagatgaagagtaattaatgcattttgggtcttgaggtttttgaagagtgaaatctattctttatattgatttggtaggtgaaactcttatgtataaagcaataaaaactagttgttagagaccctctttaaaatattttagatatgttaaaaagatatctttacaaaattcactttaaaatatttacaactgttgatttagacgcctgacacctttttagctttctatcattacaatctgcataaagctgattgtagagagctatcactaaaaaagctgccaaaatagcagacaactcatcataacagcttgcacattgttttttcttcactcaatagaaactagccattgggcatatgtgtcagatgtgtgcatgtgtggaaaaatgatatgtcagactagaaagtagttagataccttaaaatatcaaacaaatgtctgatcaaatagatttatcaaaagacacgatttttaaagaatagaactttatgcactttaaatcattttgagaaaattagaatgtcttatatgacttgaaatcatatgaaggccttagatcttatgttgtgtaataataattttagcaaagcaattgatccatttaataagatatctaagggacacgtaattctatatggagattactcgatcatagacttctattcttgatgtatgtgtgttgctttgcataaggtaaatgtctacttgatcattctactttgctagtcatttaatcgtatcctttttgtgcttgcactgttaggtatctatatagacaatgttaagacacaaaatattttgttatcatcaaaacttagatgattagctttttaggtccactaaagattgtagagatagatgctttaaatatagaatatgcaggaatgctaaaagaaatacaaaatggatgttttacattctagcgatatggtattgaaaaaaatataatatggcaaatgaactaccaagtaaataatcaaaagcaaaaaaaacatgttaggaatgatgaaaaaatctagataatattattagagattccacattcttaaaaaaaaaagaataaaagcaacttataagggttaaggtctgataaactaaatagttagttctaatcatatcaataatagttagattaaacgtatactctactagtcatcatggcttcgaccgtcacacaagttttaattgatatgcctatttttattgtctatttatgcttaaatgtggaaagtagctttttgtgaatataaactaaggtttaatgaccacaagtcatgttagaacaaggttctcctaatggtgctttttagtttttaccatataggttacatatactttatgcatcttctttttgttctctaagcacttcaacttgactattcaaaacaggttttagaacaagaccctttca

SEQ ID NO: 6301 - DNA, 3121 bp, Ricinus communis
  Intron number 1 from transcript 30174.m009037 (locus 30174 .t000434) derived from phytozome v7.0 (chr-ID 30174; pos 2 685281 to 2688401 reverse strand)
aagacttcttgaaggccaatttttctcccttacaggtacttattctttccaaagttaaaaaatttctttctgtcaattcaattttcaagtaagattgcaataaggtgtgagactttgtcaaaattaatggaatctaaatatccatattagtgtttttaattccacatatttgttcatcaccttgtttccatatactatataatttaaaagcatttatagaatgcacaacaataaataaataaatacatacaatcaattatcccatcaaataaataattgctgctctcacaactacatttttcagttaaaaaattaaataaaattaagttggaattcatgattttcttcaacattattagcttgaatcccttcgaccaaacgtcgcctgcttcgacaaattattcctgttattattgcatgtgattctctataaaggtctaagagtgcagaatataatttctgatatcctcgaatttcaggacggttgctgccagccaccagcgaagtgtggatttatttacaggaatacaacattcgggatagaaacattattcgggcctggggtagattacaatgctgacactgactgtagaatatggaatgataaccataacaagctgtgctacagctgcaattcttgcaaagttgggtttctagctactgtcaggaatcagtggagacattcagcggttggcttattaattctcattgccttcaaaatcttggtcttctgtattggttgctgtgctagaaggaacaactccatttacaaaagatatccccattacaggagctatccttgagctaattatcattcattactattaatttctcctcctgttttcttggtgccttaattttctttttatctagttcgagatttctgtttttaacatataactctaaatttctaattaattaagtttattattttttttttttgtatatttttagttaatgatctattattcttctttctagatattggcccttaattatatttataaagtttttcctaaagaaattgtaaaataaatcttaaaaaagctttgcagaagaatccaattctaaatgataaaatctttgctaactcaactaatcctctttgattgatttaagaaaactcttgatttgaagtaattaataaattaattaatcaccggaatttagggtccaccacaatgttgaataggcatataccacccaaaatccgctaccaaatccaacaggatcatggccagattttgcaaactatcaagaagatttaattacttagccccccaaaaaccacgcatccaacaaattaaattatttaccatatttttcacataatcctattcatatttataatttttcaaatactcattttcaggtccttgaatttttcatttttagcattgagtccttaaaatatatatttacattttaattaggtctctgaactattatatgttttgcttaacatgaagaatccttttgtctaatgcaaagcatatgatgtaatttaatatgctttcatctattctcaataagataattaaatacatttttagtaaatttcttccaatagacttaatgctttcttctattggcgaaattcaaaatgcccttcctcacttctccaattttttagctcatgtaacatatatcaaccttaagctgtacatcctatactttatgttaagtacaatgctttttttctttttttaatgttaacgaaaataataatttaagattctaataaaatacatactttaataacccaacactacatcaaaagaacaaaaagatttagggacattgtgatgggattttcatctataattgcataacgaactaactacacttgtattctgtctatggctagtggagcaaatacctaacaaaccatctccatccaattataaacgaacatcgatcactaacactaccacaagtattaatttcttttcaagcccattatttctaaacaaattaatcgaacatttataacatttttgctgtagaacatccctacttagctgttttctctgttcttttccatgcatgcatatatatgaagaaaaaattaaaacaaaagaaataaaggcaccaaagcgtacgcttttataaacgcagaaaaagaagaagaaaaagaaacataatggctcgccctaccgactgcctcttcttatccttcaacttgttagctttaacgtctggttgttttgccataggttcatatctctacttccaaaccaatggagtcactgattgcaagaatgtcgtccaaaagccacttctggtaatgggtatcattttgatggttatatcattgataggattcgttggtgcagtttgcaagctcacttccctgctctggttctactcttttgtggcattcttggttcttgttgggctgactgctttttcagttttggcttacatgatcgataatccgaatgctagtgagaaattatcaggaataggtttcaagaagcatagtattggagaacattacgcacagtggttgcagaatatggtaattaatgggaagcactggaatggtattagagcttgtttgattgatcatgaggtatgcaaacgtcttcataagaataatcttgtccaaaaggctggggatttttttctcaagaaattgtctcccgttgaggtataaattctatatcaagttcttaatctaccatctatcttctgttttcatttttcaaagacagctatatgcaccaaggagagatatgcatgcacaaatgctttaaatcatggctgcctattgcacaaatgcccagcaaatatttacaacacagtaaaatatatttgatgaaaaagaaatgcatgtaatattagtagtttttccatattaaatatgtgttttaccttaattgatatatttggtttagaattaagtatattatcataacaatattaatcttttattaatatggcacacattttactaatgtgacacatttatttttaaatagctctttttttttttttttttttttcccctatttagttttttgagggaaagatgatgagaaatattgacatcaaatagtatgttaattttcatggatgttcagtctggttgctgcaagccacctatatattgtggatt

SEQ ID NO: 6302 - DNA, 3480 bp, Ricinus communis
  Intron number 4 from transcript 30189.m001658 (locus 30189 .t000026) derived from phytozome v7.0 (chr-ID 30189; pos 4 21728 to 425207 reverse strand)
ggttgtggaaggttagttctcacagtaccttataaatggtatttttttctctcatttttatgatatattcttataacttgtttgttccaccctcttatattttagcttttgtgaacttatttatacacttaggatttaaaggttagagttatttctattaatgcagatcaatctcctttctcatactatttgcttggcgtacatgtatataagcactaacaactatatgtatgagtgtgacatactctttccttttgccaatttcatttgggaagctaagattgtttctaatattaggcttttatttagttggtactctaacccaaaattatagataattatattaagagactaatcttaaggagttattatttgacaatgcttgctctgatgagtagtaggagtgcttgcaagctttggagaatttactctgcttgcagttagttggtgtctgtttgagaacattgcttatgttttacagtacttcatgttgcagctatatggtgctatattcctaattcttatggcatgttaacttttagggcatctacaggtgttttggatagtaaacatgatttaatgatttcacattgttgcatctatttttattcatttgttgattaaatcaatgggttttattaaaccttaccctttttcttgttctcaatagaagaattattaatgttattgcgggagtttagctttgtgcctcaaacaaaaggatccttgtattcttctttcatacattcaaacaagaaaattgctaattgtattactaacatttttttctagcaaatatgcaccagtatgccattagtgccaaagaattttacttgctgaaagtttgaaaagtctcaacttttataagcaaacattttattggcataacatatcaaattttgggaatgggtagcaagagttttcaagtatcgtcagccaaagggacaaataatttaataaggataaatcaaacaagtgaagtgtacaaaattcctaaaacttttaggattttggttgatctcctagaattatattatttaaagtggctcggcattataattcagaggtagaaaaatgatgcaatcatgctctctatagtcagtttaagctcttctaatattttctcttgcattcttggaccacactcatgcatgtaactcgagcacaaatgtgtgtttcctggaaaattcacgactcttaggataatgacaattgtaacaaggttgaactatgttttcctgtgtattgtgcaaactttgcatgagtgttctaaagtgttccgtttagaaaacttgtcattggcagttatttgtaaacattaatcaactagtaagtattacaaatgaacagttagatgtacagatataggattttgttacaccattattacaagctggaggatgtaactctaatcctgtattccacttttacaagctggacgacataagtccttgtcattctccgtaatcagcttatggaggtcactgtttgtgggatgttgttgccactttttttggtcccacacacttggactgcccatccgttagtggatgttttgctggggaagtctacttcttatattccattgacggcgagattaactaggttattaggaaaatgatctgtgctacaaaaatgagtgacattttattgtgcattggacaactgcatgagttttcatagttgttcctcctgatgcacttattatcggtaattatacgagtatgatacaagtcataagagctaaattattaatctcatgaggacaatattcaggacacacgaatggtgtgtttaagtccttataaatggaaaagtctttttattgagattgttatatccttcattatagtgtttctgcattcagtacatatcgtgatccagtgagataagatcacaatgactaaaattctgcaaatgtccttataagttgcacattagtaataacctagttcttccactactaaataaaatctttcatttatgctatattcatttatgttactataaagaacatgattttcacttatatatggaaatgtttctggtatttgcatatttacaccaaataaatttagcatagttattaatggcgcaggcactatttaaagtgccttaaactctaaaaggtgagtgaattgtcaatgcacacatagatccgctcctttgtaatattttaatttgcggcctttcttttcccttttttctttaattttcatccataaatatccaagattgatttgactatggaagtaaacttggtatgaacccatacatgctgaatcaagttaaaacaactatatgcaagaaagaagccttgtggctttagatcagacacagtctatatgagggaaagaaaatattgttgtacacaactaggtttcttctatatgtcactccatttgttgattcattctaactctttgtgtcagtcctccaccctctctggctcttgtactattctttcctttcccctttttttgctttccttttctaggtgcctctcacttcttacactgacaaccacgaaaatatttctcttgtaatattaatttattattgtaccttggaggagcgatttttttttcttaaacgaacagagcaagaaataagaggggcagtgatatttttaaggggtgcaatcatagtatttccgtcaaatttagtgttaatatacaaaatttccgagaaacaattgggggggcaattacctcacctgctttgatggcagcttcgtcactaatagcacaatctttgtgccaagtcatttgttaattatgccatgtcacgtctcttaggattaagttttatggacttggttttttcaaaatatcattctattaatattgaagtatgaattatctatgtatatgtttttaaatttatttgcttttaaattttttaaaaaaatctcttatttgtgcctcacttatctcaagtgcatgcctatgccttgtgccttgtgtctaggctctaggatctcttagcgcgttaattcacttgtgcatttaagaattatagaccacagtaatctagactagagatgtaaatatatattagaaagtattttcttgcttatacaaggcattagtctacttttttcaggttttggtttctattttctggtaggagtttcaaaaggctgttcttgtttgtaatgcatatatttacatgtacaaccatccaaccatttctttttcatatctaagcgattaggggtctatgggatttatagtcctgcatttgttatgatatctgataggtgagcggattctgtggtttatattcttgaattttgtccaaggacctcgtgaatgaaacattatatatatatatatatatatatatatgtgtgtatgtatgagctcgacaccacatccaactcaaactttaatccaaggtgtacgagttcaaacacacttgctttgtactataatcccaacagagtatgctaatcagttatctaatacttggcaggta

SEQ ID NO: 6303 - DNA, 7817 bp, Ricinus communis
  Intron number 3 from transcript 29092.m000443 (locus 29092 .t000002) derived from phytozome v7.0 (chr-ID 29092; pos 9 202 to 17018 reverse strand)
atactgttttaggtaagcgattgtgatgtgaaggaactagaagagatgtatattatactaagagttgttcaaacaggtccgaaaggcgaactcaggctcttcttggatgaactaacagaagtagatgatgtatgtttgtatgtgcaagagaacccaattggacagcctgctataacgtccaagcatctttatggggagttctactccaagatagcctgtcgttttggcaagcaatcattatgataagcttttccggatactactactggtcaggatatggttttgagaaagtttatcagcgaagggtttttcgtttattaggcaatattttgtttttagcaattggcaaggagcttttatatatttggagattgtactgcagtttcttattatttaatagtggtagtctttttggtaagcatgtcttcttgtccattattctgtacatcgacgcattcttaattacttcactctgaaatccagtttatttatcccttgccaataattttcgaataaaaagtattgtgggcaggcaagtactattcatgatacattattttgcccctggaaaaaatcctttgctggaaccatagctatatgattttctgtatccttttgatgttttcttttcttgctattgctacaagacctaactgagtcttagtattatacacaataaatcagtatcagaatttaaaataaaatccttaagtcggctatcttcaattatataaaccagcgacacgatcatcttccgacttaaactaagacaatcaaagctaactgtttccacaaatacaaaaatatggctccttctgttttcttgactagaccctggaacgggcaattcaagattgacatttctatgtacttattagttgttattggtaacccaagtataacaagagtcgtctgataagtcgtcctttccagtaggttcaatcggatcagcttagaaagaaagtactccagctagctgacacctcaaatgacatgatcttctaaatttggaaacgaaggtaatccctggcaacgcgaaagaaaagcataattaacttcagcttccaatagctgagttagccaattgtgtcggtgaggtggtgattacagttcatagattcaactaaactaaaacaggggggcagttcctaactcaagcgccgtaaatgaaaataaatggctaaattagtttccatacatgttcagagaaattgaaattaatcaaacacgcatcaggccagtccagttggtagtcccttttttttaaacaagtttaatctttttttttcaaacacaattgaacatacttgtaagaatataaacacttattcaattaacacaaaagtaaagacatttttgagattagttcttttttcttacaatccattttcttcatgtcaagaaaaaacccaaaacatgaaaaacacacaagttcataaaaaattactcagctttcaaatgaggatcaacctcaactctagcaacaccttcattagcctctttagcaacttcaacttcaccaacaacaaagccagccacatcgctattttctcctctaagaatcttctcctctgcttcttcatcaacataattcggatctttctcatcaatagccgccggtgcagcgtccagctcactctccgtcgtgccatcaggtccttcccaagtgtacttgccaccatgacccgacttaggcggtggctttccaatacctcctttgccatcagctggatgcctatccatgcggtgaactcctttgtccattaacttcttttcaacgtacttgattgtatctatgttatgcgtgtttagctctgtcttctccactctttttctgccttcttcgtcatgcgatactgcccttatcaccaccttttccttcttgtcatcaatcgccttcattttcttgattacttgatgcttctttgctcaaattcttgaagtttttctgtttgcatgtcttggattagcgtttgatgggtatttttatagactctttttaatggttttgtgcatagaaggtactggaaagtacaagggatagtaaggtggagctagaaagttcatgcacgtggtattctgcttctgtttcaatccgacacgtctagtgtaattttctagtaagcttgagaaagaacatgctcatatcctgtcgatgcttgggctttcaagtaaacctaattggatacgtatgctttaagtccaagctgaggtgcccatttcataatctcaggcatatacgataagtgcccatttgcagtgctggattaatttgcgagtaactcttacagttctgttgtttcttagattaggagttctaacagcagagccgataaaccaaatacagaaagaagaagaaacaaaataataagtattgctgttcagagaccgattcctctaaattaacactaatatatatatattatattaatatataaatttataaaagctaatattttttaaatatatatgcttgactttcacgtataatttacttttgacacgtgaaatttagattttatatgtaattttataatttttttattaatttattgattcataagttacatttctaattaaacattatttctaatttttaaaaattaatatattaattatattttaatattatattaaataataaataattttttaatcagatactaattctatcctaaaaaatagcatattaattatatttttatattatattaattaataaattattttataattagataataattctaattttaaaaaataatattttaaattatatttttaatattatatttaataataaattaaaattcttaattatataataaatttttgattctaaaaaatagtaacatcaattatattgatatattaaaattaattaataaataatttctaaataattattatattattgaattaatagaattttaaaattttaaaaaattagagacatttaaaaatagttaggttgttattactttttacaaattttataaattactattaaaatattaaaattattattaaattttatctatcaacttgattttataatcaaaataataatgattatgcaatgcacgagtaaacaactaatctgtttatatattaatttttaagattttaattctttttgacatgtatacttaatttttgacacataggatttttgttttgacatgcgtacttactactgacacacgaaatttaagtttatgtgtaactttatagttttttctattaatttactaattcataagttaaattttaaattaaacactgactctaattctaagaaatagtatattaattatattttaatattatattaactaataaatagttttctaatcagataataatactaattatatctcaagacacaacatattaattatattttaatattatatttactaataaattaactttgtaactaaataataatactaattctagaaaataatatattatgtaaaaataaataaatttttaattatataataagttttttatttaaaaaaataatttttattttatttattttattttttaaacaaacatataaatagataaaaaataatttaatttaaatttgaccaataaataatgaaatgctacatatattatagcttgaaaaagtaagaatacttcgtcattcattttactatcaaagtgtaaaaatccttattttgtactttacaagagattttacatgtacaaattaatttttttaatttaaaaaataatatactaattatgttttaatattatattaattaataatagttttcaatgatactaattttcttttaaatattaattacatttaggacgggcgagaggaggttggggtgtttgcgggccattccgtggataccgatgcctattttattataatatattatacttttaaaatataaactaattaaatttaaatattcaatatattaaatataatccaaatataagtttagtaaaatttaaaataatattttaaataataaaaatataatatattataatataattgaattcggacaatgaataatcccatgttcaaatctaaattcgatatggataataaaaataaattttaaaattatttattattatttgaattcattttattagaattcgttggccacggataaccgaatatatccatccgcccaagtgcggtggtccctggaaaggaggggcataccccatccaggtacaatgatcttgcaaacaaattgcatgtttagcaagaaaatgggccaccatatttgctgtgcaacggatgtggttcagcttgacagaatcaaacatcacctgcataaatttgatctccgatatgacccagccaataagagaggagtccacactgtgttcattaaaccgttgcaccacttctaatgaatctgtttcgacttcgatgcttttaaattgaaattttatccttgcttcatcatatgtaattaataatcaatgtataagtaaaatcaggtgtatttcccttataataatcagtaatttaaaaaatatacagtaaaagaaattagaaaaaaagtctagtcttcaatttctgggatgcctttaaaaaaatccaagaacatgcgatcatcccaaactaaagaatccagatctggaataagtcctggaatcacaagttctgaaatacatgtgaatggatagtctgatgaggttgaagatggactcgattttccgcatctattcctgttacttttgtttttcctactccactgtggcataatttttccaatttcagaactaatagaagaataagcatactctcgtttgacaccaattcttttggttttggtcctttgcctctttgcttttatttcaaaccaacaatttgatgcggaagaaacatcagtttctgttatattttctagcaaaatatccacctgagaagagacctcaatcttgtcggagttcctctttgacctccctctgactcgttttacatctgctatgacttttgccataattctcttttagggtttgtaaagattagatgttagatttgtggggtttgtaaagattagatgttataatgtgaagacttgcaggttttaatattactttcaaattatcctaatcctgttgggattagatttttacactcctaattgcacaagaaaagtcccctgtctttttatttttcagaaacctgataacacagggaaaattcttaattcttttatcttgtacgatttatgttttttcacgatcatacgaaaattcgttgttcaattatgaaaaacaaaatgctaatcgaaaaaccttacaggtaaaaaaagagaagaaaaaataaatgcagtgacaaaaggaaacagtaagggcaatggactagcctcatctgagcactagtatcatgctacaggcattgttgatacatcctacagaagtaacctaacctaattaacttcatggccaataatgaattgatatgcgcaaggtatgaaaccaaccgacaaactgctcaaactagtctattacaaaaaaaagagttctaaaagattgtaaccagttcatgtatcatcacaaaaatgactgtggctcaagtcaacaatgtctatgattaagatttaaggaacagagggcgactctagtcctgtttgttttatgctttctctgaaggctctccttcatttttggggtttgctggggcaacctgagcatggtttgcaggagcaacctggataggggttggatgcataatatcctgcagttcttgctcgctgaatgtgttctcagcaatatgcttgtccaataatgcatcctggtacatcaaaaccaaatggaagttgaccagtaagtggcatacctttgcccatcatcatctgcccatgatttcaagttattcatctcggagaaccttgcaggtcacaagatgggtggaattaaagaattaagaagaaaaatacactcataaagtcatctaatttattattcttgtatttaattattatttttttataagagatgtatactgaactcattagtaatttgcgaataatggttatataagatgaaattaacttgatcaaaaccttcaaactagcaaaagatatgtattgattttagtaaatgtacatgaaatatatttcttaaagacctctactgaattacaacagatggtaatttagagaggctagactatagttctttatatcagtaacataaaataccactaacaaaaagaaaattaatcactttatttttccgtaagtggtgagttaaatgacaattaataaagtgaaatccatcctgaatgacaaaaaataaaaattatttgatgaataaagagctaatgatccttttatccttacaactaatccttttcaagttttaataatgtagatagaaggactttctcgtcagcattcataataggattacaaagaccattgatatcaaggaacatttgaggtttgtgtcccattgcccattttcaatgttcatggatttaatcaagtaataaattaattaatttgaatttaatagattcaagagctataataatccataccagaatttgaatagacttctgcagtgacaatgtacattttaacagaagttcaagagttggctaccttcaattatataaaccgatgacatgaccctcatccaaatcaccaaactacataaagttgttccctaaaatacaaaaatggcaagaaatattggcagcagcagcagcagcagcaattctgaagaagaaggtggaggcattttactagagaggccaatctttaggcctaggaagaagcttctcgtgatttccttaggcggcctgctgtgcgcaagagtgtgccgtagagacacatccaacattccccaatctcgccctcctgatgctgcctacggaagcattcttggtaactttcttttaccttagtttctttagttatttatttccttgaatttatatcagttcctttatttatttctttcacaattctcgttgatttcatccatcctatttagtttataagaggccttacagtgacgagttcatgagattttgcttcgaaagatttgaagtgggaatatggtcttctgcaagagacttattactatcacgccactgctacattttttctgtttcttttgcttgtttttctttttcattttttcttttccctgactggctgtgtttatgcatgtaatatagattgtacttgaataatgctctggattgtctgatgggagagttaagagacaagcttctatttttttgggtaaggatgcggatgccagtttaccttatcctaacttttcatatgaaataggccgctgcaggatgtcttatttttgaaatttcaggaccataaacaatgcactaattctgggttcaataccatagagaataaatcgaagcctatctttctcagggaattaaacaaactgtgggcggagaataataactcgaatctattgttgctgacacaaagatattcttcatcggatatattattgattgacgataagccttataaggcacttctgaatcctgtaatacatctattgtgttggagataaatttatagctttacgtatgccagtttctagtacacttttctaattttaattttgttttttcttgtagccttacactgggcaatgatctttatgatactggtttacgtgagaattgccattttctatgcataattactggtttacgtgagaattaccattttctatgcataattttcttgtacaaacttatacgtgtgaagccttttaaatattgtttctgtaattaggtcgtgaaggtgggctctggatctacctgg

SEQ ID NO: 6304 - DNA, 1394 bp, Ricinus communis
  Intron number 1 from transcript 29586.m000626 (locus 29586 .t000031) derived from phytozome v7.0 (chr-ID 29586; pos 2 26427 to 227820)
tcccgatcagatctcccgcttcaactctcttcgaggtgttcaatttttgcccttcaattctgtttattttacgtttatatgtttgcattcttttttcatttttttatatgatccacaaaagttaattgaatgagctgcattttgaatttcaaattggatttgacaagcttatgtttttattgtaggctaatcttagagagattactaggagtattgagtttagaattagtatataaattgagaaatagatggcagaatagttatttctatctgtttgtagcatgagaagattgtgctgtagtaaattgtgctgtagtatttataattaatctaggaaaagttgttattggttgtagttaaagcaagcgaaaaatttatccaactgtgatctgcaaggaaagtatattagaagattctacggatcacataaaattaacactgtggatcaatattgaagcttttccagaagcatcctgagatacttaaaaagtaacaaaatcttcagcatctttttagtatttttcataaatcttgaattgatgctgaaaaatagcactgtttaaactactaagctagaatggaaaaatgtaaagattttaatcagctaggtagtttgaacatttctgttagagttctcattgagactggtaacagggttccattaaatttctttgatatgataaatctgacatgtttaagatataaaaaactctaaaacagatacacagcagtttcaaactgcttgttgcaacatctaaatgggtgtgtttcttttttccttattaaaatagaatggatttttcaatcttaatgatgaatagactaatagtgctagcaagtgtgcataacaggcttacaatatggcacaagtaggataggctaaggctgtgttgccctagaatatatattttttatttcaaagttaagctgtttctcttgatgcacatttgttattcttggaaaagtaaaaggctattcctttaaacacattttttttcctgactgcaaggaacaaaatcttatacttttttttcccacggtcaattttatgtttgttcttatacatgtctggtatatattgtgtgatctacatttacatcactgttctctctgtattttttgtgctatcatagccataacttgtaactgtttttaatatttcttcttctccttagcttgttggaagttggtggtggagactgttgtactttggcagattttctgtatgcgcatgtaaataaatatagatatccatatagataggctcaattactatttgatatgtaactgcattttttatgccgtatcttgaatacagaatgtaagcgatgctcttttatgcccctttttgaaaagcagttgcagaccctcagaatttgctagaagagaaagaa

SEQ ID NO: 6305 - DNA, 1392 bp, Ricinus communis
  Intron number 5 from transcript 27543.m000154 (locus 27543 .t000006) derived from phytozome v7.0 (chr-ID 27543; pos 1 46219 to 147610)
ccatccagcaggtaaaattactatttttatttggccttcttctccatgtcaatgtttagttggggggaattggggcatatttttagatttcaaaggtgacttttctataggttctttggccaatgacatgggctgagcttgaaggatctgactcggctggtcagttctcagtgtgcccaagctcgatttgaacctaaagctggagcttaagcttggctagttcaagttccattaagttggagtttgtctcaggaaagcttgatcatctatctaaaacaagctgaaaaaaaataaattgttaactatagtgtccaacttttttggttgagtatacttctttattttttatattaaaaaagaaagacttcaagtgcacccataggaaagtttcagaataagctaaaaaggtcacaccccttccatggagatgggtgcttctacttttatatgaggacaggccccatcttaattgttttactttaaaattgtgagttttccattcactcagtcattctttttttctttatgtcaaagttgtatatttaaaaggtcttttgtttttttattttggtttaccatgtatgcagggaacctattatacaaagataatctgacatagtataatatgaaatgaaacttcaaccgtagtattgttacaattttgaattttagtagtttaaagttagttagataaaaattttcagaatttttttctttcaaacttcataagactaagtgaacaaatttaaataggcttacaacaaacttttcatgatttttttatctgacatcatttgtgattatgtttgtatgaaaaaacaagacatcaacaacttactcaaggtattagtatgtagactcgaagtgcccttgtggtagacaatttactttatatccactgacttgacaatgattgcagccattgaaaattactaaattgtaggttggacttgatttcttccaaagtacttgatttcttccaatcttaagagctgttaatgtgtatggtactatagttaaatttgattttaatattactatgcattgtcatttaaaactgaatttgttaatgcattttcttactgtatcaagaccagcaagcctgtgagcgtgctagctgacgaggttctgaacaagctgtctcgcaagcttaaacaagctgaacatttataggatgaagcttgaatgtgccaggtggcactgtagcttacaagtggctgagcctttttcaaccctatttgttgccatttttagctgtgcctttagagtgcttttatttttttatttaatctgcttataaagagagtagaaattaatttgttactgatatttgtattttgctttttattatatctaggcaacgggggctcgaccttattctggaaaagttgg

SEQ ID NO: 6306 - DNA, 1576 bp, Ricinus communis
  Intron number 4 from transcript 28179.m000461 (locus 28179 .t000006) derived from phytozome v7.0 (chr-ID 28179; pos 4 7182 to 48757)
ggagtaagttttaactatacatgcttctctttttatcagtttccttgctagtaaaatttgtgtagctgtagaataattgttaaaactttcagtttaatttgctaaagttctatgctatactttatacggtgtgtgaaccctcagatgcatgctgcagcctgcatgtattttacgtattttgttgcaactactacctgattgtatagaacttaaaccctagtcaaagatgtgattccttgtatttttattttacttctaatttataatgtttgctatataagttgcacatttaaagaacccagaaaaatatagtgataaaataacaatgaaggtattatagttacatgcaggaaggtgtaaaatcagaaataattggtattgatttttagcatatcatccattccagttcttccttcaatattgtggttttatccaaactttcctccgaattctgggaaaaggaatttaaacccaattgttcatggaccagaatgctgtaatttatcttgttagttttttcctttttgttgaaaggttgatgggtcattagatgatcatttgttgggtaaatttccaatcttggtccacctttttctccctcctcgcataagggatattaatttatagctgaaatttatttatgaccggtacaaatgtagagaaagtcctatcagcttctagagaaagagaaaacagctattttttttttaaaagaaaaaatgtaaatctatgtgtttgtagattaacttcctttgtattccctttctggtagaagtatgattctcaataattgattttagaaataagtaaaattcctagccactcaacattgttgcattgcaagataatgtgataatattttttacttggattcatagagttagttaaataggtttcaagtgtagactgtgtagtcattgtggttttagcatagacaatttgcctagtattccgaaaattttcatttagttgaaatttcccaaatcatgataaaaaggaaatgttgaagttgctatatcttaatgaaattattagactaatgaaatctattttcttttttctttttcaaataacaaattttccttctgtatcctattttagaattggcatcacattttcatctacttataggccatcaaccgattggtattttatcatcttttaagaaatgcttgttttagtcccatttattggtatttcagatttaacaaagttagtccttgctcgtgcattgtcaatacaatacattgattcattgtaatgatcaaacttgttcacatattttaaactgtagtatgtgatttatatgaaagaaaatacattttagatacctaatcccttgaaatagtagttttttctttctttcaaaatatgattattgtttgtggctggagttaattttaactaatttgggaggaattcattttgttgcaaaatgttgtctgtagatgatataactattatagttcatggatgaatgattcatatcattatctctttggttttgaagagcattatcactgcaataagtagttgcatttcctgctcttaactctttggctggttttgctgcagg

SEQ ID NO: 6307 - DNA, 1407 bp, Ricinus communis
  Intron number 5 from transcript 29616.m000229 (locus 29616 .t000016) derived from phytozome v7.0 (chr-ID 29616; pos 1 25150 to 126556 reverse strand)
gaaaggtcaattttctttttttttgttgatttgcctaatctaatgcaccttttccagatttgttagcatcaaaggcggggaagtagttttagcacataggtttttaaaagtggatgcttatttttgtttgttcatgtttgtttatatagttgcatgtactgcttctttcccttcaatgcctttggaagttatctctgattgttcaccctttatattgaacacgtcctttatattgaacacattctggagacttgagtctaaaacaattatctggggctcatgtttctctatagtctagagaggcatggaaagaaattgtctaggacacaaatttatcaggccagcagcatttcctgattttgtgggaaatgtttagttgttaactcttaaaatcccttgggatattaagaaaggtcataaaaataaagttcctggatattgttgcactaagcatcagatgctgtagcattcttttattcttccctttggttattccttatagagagattgaagctactggcagataggataattttgcataataaccctctcgtcgattatgcaggtttatctttgacttcaagacttgatatttggcctcattcatcagtgggttgcaagatgtaatgttaataggaagttgaatggagcttttgttaatttttaaagcaattgagaagggggcgtgttcctgcttttatctaccgtgcatagttattaaatgcacaagtcactaagagtcttggagcctaggcacaaggggcagggtgcccctttgaggggtgaggtgcaaaagaaataaaatttgctaaaaagatcaaaatcaacattatatttataagacaactaaaagtagtcagcaatcttgttttttatttaaaaaatacatgtttgtggaattattatttgtgtagaattagattccatattcgatatcaatttaatgagctaagaatagtataagaaacacgattattaaaatcagtatttgaggtaaaaagaattttcactcctatctcttatcaatggagagaacaatgtccaagttttctcagaatctagttaaaaaaaaaaaaagagaaaagaaggagcattgaaacgagtaggtgcacagaagaggaagaaaataaaatgtttgcttgtaaattcatttgtgctcataggtgggcacagacagaattttaattctcatgaatcctggcatagcaggagcttttgcttcagctgaaaaactttcattttgacctatcatttgtagttatatcttatcctaaaattcattatttttgttgtgttaattcctaaaacctgtcctaaaacctgttatgatggttctaaaaattgaaggattactttttcctgtgttttaaaggttccaaagcttctgttgcataggatctttcctaa

SEQ ID NO: 6308 - DNA, 3884 bp, Ricinus communis
  Intron number 6 from transcript 29955.m001175 (locus 29955 .t000020) derived from phytozome v7.0 (chr-ID 29955; pos 8 71285 to 875168 reverse strand)
cagaatataaggtttgtttttagtgcattagaatttccagaaatttggccatcacccatgcttactttaatctaaaattggatacaattgcagttttgggaataggaatccatgtttttgtttggctgaaggaatataaaatttttaaatatcttaaagtttaaataacttgatttcatattgaaatgatacctatttataagtaaaattgtaagattacaattgaattttctttgtctatttcaaaaataaacatggatggtattttttgagttttaggtatccatttccatttttcatggttctaatgtaaggtttgagatatgataaagtacatataaatctatttgaggccttgaatcacttgaaagaaaatgaagagaagtgcactacctcgacacatgaaactagggctccttgaccatcactaccaaggttttattggcatcatatgtaaagtgagagttgaatcaccccctaaagtagtttcaaacttttgtgaatttggaaaaccacagtataagctaataaatgaggtttgaactcctaaatttctaggcaattagactcataagtgattgatattaggaactttgactcaattaattgcaactgcatttttaaatgcaagcatgtaaatatactcattttaagatctagtgatgaaaaccagccctcatgtaaggtttggagatttagtaaactaccttttaccatcagaaaaagtcagggaaggttttgaaggggaaaagagtaaaactaacttcttcttcacctaatttattttaaatattggaatcagctctgtctagaatataacatggaaggtcacttatttgctgcacataaaacacatagaagaattctagacttattttggtttctttactcgccatttctttagcattctattgattagatcaactcgatatctgatattattatggtacgagtggaagagtaataatacctcttaattgtagagaaaggtccaatacaattacaatcaaaataagctaaaacattagttgtaatccatatccaaatgatacgtgaactgatctaatatttttagaccttaattcttgttttcccttttcatgcctagctttctcatgtataccttgaaaagtcaaaagctgtactattatgggaccatttcaatctcactacttctaaagtggatatggttctttaactgaatgtggttgtgccatgaaacaccagcttgctgatgattgcaatttctatctcattatttttctttaaaatttcttccattggtgtttggttcaaccaagttttgaatctatcgcttttacatgcttaaaatcatgatggattaggagttatatgtgtattgtcttataacaacccttatatgtagtattattattaattgtaaggaaaagtttacaaagaattattgttatttgtaagggaaaagtatacaaatctaccttgtggtttcactcattggcaaaaacgagcatgttattttgtcttttggcaaatgactactccgtggttagaccattaacactttattaccaaacatgctaacactattcgttggcatttatgtggcttcagatttttgcatattgcatcttgtggtttttctttatgacacttttatactctgttttatttcatttgcatttcaatacctcaatcaactaatagcattagtattttatgattggttgaaaagtctactgtttgaaagagagtaaaacgaaaaacaagattttttagatccaattaggtctaacgagggtagattcattctaatcttagttctttgttctgaggattctatgactagagagagagagcgaattgtaattcgaatgggggctgaccacggtataaactgccaatgacaaatgattttttaaaataatattacatttaactatgcatcataaatacataaatatagtcaaaatttattctaaaaaatttaatctcttaattcaactaaaaattataaaaataatgttcttataaattagttaagctcaaaataattagttagttatcaaattacttgaaaacaattattgtattaatttcgaacttaatttagtgatatattatcaaacattagtgatattcattcatttggcattaaattgttaaaagtagaaaaacaaagggttgaaagtgtcactaaaacaacatatgacctattttacaaaaatgtaaaatcacattagcgccaacaaatagagttagcatttgtggtggtgaagtattaagggagcaaaccacactatcgaaaaataaaccacaagcctttttctctcaatgagtgaaaccacatgatggatttttgtactttcctctttttgtaatatgggcatcttgaataaatttgatccctcattcaaaaaaatgaaaatagttttgatccttctttagtcacctcaaatttagtcatattaacaaaaatggtgaaggctaagaagcaatccaagaagagagggaagtgggcttgttagaaaactaggaagtacataacagttacaagtatacagtatacctttattaacaagattaaaagcaagatacataagatgtgaaaatatgaaaattataccaatgtaaatgagaaaggatataagagagtaaggattaatgaaagaaaacctagagtttggaatggttactctactccacgcctctatgtccactcctcaagaattcttcctcaagagttctaatccagtatgccaatctttctttggtgaataataaatccctttacaagcagtagttggttcacggcttgattgccatcattttgtgttcttccttgaaactaacagtctttgtgaatgttattttcattcttaatctcactataacaaaatgactcagatagcttgcagaaaagatccaagaataacttctaggtaaagaggcaaaagataactcaagatgtccacctttagcaatcaaactaacaaatatagcactctagggctattttattatgctattctctcatgcttgaatgcccctgatgctcctattgataacagaaaacatgaattagccatttgaattgaccaagaaattctattatgaatgtttatacgctgctgtgtgttatcatcttggtaagcaaatctgcccatgcttgatactcctgttctattttctagatttatacttcttctgtcctcctaaagcccgagatggggcaatcataatttttggcagctagatcacataatagttgaccagcaataactcattgtagagacatgatgtaatgctgtttaattttttttttttcttcacttgaacttgaagttcaatcgtagaaaagtccagttgctactgcattataatccctagtatttctgctcagtgcagttagcagataacttcattccattgtgcacttatttatttccagatgtggcatgtatttattattatgttgtaaacgtttaatggttggcaggctggagttaataaatccaagtaaaatttaccttcaaagtccattgcaagtttgtctagttgcaatggataattgcttcttcaaggtattggaaggaaatcgcaccattttccttgaagtgcaatatgaagtatgtgcttgcacttcataattagagttttgacgttgctcccaaattcacttgagcagtttattttacttaactttgatgaatttagtactaagcataccctgtcaatggcttgtggaatgtacccattttccttcagtagtttgatttgttattttatgcctcaatatatgtttcattggtctgtaactctctttaggtcttgcaggccatgactaacataatcttactattttttcagtgacatatattttattggaggttttggcactgttg

SEQ ID NO: 6309 - DNA, 778 bp, Ricinus communis
  Intron number 6 from transcript 30147.m014113 (locus 30147 .t000384) derived from phytozome v7.0 (chr-ID 30147; pos 4 580488 to 4581265 reverse strand)
ttggcaggtcactttctttctctttttattgttttcatttttttctgcttccttgatgactttttgagcattatgatcataccagacataaggattttatttgaaactttttgttgctaaatctaaatgtatcttgatcttctgaagtctagctgtttttctatgacaaaaaaactcatcaaagaaggggaatgcttcttccctgcatctgggacatgtctgacaatattgaaatcacttggatttgcatatcatatattcttagttgcatagctgcatgcattcatcatgggttatcatttgcaaaagtatggagccggagcgacattctgtattgctgaatctcagcttaagcctttaaaatttctatcctagaaagtagagatgcggttgacaaccaaaacctatgaaaccaaaaagaaaatgactttattctgcttaatgatctgcttatcctttggtccaaatttctttaattaatttgcaaagctttatctgccattcaagctaagcttgaaaatttgatctctatttttcttcctttttatgttgtgacgatttctttctgtaattgcatagtagtcttcattttaccaagtatatgcatagatctcatatttgagtgccactatttctgcaatgtttttgaacatagcatctactaggaaaggttgaaaaataatcctgaagcttaatatatggaagtgttaataccctgcaatttttatttttttgcattgtaggtgatctctggacctgatcccataacaattcgtgc

SEQ ID NO: 6310 - DNA, 2174 bp, Ricinus communis
  Intron number 10 from transcript 30094.m000665 (locus 3009 4.t000001) derived from phytozome v7.0 (chr-ID 30094; pos 18757 to 20930)
aaggtagggcttttccagaatgttagtatgaattgcaatatgaatgttgcctgtcttcatgtttattaggtttctatgtctctaccacttgtatgtttggactagaatatctaaaaccacattttacaatcttccatttcttggtgacccaacaatgattatcctttgaatcaatgctgattatccctccccttgactaacttaactttagatttgatatttttatccaaagatatgaagagagaaacatgtatccacaagtcaaacctgcttgttactttgctgagacatcagtcaccataagtgtctgatgaccttcaatgaagttgatctgctgagtaggaggctgctgctttgggttttgcataagcctgtaaagtgcttcctaattgtatattcttccaacaattctgcttaaagttatttgttcttttgcaaacactatggggaagaaatttgccttcctctctccatctctgcacctattgtattccttcccttgattctcctccttttctaaatttttttattaatattcttttctccaccactttgagatgccttctggctgagctttgcaagaatcgctgcttcagtggacctgtgttgcctaaatattattctgtgttcttgtgcttgcagagaattaactaattcagacagttagttggttcaagcctttgtaatcttccaatgatgagatttgggcttcattcatacctttgaagttggctgaatagaactttctcatcaaacctcttgtttgtcagctcctcaccaagcaatctcatcctgtttacgtcactcattaacctgtcagaatattctttgacagattttgcatctctcatcctgagaatttcgaattcttttctcaggttcaatacctacatctggttggtcttttcactgttttggaacttctcattgagcttgtccaggcttcctttgctttttaacaagtcaaaatccttgtgaaaatggcgttgttgctgaatgtatgctggaaacaccttgaactttgtagtgaattctttagtgtgatgcttcatttgagctgatgaagcattagatctcagtgaagatggatcatttctagtctccactacatctcatagacaaagccctcaaacaagatttcatcctaacatatcaaaacccataattttcttttgtagaaaaggtgtgggaatcaaaaaattgctagaagtcatgaaatctctcaggtgtttgcttagaggtctttcatctttgtaggaaaggatatctgatgtgttgctttcacacagagttcctcaaagatcataaaagccttgatatcctttattcaatatggtatagccgagagcacatatgtagtaaactaatagcagaactgagtttcagtagaaatgtaacatactactactaattttcactgacagacttctggcttttatctcctaaaagtttgaattgttctagtactagcagctactattccttaaacaccatgaaccatgctttactttttcttacatatattctttaattttcatctaacaaccattaccaagatttcaattacttaattgacatggctaaacaaaatatataaatctcttatgagttgcaatcatctaacttatatctaaaaagaaatttcaagtctcaactaacatcgcaataaacctctaagtgtatatggtgctgtgcgatttatattagtataataatgaagattcagcttgtaacatactctaaactaaaaccctggacatcctcactattaacttgtgctggttgtgtagtttgttattctctagaaaagaaaaggttattgttgcatctttaattagtaagttgtttaatgtatttcaaatttctaacacgttctattttgataatatatagagctagcatcaaattttttatcacaatgattctcaacagagaaactacaccacttctttacatggaactgtggtgccgttagctgtttatataaatttcactttctttcctattgctttggaatgctatccttctctttttcggctctcctatattctattagtaaatcttcttcttcttttggaggggtagggaggacgttggctggatgggtaattaatgattgtgctgaaatttgtctttcatgtttcaggcctaactactgttgccaaactgattgg

SEQ ID NO: 6311 - DNA, 1403 bp, Ricinus communis
  Intron number 1 from transcript 30178.m000864 (locus 30178 .t000026) derived from phytozome v7.0 (chr-ID 30178; pos 1 86161 to 187563)
gtcgtagaagtgtgcttttatctcaaactccagtgagtgcctttggaatataaaataactaaaaaggaaaaataattccttttacaagtgctatctgcttattttatataaagtttaaattagctataccttctaatgatcatgctatttttgtttatcaagttttcatttagtcattcttcactaacttgaaacatctgtatgcataatgcaaatgaattaggaggtttaatattgttggttaagattttcaaatgcgcgtatcttctctacattatcataataaaacctgctgtataattttggtttcttgtttttcctcctggatgtgttaatttacttgaatgctttattctcaactgggtaaacggtctgttttccatctgtatgtcagaaagttttctttgtctctgtgcctactctttttttggtcattacctctggcaaaacatcatgctagttagaacacattgcttacccttagatttacttccaaaaagttatatggactctgatgatccatgcacagctattagaaacttatttcattgcactaggtcaatgagataagaaaaattctgataaatcattgattcgtctggtgtctaaatatatgatgattcatttagaaatttactagattgaaattttatgacgttaaagtttttttttaaatgttgtgagtttcataacatacttcatatctgaatgtgagaatttgaggtttgtagtcaaattttagatgaacattatcatgtaattaggttgttcagatgattcttcttccctgttgcctgcctgtcatttttcttcttgttaatgtattctgttaaccatcaaatgaagttaagtaccctgttaatgtcctttttttcccttggatttgttgaaacattttttagatgctagtcatgcctatcttttattcacataagattgggacattaaggttaagttttattctggttgattgtactaattctcttcttgcacatggttagaatttgaagtggttagaatatgaaatattgtgcactcatttcatggtcttttgagcaagtacagatttaacagatggaattgcaaccataagactatatccaccagcaaataagaagtacaattctatggacaaggtgccccggtagcctaggagttgtcaatttagagaaactacttgttctggacatatcaattagtttcttacataatgttagaaatgctcgtggactccaattaatttatttttatcttcttgtgcttattattggaaccaatatggcatttgtttggattcattatggcatatttattcttggttcttgaagtggagaaaaagttaattttgattttctaaatattataatgtttaccatgtgtataattcttctatattttgtagg

SEQ ID NO: 6312 - DNA, 6971 bp, Ricinus communis
  Intron number 11 from transcript 30009.m000828 (locus 3000 9.t000008) derived from phytozome v7.0 (chr-ID 30009; pos 606911 to 613881)
tttttgcattaggggagcgcattaatatattgaaggtttttctctttcccatctggttctgaaacatgatttttctagttatttgatctattcacaattgaaattttgattacaatgttttggtcattgaccgctaatgcttttatggactcttatttctaaaagtttctttatgctagttttaacctctgttattcttgtttaggttcttcatttctttcagtgaatcctgcattgttctttgagtcattcctgtttatacggaaaaactttcatgaagaatagatcatgttgtgctaacatttgggtcatttgtattagagctttagttcttaagatcctagtctagtagagttaacactttgataatgagcaactttgaagtatactgcagactagtattatatatgttggaggatagttgatcgaccgcttgaataagaggactatactagctcagttaccttattacatttttcagatcaatttgaataatggcacatgctttatctatttactagagagttgggattggacatttaattagtgaggaagaactttaagtcattcttcttgattcagctctgcatttgatctaggcatctatgagatggagtttatgtcatgaagtagcttctcctgttacctatagagaggtaatcaaatatctagtcataatatatatataagtgcaaagggagggggacaaataaatttactaaaatgttcataagttattctattagaattgattaatatcgtcatttactaattgcattaattatttattattaattaaaaatacttatttgtaggttagcaatcttttaattagaatcataattctattagacttgtacaattaaaagactaataatttatacgagagaaataaaaaatattttaaattaagagttttgtctttatatggaagtttgtattaaaacaacacaaagagtccatatggtttcacgtcaatatcttagtattggttcattttgtatttgttaatatgatcttattacccatttctaagcattatgaatgttctccaagtatatattagaaaaattaaaagtacatgttttaaatttggagtcatcttttaataagagttttttaaagaaaacttaatactttaagaaattacaataaaaactataaattactatattctaaataataataataatctataaactataaatttttataattataaaaatgatagttaattaatatatattttaatatcatattattttaatttagatataagtgtatttttatcttacatttttattttattttatagtgtttaattttaaattttataattatttaattttaattatatgaataataacgagttcaattttttaagattcacgtgcaatggacatgcataaaaaaactagtcatcttaaataaaagaaactagcacttttaagtggtcatgtcctttggtgcaccttgtgtacatagttgatgtaccatctggtgttgatattttcatcaataaactgtttcttgtcaaaatgttttgttgtcatacagaaatgtggaattattggttgattcttgagtattgtaatttgttctcttctacatcactacaaagttgatggaggctttgttctttttttttttttttgtgaaattggttttgcacaattattctctgcaagctgagttgccattgtcacataggcaagtcatacacgaaatatgaaacctttataagaattttctgtgggcattttgagactctgctatcttaacaattgggggagacttaaattgatattctaaagaggtgatactggccttattatatcctactttgttgaagtatgggatgctcatttcttgacatctctaatattcgtctacttgtttaagttaataaaaaagaatgggatgtcttagttgctgaaatattcaaccttctttgtctctcctttttcagaaatttgatactcgaatttaattgtgcaaaggagatgaaggaaggggagagtagtgtgcaacctttcttttttatttttgtcaaagggctaatattatatgttaagtgctaggtgttaagaattgatatatgttaagtgctaggtgttaaggattgataaggaaaacgtacaaagcacaatagaaacaataacaaaaaattttcaattccgacaaatgatttcattgattaaagtaaccataacaacactgaaaactagactctcatattaagtgagaagaattttatgtgtagtattcatctaatataggaattcaaatcaactaatgattcctaattaaatccctaattattctcctattttgtatagttgtacattcctatttaatataaaatagctataacactccctcaagctggagcatagatattgatcatgcccagcttgttataaagataatcaaccctaaccctattcagggcctttgtgatgatatctcccaactattctcctgttttatgtatcctgtagaaaccaatctttgctgaattttttcacgaaagaaattacagtaatctcaatatgcttggttcgttcataaaagactggattagatgcaatatgaactgcagcttggttgtcacaccataacttggccgatattaagatcttaagacccacttcagtaaggagctgatatatccacattatctcacaaacagacttggccatggccctatgttctgattctacctcgaatatgagacaacatcttgcttcttgcttttttgtaaaaccaaatttcctccaacaaatacacaatagcctgaagtagattttcgattttccttgcaacatgcctagtcaacatctgaaaagcattgaatcctagtatgactgtagttgctatataggattcctcgcccaggtgctcctttcaaatagcacaaattttctgcagctttccaatgattgacagttcaagaagacatatactaacttaccacgctgatagaatagacaatatctgaatgagtgacagtaagatagtttaactttccaactgatcttctatatctctcaagatgtttcaaatacttgaccatcttttgcaagttaggaaccactggagtgctgcatggcttagcccctaattttcctatctcaaacaataattcaaacacatacttcatttgagttaagatatcccattcttactccttgttacttcaacacctaaaaagtactttagagcccctaaatcctttctatgaaattgaacatgaagaaaagatttgagtaatgaaatgccaatggtatcactcccaatagtgacaatgtcatcaacataaacaaccaataagatgataccagctacggactgcttgtagaaaacataatgatctgatttacttttctttatgccaaacttctcaataacttgactaaacttcccaaaccaggcccgaggattttgtttcaatccatactaaaatttatgaagacaaactttcctatactccccttgagcaacaaagtcaggtggttgctccatacaaacttcctcctgaaggacactatgaagaaatgtattcttgatgtctaattaatgaagaggctagttatatgtggttgctagagaaatgaataatctaacagaagtaagtttagtaacagggaaaaggtatcagaataatcaacttcatatgtctgagtatatcccttagcaacaagtcgagcctttaacttagtaacagttacatcagaattgactttaattgcaaatactcatttacatcaaatagcctttctacctgcaggtaagtttactagggtccaagttccattttcatctaaggcattcatctcttcaatcatagtattatgccatccaggatgaggtagagctttataaatagttttaggaataaaaacataatcaagagaagcaataaaagaacaagaggaaggtgacaaatggttacatgacataaaataggatactggataactgcattgacgtttacctttacgaaggcctaataagaagatcatcactagaactgggagccgaatctgatgacaaaggacctggtgcaagacatggagtaggaggactaaggataggagcaggaacaagatcaagaggttgttgatgacgagaataaacttgtattataggaggcttaactggagcaataacagtatagattaataaatcatcatcattcccttgacgaacatacctgaagatgaagcaatggtgtttgttagagaaaggtagcatcaactgacacaaggtattaattaagactaggacaataacatctataacctttttgcacatgagaatatctaagaaagatccatttgagagactttggggcaagttttgtaacctgaggtcgaacatcccgaacaaaagaagtataatcaaatatcctaggttcaatagaaataatgacttgttaggaaagagagcatgaaaggagtcttactagaaaggacagaggacatataattaatcaaaaaacaagtcgcagaaactgcatcggcccaaaaatgtttagggacttgcatttgaaataacaaagctttagcagtttcaagatgtatatattttcttttagcaatcccattctgagatggtgtatctacacaagaagtttgatgaataatgccacgttgaactatataattttagaagcattctgattagtattccttagcattattacttgacaaaagtttgaacaggcaaatcaaattgtgtttgatttcagcacaaaaagcaatagtgagagaacaattttgaatgatttctcatcagatataaccatgtaatttgagaataatcatcaacaaaggtaacaaaatacttaaacccagttttagacacaactggacaaggaacccaaacattcgaacggactaactcaaaaggagcactaactcatttgttgactgtaggactagaactctaacgatggtgtttagtaaattgacaagactcacaatctaatgaagacagactagaaaactgaggacaaagtgtctttaatatatgtaacaagggatgatccaaccgaaaatgtgcttcaaatggggtcacaactctaaaacaagcaatagactttggtattgtgtatcaagaatttaaaggcctccagactcatgtcctttatcaataataatcttcttcgatcataagatcctgaaatagatagaaattaagaaagaatgagatacaacggttaagagaatgagtaattttactgatagagactagattgaaagacaaatcaggtaaatttagaacagactacaaaggtattgagagtgttggaataattgtgacagaccctagaacacgagatgtggacccatgtgctaaagtaactgtagtgctaggagtatgttatttaaaggaagaaaatagattagagttacttgtcatgtaggattacctaacttctgcttcttcgttatgtaagcctgatgacaagactaggacaagtccggtagagtgaatgtactttcgagttctgattttgtgttttcgatggtttctaagggctttttaggggttctttcggttttgaaggtccattccaaaggattctagtgttcttaggtgcctttcgaggctttcttattgcggctgataagagcattgcacggttgaacttatagagaggtttctatacaaagtactctactaaaagtttcttgcaaagaggatatttcagaacttgcctgactgattcaattctcatataaaataatgcattggactatagacacttgggtaaattctatactgactactcaaaggagtcatgtttaataaacttgttcttataacaaacacccatgtgttttgtcttagtatctccataccttaatcttataagaccgattacttactttacaaggaagtgataacaacattgtagtggtcttgagcgtttgatcaatatttaatgatctttactcttgattaaacgtcaaccatgaactagttttaggaatgatagtaatgagaatgtcaccattataaactcattttataatatctcttatgttgtgtttacattcaatggagttcatctccaatagtttcgataataccaaagtaaatcaaaccattgggagttaaacaatgcctttaatatgattgtatatcgttaatgtgatgtataaattgacatagatatccaaacaactttttgtcttaagggcatactctaacactaggttctttaatgtgtcttctcatgtgaaatgagtgctaacacatgcaactctgatcagagatttgacagaaaagtctagattcagaaacaaaatgaaatcaagggctgataaataatccccttgttagaagctgagaattttgcttaaggccttaaaaaaagagctctagttttaaataaaaaatgcttaagattattccttgtatggttggtatatctttcattataagcaatcattatatattagagagagatctgtatctggaaattttactgctatgaccttgctcacttgtcatcaagttcttatcctttttaatcatcttctcccttacatctatttattatattattttgctcagtcaatacattgttctagttgaaattaataagcattgtgaaatagtagcagacgcatttggcatacaaatcttagtttccagttattgatatcaaaggaatttgataaagtaatgttttggatttggtaatattttctgtttctttgggttagctattttcattttgattatttcgtactatttacaatgacgagaaatatgtatgggatgccgaaatttcgaactttgtgtcttatagttccctataggataattatcttgcatatgaaaaaattttgagctaacttttggattgttacatttgtgttaggcaagttgcatttgttattcaactttaattggtttcaggaaattgatcagccagcattgattccacatatagc

SEQ ID NO: 6313 - DNA, 2162 bp, Ricinus communis
  Intron number 5 from transcript 29933.m001462 (locus 29933 .t000084) derived from phytozome v7.0 (chr-ID 29933; pos 4 39085 to 441246)
cctctcagcagagccggaagaaatgttcggttaacaatatgacaatcgcaattattgatgatcgataaataacaagttcatggtgcaggtatttctttgttacacgtataatataactagaatatgaatgtaaaacagatttgttgacactgtcgaaaggaacgtaaagcttatttgtcaaggagttttgtttctaagagctgtatttatttcttttcctatttcccctttttcttctgaagtattgtgtgcacctcaatcacctagagttgctgatatggaatggctagaccaaaaataccttattattgtccaaggcggttgaacaattacttgtaaaggggttttcctttcttttttacaagttgacagcaacaaaggcttcccaaacaatttgagaaagataaaaagatctatcttgctcaaatcagaggaccaaaaattgggggcaaaattagttattgtattcttaggtatttatcccacattccctgctcgctggatctaacctcttgctctatgaaaatatcgaattctccatgttttgctgattaatgcagctgctagctaatagctgataaattaaattatttgataaaattttattaatagttgttgttaatatattaaatgaccattgagagtataatttactttttttgttatattatattcaatataatctataaaaattaaaaatattatattaatttttttaactcaaatgtaattattattaaaaatatttataaaatttgtaaaaatttaaaattaaattctaataataaaatttcaaatactacaaataataaatattaaaattatttaactattaaaaataatttaaaataataataaattattataaaatataaaaatttaattagatgagaacaacttaaaataagttattattactaaattttaataaaaataataatgttcaaataaataaaaaaaataagatcagccatcagttgataagaaaaaactataaaatagagttaatacaattagcagctgattgagactaaatcaactatcagctgtcgtttcttaagtttttatcaaacactttaatttaattattcagtaagaaacagctatcagcggcatcaaatctttaaatcaaacactttctaaaaaataataaagaaaaaaaataacttatcaatcgagtaatccttaaagtataatttttatggcctaattaccaattagattctaaattttacactttttaataattttatttaattattttaaaattttaaaataatcatctatagtttcaatttattttcaaaaacactttttagcaataatttttataattttataataaaaatatgacatggtaagtcaattatacttataaaaattagtaaatcagtacaaatttgttaaattagatataaaatgtgtgaaaagatgcatatatgtgagtttttaataaccatattattagcctaggacaaactataatcatttattcttttagtatgtaatattgacttcctacgttattttttttttactgtaagattttaaaatatatcaaaaaaattgtgtataaaatcaaaacaacaatataaaaatttgttaataactggataaaattgttaaatggtgcaaattttaaaatttaattaataattaaataatttttttaattgaaaaattacataattacttataaattatactttactatttaagaaaaagttatttaatttaatatcttttctttttcagtattgaaaagaagtaataaaaagtaaaagaaataataaaaaaaggtgagaagaagaaatatataaattataaagagtaaagatattttaatttaaaatgtataaaacaaattgaattatcacttctaatccataaaatttgtaaggagcattatatttagttaggttaaatattttgaattataataaaacttaaagattaagaacacttgattataatttttctataaagtaaaacctaataatctaatatcaaatataaaatgtgatgatagaaagaacaaataaaaagatatggagaaaacaaggaaaagaagtaaaaaggagaaacgaagtaaaagaggtcaaccctggatctttcttttcgtttgttgagattatatatacaaattactaaataaatccttt

SEQ ID NO: 6314 - DNA, 1698 bp, Ricinus communis
  Intron number 7 from transcript 28515.m000319 (locus 28515 .t000013) derived from phytozome v7.0 (chr-ID 28515; pos 1 63518 to 165215)
gtggtaagtttggaatacgactgaaatctgatgacaagtatttactacattatctttcccatcttgattagtatacttcaaggttctttttttgctgcaaagtaatttcatgatgatcattttctggattttctggtgtttggctgcataagaaaattggttagttgaaaatgtttcctggtcagagggataagcaagcaattttctaggaaagaactgacttccagttctcagtacaagaatcatgtgcattagtttagcgttcatcatggactggcacgggcagtcactaagttgccactggccgttgcttcttgttggcaactaccttctgtaatttttctcttcaattcaggttgattaaattcatgtagagaattatggagtcctcgtaggcttaaatattttcatggttttctgcagcaatagaaaccagaaagtaattttcagcattatcatcaaatagtgaaataatccatttctttaaagcaagtacttgccagtgactaatcatgttcagaaaagtgagactgtctgatacagttaatactgattctgatatcaaaatcatgattctgttatttaaaaccctggtaaggttgaggaacaaggtgataaaactataataattggctacatttgataattgtcacagatgtttggctctttttggtctttaggccgtcaaaataatatgcctgcatttagagctgcaatatgcaaacatataattggagttagcaggaattgtacatgggctgctggaactttccagagtcccatgcagacagggcttaaaaaagtatttctgccttttagcatgtaaacctacattttgttcaggcctgcttgaggtgttatgggaatatattttgtgagattgtgtttgcagtatctagagttaagggttcgagggatatgactgaagatgttctggagttcttacttctgactagagctcagtcttgtagttttggacaaattagtagaataagtccaacctcgatccttgacttgagtaattttcaaaattgagtgtatattgctgtagattcaataagcatttttggattatacactatatatagagccagtatcctgcagactaaccttgaggtgtgaaattatatacagtaaaacctctctatagttatactctatataggaatagcctctacatagtgataaaaaattatggtcccaatttgagccaattataaataggaataaattctctattgtcataagttatatatgttttaagtcccgctttaaaaaaatatcttttatatatatatatatatatatatatatatatatatatatatatatatatatatagtatgaagagatatttacatatcttatctttagtttctgatcatttcaccaaaaatattaaatatgaagtccaaaaaaaaactttagtactcaaacctccattaaattataatctcctcatacttataacttttatttgttcgcaagtgcatgactatagagaggttttactgtaacttctttgagtataggcctatgtacttgatgatttaccaaaattataattgttgtatgctgacatttcttgtggaaaaaagtttgtggcagctatttgtatcactattgagttaaaatcaattaaattaaactggtcatgttctagggtgagctagcaatagcatttggtgagttactgcg

SEQ ID NO: 6315 - DNA, 1249 bp, Ricinus communis
  Intron number 3 from transcript 29747.m001052 (locus 29747 .t000009) derived from phytozome v7.0 (chr-ID 29747; pos 5 5114 to 56362 reverse strand)
actagtggggaattaactcatcaattcttgcaaaggttagcactatatgtttatttctttttttgaagaaaagattcatattgttagttactaaaacatatgcttttttttattacttactttaggattaaacggcatgtgttatataatatgtgatagaacttatacactgccaaggatattactagttgaatcagtatatgagcattgtttcaatgcacaaatgttttaattgttattttagaagaaagtgtatttaattgtttctggttgctttgttctgttctgttattttgtcgcagctagtctctcttccttgtattggtttccaattttatcttagaaacatttatccatccacattgttgtggaaatgcataagttacgaataaaggataatcttttgggtttttgttctagtagatcaaagaagtctggttaaaatgtgcctatttgattatactgcagttgaaagttgacagaattagcaattgcactctgttgcatcgacgaatctaactttactggacattgttttggaaagaattaagtcgttttatgtggtttgttttaataatgtttctaccttgacttttctggatctctagagtacatggcagttttatgctatatggttgaattagtttatgcataatactatcagtcttagcatacttcgcgaccaatttcaatcgctaggttttaaatgtgcattccattttgtgttatttatatccttcatgtggatgtcatgattcaaatgcttagatataatagatgctaaatccaagtatttggtcaggatattcctgtttcttttgtcattcagttctatcttgggctgtgcttgttatagatttatagacagcttctttccaatttcgcttaccctaggagtatgtctcttttcctttacttgcggacaggagaattatatttgtgattttatcatcacacttgcaatatgttcaaagacattactgcttctcatgaatgtctgtgttgtatattttattttagtgtgtgcttttggaaaattactgatgttttgggtcaactcactaggtaaagtatcattgaccattcctcatcatgagtagaagtagtagttatttattctggaaatacttctatctattttttctccttttgatttaattttgttcgaactcttagtgttgcattttgcatttttttaacttcttccctaattgtattgtatccctcaattgtttctggattaggagag

SEQ ID NO: 6316 - DNA, 11492 bp, Ricinus communis
  Intron number 7 from transcript 29607.m000232 (locus 29607 .t000001) derived from phytozome v7.0 (chr-ID 29607; pos 1 6597 to 28088)
ttggaacactgactgctgttccaatacatcatttggtacgtgtttgactgcttggccatgttgtttaatatgaattgcccattgaaaaattaatcgttactttagattgttagctggagagtgcattatctccattatacactgtggaatatatagccttagacagatcatatttggttctagaggctgtatatgtattttcatgaggaagggtagaggcaacattgcacctgagcaaatattactgttgtggaagctttgagttagaattattataaatcaatagcatatatatttggaaaaactgttcagtattaagaatctttgaaatcttgacaaaattaatctcttgccaatgaacaagcaagatcaccaaggtctactaagaaaatttaaattgtcaaatctgcagattaaaatacaagaatttgtggagataataatttgggaggtaagagttgatgaaagccacatatctgtttcacaaatgagaatgccaatatataggcttacaacttgaaatgcaagagtaaacagagaaagaaaggaattgtttatagtgatatgtattgaggaatttacatgtatatatacaagctagtttgaccaaaataggaaggtcaactactgattacatccctataattaagctatacgatttttttatgattacgtataatctatactgatatgtataggttgtaacactccctctcaatatttagcataggtgttaatcatgcccccccagtttgttacaaaggtaattaacccgaactccatttagagtatttgtgaaaatatctcccaattgttccccagtcttcacataccctgtggacatcaaattttgctgtattcttttatgagcgaaatggcaatcaatttaagatgtttaattcgctcatgaaacatgagattagatgcaatatgaagagcaacatggtattacaccataacttcgctggtattgaagtcttaagtcccactttaatcaggagctaatatatgcatattatttcacacacaaactgtaccatggccctacattctgcttccgcactggatcgagatagatgttgcttgttactcttccaggtgactaggtttcctccaacaaaaacacaatagcctgatgttgatattctatccaccttggaacctactcagtctgcatctgcaaaacattcaatatatgtgtgttcatgatttgcatctaagataccacgtcttagtgctcatttcaagtaacacaaattctaaagttgcctaatgatgaattgttggagtaaacggattcaccatactgatagaatatgcaatatctggacaagttactgtaagatatttcaacttcccaaccagtcttctgtatttctcaggatcctcaaacaattcaccattttttgtatattgtacatttggaatcattagagcattggctttgtccttaattttctcatctcaattaataaatcaagcacatatttcctctgagataagaagataccattcttactcataacctcaaggcccaagaattactttaacatccctaagtatttcgtgtgaaattgagaatgaaaaaaagacttgaagagatgagattcctatagtatcactcctagtaatgataatgtcatccacacatacaaataaaagaatgatgccagcttcagatggtttgtagaaaacataggctcagaaaatattcaagaaaaagtgtcttgattgatttttgaatgagtacaatgtcctctttaaataaggagaggaataataggaaaaaggaaaaaataaatgtaatatggacaactgcctatcttttctaatttatagagttgactatctatatttacatagaatacaaatcctagcatatatctgtaatatggctgaatcaaagccaaatctctgattaacagactttccaacatagtgattagacttacttttcatcatgccaaacttttcaatagtttgactaaatttgctaaattaagcacgaggactttgtctcaaaccatatagagaattgcaaagactacaaactttcccatactctcactaagcaacaaatccgggaggttgctccatgtacacatcctcctaaagctcattgtaaagaaaaacattcttgatatttagctgatgtaaattatgagttgcttgtatagaaataaataacttgacaaatatcaattttgcaacaggagaaaatgtgtccgaagaattcaccctataggtctgagcatatcccttggtaacaagacgagctttttagtcgagcaatagatctattaggattgactttaactgtaaacacccgtgtatacccaatgtcctttctccttgaaggtaaatcaaccaaagtccaaataccattgtcatctgaagcatacatctcctcaagtattgctttataccatctaggatgtgagagagcttcatgaacaatttttggaatagagatagaattcagggaggcaataaatgaacaagaagaaggtgacaaatgctgataagaaacaaaagaagaaacaagataagtatattgacgtttaattttgcatagagaaataggaagatcatcactggaaaccgaatcaaatgatagagttggtgcaggacatgaattgggaggatgctgttgtatggagtaaacctgatcaatgggaggcttgacataaattggtccagagatgggttcaaatgatatgatagtatgaactaacaaatcaacatcctctccctaacatattggaatagttgttagaaagtacagtgttccttccatgaaaataacatcagtagagataaggtttcttttaaaactacgacaataaaatctatatcctttttgaatataagaataaaccaaggaatatacacttttaaagatttgggatctagtttggtgatacgaggacggacatcccaaacagaacaagtactactaaatattttaggatcaataggaaataatgagttattagggaaaaaatactataaggagtttcaccatgaagaatatatgaaggcatacaattgatcagaaagcatgttgctgaaactgtgttagactaaaaaattttaggaacattcatttgaaatattaaggctcttgctgtttcaagcagtctattctttcgttctgctactccattttaagatggagtactaatgcaagaggtttgatgaaggatgccattctaaatcatataattttgaaaagataatggcacatattctttagcattatcaattcgcgaagtatggacaagaacattaaagtgactagaagtacttgtcatatggtctgtggcaccaaaattaatgacccatttgtaggatgaagaataagacttgcatttaatttacctgaatcagcaacagcaatggctagagtggatgaagattttagtgactcttagtactaagtgaaattggcaaattcatgtgcagagataagaactgacttcgcagatgcatcattagtagatgcaatatgggccaagtgattttcctgattcttgtattgaaacattctacaatcccatttcatataacctagtttatgacaataatgacacacaattcctcccgaatcatgtgctcaaggctccaaactatttgatccttctttggtgccactttggaatgtgactgcaactcatcattatttattataacaaaagataggttgtattgcttcttaatttacatgtattacattgtttatatatataggtacaaacatcacctaaataaagaaagaacataatcacagctatataagaaatctgcctaatgatttgcctaatctcctttaatgtagcctagaattcctatatttacagctaggtcaatatttcctattccaacactcccctcaagctggttgaaaaatatctcccattgacagcttgcttactagaaaatcaaattgtcttttcagtagtcctttggtaaaaatatcagctatttgttgagatgtaggaatataaggaaaacaaatcagtccactttcaatcttctctttgataaagtgcttgtcaacttcaacatgcttagtccgatcatgatgaactggattatgtgcaatggaacaagcagctttgttgtcacaatagactttcatggggagggaaataggtagttccaaatcttttagtaaccttttaatccacattgcttcgcaaattccatgtgcaagagatctgaattcagcttcagtagtactacgtgctacaacattttgttttttgctcctccaggaaacaagatttcctccaataaaagtgcaatactgtgatgttgaccttctatctgcagtgctacctacccaatcagcatcggtatagacttccacttgcaaatgaccagattttttaaacatcagtccttttccaggtgttccctttagatatctaagtatcctataggcagcttcaaagtgttcttggcctggtgagtgcataaattggctaatcatgcttactgcaaatgctatatcaggacgagtatgtgacagatatataagtctgcccactaaacgttgaaacctctccttttcagttatgtcctctggctttgcaggatttaatttgagattcacctccattggagtttcagctgctttgcaacctagaagacctgtttcatttagtagatcaaggatatatttcctttgattcacataaattccttctcgtgatcttgcgaactccatgcctagaaaatactttaatgcccctaggtctttgatctcaaaatcctgacttagctttttctttaaactagctaattcattctcatcatcatcaattaaaatcatatcatcaacatacacaaccaacactgctgttttaccttccttaaaacgtttataaaacatggtgtggtctgcttgactttgattgtatccatattttttcattgttttcccgaatcgttcaaaccatgctcttggggattgcttgaggccatataaagatttcttaaatctgcaaactttgtttttgccaatagatttttcaaatccaggaggtggactcatgaacacttcctcttctaaatcaccattgagaaaggcatttttcacatctagttggtgtagtggctaactgaaattaactgcgagagacaataaaacacgtttagagttaattttggctactggagcaaaggtttcttagtaatcgataccataagtttgagtaaaccctttagccaccagcctagccttgtatctctccacattgccttctgctttacattttacagtaaaaaccatttgcaaccaacaattttttgatctttggggagttctaccacttcccatgtcccattccttttcaacgcacccatttcttccattattgccatcctccaatttggatcatcaagtgcttcctgaatatttcttggaataaacagatttgagatttttgacacaaatgccatatgactcttggagagtttattataagataaatgatttgcaattggatgattagtacaagaacgggttccttttctaagtgtaatagagacatcaagatcacaatattcatgtgatttttgaggattatcaaaagaaccattgttttgaggagaatcttgagtacctgaattcggagtggattgactaggtgttgaggagatgatgagttctctaccttttttgtgatcttttctccttgtataaacaagaacctcacgctcattatttggaagtgtttctttctctgtcatagattcaatattgcttgacaaaatagaagttttatctttaaaaatatttggcgtagaagccacaattttgggtaaagcaatgctgtcccatttattttcttcctcgaagtgctccccctgaagaaaattccttttgaaataaggctgatttcaagaaagataacatccataaaaattatgacctttttattgtggggattaaaaaacttataacccttcttatttgatgcataaccaacaaaaacacatttctcagcccttggatctagtttggattgatccttgttgctagataaatggatataggctgtgcaaccaaaaattttaagaggtaaattggatgaaagacgatgttgtgggaagtaacgttgaaaacattcaaggggagtagtaaaatcaagaacacgggtaggcattctattaatcaaatatgatacagttaaaatagcttctccccataaatatttaggtacatacatagagaacatattagcacgagccacttccaataagtgtctatttttgcgctcagctataccattttgttggggcgtatcaatacaagtagatttatgttgactacccttgtcttttaaaaacttctcaagtgttttattgaaatactctataccattatcagtatgtagggtactgattttagtttgaaattgattttcaatcatagcgtaaaaattttgaaagattgtcttaacatcagacttgctagtcactaaaaaaacccaacacaattgagtatgatcatcaataaatgtgacaaaccattatttttccgaataagtatggatccgtgagggaccccacacatcactgtgaattaaataaaaaggcctcgaggattgataaggctttgaatgataaatgtgcttatgactttttgataaaatgcaatattcacaatgaaaacaagaacaatctattcctttaaataaagtaggaaacaaccttttaaggtagaaaaaactaggatgccctaatctataatgccaaagcatgattttatctttaacagagatagaactaacactacttagtccatgaggtttttcatctttggaggcttcagcttcaaaatggtagagcccatctatcatcctagcactgccaatcttcctcctcgaattctggtcctgaaacacacaataggagtcacaaaaaatgacacggcaattggaatctttagacagtttactgacagataatagattacacgcaagtttaggtacatggaggacaaatttaagagtcaaggtttttgacaaactgattgtacctttaccagcaattggtgtgtaagaaccatctgctatacgaattttttcatgaccagaacaaggaatataagtatgaaataaacttgagacacttgtcatatggtcagatgctcccgaatctatgatccatggagcagttcgactcacacaggataaagcatttaaattcctacctgtttgtgccaaggaagcattaggagtaccaaatgatccagaattagatttcagcagctttagtatttgatcaacttgttgtggagtgaaggggacaacttcaacttcattcgcaaaaggagtccgattgaacttgccttcatgttttcccttccagttagctggttttacatgaagtttccatcagttttcacgtgtatgctttggtttgttgcagtggtcacaccaaacacggggcttttcatcaaatttcttcacttttcttgcataggattcagctgttgctaatgcaaaattttcagtgctgctgtttgagcctttttccccaacataaccaacttgcgactttcctcacgtcgaacctcaacaaatatctcgctaatagatggaaggggctgtctcccaatgattcgccctctcacttcatcaaactccacattaagtcccatgaggaatttgaaaatgcgatcatcttctaccttttttttgtaatgattgcaatcattagtggatttccattcataaaagttgaacaagtccaagtcttgctatagacgtttcagagaattaaaatatttggtgacattatcttcaccttgatggatttctcctagttttagcatgatttcatatatctgagactgatttccgagatctgaatacattaaattgacattatcccaaagttcctttactgtgtgataacacatgtaattggaatttatgtcttcctccatagagttgattagccatgtcataaccatggaattttctgcatcccaagaagaataggatgggtcatccatgtctggttccttcttctcaccagttaagtatccattctttcctctacctcgaatatacatacgcatagactgagactagtgtagaaaattctctccattcagcctaacagtagttatttggactgaatgagaatcagatgtggctaagattttttgttgattggatgaagtaggtatttcagaagtaggattagtgactgacccatcaaatggagttgcaggcatggtggaattgcagtggctagatttttctttgaggaggctagggttttttttttcaaatggctctgataccatgcaaataaatagaaaagataggttgtattgcttcttaatttacatgcattacattgtatatatatataggtacaaacatcacctaaataaagaaagaacataattacagctatataagaaatctgcctaatgatttgcctaatctcctttaatgtagcctagaatccctatatttatagctaggtcaatatttcctattccaacaagatgcaatatgggccaagtgattttcctgattcttgtactgaaacattctacaatcccatttgatataacctagtttatgacaataatgacacacaattcctccagaatcatgtgctcaaggctccaaattgtttgatccttctttggtgccacttttggaatgtgactgtccaactcatcattatttattctaacaaaagcactactatattgaacatatggagtactttctatgctacgcaccctactgaatacttattgtaaagaggaaatctcaaaactggagaatgtgagacatacatttcaaattcaagaggcaggcaagctaaaatactcataacaaccatttgcttcctttgactttgctaaaccttcataataggactaaatggcagcagcaacatattaagcttctcatatgaaatccataaaataacttgtaagagacttgtcatgtttttcagcatgataaaaagctttgcacacctcataagtacggaaaatattcccttttctgaaatacaagaaatctagataatccattaaatctttaacaaattcacagtgattgattataccaattacctcactgtcaatagaatttcgtatttgcaggaacaatcgagcatcctcccttagccacacctgtttggagtcatctttcggtggttcatcaatcatatgatcatcctcgtcaatagaaaagattttgcctcgcagcctgtaggaagtaagctatgataccattgtcgaaatcttgacaaaattaatattttttcaataaacaagcaagatcaccaaggtttactaagaaaatgtatactgtcaaatctgcagatatcaaaaaacaagaacttgtagggagaaatagataatttgagagttaagaactgaagaaagtcacatgtctgttgcacaaatgagaatgcctatttataggcttacagccaaactgaaattgctaaaattcttagttactatcagatttcattagcactatttctactaactaaaaatcagaaaagtcatggagtaagaatttaatatgaacgataacagagaccaagcctaacttagacttttcaaattttaaaggcaaactctcaacattgaatctattctatttacttagttgtaacttatttgaaaagatataagttgattcttaagaatcaatatttatatatttatatgtatatatatatatatatatatattattttatattatattttcttacattcctatgcatatgttaatggttgcaagagtcttacttttctagctcaacaaaaaaaaacattttaaatagtatctaagatgaataaggcaacaaaattgaattaattgcttggctaaatgcaagggttactttaatgatcaaaagaggtagctacaatccaaaaaggtaagtgtagaaataccatgagttggcgagtgttgacttgagttcatatagtggccgtaaatgtgaggttggaacctcacttgcgtaaaaccaactgcatttgttaaggcttaatcttttccacttttaattctctatacctagtcctactcttgaattccctaggtcaacaaagggtctaagccagattccatgtctctacttatattgcatgcttttcccactctatttccttataacattccctatgtagagatatactctccaatatttcccctttaagtgcaattgggcttagagcagttttacttatccaacatggacccatagtaaatacaccaatccctactcttaaaggtccaaggtcaaaaaaggatcttgtctcctttgctagccctaactcgaagttttcaaacatgagccttggatcattcaactattgggccattctttagctctggtaccatacaaggaaaatgggttgaatatataacagttggacattaatctaacccaaaagctcgagcttttaggtggaagtatctaaatggtatttaagcccacttattcttgtatagattaccaacatgaggaattattctcttaactcgatttcttgacatatgttaggcccaaatagcatgtggcacaatgacttgattagcacatataatggaattagatgatggatccaagcacggcgaagagacatttaaattgattacgattgtgtagaatggagtgccagtcctagattagtagctccaataccatgcagcatttcagtaggtgatagagtcttgggccaaactcacacaatggtggtatatgtggagtcggaatcttatttgcacataaaaccaataggtttgtcctatggcccaatttatattccactatagtttcttatattttctccattgtagaattatattctccaatattaagttccaattattaatatgctaagagcaattataaaggcaacattgtcctagagaacacatggttggagttaaattaacaaagtcaaagaaagatggattctttttaatgaagccaaaactcttccaataattccactagcatgcagttttcttcgaaattctgccactatttagaattgagtacttatgtgtttcattgttggatatgacctctgaataattaagccatccatgtaataaatagtaaattagcatttgaataatgtaaaaaaaatgaatgatgtggaaaacagtgagaaaagttcaattaaagcctacgcgtgccgcacgataattattatatatttttcttaattcaacaaaagtaccaataacaactaatagttcctcaaaagtttgagcaatctgtcgatttttagattagattgagtgaagcaaaatgttggtaattgttatatattttaagctttaccctctaagatgcctatttaccaggacttatgatcaagtaggagcattattttgtatttcaagcagaatacatctgattaattttctgatgcttcttcttttatgtgcctacaggatcgttcgcttgactttc

SEQ ID NO: 6317 - DNA, 613 bp, Ricinus communis
  Intron number 3 from transcript 30078.m002298 (locus 30078 .t000091) derived from phytozome v7.0 (chr-ID 30078; pos 5 78083 to 578695)
catacttgaaacgtgagtttattctgaacacttcatcttcaagcaatactttaagatggccagtcattgtatgatacatgtgctttgtctgccttattgtcctcaattttactgactttgctgtttatgtgcatatttgcacaaacactcaccaaaagtatttacatgttttattataagtatatgcatctattctttaattgctgtatctgatttttaacataaatgtctctgggttttctcatccatgagatgatactttggaagattttatgattttcaaatttttctactacttctattttaactagagttagtttctatgaagaatgaaactgtttagcatttgtctgtgagtagataccctttaatgcatgcatctggaagtttgagttgctgaataaatagttttgggatctatctgtccaaaagtttttgccaattctttagaaatgttgtctgtctagttcatactcagtgtcttggagttatggtgtagatcccttatggtttatagtcgaattctgcttcactcattttgtgtgcattacactgagcctgttcattgatatctgcagcttatttcctggaggcatatcgcccagtcaggaag

SEQ ID NO: 6318 - DNA, 824 bp, Ricinus communis
  Intron number 1 from transcript 30154.m001150 (locus 30154 .t000034) derived from phytozome v7.0 (chr-ID 30154; pos 8 52521 to 853344 reverse strand)
ctttgattttgatctctggttccactgtacaccaggtatattcaggaatctgcaatttttattttgtttttgttttttatgctggtagatttttatttttatttttgttaattttaatgtattaatataaatatcctcatatttggatcgccgtaatttactgttcgttgaatctgaaatcttgatgaaaaatgtgatcttttttttttatttgctgaaaataattgttgtttgtttattttcaattgatctctctgtttttggtgattaatatattatgctgttgatcttttggattttagatacttgtggtgtttgtagatataatgtgacagaatttggagtgcaagagtgccattgagttaattttttttttttgagtttggttttcgatttggtggagctgaatgtgatatgggatagtgatgttttctctcttgtggtactgggaatctgaaagtagttggcaatacgaaacttgcactttgagaatgtttgttttgaatgactattgtttcttggactactacggaactgaacttgtcgatgatcacagttcaatcagaaaatgccatcactgattcgttgattgattattattttatttgaaattgaagatattgcgtcttatatatgaaatggagttcttttttatcttgaacatggtttaaaagtttaaatattcatgttccgaggaatgagaatggtgcgagaaaagagctgattgagcataaaacatgatacaccttcattttggttttttggcatgaattttggtggtttctggtttatttatttatgatttttgtaggtctcttcttcct

SEQ ID NO: 6319 - DNA, 916 bp, Ricinus communis
  Intron number 2 from transcript 27715.m000180 (locus 27715 .t000003) derived from phytozome v7.0 (chr-ID 27715; pos 3 6741 to 37656)
ctctggtaacactccttccatttacatttcatttcatgtacatataacaccatccaacacaaaaataatatatttattagtctatgttttcacttatatactaaaataaataaattcggtcattcgtgttctaatgaatctaaggatgagatataaaacatagcatcggggcaatagacacttgtgctcattgtctccaaaggttcattaatttttggagtaatatttacccaagtatgtaaactacagtaaataaaagaattatatatataattctttatattttaatattaaatgatgatacacattcaattatataaaattaataaatatatatcaatcatttatcagttttgtgtatatatagatatggctagcaaaaaaaagaaaattttgaattaattccttatatttaccattcaaagtccaagtttgcgccacctttagaatttcttttcttaacaatttcaatttgttcccacacttgaatcatataatctcttagtgatattttaatttagaattgactcaaaagtaattagtgattcataaattaaacttgttagataatagatttgcagaaccctctaatactgaattgaatcagtaggttgttccttgctttaaagctttgtttgcccccttctgtacctacaaaaataactaaactaaacttattgatttattctgatttgatgtaagtttgtagatttaatagttaaaattcaatagcattattgattaaaactaacgggtcttctacatattatatataataaaaaatcttgatctaatttaatttcttaaaataaaaattaaaactttttaaggtttaataaattccatctctatataagtctgttttgttgttgcatgggcagtttggagctgtggtacaaccaagggattatacttc

SEQ ID NO: 6320 - DNA, 10181 bp, Ricinus communis
  Intron number 4 from transcript 47284.m000040 (locus 47284 .t000001) derived from phytozome v7.0 (chr-ID 47284; pos 1 7125 to 27305)
ggtgcggcaaatttggtagtgtatgtggcattggctaggcgatactcttacaaaaatgtcaataggagtgtggctgtggctgattgctctggtgatgattgggaacgctcaatggcttaaactacccttttcattagtcctgtaaaaatcctatcatttaaaattagtgttatgctttgagttgcaattcctataaaaagttttaaggaaacatgtgttttattaaattgagtttaaaaaacttttggatgtctatattatccttaacttggcatttttatgggtttaagtgtcggtttgcctttcaacttataatttgctccaaaattaactttctttgacattttatccaacaaaatttaaaaatataagtaattactcccaatattagagattctgctgccacacatgaaaaggcaactgaaatacaatcacaatactaaaatattactttaatttatcttctctattttttatatttcctttctttcttcaagtactcacaaaatcaactcaaccaatttaatcattcaattaaacttgatccccttaaacccagtctctaccatttcttcatcttcatcatttaccatcacaattcgtccatatttatatcaccatcacaatccaacatcactaaacttttacaaactcgaacaaaatccaatcaaacatttagaaattttaaacccataacaaaaattaaaagtttttacttattaaaatatattagaattcacttactctctcacattcacacgtctttgttaccggttgtcacaattgatgttaatggcaacgatggaaacaatgatacaaatggcgatagcatttataatggaataaatattattaattgaatatttatttatttattttctttaaataattttataataattttaatattaaatataaaaataaaatttccatttcaataaagaaagaaataaaaagagtaatgctgaattcgcaaaaaaaaaaaaaaaaaaaaaaaagattagggaaccaaacgtaaatttataaaagtacacctttttttttcactctttcatctctctttctttctatttgtctctctctatctcttttttcttttttatcaaagctgaaacgtgtggccaagattgtttattggccacaagctcttttattcttcttaaataatttttatttcaacaatttatatttatattttattgaattttaatagactctttataatttatttttattttcataaatattaatagctatattttatttttcattttaaattttactgttaaaaaagtaaaaaatataaatataaattaattaagtgtataaaaattatagtgtattattaaataaaaaatagaaaataaaatttaatttctatatatataataaattaactctctattttatattttaaaaataaaaaaaatatgttaaatgtaattttatgatataactccttaaaataaagagtttgacattcatatcaaggatgcaataaaatgattatagttctcaattttttttttcaattagattgtattgaaaaagttatagttatctttttaaattctcatttcttttcccaattaaattgtattgaaaaagaaaatttctcaatggccccttcttaaagattgatgacaaatgttttaatgattttctttttgtatttgtaattttcagcattagataagaatgtagaattctgaaacctcatttgctttctcaatgctatctttataagaatatgaaaatatattgtatgaatttacgttactgaaaattctttagccgctgttatctccctcaggataagttatgacttgaagccaagaacacctgccatttcctgtctgtctcattacgtgcttgttttgagaataagaaacaaaaaaagagacaagatccaaacctctgattaaaaatgcggtcagcctggatcgaacacgcgaccttcagatcttcagtctgaagctctcccaactgagctatccccgcaaatcgaataagatgaagataaatttaaaatataaacaattgttagtgataagaaaagtaaaagatctcctgcaaaatgcggtgaacgtggatcgaacacgtgaccttcagatcttcagtctgacgctctcccaactgagctatccgttttcaaatttagaaagttatttttctttagcacattgtagtaggtactttttgggtacggtacgggaaagataatgtatctatacccatatacctaaaagtataaatggctgtatatatccgtattgaataacaaatattaaatcgtttcctactatatcataacatatattataattatatcattaataataatatacttaaaagtgcaaagagggacatgcaaattaacagaaaaaatattataattagtttattaaataaattgatttggtcttttactaattaaatataatttaataaaaaaatcatcagataattaccatttttattaactatctattttattttaaagattttatcatatgagtagataaataacaattattatacaataaaaaaatcgttggtaaaattcatcatgctaaattaaggtcggatctaaataataaatgcatcaattcaatttattaacaataaactaaaatttaaataaatatcttattttcctaaaatattttatcaatttgtcagattataaatatttatttttattctaaacttagtagttttttgctttctatcatatgacaataatgagtccaaatattgatattaagtttaattctaaaaattgaattctgttgagattttcaattattaactataattgaatttaattttagaagtataaagatataaaaggacataaatttttatgtattacatatatatttgtcctatttatagtgcatacttggataatcacaatttaatttaatttttttttctttttcttaatttctaataataaatttaaatgattaatataagtacagaaactgaaatgatgattaattgaaaaatagaactttatctaacaacgtaacttagtgttatagatattaatttttatgtatttgattaattattaatttataattttttgcagtgccttgaagctttttaaaaatattattatttgatatatttaataatactaataattaaatatattggcccgagttaaaactaaaaaatttattatttaatcaaagttattaatttatttaatatttattttattattaaagtgttaatgtatctataaaaaatattgaatatattaaattattaactagatagtttttaacttatactatcactcacctaaaataatatatattatattcaattatgctatattaaaataataaaattaaaaaactaattagaatatgaaataattaaataattaaataatttatttaattctctaaatataacttattagataatcaaaattaataaatctaatataaaatctctaatattatacatcttatttaataggataaatatttcgaatgtggtatagttataaatataaatagggtactatattattcatatagatagggtaacataatttttttaagcatagatttatctatatctattatccaattaactcacgtattttaatttggctagatagagtttagagagatgtctaatcacacgccaatagaaaaatcaaaaagaaaatattttctgaataattctaaataataataataataataataataataataataagcttttaagcttgcaagatgcacaaacttcataattggtgcggacgatggcataattaggaactttagttagcaccgctagactataaatatattcttataaaatattaaactacccaaatagatcctctgttcttttggaaagtcttattttgggtgtaaattagtcaacttttctcaaatataaaattgacttctggcttattaaaaaagtaaatggccccgatttaaattatatttttaattatatttttttaaattaactcggagctaaagtaaagtgatagacttaaaaagaaagaaaaaaagtgggttttcctaaattaccccggcctacaacccacagtatccccaacgtagttccgctcttgggtgcggatatcgcacttgtctctatcggccaccaaaacattgatgccattagaactgcatatattttgcatatgaagacgcgttgcaggaaattcaaggttgaactgcatgcacgccccaattgcttattcatgtgacaaatttagagaattgaataaagtcaagaagaaaacccagaatcttgccaggcatcctacctgcggctattcttctaagtcttcagttcaaattatgaatatgatacatctctttcgcatgtggtaaatgtgaaacacttgcattcttttactttctttcttccttgcagatctttcaatatattttttagataacgactgcgatggcaaccgcaaccgccaccgccacccttcatgagttcgtttaaaacgcaatattacatatgattttccataatagaggaatattaatggcgacagcaagcttatctttcaaaacctaactgggtgtgagatgacctctgagaggaatattaatggcgagaacaagcttgtaaagtggaaagctaactgggttgatgatagggactgccaccctcctgtttggacccaataatgattcaaacttatctttcaaaaaccaaatcatctaatgagtgggattattacgatatgactaggttatttttatgttttgcaattaactatatttttatgatataattgtttatggtaaaaaagaataccaactaaaataatagaatccaccaacaaaataaactaccagatcacttaagcaataaagaagtggagatttcaactttaattttgaaagatttgagtacaattgcatcaaactttttaatcgatttatattgtattttgtaatttgcaaaatataagacttttttttgtttaaataatttagtttagttcaagtttttttctattcttttccttccaaaaattcaaaatgaccgagtaaatgcatagtatcaaattatatcattatttttttattaatagatttcaaaaaattaaatgtataaagcttagatggattttagagtgtcatagatataatgacttaatttttctttcaatactttatatgtatttatttaataagaatttataaaattttgatcaaatttatatataaaatttattttttgtgatttatataaaaaaaatatagtatgtaaaatataaagttacatattagaaattttcatgtaaattttatcaaaattttatatatttttattgaataaatacataaagacattaaataaaaattatgtcattataaactacatgcagtatagaattcacctaaaacttaactaaatcttagaagttatttatttgatatattgaattcatccaatgaaattcattttgaataaaaaatagtcctatcaaaatatctttctacaatttcattgaattattggaaatacatgaaggctaggcaaacaagctacgtataagtaaaatgaggaaatgcaaatgaaaaacacatggttcattgaataaagatgagttaccatcataacatccactttcttatttgctccaagtcagaaaccatgctcccacttatgacaatcgttactatatcaaggtaagcaatgaacattatcaaattggggcagaacctttgtcgatattgttttgggaaaattgaccatgatcgggttcttactgctctaaccaccgagaaaagatgttgagcacttgatctttcccatatcgcctttaaactaatatcagtgttaaggatggtcatcatcttcaattgaccgtcactaaatctatataaaatattgcttaattagattgccactaggggttcactaattatgtattaaagcttaaccactgaattttgtttaggacatgattagtttcccattttcacgttaatggggtcaaatggtatctttgggtcatcactactactactatataaacctaaacaggatatattgaggaacaagtggcttatcttaattcaccctcttaccaataatggggtaacttttgagatggtgcttaacatgtacatgacatcatttctttaagtgtgttttacactagagattttgagaaagaagttgatgaaatcacatttaatctatcatttgacatccattattctttttatgattttcattttagggaaaacacaagtgtctttaagatatttaattaccaaagtaaataaaagaatacttcacttgatagctgaaaaagcctaactaattagcactaatgagcttagctcacaaattgatataaaatagaaacgcttacagctaaaatagctagaaagcagaaaatacaaattgttaattcaagcctaaaagtttaactctaacagacagttcctttgcatcttatccatgatatccttactttctccaaaaaaaaaaaaaaggaaaaaattggtcgcttgctttatcatcttaaaaaccaaagaataaagtaaaaggacttttgagtttagcaagatgggttttgacatcattattaagtcatttttgtttcacaccaaactcttacgctctgttttatttgtaaaaaattgatgcaaatggaaatatttcgattcacatataggtgatttatttttagcaatctgtaaaatataagtgagaaggacccaaacaatgtatctagagtattattttctgaaatatggctagtaatagagtaaatgtgttcctattttcatggtggaagtgagatcatggggtttttgctggcctaggattggtctgccccagctcagagttcttgatttctacgtgggaaatttaatcaccagatggacgagtcataactcatcttggggtgatttatttttaccagatttcatcacatgttcctccaacagttccgagttaaaggctcgttgatctagacatagctaaattcgaggagggcgatccataaatattaggaactcattatgacaattattaccagtacattttcaggtatttaaattgtaaaaagacaacagttacaaagacctttggtattttctccccacccgtcccaaagaaggtttgtgaccttttgatggaccattttttcttttcctcttcttccttatttgtttatttgcaaagtttgttaattttttcattttaattttttaatgtttaagaaacttataggaaattgataaaatttgtaaaaaatatttatttaatatttatataaaaatatttttatttaagtagtattttaaatataaagaataaattttgaataaataaaataaaaattttatattttcattgagaacaacttcttatataaaaaaatatattaaatttatttttttaaggttcaataataattttaaaaacatgaaatattatttttattttattttaaaaaaatagtataaataaatataaaattttattttctgtttccatttgaaatattttttgaacaaaatgacatataatgatttgtatataaatatgcctataaagctttaaggacaaagggtcaatttattttctgaacttatgtctaggagtcaaatacactaaatttaataaaaaaaattcagcaataatttttttgaacttatatttaatagtcaaatattttgagtggcatttcaattctgtcattaaagtttctattaaaaacaacttatctgctatctgcacaggttatttctattaatatttaccttttgacattaccataatgatataagtttaaccttttatataacagaatttgtacaagggaaataatctaacattgaatttagaaactagagatataacatttgagtaatttttatttaccttctgattttttttctaatagagtcatttttattatgttaagatttttttatattattgtaaaaataactattattttattacagctaaaatcaacacagtcaaagaactaaattgataaataaaattataatttaaagtacaaagttcatctaagattatttttattaaatttttagagtaatattattaattttggtgggagcagtagctaattttataataaattaattttagtatctaataaaaataattaattatcattttttaattattctaattttttgcacaatttagatctaaaaatctaagtattttaaaaatatttatatttagagaaaattcataaattactatataattcatttattaaattactacaaaatatatttatagttagaaatattacttttattattatcttgtagaccctataactaaaatatgctaaaaataaaagtattttattctaatttaataaaaaataattttaaataagtttaatatttgataagaaattcaagcactatattatttttttattaacttgattgattttagatgaaagacatattagttagtatttatttatctaaaaagaaaaaagagtttagtataataaaaagtcataaaaaaccattaatggattaaatcaaaattaaaagataaataataattactttatatacttgaaatctaactcaaaattggtaagattatttacttccggtgtgaatttttatttttataataaatttaaagagattactatgttatgcaattcattaatttttctataaataaaataataataattctcccacaacataaaaagttattttctatctgtttttcttcttacaccgccttaattgtgggatgtaatgctctttgtagatattaaattttataaaagttatatacttagagaaaatttctttatatgatattacaggtgggtttaagttttaaatggaattagattggctacataaaataatacaataattaaaattgataacgctataaggaagggatactgtggatctttagttcagtcgaattataattattacaaaaaatagcaggttgaataaatacaagtttagtttataatcaagaaaatgtaaaattaaattaggctaagattagaccgaccagatgagctgttcattttgttttgtcggttcaatcatgctgttcattaggctaataataaaatgttttatattaacgtgtttcttcgatatcacattctaagtgcatatgcatatcgtatcatgtgatgtatttatataaccgtgcgtttttagagttagtcaaaagagaattcatcaatatagactttattaatttgaatttttcaaaacattccccctcctatttattacataaatcatttgagagacattttttagtcagctgatgttcttttttaaaaaaaaaagaaagaaaaaagaaatttaatgaaatttcttactattagactaaaatgtcaatcaatcacatattgtaattttttttaaataagatattcgtaatttgtttgatcaagaggcctctaaaattttaattagatgaaaattaaaattaagtaatatttgttgaaaaagtgattcaaaaagagaataaaatgctacccaaatcaaaattatgctattacaatgaactaaattaaacagttgtaataaaataaaataaaataaaataaagatttatttagaagtataactatatatgagatatagctatcacatatgagaaaatagaaggaattataatgcagtggtggaatgcatacataagtggggctatctaagtgtctaatttttggtcccataaatgaacaaaaaaattcctttgggatggatgccattcccattaaaattccgaaaatgacatcttttcatttagtgaaaaaatagctattaatctattttgcctttccccaattatagcatgcctttctaataggttaactgaaactcaatatcaactatagattttcaggaatccctatttctgcaagctctggtcaacaaaacaatccagtaatacccctctctacctctatataagacctccaaagcaaagatgcttttgccaaaaacatcaaactcttccattcattcacacttgtagtaaactctaagacttcttgccactgtttcctacgtagaaaagtgataaacttaatcataattatctacttcgctacataaagatggagctgccaaaggaagcagaaacaagagaagttg

SEQ ID NO: 6321 - DNA, 955 bp, Ricinus communis
  Intron number 13 from transcript 29739.m003625 (locus 2973 9.t000061) derived from phytozome v7.0 (chr-ID 29739; pos 361721 to 362675)
ctgaatcaactgtaaataggtaattagtattccatggatgcaaatatatgattcttgatgcttgccgttaggaattctgagaaatttcattggtatacttacttcataagagataacacatctacacctggttttaagttttcatttgtacatttaaagtttagtagcttcccttgatttgcacatggccacaaaagaaactaatcattttctccaaaaggggaaactcaactttttttcactatttgttgactatatttttttctttttctgataattgtttggtttactttttgtgtaagaaattcagacataagctttcattgaaactgaataatcagtaccgatgcaaacacaatccacttgctttttttgctcctccaaatgtgagggcagtctgttacaatattgacttaccaataagcttcaaactatttcctggttcttgaattgtgtttatgagttcagatatagaatttacattatggttactgattgattttaattagttttatgatctaggacagatttaaataacctgttctaggttgattttgcggaaaataaggcttttaaatttaattccaagtctgatttgatggaaatcagatctgaaatagagtgggaaagtaaatttaagaaacttttaagaatcaacacttagaaggttaggggtcacacctaaagagaattgaaacacacaattctagagcagcaatttgcaggaaatcttgttgcttgaatctgaaaaagctgaataatcattgttacaagcctagatatttacagactaaactactcctaacagtacttggattactaatttctgtagatttgttggactccattactatcctctatgctctgtgttgactctgaatctcttaggtgctgtctaagtacatgagttactgctttatatgctttttatttgccttgggttggtaggctccag

SEQ ID NO: 6322 - DNA, 975 bp, Ricinus communis
  Intron number 7 from transcript 29676.m001619 (locus 29676 .t000010) derived from phytozome v7.0 (chr-ID 29676; pos 8 6783 to 87757 reverse strand)
caagcaaatttttttgagtctgctggttatctatctcttcctcttttatttgtgattttttatttaaaagatgattgaatatggaggcaaatgaattagtgtgtcatagtcattttaggttgaattggccagaatattttgtggatagttaaggtctacaataaggtataaccaaggatcaaaacaaataaaatcgttaggttttggggctcattatggtttttgcagtgtgaatgtcagtgatgggagattatttattaggatttgatggagcaacagacaagtttgattttgaatgaaattactcaagattttgttgaaactgaaaaatttaaaacttcaaaactagagtttcttggcatcattcacattaagattccatcaaccttgtacataacctaaaagaagtacaatttctatgaatattttctaattttactaattaactgatattgataggcatggaaaagtgagatctttcttatttcattataacataaattatttgcttatttttgttggtacaacttagacccttacctacaagaatcacatacttaagctaaagcacaaaagttggctggtgatgccaaatgaaaattcatttactgatgcatgtttggttactttctgtccatcccgactataatgaggtttatggggatttttcaccatttttctttatgtaataaacattatttttctattactatggaaagaaaagcaatttgaagcatcttttgagaatttgaaagaaataatagaggagtggaatctcataaaatttaggatttagcaagtcatcagaaagacaaccaatttccagaattcagataaaaactgattgttgtatccttattgcactttttgatgcttcttgttgtgtaattttaatggaagccacaataacttgatactttttctgcattttcacatgcaggaattgaatcaattgacatccctcgaattttatct

SEQ ID NO: 6323 - DNA, 1392 bp, Ricinus communis
  Intron number 1 from transcript 27964.m000358 (locus 27964 .t000013) derived from phytozome v7.0 (chr-ID 27964; pos 1 24331 to 125722 reverse strand)
cacctgctaacattaccactgaacagatccaaaaggtaattgatttttgcttctatttggtcttctattgcttatttgtgtgcataaatgtggatatggggttgtgttttgtgtcaattaaatgatcttgtgctttttaatgattggggtctattagaggttgggttttaaaagaggttttgcgtttggagtgtaggttttatagaatatgttgttaaacctatctttttttgctagctaatgattgatggaggattgagtaaacgttaaaaggtccatattacatggctggcttattaatatatatcttcttctttttcaatttggaagttgttttaagtatttagcgttttgtcattaattgccataccattattattaaggctttttttttttttttttttttttttctgttagtagcagagttctcactaacctattcagttggttatgcagatagatggtgataattgcagattttgtgcagacgggtgttttaatactttttgagaatgggatctagttaataatagagcttacagttttactattcatatctcggttttactactacagttcttaactcccaagttttggttattcttctttttttcattttaaaatgattagaataaatcaataataactaaatttttcgtggcatatatgcatatttagtggtgacccggtggaactttaggagttggtaatatgaacttatgttcattatgataatttgatgaggttacatttctatctcttgatgattatgtgttgtgcacacacatgtttgacctgaaccaatgaaatcctgatcatttaattatggaagcttctttttcacagtggttcacatttcttccttaatatgggatacaaataaattaaagatgaatgctaacatgtaatcaagccttataattaattaaataatttaccatgttaacatgggctaaaggacaatttactagcctttaggtttatgctttctaaactgttagtttttggtttcattccagtgatatgtggacttgtgaaaaagaaatgtccatcttatatgatcaacaatctttaagctacctttttaattgtgaatgaactccatatcaatttcatgagttcttacttttacaagcttagattttaataattatttcttgaatctgcttccagcttttaagtatacaaagtatttggtagtccacattgctaacaagcatagacattgtcaaaggggtataagaatgacatggacactgtgtcaaagtagtgttgaaccattttactttaacttgccacttcattctgttagaaccacagaatgaattaaatgctgatgtggataagactggtgtttgattcacgtttattaattcttgctgcagtatcttg

SEQ ID NO: 6324 - DNA, 527 bp, Ricinus communis
  Intron number 21 from transcript 30128.m008782 (locus 3012 8.t000243) derived from phytozome v7.0 (chr-ID 30128; pos 1021281 to 1021807)
cccagagtaagttttccaaactcgtcttaccctgcctctattctgcaatagtccaactattagttgtaggtcttctgcagtagaaataactacgcagtttattaaaatcactaatgtgccattgggatggaaggtttcaaataaagggaataagagtgtgattctattttcgaatgattgaatgaagtttagcatgtcctttagttgattaaagtcatgaacaaagattgcagtcatgaatgtggttgaaacttatttggtatggatttgggatttcatctttttgtagatgtgtcaaatctgcccttaataagtctttttgtctatgttcatcaatctaacttctattcatgaatcttatccaagaaaacctatgcagtcttaaatctaaatgttttcatttcaaatccatctgtccaaatacaacggaagtgtgttctgcaatttggataaggtttgtcaagtggtactaacagttgtcagttatatgttatggcaggtgcaacttcttgaactataggaggaat

SEQ ID NO: 6325 - DNA, 938 bp, Ricinus communis
  Intron number 4 from transcript 29740.m000496 (locus 29740 .t000028) derived from phytozome v7.0 (chr-ID 29740; pos 2 05532 to 206469 reverse strand)
ttagtacacttccttaatgaattctattcctaacttaaattagtttcagattttgatttctcaattccttcttctttcatggtggatttactgcccagctaattgatattgtatatattctatttttaagtgcagaacactttgccattgttactaaagttaaaacatatttttgattttctgtattattgatatatctcaaagcctcataaactgaacattcatcattcatgccccaaagagtacctaaagtgaccaaaactttcttgatcctacaaaccaaaaattgcatcataaaatgttgaaggtttctgactagttcaaattgcaaatttggacttttcagcttacttgatgtgcaaatacaagctactattaaatttttctgctgtttaattcagtggtatgcttgtagttaggcctccctttaaatgtttcaactaaaggagcagatgaaaatacaagcttcttaattgtagtccttcatgttgaaggttttcataagtgaatatgcatcaatgacatacttaatttatttgtacactgaatataagaaattggcctaactatattcttcgacattgactatattttcttagatagataattaataaatgaagaacttcagtcacaatttccaaaaatcgttcatagagcttacttttaatgccatttgtggacactgtctgcatttctgcatgccaacaaattgaagccccatttcctttctaaggtgtttttggcagttcctttctttaaaaaggacattatttgatcaatattggtgtatgtacttgtttcactttattaaaaacctggggcacttacttttttaatgcatttgaagcatcaaataccactttttcgatcatctgtaggaaatcatactttctttaaatagtggggcatctataagctctgataatttgacaggaaga

SEQ ID NO: 6326 - DNA, 5847 bp, Ricinus communis
  Intron number 15 from transcript 30063.m001445 (locus 3006 3.t000049) derived from phytozome v7.0 (chr-ID 30063; pos 652325 to 658171)
aaggtaaattatgttatgtctaatattaagtgatatctctttggtctttgttttaataggtagttggtttaacctatttcttgagcactctattttggtggccatttcttttatttactaattttgtagacagatttattggatggatgagatagatttcctagaattagctgatatattatcaagttagtgaaacttaaattacttaatttgcatactagcaatcgctgtactgctctaatatttgaagatcagaagagtaatgatgcttcctttgggggatggtagggaaaggtgacttcagtttgatgaccctttgtgacaaacattaaatatggccggttaagatcttttggaagacacgtgatctattaaacatgaagagttagaattaaattgacgcatgcataattctttgcatttttttctttgttcgtttatatcgaatctgcaaagaagacttgcaatgtgataatggactcctgtgcgaaaatggaaaaaaaaattggaaattcaaacagttattttttttttttgtttctctgttaatgttttgtttggtgaggcttcatttacggtaattatggtgagtgcttggaatattttaattctctttatcgattttttttttttgtaactttcaatacttcaattattcagtaaatctaaattatatgttcttttttattttaaaagcttagacggtttacatagcgacaatttcagaacttgtactgcacagattaattgaaaagggaaatattaaatgaactgaccatagcttggtttgatattaaacataaacgttgagattttggtcactctttggcctctccaaagtacaaaggataactggtaggatatctactaaaattgcactacctgtatctaaaaccttctacttgagcctgctccaaacccagttatttatcccttgtttactgtcagcctcccaaaagactacccacatagtactggaggccggccaaatccaagcccatattaggtaaaatacttttcattaatcacttttaatatatttatcctattaatatctttcttgaaaagaaaataaaaagggaaaagagaaaaagacctcaactattgtaacttaagctttctgaatttcatttgaagaatataatgtatagatggatttaaaagacattttccaataaaatctaagacaaaatcctgccatcttctctaggaaacaattggacagatctatcaaagtttgggatgaaaatatttcttcttagaagtgaaaagtccaagagaaagtaaagcaaaaaaatgggatagcaggcaaagatgtagataaggaataagggtgaaaactgtcacactgttaggtctgtaaatgggtagagccaagtgaaatgtggtataggcgaggactgtgttagtggtttggtcacttggtcaataatggtaaaccttttttgtgttggaaagaatgtaagagacgtgaagccttataaaatgcttttttaacaaaaaaaaaataaaaagaaagaaagaaaagaaaatgaaggaaaatgctggcgctgccaataatgtgtgtccttcagtctagggtggtttggcaatcttggaagggtaaaaaggtgagggtagatgaaagttgattttcaacgacattaaacctacatagcagtctcctaattgtctacctatttcattctgttttacttgtatttttctttcttattcacaccattttaaggatttggttagtagattggtcttatccattaagattgcatctgaattggggttaaaaaagagttaatagttagatgagttttagttaaggatgtaatagttacaggtctaactattaagcccttaactttgtttcttaatatctatgaaataaggagtaatgattaatgccttgtggttagacatttttaaaatatattttaaaaaaattaaaatgaaaaattatttattagtaaattaagattgtttaaatcaattaataataaaaaggaatataatttctttcttttacttttaactctgttgaacctaaaagggatggggttaacaaaaatgcattataagaagattaatcacgaatctctttaacagttaacctaataaaagaaatttataccaaacagggctaaaagaggttaagggttaacccttaattgttagccttattcaacctccaactgaactaccctaagtttacaactacctgtaagtcatatatgtgtcatcttttcaaccaagtcggttccctctagtttccctgaaccataggaaaactcaatcaaatttgcccctttattttttttccggtcaagtcaaccataagagaattttttaaggcaacaaaattggaatcatagcattgcctaaaaaggcaaacagagcaaatactaattgtacttcatttaaaattctggcaactatcaagcaaactcctaattttacatgagttgaacaattggtcagcaactttaaactgaacagcagaagaaatgaaacacacaaatcttatatcagttttcggctgctgaaaaacaatctggtttctctccctccaaattgcatatacagtagcagcaaaagcaacctccttacagtactcgaaatacttttaccaccacatttcctactaaactgattgatctctctagaccacaccatagggcatttagaaattaggaaagcttacactcaacactagatacttttagagaagctgcaattaaatagtacgtgttttatagttcagcagcaccgttggaaatacgaaagctatcattagctacaaatcctcatttttgcaatctagatttagtataaaaccttttatcaatatccaaccaaagaacaaaagtataacttgcaatatgcttggctcctcaaactaacttccagaaactcactttgggcatcagccactttaggagtactagaaacattagcatcctggatattagtgcttgggaagcaatcaacaaagatttgccattaacccaaggatcaaactaaaaaaaaaagggtttgctgaccatttcctgaaacttaaaacaattcttaactttaggcctcaatttgactaaatgcctcataacccatctacaatcaatcccatctcaattgttagacagatttagatcattcattaaagttcatttaagagagtagaacaacatttaagacctactcttgcagtttaatattcttaactctcttaattaatttgttttatcttgggctgttatagagcattgattgctcattagagttgagtgtacgccataagcacttgggaattggttttgagagttagcctaggtgtatggaaactattgtaaggttgtgtgtgagccttaaatacaattgtaaaggatttggtgtgagcctagaaacactaagtttgggagtgagcttcgaaaactccttataagagaaatttgagttactgaatacctaattggatattgggagtagacgtaaggtttgtaaatacctgaaccactataaaattttgtgtgtaattcttcctcttcttggtgcatttagggacaacaaagacccaagtatgcttgcacaactattttcttccaaacagttatatttcaccctagggctaccttcactctctttcttacaacgctccaagcaatcaagataatcttgcttccttttggagtacctttccataagaaactattcgagggttttcaattttcttcaccatgggcaagggaaaatgaaagctgaactccagaagactcacatgttaatataatagaattaatcaatggggcctagtagcataagaaaggctaatgacaggccaaacagtgatcctagctaatcccgtcaaagtcttgtcgcgagccaaatattcccagctgatctagttcaattggtaagctagggatagctggttctatgtccaaagctagctctaggagaatttctgaacctattttctatggcttaaggaagggcagcaagcactagtagggaagaggagggagagactttctttgttttttaaactaagtcaacatttccaaagcgtggaatcgagttttcttaggatcctttaggaagtgagggatttccttctatgacggacatgttttgctttacttcttgaaaggaatgggggtggataaagtaagctagtatgaagtaagggttacggtaaaggcaggaagtgctctagtaaaagtaatcggatcacctcattagatgccccttgcaccatggaaaaagtatttccaaattaccttttttcattactgaaaaactagcatttcagatatccaccaaaacccactactaaaaacaccttagaaggaaagtcaccataatttctctctccattaacactaacatactagtcttatcataagcgcaatgatccgtgaacagatacttctatagaaagtagctagtctactcaaaatctggatgaccaaaactcccaaggaagcttgaggaactaaatccagattgggacgttttgcaattcagacatttctagcttcattctcaccttcttttccttcaacactagaggatggttatgaaaagacataggaccatccccgaggacgctaagtttgccttcttcagattcaaacttaagcggaaataagttactctcccggttatgaacctcttttgaactatagcacttccatatgttaattacaagctcttgatctcataaagtttaagttttaaccctagtccagatccaatcaaccattttccatttgctcctcataaacctattcttcactgaactcggcaccacaaacaccataactaaccaccagaggaatatattctaattcacatctgctgctccactgatagttattaacaaataagaagctccaagatttctttggttcctcatcattttgctgaatcacactgggatcaatttcaagatttagatcatcatgtgccgcaattaccatagaaaccctagaaacttgctcgtcaacaattgcatcagcaactttgtcgcaatcctcagaatcactctatggatctaaagaatgctgcttgaaatccttattaacaaacgtaagatcattgcaaatctcattaacaagctgagatttctatcaagaaataagaattgccaatgaatgtggtgattcttctgcttttctcctattaggaaacagcacaagttagcaggctaacatgggctgaggtagaaagaaaaagaaacatgctaacaaagtaccatgatgagtgaaaaattatttctattttgtatattctggatgagacctagcttcagcttattgttatgttctttggaatagagatcactgtaattcttccaaatatggatgtgaaattgtcagatgaatattatttaggaagtaggaatttctggatttggagaagatattggatgattttgttaggtataagctacgaatggatggatgatgaagtttgtttgtcttttttgataataaatgtgcatgatcataatgatttatggccaattctattttttaacgtttgttacattgatgcatctgtaatgcttcttatgcacatattgcacgtttctcgcttttaaggttgatgccaaaataccagtaactgaagtaaagtatgtctaaatacagccagcaagtgataaaatattcttcatgtagttatatacccaatcttttacattgtattgtcttgtattttgtggactttattttgtcttcatatttgatttatttttctaatgtttgtttggatgagctagcagttataattttatgatgaaaacatattcatggcacaggattcatacaagaattgcactagtgctgttataga

SEQ ID NO: 6327 - DNA, 1672 bp, Ricinus communis
  Intron number 1 from transcript 30204.m001765 (locus 30204 .t000034) derived from phytozome v7.0 (chr-ID 30204; pos 2 14714 to 216385 reverse strand)
ggagaaaactatttagattctgattcaagagacaggtatatacattcttcattttctcatctttttacaaaaaaaaaagagtattctgcttttctgggtattaagttccaaatgtagctccctttgctaggttcattttgtttttggctatataaccttttcagtttcaattttttttttccagtctgtgatttgttttggtagctgcatgtagctgtgtcctataacattaattttcttttttcttttgtggggaatttttgagctttttgctgtcctatgctttttaatgttctattttttttttatttgaagtgcttttcaaagtgaagcaagaaaagtaaatttccatgcactgaaatgctcatttagtacttgcctagcttgctatgaagggttttagatgttttactcttttttttttctaaggaaagaaaaccatgcatggttgcttaattctttatttcttacacttttgctcaagtaattttaatgtggtgttattctgggtattgctagataaaaatcctgtcttttcccttcagatttttgtatagttgtcaagtgttgtttctgctgtctagttcactttccgtatgttttaggagaactgggttggtagtgcaaccccaacatggctcaagaacttatgctgacaaatggatgctgtaagaaactaaaaaaaagaagtgtattattatttcttttggaattagataaggcatataaaaaaaattaaaatgaaaaaagaaaagaaatttctttctggggttgtgatttgtttcagtgctttcactttcgtatgatacattaatattgttgctactgcctaaaaattgctttcgcaaaaggttagcgatgtttatgacttgtggaaggtgcttcttttaatttattatattttacaagtttccattttcaacatgtgtgcccacaagcagagttattaatgttgctagttgcttttcttttgtgttgttgaaactgatttatgcatttttcccctgtctttcaagggtaccacagaaatagaatgaagaatatcttttctgatttgtaatctcttgtgtccttaaacaatctttggttacttgtaatattagatcatgaatcctttttgtgttgagaccataagctgtcatcaaaatatattattttgaactataaaatatgtgagcaatatggttttaattagtttattaatacatagtactagaacttgaaaaaaaaaattgctatcatgaatgtgatatcctgggtttggatatcctcggtaaatttttttcttcttgcaatagtggtgccagtaactcttctgcttcatttgtgttagcatgttagtggataatgatatatcatattcatgggccccagtcacagagatacatttatgtggaatactctgttttagggctatcagtacgtgacaaaaagtttcagttttcttgctttcattgtatggctcctgatttccaaattggttgttgtccttgtaaatagtgagacttactttcttggcataattgggatatcaatttatatttttttagtttgattttcttttttatttttcagttggaaaagaacttcattatgaatttttgcataaaaatgaattggcattgttttgatctaatattttgttaagcaggagcactagagaaagcactcc

SEQ ID NO: 6328 - DNA, 3569 bp, Ricinus communis
  Intron number 4 from transcript 28067.m000103 (locus 28067 .t000002) derived from phytozome v7.0 (chr-ID 28067; pos 1 2130 to 15698 reverse strand)
aagagaaattcagagaaaataacagcagcacaccggtatagttgataatgcctatttaacttggaaattataaattgtttgcttaaaagcatactggtatattgaacatggtaaaatagtattttaatttttgcttatgaacactatgatgtttttaactgctactttagctgtttaaaaaaattagatttttctaatactaatttagataaactagttttatctcaattgtagaataaaacttaatgagactctcattataggaagatccacttttaactaacatgaataaattgtgtgcgtatatattgtggagagtggacaagggccacttgcaggaagctcttgagatgctttcatttttcgattttaattttttttttatttatgtttatattatgtctttatgttacttatctgatataactggattgacgttgcttttaactatcttactccttgcatatcttggtagcctttcatggatgctcatgtgcatattgcattacattaattcatatgctcatctatttgggacttcttttgagaaacatctagaaattttgacaatgtcatatttcgaggcttaaaagagattcgtcccacttgttaacaatttaggaatttttcttttgaatggcttgtgcaagtcaacatttccctgaagtctcaagtcagttgtttaaatgtgtggcactaacaatcttaagtttctgtagcatgcttcttccctccaataaccccagttcttattttccaggaaagttaaaaaagaaattctatcttaaagaacaaaagggaaactagcttctcttgatgaatcttggattaacaaaaggttaacagcacacccactcctttcctatctgagttatagttaatggtgcacttcccatgttgtttagttgtggctcatattttgagagttaaaatcctggagttatgtatcattgtgacatccattaatttgaaaaattgaaggaaaaaatattcaaattagagtaatgttgtactacacaattgattttaaatgaaatactacatgaattagttggatgagaaagaaaatagatttgacctaacacttcaaaagaaccaatgagaatcatttttctgttatcatgaaatacttttataaaaagatattacttttctcataattaacgacttacttttagggatattgggagtcttgattcttttcctgcatgttacagtgttcatgagcatggggacatcaggctgttatgtgcttgtggaagacgggttaataatggacataacatgcatggtcctaaggaaatgcaaagagtctctggcctagtttgtattaaagaaaagttaagctaaaacttgagctgcaaatgtgaaaagctaggaaggaggttactggagaactcccatctaaagctgctatttttcgtgatgcactgttatgcttaagtaattccagatttttacaagggtccttaattctagtttcttatagaatatctttctaagttaattatatatggtctaaccactcagatcacttcaaagtcagacttcttttcaactcatggtccagaattcttttttcaatgcattgagattattggggctacgcttcttgaaacagcttcaagtcctttgtggtctagagggtattatgtttaggatctcaaatttaaattaaatactggaaatggatgtcaatgataggctgatcagcagtcaaacatcgataataatctgtcaggaattttaaactacagaaagtaaggatatttagagtctcccggaaagaagataatgatttggatttcgcttttgttgtttttagtgcacatgtgtgcagaatgactaagagttctgctaatataagtttgtagattagatgtaaggtatgtggttgagaacagtgaggggtttaaatataagaaaagaggaaagagggattagtgccaaaaggtaactagagcagcccccttgccggtgatccagtatgttaggcaccattaagggcttaggaatgtcatggttcaggcacattgcttttcaggctctttttcaggcaatctaagaaaagtttgtgcactattagatatcaatgcaaagcttatgttttttagttcttaacagtgtccttcaactggaaactggattttctttaggtcctaaagtttgagctgaaacagaagtgaaagaaagagcaaagttcggtaatcactcggaactaattaaattaattttatggagagtatttgcagattcaacagtctaataacaattgtatacctttgggaatctaaaaaattcagtgtagtaggagcagtgtaaatgtaaaaggtaccaagttaagttccaggattcacaatgaggtatctgccatttataatctgataggaatagacaccaagtgaatataatctgataaggatcataaaaaatgatgatttctgatggatttggtgcctctgttgaatagggttgtgaatttataagcattggggtttgactgatagccggtcaatgaatgcacaagtgcaaggaaatgaaattgccaccattcaaatctgataaggaaccaaacaagaggaagctacaggcaatagtgtattatgttcatgcagggagcatttcataatagtagaaaggtcacaaaataagtggcatgtgaatgttaatttgttttaagcaacagtcaatgccaaaattggatattggcagctatctgttgttcattctctagtctttacttgccagcattacttaaaggtttgtttaggttgggacgtgggttaaacttcatttagtttgtataagaattgaaaaggcttttccttttgttttctgcattttaaaagcagaagcattctgttatgatatgttgtcctaattaagtctttgaggattttttgaaataaataagaaacacaggttgaaatctgaggatatgcagatgtttgcaaagaagcaatggaaaaacaattcaagatttgaggatagttccatgtccatatggatttctagataattggaaataactcttccttgaaatagtttggcctcagtggcacttagaatacctgtttgtgttgcatgcatatattcatgcttttaaatataacagtaggaagagcgaattcgcatcttaaatttgtgagtataactcattattcgttagttaattgccttgtccaaaaatctggtttaagttgcatgtgaaactcattaggaggtattacctgcctgtagtttcctataatgttgcattagtaaagggcacttgggcataatgaaatctggtgcatgagccttgcttatgattattggcttaggtctcgtgtttaaataactcttaccttaagatgaatgaggtataatcatcatttctttttgttacataagaatgactcattattttctgtgtattgatgaatgctcaatgctaaaatctgcttgtaccgattgtagttatttagaagcatacaactgtctaggttgatttcttgcataaaatagttcctacacttattctgttgaattctcacattcctgtctcttggtcacaattattaggattc

SEQ ID NO: 6329 - DNA, 338 bp, Ricinus communis
  Intron number 5 from transcript 30128.m008739 (locus 30128 .t000200) derived from phytozome v7.0 (chr-ID 30128; pos 7 91290 to 791627)
tgcttggaggtaagctgcattatttccctcgtgcgggtgagacttagttcttaaaaaattaggtatagaagtttgaatatgaaaatgctccatgtgttacattgcaatttttctcagcattctcaatttagtgtgacataaatttgttgttgtttgtagttcaacatcgattaacatgctttctttacattttagaatatgatttatcaattccatagactgttggaccaatgttgtaaatgattctgttatgttaataattaatgaacttgtttcttctatttgacagctttagatctatttttactgacaaacctttttgatattagcttggagga

SEQ ID NO: 6330 - DNA, 10010 bp, Ricinus communis
  Intron number 4 from transcript 30226.m001977 (locus 30226 .t000001) derived from phytozome v7.0 (chr-ID 30226; pos 3 1904 to 41913 reverse strand)
aagtatttgggataccttcgctaaggaagattcaggttcctcctctctttttatctctatcttgggagatacagttccttttagttacctttcttctttaatataaaattgaaaaaatggatccaaatgtcaatgttaaaagaaagttactcttcttggattccttgttatctagtattttggtctttccttttttcgtttttgggagataaagggaggctcagccccgagcaaaacacatattccaataaaggcatatccgcgggtaacacagagaaattatagacaataaatctcaatattattaaattttaatttttaagctattatgccataatttattatgaaagtttagctataaatatatatttctattatacaatcaaatcttttaccaaatgaacgataaacgagtgtttaaatcaacatgtgtagcttccttaattaaatttctgaattccttaagatttttaggcttttgtctcttatgggtagtaaagaatagaattgtcgtattaaaaaccataatttaggagtttttatattctaacctaatatgatttcatctaagatcccgttaagcttatatgtatttgaaaacagtatttatccatttaacccatatccaaatccggaagtctatgagctttatataaatgaatcactttaaataaccacattgataaaatagccattaatataattattgttaaatatgtgagtctacataataaagattaaatcctaacaatcacccacttggaatacatatgaaacctgaaacaattatatcaaataaattctttatgtgtacactttcttgttatttatgtagactttccttaggtacaatttgatccatttctcatatcaatatgagatcatgacggcgtcacatacaagcatgactaaaaccttttatgctcaccatattaatataatcaagacatagtatagatgagtgacataaaaattacatacaatatgatctcaaaacatgcttatttccaactggttctactttattctttagagagatcaatctaaaattataattagattcagatgtataaaaataaaatgaatcataaaactttattatgcataaatataaccatgtaaacatgtatcagtccatagaatatctaaaagtaaaactctcactaaatcaagatatcactaaatatgcccacacccatatgagcaatatgttcataaaagaccttaggtggcaatcccttaatcaacagatatgctattatggagtatttttctatattatcttatacaaatctgaccactctgaactctctccttaacaaatagaaacttgatgtcaatatgttttgacttcataaagcttctgttgttattggaatataaaacttattgtcatatgataaccttaattgcctttcaatgccgttaactatatgcaatcaagtgacagaatcttgtatccatattccatgattagatgccccaaaactagctatgaactttgcaaccatggttgaggaagctatgagtgtctatttggcatattttcaagatatagctcctccagctagcataaagacatagcccgaagtggatcatttactatcttggcatcccagaaaatcagaatcagaatacctaatgatctccaaactatttgatctctcatatattagcatgaagtcctttatcctctataaataacacatcatccatttggttgctttccaatgatccattcatgggttacttagctgacaatcccactatacatgatattaggaagagtacaaactagagcatacattagactttcaattgtcgaggtctagggaatcttttccatctcttttattttaaggtcactcttggggattatttgaaactgaacttgtctcctttagctagaggtatatctctgagcaagcaatctttcatgccgaatctacttagcacttttttgatatagctcttttatgataagccaagataccttgatagctatcttgcagtatttgtttgcttaacatgaaagaggcgtcttcaagatccttcatctcaaaattcttaatgagaaatttcttagtcccatgcaataagtctatatagttactagccagtaatataccatcaacatataacacaagaaagataaacctactcttattgaactcgtgatgtacataatcattaactatgtttacctaaaaaccatatgaagtaatcacttaatgaaatttgtgataccattggcgagaagcgtgtttgagaccatagatggatttttttttttaatttacaaaccatagaatttgaatctttagattcaaagttttttggctgagctatataaatcgtttcatcaatgtgtattaaaaactatagtctttacatctatataatgcagctctaaatcaaaatgagctacaagtgccatttttatcctaaaagagtcctttgatgaaactagaaaaagatccttttatagtcaatgccttccttttgattgaatcctttagcgactagacgagtcttatatctttcgatattaccttttgaatattttttagttttagatatccatttataaccaatagctttcatacatttaagcaactcaacaagatcccaaaacatgattgtctttcatggatttcatcttatcttgtatggcattgatccaacattgagaatctgaactttgaagagctttgcgaaggttgattagatcatcttcatactaaacctgtcgaatcttcttattccagaagaaatatgtaataatcatatggaattgcatttctcctttttctagttgatccccttaagaacacttcttgaggttgttgagtttgctctataggaagaacttcattgttatcttgtactagaattacttcttgaacattcttagaaattattgcataaccaatatcaatatcagtattggaaaaagaaacaaatttctcttcttcagatttaacttttttgtcaaaagatacgttctttggtccttcctccacaaaatctacatcctaaaaagaaatctcgtattttttgtctcaaagaaacatcgagtagtagatcataaaacttaaatcctcgagagcattctgcttatccgataaaaaagcagctaactgtctttaagtctaatttctttctactaggcctacaaggcattgcttcaactgtacatccccaaatgtgcaagtgccttatactgggccttttgccaatccataattcatatgcagttttagctactgctttgctaggtactctactaaggatatatcttgtagtctttaatacttttctccataaatattcaagtaaagaagagtgattgttcatacttcttaccatgttcttaaacattttgttttatcttttagcaataccattcatgatgggcttgcccgacacagtgtactgtgggataccacattctcttaggatgttagcaaagagtcttgggcattattaacctaatccatcatatctgccataatctccaccactgttagatttaacagctttaatttctgacgaagttgaagttcaacttcagctttctaggacttgaacatgtctagagattgagatttctcactttttaaatacaagtaatattgactagttgtaaatgaacatactaaagtattgttgaccattctatactggtgtagggaatggactatagatatccatatttattagttataagacttatttacatttgttggcacctaatttctttatatttgttgtctttcccttattacactcaatacaaacttgaaaatttattaaatcaagggaatcaagaatttcatctgatacaagcctctgaattctctatttaaggatatggcataaacgcttataccataggaaagtagaattctcagttaattttcactttgtaccttttaaactagtttgcaggattgcactacgataagcaaaaggttctagcatttaaagacgatcaactaaaataccagcaccaacaaaacttaagtttagagagatattacctttattatttccaaaccataaaagtatccatatttatccaaagaggaaatagtaactaaattctgtttatataacggagcaacaaaagtctcaactgaatccaaataacagtcatatttagaaataatctaaagtgccatatagtttccagatgaaatttattgccattggtcacatagatgaatctctcagcatcatttggcgatcggctccaaaggcagccgtgcatgaacacatttatgtgagtaatagcactagagtctaactaccaagcgtttataggtacataagtcaaattagctttagaacaaactaaaacgagaactttacccttctttgcacactaggcatcatatttggaacactctttctttctgtgtcctcctattttgtagaaaaaattaagtaaattcatcatcttgcttctttgcctttttctatgaaggtgttcaagttgtagtatctttagccctcctcttattgttattctaagatattaatgctaggtgagcactttcagtcttattccttttaacccttcttcttcttgcacatattatgaaatgagctcattaagagactatttatccttttgagtattataattcatcttaaattgactgaattatgcaggaagagaaataagaactaaatatatgaataaaaatttatttatctctaactttagtgcctttagttttctagcaaggtttgaaatttttataatgtactcctttatgttctcttttcctttatacctcataaaaatcaaaacagccaaatagttacttatttatgatttctcactcttagtaaaatattatcgtatcgcctcaagagattccttagcattattgctctgagaaatagagcctcgaaaagctttagtatggaacgttttatgatcattagacttatgcagttaaagcaattctccttcacaactgtagctcatttgaagcatcttcaactaaagtgggtcactctatcacaagtattttcattggttaacattaatcctcctttgggctgaaattcataaaatatttatatttcaaatcaaattattttacacaataaatgctactttggtaacatgttgttttaattaacttagtttgaaattctgataatactagtgtatgtaaaaccataaatttgcatatttgacaaagttcaaacatcctattgatactgtcatacaacctaaatacatacagatcacatacattaaaaactcaattaaaatgaagtttaatgtaaaaaaaaccttcaaaactgataaacatgtaaggcccagaatacaaatcaaacacaattatgcaacagcttcaactttaatcctaataatttaacatgataagtgctcttatactacttgttagaattaattaattataataatgatcaataaatcatccatgacatacatatagacaacttcaaggcaccagattctagattacttaaaatcacgatcgcaactatcatgccttctcaagactgttataaactgccaacatgcatttttaaagcatttaatctctattttacacgtcagacagcagattgggaaacttcaagaatcgcgacagcaaagtagaaagtgtaaccgtgatttacactttgagagtgcatttaatgcattgtatcaaatcaaaacgagggagttgttatccattgtgtgagtaacagatatttgaggtttttagggtataaatacaccaaaatgaccctaaatggttcattaacaaccttcttgggcatatatttattaagttttaatttttcatcttcttgcaatcaactttttgtaaagtagtgattttggttgttgtaagagccttaattgctcttgtgagtgttagtataaacacttgaaattgggtttgagagctagcatagttaaaaactcttatgaggttgtgtgttagccaaaataatataagttgtaagatttggtatgagccaaaatattaaattggaaatgagcttggaaaaattccattgtatttgtgaaagcaagtagtgaaatacccaattggaaattggggaatggacgtaggattagttaacaaccaaaccactataaatcttcttccctatctctaatattcttattaaaattttaatttaagattctttctacttcatgaattcaactccctttcttggtttataagggcaaacaatatatttcatctctagagcttagtttgaataatatatcttttatagttaggacgaaagtggtagcgatggctatagggacattaaatcaccaacaagtaccattctacagactttagtattgtagtgaagatgatagataatttgacggagcatctcaattcgatgagcaaattggtagttatcaccatatgaaaaagttcgtgtctcctaccatttattgcacaattctatctttcacatttcttgattatacacttctatctctagttaatcttccttattctattcttcacggacataaaccatgcgttgtaatatttttattaaataacaaatactagttcaatctacaagaagctgaaaaattccttggaaaatcaatatttgttcaataaagctccaccaaagcttgttataggctctttccaagtcaaatttgattatcatggctttctcgcctttccacttatttatagagttcacaacatgttgtaaaatggtgaagttgtctgaaatttatcatcctagaataaatctacattgggtctgccctaccaatctatctaaaaagcgttgagctaattggtaataatcctagtgacaatcttagaatgtatgttgcataagattataggatacatttaagaaagctgaataaaacaatcaactttaggagtatgcataattaaagtcttattgatgatggagttagaagtattacagtaatttagtacactgaatttccaaccgatgaaagaaaattgggtagaggacatcagggtggagttaattaagatagaaaattaactgccttttctttatatgctatgggtcagataaccaatcctctttcctatcattaattacttccagtttatttcttcttctttggatgattgtgatagcattaaagaagcgagtgttactatcccctaaatatagccacttatttcttgatttctagaatcataccatttatacttgcacaagaatattttctaactcaaattgagttccttccgaagaatcatggcaagccgagtacctttgtcttaaaaattagcagaagtagccaaaatatcattagaaccatcccaatgcttttgaatgaaggtcctacagttaggatgagtaatccaagcgacttgaaatctaaatgacctcttagagtaaggaggagattggttcccattgagcttaaacagaagggggcaataatctgacttaactctagttaaataaaggacaaaacctcataaaattcaggtgccaagacatttaacacaaagctctgtctaggcgttgttacacttgatctctaacctaggtaaattttgtacctataaaacctaagacgataagcaagcaagcaccaacataatctttaaatatttatatttatacaaactaccaaaggctctttccatcttctcttttaaattcaggttgcagttgaaattccatgttatcatccaagagtccaccatcctactataaaatctttgatgactagaccataattgtctacgagcacttaggataagaatcttataaaaaaccatataagaacctaaatcatgctcactagagcatttgaattgcataaaatgatgaccaaactacataattgatactctaacattaatctcattccataaaatccaaattcctctaaataagcctctaacatcttcaatataggaaatagtttctgatgacgtcaacaactttgtgactattatggtaattctaattctccataatgacatagatagaaggcttatgagtcttaattagatccttcaaaactgccaaaatttttttattgttaataacttgataattccacatcataatagacattaacataaaaagattgataataagaaacttgacctaaaagacatgacagcctaggcatgttgcccgtcccttccatttagagcataagaggagacaagcttcttatttgcattaccacttcttcacttttccttcaaatcaaatggtttggtagcattaaagaggaccattgaattattgtgggcatgatctaaaactagttaaatttgggttactgtccaatcgtaacctataatggaaagggttatttagcctaatttcaacttgcataggcccaaaatatttattattatctgaagccctttccttactactacttgcaacatagcttgggcctttattgtcatcctctattaaaatcattagaatataattcgaattaatcctagtcatttccttttctattacaaataataaaatcattagaagataactcttacaagactcaaaaagcctcatatttctccaaagcattctcttccaaatcattctcccaaatcaaagcatcaaatcgcgatctagatgttgtattattagctttttaggtcctttaccattatttatggcatcttctattttggtgtttcttctacttcgcctggttgcatggatacatggtcattgctatgatgacccattaccaaaaaattagattaattctacttttttatgggattattataatttcccatttgagcgtttgattcattcctcaaaaatttattatcaacatcgttttgcttttggggatatataacttgattatcactgattctaccacactcaaaacacacttgagggagatcctcgtattccaccctccgacaaacttcatctagattgaatttagacactaaaggcttgaccatgttaagttcaattgctactcaagcaaatgttcccttactagcaagttgggtgttcatgtaaactttcatcatagaactaataacatttcctatagcatggaacaccttttcatgataatactgaataagcatcccaaggaaacgtacccatgtcaccatagacttcatattagttaacagggccctaaaatgtggattctattattgcaccattaagtattatcctaaaaccatccatggtcctccaaccatagccctttaccaggtatttcgtcaaagcacgttgtactacaaagatccaattaacagaatcaatacttttgtaatacttttctagttgctggggttttgattctaatgctcataattttaaaccatataggtctacctaatagcttcacaatcacataattctcctaaagctttgtgattcgattccttaatctgtcacacaacatgataaagggaccaccttgtctaatagtgacattgatgtcaccctcttcaatgtaaatatcaaatttagatctcaataggtctttttcatcatgaggtaaaaaggcagtatctatacgaaatagggtctttttttaaagagtcatcttcaatgaagtcatccataatctgtgaaacaataggatcatccataagcacttcaagcttaaggcaatcattcactatgtccattatttctctctcttagtcaaggactacagagggaggagctttttctataaaaagccaaggattccttttacagagactattactattatttcaatggtaatatatatatagagagtacttttcttatatatttatggtccaagatgataacttttttctagagaaaataatgatgaatactgattttttaatatgaattttagtactttatttatttgatcaataatactttgtattgcataatataattatttgttgtagcttataagatatgttttgtttctttttctttttttcttctttttctatattattgcagataaaataaaagatcatagcacaggtgatattgct

SEQ ID NO: 6331 - DNA, 867 bp, Ricinus communis
  Intron number 4 from transcript 30128.m008888 (locus 30128 .t000349) derived from phytozome v7.0 (chr-ID 30128; pos 1 539280 to 1540146)
tcgttactcccttgaaggttttctgaaaggcaaaggtactctttgtgcattgtgtatctgtatgcatccttggacatcacgttctagcttgacaggcatactattctgtctttatcatgcttgtgaagggattggcaactaattaacttgggcctgatttttttcttgaatatttgctagatttattgtttgcaatacaaaattgcacttcggacctcctagtcttcattttggaaagcaacaccaatttgtgtacaatgacaactttttagtgtcattgcagcacttgtatgttacattcattcaagagatggtcagaggtgctgatggtttcgtgatgaaaatcagatattgttattctttttgctagtttttatttttaatttcttaaatttaacttgtaactagcatattgtaatgtcttggaaaatggacattcgttttatgttatttcatagacttttggactctcgaagaagtgtacattctttgttctagattgattctttcagatttttggtgaaactaactctgcttgctgcttgaaattttatgtgttgggcaatggaccctatgttagaaaagctggttgagcccctatgtgaaagtgccctttagattgacaaggattggtaataattatgtcttgctgctatgatggggtgagtcatgcaagaaatggttgtggtgggcgagtaattagtgtatgtgtaatttgtttaacattgctgggaaatggatagctacgatcataaattgtatagaaatgaatgattttacgtggttattatgtagtagtatccaacttgtcatggaaagacacttatacttgtgctacttggtgtttagaacttgaaagtcttccac

SEQ ID NO: 6332 - DNA, 1282 bp, Ricinus communis
  Intron number 1 from transcript 29897.m000359 (locus 29897 .t000005) derived from phytozome v7.0 (chr-ID 29897; pos 1 59773 to 161054 reverse strand)
ttgttgagaaggaagaaggagagttagaggaggtgagattgatttggatatggaaccaggtgagaatatatgaacattgatgggttttttatgaagttgctttggatagtgtaactgtaaaaaaagaaaatgatgctttggagagtgtaactgtaaaaagtaagcaaaatttgctcatgttgaacttcttgatgaagttgtgggttgtgggataagttgttctacaagtgatttttgttttgatttgttgtagatcatttgatgcagtttgtaaattggagggcttgcaggaagttgttctgggaaatagcatttccaataaagatgatcttattcaattgtcattcactgcagttcgagtgattaattctgtgagttgtgttctacgaggtttatcctgattttatttcttggttaattgcaatgctgattattgtcatttacacgttttctcctcgatgaaccatatagtaagagaacataacagggacagcttttcaaggtgtcactcgtcatcccttctggtaattgtagacttctttctctggtaaataggttccttctcttttcacccctgagcattctgaagaggtatggctagtgtaatttcaatcttagatcttgttgtttcctttgttacttgctatggtattactgtcacttgggttgattttctgtcattaagaagtctagaagtggtatatgtttccacagattgagatcgtgcttgcctctagagattcttctggtgttttttttgagttcttagaaggataatgatgtgattggtaaaagttcaggttacagaactgaaggagtttcggattttaagaatatgctgatccaatttcaaattttaagaatagatcggctttgcttcctttattggatctatacctctaccaattgtagcagctatctatttcatctagaccatatttagacagcttctgctgtccttggtttctctttatgttctgtaacctcctgaacagtttcaggataaagttcatacttggcttctctttcttcatgggcatttcagtactccaatacttcagatagtactataatcaaataggatcaaaatgcgggtcatgtttacactggttcctttgttagacctccacaaatatcagtacccaattattaggctgcctgtcatccatcacctacacgggaatcagcacttcctttacagtataatatttgcggttcatttggttctctgtaatattaggaaattccttttcattttcttcagctggatataatcttgagg

SEQ ID NO: 6333 - DNA, 3734 bp, Ricinus communis
  Intron number 24 from transcript 30162.m001261 (locus 3016 2.t000006) derived from phytozome v7.0 (chr-ID 30162; pos 641114 to 644847)
acaattttgcttctgttgtaaaggtttgtaccagttctattattcacccaagaaatatttatgcatgccctttcgtttatggagggacacacgtatttgatttagccatcacagttgggtcttaatattgatgcttcacgtgatcatttcttttggaatgaatattaatgcttcaaattatagtataaagattatgcaaaagatgtttgaatatggcaatatacgttaaagaagaacataccatagttgaatgagacattatctaccttctaaaaagtaaggccttccgtgtgctccattcatttctcatttgtaattcatatcgagaaagaattttctttttctcatatggtaaggcatgcatgcctagtgaacacaatccttcttcctttctctttcttatactttctgctgaacttaatttttcttccttatcttttgtagtttatttctaggttttggagactccttttcccgtaaaatttagcttttattctttcttaatctttttcctcatcatttcctccttaattttgtaattcctaactgtgtaccttaatttaatcctcatatatactaaacctttaagcttccctcctttaacttgccacaaatgctcaagggtgtctcagtcccaaagttgttctacttaggtgttggtataaagtgtgcaatcctgtcaatttaacttgatgcctaacattttttgtgttaatttcaagaatcactaggtcaaatatagttttaagatgcattttaatcagttgaaataccagtactttagttaggtcttgaaagttttccactttaaaatatgttgtttaatggtttatttatgatcctgaatattggaatgaaatgcgggtattgacaagtccaatgagaagtgcatgaccacttgtttcatctgatagaaatgataagctacctatatagtttgtatgtctaccaaagttaaaattctaaaatctcttggagaaatgctgcgcgacactgaagtaaagttgagaggtcttgaaattactcttataggtggaagattgaaaagatggaaggcaagagtctcttgatactctccatttagtattacatatattaaggttttgaaagcacttttttggatcctttagccaaaaacaaaattgatctgtttcttaggatccttggcaatggggaacttatcttacaagcaggcttgactgcttctgaatacgttagtcattaatctgtagtgcaggctggttctcttgtatgttcttattgggcttataaatatcttacaaagtatattttcagcctcctttatcatcaatgatatcagtgattttcaacctcctttatgatcaatgataccagtaggacaaccaagctctatagtcttttgataatcatgcttgttcttgggagaataaagttaaagcaattagtgttttcattacttcatgccattcatttgaatttgaggtcaggaaaatgatcaagtaaatgcttgaacatagaagtagttgatgtccaacggcttttttatctctgcttatggcacgattctctgttaaaatcttcctaccttactggggaaagattgaaaaaaatgtagccttgtatgctcagaatccttacaagcagatgccgttatactatatatgagagctgaagaagttgacaactgaaatcatttaaagtttaaagactccaatacccttgagcatgtctttatgcttgtttacagaggtggatatgaggctaaagaaaagggaggtggacgtgtcagattggtattgtccccaagtacagatgacctcttttcattattatttttttaagaagagtagagctgacctctaaatgcatcactttaacaacagtagtttaatcacatgcacataagaacaattgatacattataataattcatcacaatgacaaagaaatttctgaaaatttatacaatatttgaaagctatgatagaaggaggtcaaaactcttaatggtacaatgactgaaacatcctttagacttttaaatttgcagcagaactcttatatgcaaagacaggaatgtacttcatagactatcattttataagtctaaaatgccatcattatacacaaatgcctttctgcacaggcaagctaagagaaaaataataataagtaaataaaataaaaggcaacataatatatcaaaatctaaattacatggtaattctttatttaaaatctagatttattcagtatttttatgcaatatttgatgcatgtttatcattttatatgtcaaaattatcaatgaagtttattgttttataatagtattttaaagaagttttaaggatatattgatatgttctataagtaaccttttttctttctatattaagaattttagacttattttattttagtcattatgtaaattcattttgttgattataattagtataatataatataaaaggcttatgataacatgaaaatagttgcataaatacattttaaatttacaacagtgagaatatgttgacacaaataaatattgttttctgcaattataaaatatacaatcaaagatgtaaattgtatgagccaataaaagatagagaattagataaaatattaaatgttactctatgaattgcataatttggatcttcttatgagctttgtaaagatgttattttttaacagaagaaaaagaaggtagattgaggtaagtatatgtgtagcttttaaactgaaatttgcaaagtgggtggcttgcatcttcagagggttaaatattagagtttttgttgtagtataaataattcattatttatacataacaaatatgtgatgattatattcatgaaacatggagaaaataaatttaaattattatatactgaaatgaatttgcaagaaaatgctatgtaagagtttatatggaaagataacaagctaaatcacaaatctcttggaaatttattaaatttaaatagtcatgttcagcaagtatgtataaaggatatcaagagatatgtgaagtattttgtttctgttgataattatatgtaatatgaggaatggttgacaagcacgttaataatccttgatttcaacacatcaacaagtaaatcacatatattttggactttacatgcacagttggaagtgtatttaattatactaaaagtttaagaaattgagatgtgaactataaaatatgtgatatgaatgtgtaattgacaatacagatttaataaggacatgtaatttacaggtattagttgtgaaaattgaattattatagaacaaatgagtggaataagatgaattagggatttgaattattattttgttattattattgttgttgttgtggttgttattgttattattatttcttttgtagctataaaagttctcttctatagtttttaattaaagtaaagaattccatttacagagttaagggtgtgtttcaaatttgctatatattttttgaaataattagttttttcgttgcagaaattttctttagtctggattattgcaggaatgtaacatcaacattttcaatcaatgtaataaataacccgcagcaaagctttctgaacttgtagaatccgcttgcagtttatatgcttattttatttttcctttttctccattgaattatcatgattaaaatagttcatgttgacaatttatttttttgaatgttacctggtttcttatatgtaggttgtaag

SEQ ID NO: 6334 - DNA, 306 bp, Ricinus communis
  Intron number 10 from transcript 29589.m001285 (locus 2958 9.t000064) derived from phytozome v7.0 (chr-ID 29589; pos 446959 to 447264 reverse strand)
aaacgcactctgtattgaagaatattgtgcaagaggtatgttggtataatttagatttacaagtatgcgaacttaactctggagaaacagaatattagtagtttcaaattcaaaatctcttcctttctttccattttcctctttctgatcatgacatccatgcattgaggttatttgaagttatctcttgttcatgggccatttcccttcaatgctttaaaattctgtgaaattcattctattctcttgttgaagaacatgtttaagtagattattagttaacttttgcaggaccaggaaacacaa

SEQ ID NO: 6335 - DNA, 3113 bp, Ricinus communis
  Intron number 2 from transcript 29869.m001178 (locus 29869 .t000043) derived from phytozome v7.0 (chr-ID 29869; pos 4 77282 to 480394 reverse strand)
tcagaaatgtaagtatttatgtgttggcatgttcatgtttaattgctttcgggatcttgcttactgttcttgtaaaattaccatactcattattagtacttgtttattcttgatatgaattaaagcatcaaaattgtagctgctatggatttttttttttgtggttaatatttcatttctaattaattttatggaatataatatttgaattagttatgcaagattgttggtattcaacatgttttgaagtgtaaccaactgaaattacaaataagcaggcctctgctcatttcatgcaccaattactgattgagcttaggggtgcaaatgagccgagttgaaccgagtttttcaatgttcaagctcggcttgcagaaatttgactgagctcgagctactcaaacttgataatattttatattttagagctcgagctcggctcattataattttcatatgctcgagctcgatttgagctcggttcataattagctcgatgctatatataaacgagctgaactcgagctcggctcattattaattgagtacttatataaacgagtgaagctcgagctcgactcgatttcaagctcaattttaaactcgatttcaagctcgttaagcaagctcgattttaccaaatatgtatctgttaattttacaattataaataaattatacacaaaagcaaaatatacatataaattcagaaactaaaataattaaatcaaattctttataaaaataaagagttcaacaaactccatgaatacagcaaataaaattagaatacaacatatgtcacaacaagtgatataatgcagcctacaatgatctgaaacttctaaaagcgctaaagatattgcaattcgcaaaaagcgctaaaaataataatcattcataatagttttactttatctataaatttcattttaagcatattgcaaatatatttactcataccttacaaatgcatagactataatcttcaaatatctttaaacatttaaataatatatacttgttcattcaacattgaaactacgtagttttatagtaaggcaacatagtttaggttgatctaagttacctatatcatacaccaaaactacattgtttttatacataatttttattttattgttttgcttcaattaatttaggacaaaaaataaattgataagacattaataataattaaatgtacattaatcaaatgccaacttaattaataatattattaaactaacacttgattaagtaacaataaaattattcaattagagaatttacaattaaacctaatttgttggtatatattgttattttcatgtaataaaagttgaatttttatggtctatttatttatttattctttttcaattagaatatattatttatttatttattgagctccttaacgagttagcccgcaagctccttaacgagctcctttacgagccagctcgcgagctcagacgagctgagcactactaagcttgagctcacaaaacgagttcgtttgaactcagctcgtttattctgacgaatgaactcgaacgagtttttatcaagccaagctccaagtagcttgcgagcggcttggctcatttgcagtcctaattgagcttatctgggtcagtgtactacaaataaaaaatggtaaaatagtcagtaagaccatcttggtatagatgcagttaagtcacattgcagtgctatgtgtaaatgtcattgcatgtttgttttccctttcaaatattctggtagtgtcatggaaaatatgattttgatttgcacacagcatggtcatgaaggttaattactatttgataggtggtggaaaattggtccttgcatagattactatggctagttttgctgcctgtttgtccttattgagacgccacataaattgttctttgtcacgagcactagatttttgtaagtgatgtggatttttctctcttattgatgaatggcttagggtgtctttacttatagaaaattaggtcagttttagaaaaaatttcaaatgaaaacagaaaatagaattttatgtttatttgtgtacttttcttaaatgaaaatagaatacaatttttcatgttttctaaattataattaaactttggaaaacaaactttaacatgttttctatgtttttctttttataagaactcacttgttttcaaatgaaaacaatgaattttcacttcatttatttaatgtttaccttttaaacttaaatattacccaaatagaaataaaaagttttctatgttatagcaactaaacatgttttacaaatttatgcaaattttctatgaaaatgagaagtttttattttccttaaaaattagaaaacgaaaataggaaaagattttctacaagtaaacatgcccttagattctctcatctaggtctgcaagttccctttgttctgataagcaaaagtagtaaaagagagaggagagagctctttcaatcttcataaatgattctgcttatctagtttattatggatcaaaaattggcctttcttgcatttaagtgagtcaatggttgatgcctgcctgtagttggaacattcttgaaaattgaacatgaaagggtgtcacagtgcatgaagctttttgcattgtgatatggaagggttagatatacatatgaaagttcatccaatgggttacctccatgatcttcatgtgacattggagaaaccgtaccattgcaccaagtttcatctatatacgaacacaatagataaaggttttatttgtgaaataggttttcctgctccgtatttaattatagaatcatgtcactaccacttgttattttgggtgtgattagagcatcttgtcaatgcgaaaatatttgaactgcaagaactagttaattgaggttgcttctgccaattgaaccaagtataggcatctctgacatctccttgattacaaaattttgtgtagcatcatccacactcattcagttcaaaagttaccattgacatgatgacttggatatgttgatatattgattgaaatgatttttttcctgacttgtgtttaatctttctgttgtgttattatagttctttcggaggttcc

SEQ ID NO: 6336 - DNA, 934 bp, Ricinus communis
  Intron number 3 from transcript 29709.m001197 (locus 29709 .t000033) derived from phytozome v7.0 (chr-ID 29709; pos 1 54950 to 155883)
gttgggtttcaagactcccagagaggcaattgaaggtttattcccttaatctctttttttctcctgtttacatttgtgttctttttcctggagtgtcttttgtattagattcgcttttaggtttatgtttgggaatgtcgtgggagagtgaacgtcgtagtagtgaacgtcgtagtagagttattataatttattcattttggttgaactgttgcagaagataaatcgttttgttattaaacaaaagccttgatctggatggaccaatttcctgaacttgacatttctccttggacatgattacgaaattgtgtctaagagaattatttggggattattctgtggtatgaaacatcttctttcaaaatgataatgataaaaaatctatgtccattaccctgcaataattgagtggaagtcaacctcagaaaactgcagtacccctcaagtgcattttgctaaactagcttggtcaatctgcagtctttgctgtacagtttgggaactaaaagctaccaaagaaattagcaaccattaatgtgatgtctgcttgatcattgaaaagaagaactttacattaacagtttgggaactaaaagctaccaaaaaaattagcaaccattaatgtgatgtctgcttgatcattgaaaagaagaactttatgttctgtttcgcagccttttctgtagtttaggcttggggttggcttagaacaattgcaactttatgttttttgtatttgacttctaccttgacatacgttacaatatatgctatattggatggtgcacagaatttgattggtcatgtggatgttgtaggctaatttcgtactccagctgcatttcttgcttcattacttcttataagcagaaaaatacgggataatttgatggttgagatctttctctacaggaacatatattgacaagaa

SEQ ID NO: 6337 - DNA, 1041 bp, Ricinus communis
  Intron number 1 from transcript 28962.m000452 (locus 28962 .t000021) derived from phytozome v7.0 (chr-ID 28962; pos 1 22588 to 123628)
gatttactggtaatcatttcttttgaccctatttgtctctgtctctttgtgtgtgtttgtgaaaactatgtccatatgaatgtgcctttgaggtatagtttagatgctgaagatttatttgtactgtagttggttctgatctgatcctctcttgtgtttgtgaaatgaacatatccttttgaagaaacaaatttaagttactgttagatgaatgagacaatctgttctctgttttcttcttttttaatgtcttaacgaagcagaaaacaagaacaaatatatcatggataatccaaagttgttctactaactgacatgtcctcaaaatacataggaactacaggcaattgtttgtctgattcagacggctggatgtgttttggagactaatttgttgagctataccaagatgagactacttaaattctgttttatgttattatcataggaaattttgttttgtattctctagatttccctatgtagttctgaaacatcattttgctatctatacaacgggaggcatgctttggagtatcatgttctactgtggtttatgcttttttttttgcctgtcagtttctgctactatgagaaggccgctttatgaatattttataggcttaaagggcttttctttaatttagagaaggctgagttccagaaatgtccaactgatggaacacagaatatgttaagttctgaggttgtaattaaatcaatgagtaaaagtaaatttattattgcaaatatcttctagtcaatatctcagtttatatctttttgttatagtctgtttgttatttttctgtttcctttcccatttagtgtttgtgacagcaatttgttcctttcagtaggcaagatggagtttgaactttgtagaatatttaacttccattgctttgatgtttataaatgggacacagattttctccttaatctttatctttgctattctcttttcagtttaaatcctgtgtgctgattcttttttgtttttgctatttcttaaggtgaaaatactctgtcacctgcatc

SEQ ID NO: 6338 - DNA, 918 bp, Ricinus communis
  Intron number 7 from transcript 30190.m011307 (locus 30190 .t000543) derived from phytozome v7.0 (chr-ID 30190; pos 9 7504 to 98421)
ctttgcaaagccttgagtcatttagaggtaaggctgccttttttaagtaaataagttaattcatgttgtcttttgttttagtgccaaaactcaaaactagcctgttagaattataattttttagttctaagaatagcagggtgtctactctctgttaggccaaatactttcaacataataacttctgtaaatattgcctatgcaccttgctagcagccagcattaccgaatagattatatgttttgctaccatttctagtagccatcatcatcctttttgtaaattacggtgacattgtagtgctcacaagtgcatgatttaaatgtgtctaaagtaaggaattggctaaagaatgaaaagtggtgatggtactaatatttttattattatgagcccacttttaggtggcatatgggttactctcttataatattagcttgcattttgttgaattatgtatttggggataaggaggattctgataaaagacatgagtcagattttacatttgtcctaaaagatgtgagatctaattctctagattgtaacagttagattttagcagttaaagtgcttcattgccatactctattaaactccaattttgtaaagaaaattattatcttttcaaatcgactaaaagatgcaagcaaatgaaatcttagcctttgcttctaaacaaggaaaatgaacttcttgtagctactaaaatttaacttttgcttctgataaagaactgtcacaaggctctaattcattgtctccagtttttgcatcttgaatgcaatcggcattatgcatcgaaataatgctattactggttgttcatactgatgatttcttctcattgttgtttggtgaacgttttccatctgtaagaccgtaacatgttcttttttgcttcagactctttgagc

SEQ ID NO: 6339 - DNA, 3622 bp, Ricinus communis
  Intron number 4 from transcript 29733.m000741 (locus 29733 .t000005) derived from phytozome v7.0 (chr-ID 29733; pos 1 07854 to 111475)
ttccatatacaagcgctttcgcctgaaagtattgggtacatttttttattctctacctctctaggtctagttcacaatgcagcatactcacataaaaaatgagactaaaaaacaccatattcaatagtacatccaaacaaatgatgaaattccttttgggattattctattgattttatctgaaaccagaacatctctaaggttataggcctattggccaaaatatttgtttatttggcaaattggccaaaatttaaagattggacataatggttataaaccatgaagctttggatttcttaggccaataggccaaggttattctaaggttagaaccttttgccgtgcttagttctaggaaacagttttctagtttccatttacaaactggaaaacattacaaaatacattaaaaaatttagaataatggaaaacttgaaaattggtgatcatgttaaagtcgcgcagttatgagagttgaaaagtaaagcacacttattcatataaaatgaaagaattgggatggctaagtgatcaaaactaaaaaacatttatggtgagaatttaattaaaaagataatcagagttaagcataaggaaactacagatgcataaaaaatatttgggtaaagatagcacaaaatattggaataagaatagcaaaaaaaaaaaaaatacaagagcatataacagttatgtgttaagaaaatattgagataaaaaatggttatgtttgatacttatggcttaattaaaatatacgactaaaagcaaaaagggccaataacatctgttaagatttaaacctagactcccagatgaacttgattttacgtaagggttactaatattatacatatatgtcaaacgcaaagcaaggttaagagacctgcgtttttcaattggatggacccttttctctagagaaagaaccaaaaacatcttcatatagtttttgggaggctactgtttgacaaactagtttccagtattccaaaacctcttttgacatctaaataacagattcttttctcaagttttctagaaagcaacccttagaatgtctttacatgtagagaacaaggatttgcagaaaaacttttaaagaaaactataaagtagagtttcatgttcaattgtgagatttttctagttagaaaactgaaaaaccagttttccagttctttagcttataactgacccttcaacccttggaaagcaaatctaatgttattcattaatttcttacatagacatcttttccaaatggacaacacataagctttggtatttctcacttgagtgcgtttgagctctaggggtgctgggatttgaatgtcagcttgaccactcaattatttttactttactcctttttgtattctttcttgtattagcagtctggcacattttctttttatccttcttgttttacttcttttagctaggttccatgtctaactttattaattatttttagttctcattttcttgaggtaagtctcaggtcttttcccttatattttgttaagtttctttcctttttcttttttcttttatctattccaaattaaatgcctattgtcaaggtttttcgttttagggtaaattactatgacatcccccgaggttatgtgaaataattaagttaatcctatattttaataatcattacgaaccctttaaggtatggtttaatatactatttcacccttccgttaaaatttcagagaatattctgttagttagagcacattacttttaaatatcccaaaagtgccctctaaatatattattatttttcccctccttatataatcatatgatataatatactaataggtccttaaattttgaatatgagattaatttttatttttattattaactagtaaaatgtattaacataacaaaataaactatattaaaaacttattatgatattttaatttcttataaatagctataattagaacttcaataaaataaattataataataaattttttaataagtaatttcgatttttaaaaaataaggtaagcatgataagtttgttatgatatattttcgaaatcaaattaaatgatttttttataaattttttgtaatttattaagttattaaaaatttagtaaatttaatttcataattacaagactaaaataatcaataaagtctcaagtgtctttttataaattatacaatatttgatgtaaccttttcagtttaaatttaaattattataattcttaatttcatatatatattttcagtgaaatgaaaaaatttgaataataaaaatataatcgcagatgctttgttaagttttataaatagtattgaatataattattttaaaaatttataattaaattatcaaaaattataatttatttgtgatatttaacaaaatctcataaattacccatttaaattggtatattgtaattccaatagggtcatagtagttcatcctataaaatttgatagcattttaagggtgaattagttttttttttttatattatattaatggattactttgacagaagggtgcaatagtatattaaaataaatcttaaggaggttgtaatgtattattagaaaatgagggatcgacttgcttatttcatataaccttaggggggttgtagttattttcccttcattttttaataaattttacttttaaaacagttaatttatctagaaaggaaacatttcacttttattctttgattgaaatttgtaaatactttagtaacacgatgaattttaatttggaatttttttttccttagtaaaagagtacaggctccatgtttttgaagaaaatgaaaagcaaaaaataatgaagaaaattgttttccacaagtaaacacaatctccacaactaaatagtgccatatttcccaaattcagtgatttatgggcataaatggaatttatgcattgtaaactgtttcttatctctctgtttacttattacgaaccattgtttacttgtcgaaaattaccgttgcttttttcactttctaggctacttgttggttgagtttatcaggtatcatgtattttgatatgcatgtttaagatatgaacatggctcctgcattaattaattttgattttagggcattctttagctgcaagttaaaatgtcccctacactgaaatgatgcttcactcctatttgaagaaggaaagaaagatggatgcaccactaaaagtctaaaatgatatgttataagcatcagttcaatccaatctaacttgcttcgaacagaattgtgggatataatgagtgagcaggtcatgcagtttttcttgcttaagcaggataatgagatttgtgattttgtaactgctcttaaaagttatccttttcttgcatgcaaaattgatgaattttgtgctttgctgacttgactatttggaaattatcattcattgttgtcttcaacagcaattaaatctaaagctatgtggtatcctttcccatttttttcattagatattgaattatattgatgattgatctatgattgtcccaactaacaaagattatgcaacaatgccctcaggtgattcttataaccggggagagaagatagacagt

SEQ ID NO: 6340 - DNA, 932 bp, Ricinus communis
  Intron number 1 from transcript 29907.m000652 (locus 29907 .t000031) derived from phytozome v7.0 (chr-ID 29907; pos 2 72493 to 273424 reverse strand)
gttgatcaaataggtttatctctctctccctctctctctctctctctcaatctttgtttttggccctctatttatttatatcattattattattattattattctatgcattttagtttgcatgcaagctttgaacaaagagttagcaactaggaaaccttgatttaacatcttgtctatgtccttttcatggaccctgaaagaaatctatttgaaagggaattttgccacctaaacctgcacttttcttttcttaattttattaccaattcctttttaggtggttcagtatctaatgaaatagaacatctttgtcctacctttatttttcccccttaaaacatcaactaggagactccactttgaaattttatttatttattgccaaataaatttattttcttaaattaaaaagacagaaaagaaaatgtttttttcatttataatctaattttaaaaataataaaaattatcaacaaatctaaagtataactacttgtgtcaactaagagcttttttttctatttttatgcaggaaagttcactttttacctcagttttatttcatctttgcatctgatgtagctttttgggtcctttttgtttttttcccctatattttctatttttttcccaatactttgattcctttttaaagcttaaataaaggcatccataggaggcttttagataaaaaaactaagcaaaaaactaaaaagaaattcttatttgttagtgcatgtgatctgcaatgatgacaggcaaccttcaacgcaaagttacatttttaagaaggaagaacaaacattatggattcatatgataggaattgcgcacttaatattttgatctgaaatctttgttaatatatggcaatagtagatttatctttatttgggtttaaaaactgtgcatgcatatatgcagctgaa

SEQ ID NO: 6341 - DNA, 903 bp, Ricinus communis
  Intron number 3 from transcript 29948.m000687 (locus 29948 .t000001) derived from phytozome v7.0 (chr-ID 29948; pos 1 2227 to 13129 reverse strand)
cagaacttagaggcgaggtcaggagtcaaaccagtctttatttcttttaaatcatttttgatgaaatgcatgcaatttttcttattataatttctgttaggtaattcgtcatcttggctgttgcttaagacaagtggacaacatgcttttgttctgtttttgaatcatacaagtcataatcgctgtcaaaatgggactctaccacatactataaaccagcgggggatagatttaaatgtgtttgctatttgatccatttagctcggagatcatttaaatatgccatttatagtacaatctctctatcgatattacatataatagggaaaggaaaacatttggatggactgaaaagcctgtattactttctaaaatgtttgcataaaaatcaaatcctctagttatagttttgatttaaataattgtgaatagttctgatttaaataattttgaatagttctaatctctgatggagtcctacttgcaaatatgcatataatatcacatgcaaatatatggtcttgccaaggatctgtcaccaatagaaaattttccccaaagaccatgagccttgtttacatctttcctttcttttcccgtctattttaatataacattgagaaatgtgataataaaactttgaattctaagaaatttatttttatttttaataggatatatttgttagatagtgatcagatccaaatgagaatgaatgttataaattagaaaataattttaatgaaaattttaataatttataaaaatttagttggtgggtatgctctttatctttggtggtagaagcatatgttaatgattgcttttctttttgtagtaataaatcttttgcttttcaacccatatatttgacttagtatacagaaagctgcaatcaggaag

SEQ ID NO: 6342 - DNA, 729 bp, Ricinus communis
  Intron number 1 from transcript 29607.m000240 (locus 29607 .t000009) derived from phytozome v7.0 (chr-ID 29607; pos 1 38889 to 139617)
aagagattttctccggttttgtgcttcaatactcggtttgttctattttcttgaatgaatacttactgcagtaccatttgagtttaactgctttgatatctcgttttattgacttacctgattttgtatgttttgcatttattgggagtgctaagtagatattctcaaacgaagaatatctttacacaatgtttggttgaaatccataaaatttatggaattcatttgcgaatctaaaatttatatgctttaaatggatgaacttatttgtgtagaattgattatagttaaactaaattttaacaaaataggtagaatttccaaatgaatttcacgtaagtaagttaatacattttataccatcaaaatatctctttcaactttatcatttccattttctttttcatgtctttttctcaaatgaaatgaatttttttatagatttcaaccaaacatagcattagtgaaacttgaaaacttcttttggtagattgaaagtctgatttggtttcgagaagttgctatacagtttcagacttggagttttatggcacttgtgtatttaactaaggaacattatcaaaatttgttgaatcatgatacttatattgtgttgatttttaattgaagtaaaagcagaaacttatggaaaacagcagttatggaatatatgttcagttcagcttctagttaaatagtagcaacttaatcggtttgtggttgtaggtg

SEQ ID NO: 6343 - DNA, 749 bp, Ricinus communis
  Intron number 1 from transcript 29848.m004635 (locus 29848 .t000191) derived from phytozome v7.0 (chr-ID 29848; pos 1 072582 to 1073330)
gaaggtaatatcctttttcttctttttacatatgcattattgttttgaagcgaagcgattttcaaattaatttctcaggattttgatgggttcttgttagtagattagaatataaagagatctaatttgattcctatgtgttcttttagtacaataaacatgttgttttggattttaaaacatcagaaaatttaagcccttgttttgggaagtcaattctgtttagtcaattctcatgtttggatacaattcaattctttcaacttcagaaaaattaattgtgccaaattgacatgattttgcaagaactcaattcttttaaacacgtgcgcctaatttattccaacagaggccttaaagatttccaatttgagaaggaattgcaatgtgattttccaatcagcgaggttcctaatgttgtctgcataataatgctctgtagagggtattagacttaaatgttccatattgttttctcataatatacaccaatggagacagtagctgaagaaacaaagatgggtcgctccctccttctgcatttctgctatccttctacatgcttgattacttaaatcaaatcttatatgtatgaaattcgagctgtgtggaatgctactatttatcttcagaaagaaaattatcaaataatttatcacacgtgattattaatttaaattaaaatttaatttgtgctttggttgtaatgcgcaggagctacaagacagggtgaaaaaggccaaggattc

SEQ ID NO: 6344 - DNA, 4255 bp, Ricinus communis
  Intron number 1 from transcript 28180.m000390 (locus 28180 .t000015) derived from phytozome v7.0 (chr-ID 28180; pos 8 7984 to 92238 reverse strand)
aaagatttgacaggtttaaagatgtaagttcaaagttttcccccctttgtttttatagctcaggtgtgttcttttagatgagtgtacatttgctacttagatgagcttggtagaggtattagttcataattggggtttcagacttctgattggaaattggtaaggttgcaattttgtggtttgcttcagtcaattggaaccattgattcagtacaatctacaattattttcggtaattggatgaggaagcggttttaagtgtgtattgtgaaaggtgtgctttaaaatctgcatggcttagtttagttttatggctagctactaagcgagcgcttgttgacattgttctgcatctcaagaaaattggggttacttttagctattcgacatactgtttagttgttcaattagtttaagctaggtgtttcatttggttttagagatatggaagtaccatgttatgtcttatgaagtcaagtttctgtcaggaatgtgtttttgatacacttctcaaagggttgaattatcgtctttatgaataatagagaacaaagaatacagttggcttggcacaataatatatatttcttgtaatgtggttgggctagtggaacagatatcacttgtgcggaaaattttccactcattcttcagagcagtttaggagctagggtttatagttttaagtctttagcaacattaacttttaacttcagcaactgaagatatgatttcaattaagttcaattaatgatcaacctactgtggtgaagacagttaagaaaaatagcactattagtgaagtttacaactaatagcaatactttagtgcctctttcactaatttctttacaaattttgttaactatggggaatgaacaggaagggaatttgtagataggcatgatgtatgaattgctaatatctcaaacaaaatgaatctttagatactgtatattggttttactttcttttcattctcccgttgggttctttgcattttaataaaggagaatttgtgaatcaatattgttactctcttttgtatatcaaatacagatttaagaccttaggtttaaatttcctcgcatatgcaagaggccaagaaattatacttagttttccacttctctagaaaaatttactgtctttgtctctcttaattttccgtttcttacattgaatattcaaatgttggatttgccaaggtcagatttcaaaaggattttaagaagttatttttcccttaagaggcatgcttttatcaatggaatttctactcaaagagagttgctgttcccattttttacaatcatagaattacttttattcatgtacttgtaattttaaatgttctattagtttaggtttaattttctcttagaagtattccctacttgtctttaggatgtttgttttagaaattttgtcaatgttactttgtaggaagagattgctgattttttaaatttcagttttctgttcgttatggatggcaatgggtaagttaaggtagggttatatctttacccataaccaaaagaatttatatctatccttggtacccatactcatttgggcaacaaatattaaactctttcccatactcatagggttatggataacccattgcctaaataactatcaaaatccagtaaaatctctttaaaataatactattaggagtaaaaatatattatttttctagaaatgaataatttattaatttatcaatagtgaatatttaataatttaggaagattttttttgtaattatttgtatatgcatttatttatcaagattcatgtataaattataaataagaaaaatatggtaaaaagttagtgtgcatatacatagaattcaaaagttatcacatatgtacataaaaaatagtatatgttacatatatatataggctaaataaagatatataatgaatttagtgataaaaatcttaaaaatgtcaatttatgtggtttaaactacatagacatatagtaaatgtaatttttaaatttaataccctaaagataaagtgtcataaaatgcttcaaatacatagaatataagctttataagttttaaactccagagtattataatgtctgtaaggattcctatttgaaatgtgtaaagaaaatgtatattaactgatgagataaagagagcgtccaatgagtgtaatgatgtttgataaaaaagaaatgagtataatgacgagcatccctcttaaagttaacagaagtttcaatagtgggttgaaacaagcttttccattatttgttcttttatcaaaccaacaaacaaattcttaaacattagaatgaatgaattgcaaaaataggagttgtctaaaacaaatacctttagtattatgaatttttatatattatttttttatgtatttgattaattattaatttgtaatatttgttcatctctaaaggatttgaaaatattagtatcttatgcatttattgaggttgttaatttagtacagtgccctgagttaggattgaaagattttattatttagttgaagttattactttattgaacatttatttacaaagatgttactgtaactataaaaaagaaaaatgagtatattaaagcataagtatataatttttaatttataatttcactgaactaaaataattagtattgtattcaattagactatactaaaataatataaattaaaaagctaataaaatattataaaaaggtgaacaattaaataatttgtctaattcttcaaatacaattgattatatatttaaaattaataattcaattataaaattcctaatattgtacatctaacttataaggaaaagatatttcggatagggtttggttacgggtatgggtaaggtactatattatctataatctacccagtcaactctggtattacctgatttgactgggtaggttccaggtaggcgtccacgctaggatataaattgccatccctagtttgttctttggtggattcttttgcatgataaaacctaattactaaaagtaattagtttccaaaatctagatttatcccaacaatgcatatattctgttttaattctacttagctttttggactttatatcgtggtctttcattgcttaggcttctttttaatcatatttagttttatctgttagaactactcattaacaaaatgtgtacaacaagtaagaaagccaatggttttaagaaatcttatcaacaagtatcaaagccaatggtcctcacacttgaggatgccccttcaattcatatatgaaggaacatataatagtcgtcaaagatgcaaggtggcccggtacgtggcgtctaggcatcatgtataagtgtaagccaaagaatatgaggtgcatgcttatttaaaagtttatagactctttcttaagttttcaattctataaattttaattgttgaaaactaaaacatttaaaacttttggaatagctattgggtggttagaacatcctatctttagagataaagaagggcgtgaactttttgtatgtcatatgcctacttctcttaaaacatttccagttgttttggtagatggagtttgtctccctttcacgaaaacgaggaagatgaattatgtattttttttattagattattgatgggcgatgctttgatcacttgaactacaagttcaaactgcaatgctgttattaattaatatttatatttcaatatctcatatggtgaaggcatagtttttctttttctttcaaataaaaacctattggcgccaagcaggagggaatgctgaatgtttggtaaattttcctccaactaggataaaagatgccactgacgcataaaaaacatctctatggagtgccttgtgcacactagagagcattgaaatcatctcaaaacatcaacaatagttatctccaaagtctaatccccaagctacatcaaacattacaatataatgaagatggctgctaagttttccaacaaaagccattttcaaccagcttgcatggccaattcagtttcctttctcactttattatattctttttaatatatcttggaagaaagagaaggtgggtttgtgaggggtggggatggaggatgctttcttcctttgacctaaaaatctatatagaagtgttttattcttgccaagcagattaacctctgtttattaaccaaggggcttgttttatgcagcttgctttaaccattgtttatatagctgtgggtgt

SEQ ID NO: 6345 - DNA, 1819 bp, Ricinus communis
  Intron number 2 from transcript 30174.m008734 (locus 30174 .t000131) derived from phytozome v7.0 (chr-ID 30174; pos 2 576951 to 2578769 reverse strand)
aagcaccttttacctgggtaagctcttaagccaatgaaaattatgtagcaaacacatgaacccaagattcaaaactttgattctgtatacaaggatggcaagtaatttactatcacatgacagaatgattaaaaccattagccatttcaatataagttttattttgtgatggactatcatgcagatagtgtaaagttcttctccagatacctgctaatattttgcaataatgggataggccatgttaatgatttatattggagtttgcattgcgttaataaagcagcatgtgatggatcatcatcattgggaattatttgttttatctgtttgcatgagtgatttggaccatggggcttgctgtctaactgctgcgacttggaaacttagaaggtgttcattgggcatggacctgtatggttgtgtgagttgtagatcgttgtaattggacgtccagcattgcattgattttgctaattgctatatacaccaaggatgatacttttagtgtactgagtgtgattggttatatatgatttgatcgactatggagagctcgtaggttacaaagattgtttagtggtcagtcagattgaattcagacaaagtacacttgatgccctgtatgtaatgtagggattatgttgttttttattagatacgaacagtaggattatgttgggttgctgaaaagaaataggaatatagtcaaaaagtataatggcgtcaagaatggtagtgttgtattattcaatagcaatacagaaaaatagaaaaaggagttttattcaaattattttaggatattttctgtcttttattatttataaaccatatgtaaaagtattcttctgttattatttgcatatgtaggagcaggactagatttttatatgttggggatattttcattaaataatagaagtaccataaatttaggagtgggcaaaatgtttaggattactttaagttgtagagcttaactaaccaatataatggattagagaactatttcaaatatctccagcagttattttttgggatgatgtgatgcaaatttaacctttggagtgattccgagtttagatatgagatttttgtttcatcaatctttaatgtcaaatagcttatagtcgatttacttgttttacgtagtgaaagatgggtaaagatattgctgtgatttgacatactgaaaagcagctgaagccccatgatgtgttggtcttaaaattcaaatcaagataatgtttaaatgctgagaatatcctcaacttgttgcatcattttttataggtgctgtttcagtgtttctacataattttggaatgaattgttgtaatgaatatcctcaactttttgcatcatttcttataggtgctgtttcttcataattttatattttgctgaattatgttagctgtctgcaatgctaatgctattttgactcgtatcatggtagaccatttgtttagtagcttgagttgtggccaaaatgatgcaattgagcttttccactggctttttgagtgcttatttgcatttctgtgttgtatattgcaatgattcattcttgtattcaaagatcctctttccttacctctcttttctttttaaaaaaaaaaaaagaacaattgaaatacctaaccttctattgttggggaactttttgatgttgttattgaagtgaaatgatgatctttctcttccgatattcaaattgtcttggcttttgggcactgctaatacttgctattgattatatcaattcctgacttcggcagcaatgctttaattttctggtttatgtagatcaatt

SEQ ID NO: 6346 - DNA, 2160 bp, Ricinus communis
  Intron number 1 from transcript 30198.m000858 (locus 30198 .t000016) derived from phytozome v7.0 (chr-ID 30198; pos 3 88163 to 390322)
tcagtctgagcagcctgatttcattgctttcacaggtcccttgatattctttttgatgatttttaatattatatgtgatgggtcatatatgtgttcatgatgattgaaaatgttattgaaactatttcatcgtaaactaatggtggtgatgttgcaattattattttggtgggtgctgtaactggaaaattacaatgcttcagactttggttttagttgttattggctttagacaaagtatttgaggcatggctcttttggggaaatatgataacgtttttgaacatagaattataagaataagttaatggatttggaggaaaaaatgggactgaaatcatttgcactactttgattctgcggtaatattaaagagggagaaattatttgctttctaaggtttatgttctgagttcttttccatcacacatatatttacattgctttccaggattgcatgacatcatgcaatccacacaagtatgactgcaggaacggtgctacatacccaaagtaatgaaaagcccaatattctcacatagtgctgcatctctagcaatttgtaatctggattgcaggatctggattatgtattcagtatttttttcttcttcgaaatagatagattgtcagtgatttggtatattgaactcaatattttgaaatgcaaataaccatgagtactgaagaaaacaatctgagtgatacataaatttgatgatttattctcatgcttaaaatttttgggcttgggtaaaattctacagcatttagaagttaacatatcattttcaattgaaactaacctgtaacttataggacattacaaaaaacctttgtgattctcagaagtaatatctttatgattgttcttatttcattccaatatatggttttaggagtttatctattactatggaatactgcattataatgcaatctagttagttctatttggtttctactaaacaaatcctaagtgtacgcctaccatactgcatacccaacctaaaccctagttatattggactcctaaagatattttgaatcctttatggactcgatctcccacagaatgttaaaaggattttctgatacctaatggaccctcattaagggtcgtacttataatcatggtttagaaaattgaaaaggaaaccttaaagacattcagccagctattctaactgagctggaaatttaaagaaaaaatcttctcaagtttaaaaataaaggaaacttatggtacttgttagcaaagaagcgacttcaataagcatcaataattggtctctttaaaaaataaataacaaaaagtaagctctattcaaatttagactctaactctttaagagtctctacgcatgattttactcgagcttcttgttctttgtgtccattaattatgtgctttgggtagtttgtggattggatgaaatgaatttctatcattcatttagagaagactatttgtcagactaagttaatttttttttttagtttcgttattagatcttgcagtttggatattgattgagttaaaggcattgtttggatataagggctataggcaggataattcatttatgtaatggattacaagtttatttgtttttactttgttttttagactgacacaagctggacccatacactttgaatgtatgcatgtgataggttgccaagatttgaaagtttacctggattaattttctatcatttcagtgataggattgatccacttttcttgcgcttgatttagttgtataaatgtaatatgagggctgagggatatcatatgacaaatgatggcaatttgttggctaggatggcagaataatgaaggctgaggaatataatatatcaaatgatgccttttctctttggttaggatggcaatattttgtgcattacagattaactccttctatatatattctcttctggttcaggatattcataaatcatattgatcattgaatatggggaactagaggaatgaaacatagggcttttctttttcctttcttagaacatatttctttgtctgatgttgcatgatttcctcctagtcattctcttaccctttcctttccaaattactaatctgcattcatttcctgtgaccaggagataacatttttgggactagcacttctg

SEQ ID NO: 6347 - DNA, 977 bp, Ricinus communis
  Intron number 4 from transcript 29660.m000766 (locus 29660 .t000019) derived from phytozome v7.0 (chr-ID 29660; pos 1 39227 to 140203)
ataaaggagttgaggtattctggtgcatttagtctatttctgtgcttgtgctttttttctttcatagtttttcaacttgaatttgtgggaattgctaaagaactaaactttttaaataactctgatttaatgattacctgaaaatgattcctttattgagtaaagaaatatgttttgggttggttgacttgcagaccttttgtaacaagtgcaaacttacagaacttggaatagtattcgactgtgctaattcaagtagtgttcatcttaattggttagtaaaagcataatgtatgcataattggaaactctgtcttctgttcaatttggctgctgtaatttaaagactttgagggcttactttctagggctttccacttgcgctgcctggaagcaactggaagttgccttctctttaagctaagcttggccagcatagtatatatatatttccctgcattttcatatcactaagccctattgtccaagagtatctgtatcttaatttttcacaatttcacgatcacatcttagcacataatgttgcaatcttgcttatttttgttagttttgctggttcaatcattggaatgaaatatctgctaaatgtgaccgtggaaaagctctgaattctcaggaacttggtagccaattttgttcatgtgcaagcttagattctgctcaatctatttgtccagagcagctccagggactataatttcagcagattttggttttccattacaagtttcttatggtgaaagacaaaataaaagaatgaaatttgaactataactttaaatcaagtaaccatgtatttgttaatcagtcatggcttttagtagtttatcgatccatatcttttcaggaaacagttctctggcgttcctagtgtttgagcacccatttcttcctgtaataacatataaataatgaatttaggttaaagaagcaggagctggaagtacttgccaagt

SEQ ID NO: 6348 - DNA, 2656 bp, Ricinus communis
  Intron number 4 from transcript 30018.m000546 (locus 30018 .t000006) derived from phytozome v7.0 (chr-ID 30018; pos 2 98949 to 301604)
ctgaaattgaatgtgaggtttcttggtcttgtttcttatattttggatgctcaattctaagacatttatgttattatttttgcaaattttgttttctggcacacatccgaggggaaatattcaaattatgcttatggtatggtcttgtgcatggtaaggcttaacttttgtgatgatgctttaacaaagtaaatgggctgtgattatgcaattacatagttgtgcaagctacagtagaatctttttagtcaaattaactattcaaattatgtttatagtgtggtcttgtgcatggtaaggcttaactttcgtgctgatgctttaacatagtaaatgggctgtgattatgcaattacatagttgtgcaagctacagtagaaatctttttagtcaacattaatacttaatgcatcaatagtcctaagaccgttggaggttttgctgatttgggcttgcagactgaaattttcagtgtacttgaaaatcttaaagatatatatatatacacatatatatatctcttttgcatcttttcgagcggaggggactccagtgcatcttaggttattgttctcttttgaaaactttgtttaatggtttcatataggctttctttgccacgttttgaaatgaccgaagtggatgtagttgcagtcatcaatgtggtattatgcaagcatggtgttcccaattttatgtaacagttgtcgtggatgtggttattcattctctggttttgaattttaaattttcttgatgcatatattgatacattcaattgatttgtcgttttctttactaaaaacatgttactaactgaatgaaacagaattatagtaatataaaatataagctcaaggatcttaactgtgattagaaaaagaaaggatattatttactttagcttttgtagtaggctgttataaagagaccataacttgagtttgaatttatggtttctagttgatccataaaataacaaaagttcagtttgagatgtaacaacaagggatttttgcaagagttcttttgattcattatgcaacaattattattattaattgccatgttctctactcttacatcattttagcatctaatgatttgagaaatctagctgaactagtttttaagttctattaggagtaacacttctaatgtaaatagtttttggctaaggaagacaggtggcaatattgactaatttgttgtaagacattatcttttgcatttgttatttcactaatttgccattctctgtgatgaaccatgatagaatacattaaaagaacaagaattccggatttgattacattttcagtctctttaaagagactctcacctgaatccaggaatccgatctgacctgttcaaacccagtttcaataaaaagttaaaaaccagaagccgaattgacctgagactaaaatcagctgaactcgaaatgacttagatctgaaatgatttgaaacccaaacaacccgagaccgaaacaatccgagcctgatactatcaaaataaaaaatgacttcatactccgtgaccaacacgaccagatacccgacactacttggatttataactaacacaaagccgattcataatttgaaatgacctgagacgtaaatgttcagcgagacaacataacatttttgtgatatttatttatcatatatatagcaataactattactactaattttcttaacttattcaattttcatcttcaagtctctaattttttaaaatgttgctttgtggatctttaaattattaaataaaataattagtttgaatataataacatatcaaataaaagaaaactatcaaaaaaattaatcaaataagagaatgtaagttaggaattagattctttacatttgttatattgcaatttagtttaattgatatgatgaatttaaaataaattcaaaaaagttataattaagtaggcgttgagtagtaagtataatgaacttcacaaaatgtatgattttatttgattaaatgttagtaaccaaatttattagagaaacatagaattacatttataattaagtatattcataagtttattatatcttaagttaataattatttattaatcgataaaattaattaattactcattaatcgattaattaataaatcatcattaatcaacgaattaaataattaatgctttgcttaattaatagatatgtgtgatcctaaatctgttaattttaggattttattatataaatttatgagattaaaaagcaaaatcggataagtttactcggatactcgataagtcaacccagacttcggggcaaccctggctaaaggttattcgaacctggttctacccgagcctgcaatgatcctaactcaaaatgatgcgttttaaaaacgctcgtaccttaaacgcaagaaaatccaagcctgaaatgatcagacccgaaataacataaaacctggaataatctgacagaacctgacttgattcacccgtttgccatttctagttgccatgaataatgattgcagtgctgataattttttatacttgcaaaataacatttttggtcttctaataaaggaaatttgttttctttttgataatctactgcgattagaatttgacatatatttattgtgtctcctgaagttc

SEQ ID NO: 6349 - DNA, 333 bp, Ricinus communis
  Intron number 2 from transcript 30174.m008608 (locus 30174 .t000005) derived from phytozome v7.0 (chr-ID 30174; pos 1 711881 to 1712213)
ggggtatgagctcttttttctttcctttatatatcttgcctaaattgttcttgaattgggtgccttagatggaattggaaaccacatattctgatgaagaaaaactgttttgaagaactactgaaaggagttttaaggtgaacctcattagttgcaacattttgaaaaggatatatataaattggttaggaatgttggagttaatttactgttgtacaggtgtttgatttaaagtttctttttgagaatttcaattagcatgagccattttgattgattttggcattatcaatgtttatgttctaggtgcggcctgaaaaactgcatattgaa

SEQ ID NO: 6350 - DNA, 2375 bp, Ricinus communis
  Intron number 1 from transcript 30186.m001314 (locus 30186 .t000019) derived from phytozome v7.0 (chr-ID 30186; pos 9 21309 to 923683)
ggtccacaaagtagcggtactgtctttcttcctattgattttcgttttcgttttaatcaattgcttttgattggtttttgatgtgaattgattttggctattcatttttattatttttaataaagttaagtagaattgagctcattgtaacttaaatcttgttcttgtggaaaagacccatatcatgtttttttaatctttctatttattgtagtcgaattcaactgattgaactttattaagattggtagctttagctgattttgggatctttatgttagtgaacttcaaagttaaatctttagaaagcacagagtcttgagattttcttttctgatgtacatattagaaatgagtcttttctttgggaagaaaaatgtaacaattttctgattgaatgagctctatttaagagttacatcgtttaatagatctgtaattagctgattctctaagaagccaacttagcaaaaaaaaagaatgttctgttcctagattgaattttcaatgttctgttcctagattgaattttctgatactcttggtcaattgtcttggtatattcgatctttcaaactatgttatgttatttgtgcaactggtttagcatgaatattagatctttctaggtatagttgaactagctgattctttattcttattctagagataagccatctctagcaacctgaactaaactgatgcagcactcagaagaggtttctacttccagtccaatgctagttgtcctaactttggtaaatttctggagctcatatgtaatgattgtaggctggaatttatgtagtttatgtcctggcagttttatgactatagcaatgttaattagggtcttgtaacattttccttcctgcattatccattggagcagagaaaattgctaacttaaagttttgggatcttaatacagttatttgttttatattttaatgcctaactttcgctttcttttctgtgctagtttacaattttgttcgaaaagtggaaaacttgctccttttctcttttccccttccgttgtctactataactttgatcacagatattaggtttctggattcattggtgtaaatctggatattagcctgtgttaatgtgtctgctgcgagtaggaccctaaattctaatgtttaacaaattacaatttatatcctcaataatttaaaattttaacgcagaatttctttctaaaaatatctctagtttcttcatgaaatagtgcagttgaagcactaaaaataaagaaaaagttcccagtcagggttctgaatggtaaacacattttggttattttagggtgctatgagtgggatgtaagatttgtgatcggattctttcttatattctcatatttacatatagctttgaaaaattgtggtatatatagtgtataatggctataatggaccagtttctagcctgtaacacaatggcaagcccaaaaacaactatgtaacgacctttatttaagatactgtatctagtaggacaagtttatgctttcaatttctaaagcaactatgtattgatatgtgaaagattgttaaaggattcaaccttacatctgattttatttccaaatatatgttaagtaaaatatttcgagcaggtcatatatcataatgaagcttattttcttcatgtaattaaaaccttaacccaatttttttaaaaacaaaaattaaaagttcagagcaattaaaaagagcaaattctgccataatttagattgggtttgttcaattgtgcatggttcattaggaccctaattgtaattgagcctttactacaattttttaaaaatctctaggatacattatgatcccatcctcagaatccttccatagataaaaaattgggattctagtacaaaaacttgaatcataataacagataatgctactaaccttgggatatatgaaaatcttcatttccacttaaatatttatctcagttcttttaggtggtgtggaggtaattacatggtagatgtagtgatgctgatggtagaggaccggtggtggtcgtggtttaatgtaattttggttgaaatgtttcatacattctacaaatatgaaagtgagccttctcagttgaaatgttttatgttactggggtttagctctgctttaagtttgtttctgttgtaattgtggtaaccttttaaactgtatcttgtctatgattcccttaatttgcttaatatcttaaacttttatgattgtctcacacataatgcacaaaattttcaagcctctatagtaatgcctttttgtaaacttattatgtcattgttgatatgcccctgtttgcgaataggtaagagcaccctgttgaatcatcttttctataca

SEQ ID NO: 6351 - DNA, 1223 bp, Ricinus communis
  Intron number 4 from transcript 27749.m000335 (locus 27749 .t000007) derived from phytozome v7.0 (chr-ID 27749; pos 4 7497 to 48719 reverse strand)
cgttcctaataccagccttgatcatttcttatttggtaagtctacgagtctatttagttttctggtttacatttttatcaagataaattgtatcaatggtcactttatttcacactaaattttaatttggtcatatatattttttctttttatttgttatggtcatttaattttaagttgaatacagattagttacttatccgagatctaatgatttaattcgctagaataatgatatgtataaagcattcaatgttagatgaatacgtgttttaaaaaattaataagtcattactctagtcattaaaccatttaattaaattactaatttaatccaaaatcaaacacaattttagacttcaaaaattctataggctttgataataaatcttggctgtagttttcttatttatcttttcatcttcttttttttttattattacaataatatcttttttcagcttaatttaatcaatattaattacttttttatttatttttatcaagatattatttttaaagtaataataataataataataataataataataataataataataaacaaagaaagaaaaaagcgaaaaaaataaaagagtgtctaaccactgaattaataatatttttacacttgtttgtatttaagctatcatttcttttatgtttcttacatgtccacatatttatttgaggatgtatgattagttcctattttgtgtaaaaatttcaatagtaaacgagtgtctaaccaccaaattaattaaatctagatgctaattgtaaaataacagatacgtagaatttacagtacatgagaatattttttcctaattgtttacgacgctaatccattgaaattgatttttaaaaattggaattcaatacttcattttaaagcttcaaaattaaggatttcattttatagcattagagattgtgtattgtagatttaggagatttagagatttttttttttcgaaaaataaaccaccagattttagacaagtgattaatctattacccaacttaaagttaaataactttaataaaataaaaagaattatgtgtccaaaataaaatttagtgtaagttaagtgaccattgttataattatccctattttgattatatcacattcatttcagttagtcattataaatgataaccgaatgcatcaacatgtagatccaaggaaacaaggaattttaaattgggaaagg

SEQ ID NO: 6352 - DNA, 279 bp, Ricinus communis
  Intron number 1 from transcript 30190.m010830 (locus 30190 .t000066) derived from phytozome v7.0 (chr-ID 30190; pos 3 617596 to 3617874)
ctccaccgccgccttcttttcccttctttgctcgagtaagtttttcttttcttataaagaaaaaatatactttgcactcttttaatgcaagaatttaattaaattgagtagatttgatatcgtagaattttcaaaaattcaattggttttgaatagaattcttgcacgcacatgattcattccaaataatgtagagaagtagaagaaaaagaaatgtaattataatagatttgggtatctgtagagttttcaaacaaagcgtggaggtggttgatctga

SEQ ID NO: 6353 - DNA, 749 bp, Ricinus communis
  Intron number 2 from transcript 30089.m000996 (locus 30089 .t000010) derived from phytozome v7.0 (chr-ID 30089; pos 5 29274 to 530022 reverse strand)
caagagaaggagacgtctccacattttcattcacggtatgcctcttcacacacataatacatattattagtagtttaaccaaaatagttagtctatatgcaaaatatattaaaaaagtttggtctatgcatagcatattgtcctcatctatacactaaatcgatagataattgacacatatttattaatattaaataatagaatatatttcaatcatccaacaccaaaatataaaatacttattctttctttagttctagtgtatatacctagataagaatttcctaaatattttttgtcttttcaaattatttcaggagtaatatgtaattgattctgagaaatctgactttttgtgatttgctatttgattcttctagaatttaatttattatattttttcactatttaaaagtatttaatataaaaatataaattatttaataatctcaatatagaatccataccgcagttggatcataagaaagaagatctattttatagtttatcttttacttttattaaaaattattgggtgcttaattttaacaaaagttatagtataaaggtaaaataaaataaaattaaaagtaaaaataaattaaattaaattaaaaagaaataaaagattcaaaaatatattttacttttttgcttaactgacaattctgataaaaaagagaaattatatttgatttagagaaaagaaagtctaaagaattttttttttcttttaaattggcaggatt

SEQ ID NO: 6354 - DNA, 5097 bp, Ricinus communis
  Intron number 4 from transcript 30147.m014292 (locus 30147 .t000563) derived from phytozome v7.0 (chr-ID 30147; pos 2 67222 to 272318 reverse strand)
ttgttgaaaatcctgaagcactggaagatttaactgtgagtaattaattcagcattttttttctcttttttctttgtatattgtagaaaatagaaatgatgagtttattgattttataattctgatcttttacaattgaatctgttgatatatatacatgtatatgtccaatggtagcctattctactcggttgccttggcattactatccaacgtctctttctttttctggaaaaggttggagcggcctttccctgccacagggatggttgctccctttttcagggcatgtgatgacctgccctgcacaggctttctgcctgtgcagtgtctgaggccatgctttctttatttcctctttcaacactccccctcaagttgggttcatagaggttgatcgaacccatcttgctcaaaattgagtgatgcgtctgtttatcgagtgcctttgtaaggatgtcagctagttggtcctggcttttgatatacggagtttcaatttctcctttttgaaccttttccctgatgaagtggcaatccacttcaatatgttttgttcgttcatgaaacacagggttagatgcaatgtgacgggcggcttggttatcacaatgcatcgtcataggtccgttgatttcaaccttcatatctttgaggacttgcttgatccagatgagttcgctagctgtatatgtcattgcacggtactcagcctctgcgctggatctagcaaccacgttctgcttcttgcttttccatgttactaagtttcctcccacaaagacacaaaaaccagtggttgacttcctgtcactacttcttgcccaatctgcatcagagaatccaactatagagttagaatttttttttcatccatattccctgtcctggggttccctttaggtatctgagaatcctatctatagcttctaggtgacaagtgtgaggggcatgcataaactggcttaccatacttactgcgaatgatatgtcaggtctagtgacaatgaggtatattaacttttctaccaaacgttgataatgtcctatgttggctagaggttttccatcttcaagattgagtttgactttagtttccataggggtgtaggctggtttagcccctaatttttcggtttctttcaatagatcaagagtgtatttcctttgacataggaataaacctttagtggactttgccatttctatgcctaggaaatatgagagctgcccaagatccttaatatcaaattctttctttagactttgcttgacattcttaatatcttggtcatcatttcctgttattatgatatcgtcaacatagacaagaataatgacggtgtgtgtgagcttgtgtttgacaaacatagaggagtcagaattgcatttagtaaaatcaatttttaatagaaagaggcttagtttggcgtaccatgctctcggagattgtttaagcctatagatggccttttttagcttacataccagggaagtatatgtggctgatttgtgacctagagggagattcatataaacttcttcttctaggtttccttgtaaaaaggcgttctttacgtctatttggaataggctccacccttgattagttgcaactgagagaagaattctgacagtgttcatcttggcgactggagcaaatgtctcttggtaatcaattccataagtttgagtgaagcctctggtgacgagtctagccttgtatctctcaatggtcccatcactattatactttattttgtagatccatttgcatccaactagtttcttatttgcaggaagaggaacaatatcccaagtgtcattcttttctagcgcttgaaattcatctttcatagccttacaccattttggactagtgctggcttcgtagaagttggttggctcaggatgggatgagatctggcttaagtagctagatattgacttgttatggtatcataggaaataaagctttagataggatacgataccgaatgagatacataatctcttaatttcaaggggggcgagtttgacgagtggaccttctcaaggcgattgcttcctcctcaggttgagattggctttcagaggttgtatctccaattgtattgtctccccttgaaggaattgatcttgagacaatggtcggctccccctgtggaaaatcctaagtagggctgctaagagaaaaatcagagttaggcggaaatactagcgggcaaggtccatgaggattatcatgagtttgggtggtgtaataagggactgtctcgagaaatgagacatcacgagagatgtaggttttatgagtatagaggtcataacatttatatccctttttagtggaggaatatcccaaaaatagggtcttgacagaactcttatcgagtttgtattagcggtttatgttaacataacaaacacagccaaagacccggagatgacttaaatcaattttcctacctttgagaacctctaggggacttaactgttttaaaacgacaatggggagtctattaatcaggtaagcagcagttaaaagggcatcagaccaaaaagtcgatggaacattattttgaaaaaggagagttcgaacgacattaagaagatgtctattgtttaaagaatgtagaaaagttttggtttatgtattctgtgccattgtcggatcgaaatttttttaaagcagcattatattggttttgaatgaaattatagaattcttggaaacgagaaaagacttcattttttccttttagcaaatacacccaggtagtacgagaataatcgtcaatgaaagtgataaaatatttaaagtgattataggaagttacaggagcaggtccccaaacatcagagtgaattaagccaaaagctttttcagatacattggaggataaggaaaaaggtaaaacgagtgtgtttaaaaaatttacacacatcgcaattgttggaacttaagttgtaatgaaataatttattcaaaacattgtcggatggatgccctaaccgttgatgcattagtatgccttggttagggtttgttgacaaaaaacatttcttaggaggtgcataaaggtagtagaggccattttctagttttccctcaccaatcgtcttcccggagattcgatcctgaaaaatgactgaagtaggtgagaaaataacattgcagtttaaatcacaagtaattttacgtacagataatagattcgatttaaatgcaggcaaatataaaatattttcaatatgtgagttaaataaatttgaagtgccatatccttgaattttgactttttctccattggcaatagtcacatggtgagatggagaaaccaaattgaggttggttaggttttttggatcccaggtcatgtgatctgttgcccctgagtcaataatccagaaattttgacagggttctgaagaattttgtaaggaatttaaagcagtgtgaaccgaacctgacccgtcgggttgagttaactcaaacccgttgggtttgagaaccaaggcctgcaattgggccaacatttcggccatttgggcctgatgtttctgctgggcttgtagtgcctggtgggcttgctgggtggttgggcctggaaggcctgttgagcctgctgggcctggagggcctgatgggcctactgggcctagtggctcgggccggagaagtcaggtcgggtccaaggttggcccgggtcgggttgttgtaaccctagggagtcgggtcggggcgtcatataactatctgcatatgacgcccagcccccgaattcccttttctccctagggtttccttcgggtcttcttcttctttctcttcgtaccccttcgtcgttccccccttcccaacctcgggttggcttgagctcggggtgtaggtgccagcaacgagcacggctgtgaccctgcttcttgcagtggtcgcatcgctcgctcgtgctcgcctctccccatgttctgtttcttgcggtgagatcggggcgacgcgatgcaaaggcttgattttccgcgagttcagtagaggccgagggattcataagatttctttgtgtctcctcgcgctggactgttgcaatgacagtgtcgatgctcggtagttccggggacaggaggatttgggatctcaagctctcgtagcttgagtccaatcttcccaggtaagtgaatactatatcattgtcggctcgcttttgaatttctgttgggtccgttgaaggtggtaagtaggtctggagttcttcccatcttgtcaatatttctgtggcatattgtgagcttgtttttgtgccttatgtaattctggtcaattcctgtttgagattaaatatgtgagcaaaattttgttgatggccatataggcattttaccttgccccatattgcttttgacgattccagcaacatgcagagcctggaaatttggggctccatagtgctggtaagcagtgacatgaacaagtggtctgtcgtctgccattttttaattttttctgcttcttcttctgtcgggtcttctggtctagtaggtttgggtttgggtttagtccctgtgatgaacctcaattttcttctgccactaagccctatgtagacagcttttgaccattcgaagtaattttgattacctctgaggattatattggtcaatctgttatcggtttgagacatgatgaatttcaaaaaggaattctaagaatttgatttttgtttgcttgattgatatctcacaggtttgaatcctgctctgataccatgtagaaaatagaaatgatgagtttattgattttataattttgatcttttacaattgaatctgttgatatatatacatgtatatgtccaacggtagcctattctactcggttgccttggcattactatccaacgtcttctttctttttctgggaaaggttggagcggcctttccctgccacagggatagttgctctctttctcagggcctgtgatgacctgccctacactggctttctgcctgtgcagtgtctgaggccatgctttctttatttcctctttcaacatatatgttcatcaatgtttcgttaactggcctatcagaaagaac

SEQ ID NO: 6355 - DNA, 481 bp, Ricinus communis
  Intron number 3 from transcript 29648.m002017 (locus 29648 .t000104) derived from phytozome v7.0 (chr-ID 29648; pos 7 55142 to 755622 reverse strand)
agtatttttcaggtacttaagatgaatttttgcaacttctacacgatatggatagctgttagaatagcgtgctgaatataatatatatatatatatattttttttttttattttacttcgtgcagtaggtagctattctggtgacattgagctttaggaattagacccctgtagatttatcatgcaatgttgcgtcatagagaccaaaaatattacatgactaaaaattctttaccataaaatccatttgatgatatcttaaaggatctatttaaatattaaaaaaaataaaaatgaaaattgcaactagcatttcactgaaagtattaggtccaaatcaagagactttccttttctcagattaaattgcagattcaacaagagttcattaagatcccagaatgtccttaaagttatgcatcaaaatgtcatattgatgcactgaatttttttaagattttgtttttaacttgcagctttc

SEQ ID NO: 6356 - DNA, 799 bp, Ricinus communis
  Intron number 1 from transcript 29807.m000492 (locus 29807 .t000022) derived from phytozome v7.0 (chr-ID 29807; pos 1 70951 to 171749)
ttaggcctgagtttttcttgcattgggttaagcaggtctgtaatcttcattggtttttggtgttttatatgaactattactgcttgctgtgttgatgggcaagtcttttaatttgtttttggattacattatactcgttagatatgttcatacttaactttgttttcaatctttgaggataacaagtatttctggtcgagtaccaattgctatctcatgctgctaaatgagtcttacttccggtaattgaatgtagttgttgattagtagtgggcttagactagtttgtttgttaattggttgtggtttattatattgccttgtttggttttgttaccttgttcattgcttttcgtagtgtatggagagtttaaaaatgccagaattcagttatactgaattctatttggtcaattatcattttcaaaaagatcctgataattctagttgttggaattcaagtctttcaacttagaagaacaagatttatgaaggaattttggaagaaatgaaacgagtccacaagcaacatgattctaaaagcattcaatttgacatgatttatgcaattaacgtctttaggtttagtatcaaattaaacatctgacttcccggagtaattcaatcatatgccaataagtgaaaagaaaaaagaagaacgacaaactgagaaatacaagtaaagcaaaaaggaaacaacctttatcatctcattgttcacattgaagattgaaaccagttcatttggttctggctctggccttatcgattgatatattattgctatagacaggacctt

SEQ ID NO: 6357 - DNA, 8634 bp, Ricinus communis
  Intron number 1 from transcript 30178.m000873 (locus 30178 .t000035) derived from phytozome v7.0 (chr-ID 30178; pos 2 34393 to 243026)
ttgaagtacaagatactcaaaccctttccagcgaggtatatatatgcttaaccattttatctttcgtcagaaaatgattatttttacattatatttgaggatgcaagtagagaaacaaagaattgtttgctccatctcttttgattggatggaatatgagaaattttgtgtaagaaaggaagcaattttataacttaaaattttgatgttgaagttttggaggataaattatataagaatgaaggatataaacaagtataataataatattttttttttttgtcttttccaaattaaagggactgaattttatttgtatggggattttatattgcttgatcaagggaataaaagagtgcaagcaagttttcattcctttcatctatgaatataatattcttctctctcatggctttctaaattcttcatctcttcttctcgatccattggctatgagctaattgttgcacgatctgttcttctatgatccaaaagggctaactcggctataagaatctaaaagagcagaaagacctctcttggcaaggtgcctctatacggtcctagcttgaggatccctcctgccttgagtttacagcacgaggattatagaatgaacaactctcggccccatcctttgatgatctgcctccaccaaaatggaaggataagctttctgaatttttggcatggattgatctccaaatgacttttgatggtgccacacttattattagataggacttatacttttgtaagtaggaaatctcatattgtcttctaaggaagacatgtgtaaaagataaggtgggatgagatttttcgtcccttttatatgctgaatttcaaaatcatatctgctgaaccatgattttaaccttaataattgaggttctggtaaggtcttttggttggactcaaggatttttggaaatgaagaattatccatccgaaccaggaaatgttgaccaatcaggaaaaactcaaacttttttatcccgtatttgactaccaagatctctttgtaagttgagtggtaatgcttttctgatggagaaaattgtcctgatgcataaccacacaattgttccttgttgttgagattttcaaggaggatggccccccacgcatgatcagatgcatccgtctgaaggataagatttcctgtagatggaatggtgagaggtggaggattgtgagccaattcttttagtctccggacagctgtagtttgttctgttccccaaggaagcagatctttttttagcattttagaaagatgacatgtgtaactggacatgtgtgatatggcttccctgacatagttgagtattccaaaaaactgttgtatttactttataaagagattctcatctggaaagtaatcaagctcttttgtcaagtgtggaccatacgtgtattggccgtctttgaaatgcatgccaagaaactctatctcttgttggccaatgatactctttttctctgacagcatgatgccatacttttggatgatagcaaggaattgtttcaggagttgatgatgttcctcggctgtctccgagaataggagaatgtcatcaatgtagatcagggaggagtaaaggataggctcaaagatttctatcattgttttttgaaattgtgaaggagttattttgagcccaaaaggcatgactgtccattggtattgggcgtttgggatacaaaaggctattttgtatctttctgacggatggatacccaatcgccaaaatccagccttaaggttaaattttgaatagaactaggccttttggatatggacttttaggttcgaaattcgaggaagagaaaatttgttatcttgcaggaaatggtttaaaggcttgtaatcaataacaagtctcttttccctcttaacttctcagacctcttttccacataaaaggcttgacaggcccattatgaggttgtgggctcaatgaggccctgttgtaacagagtcaagcattctgatctagcaagggctagatctgtaagagacattcctagatgagtggcctttgtattgtaagaatggtggttctgtatctgctatagtgaacagattagaggtatctgtgtatggatgaaattgcctcttgaattttattccattgggaagaatttgaagcctttgagcttgatgataaacatcaaaccctattaagaggtctttgtttgggagatttgagttaatgatgtgcgtccataccacgcaatcagggaaaaactgtatcctgattttttgctttgtgatcagagtagtcttgaaagtttgaccatttgctgctttgaaaaactaaacatgagacttccagtattcagatggaaggacttcgggattcatcatgcttttttgagctccagtgttaaagaaagccataactggaacgggttttgcatactttgaaggcaagacttgtataggaacataaggaacatgaggaattttggttgcaagctgagataactcaggaaatggatatggagagaaagggtactgtatcacatttgtcaggatatcttcctcttcttttgaaaggagactgatcatcagaattggaatctcactatcatcagagtctaaagaggactcttctgaggatttagtggagtctgaatattctgcctctattccaaagagacttcttagagtaagattgtcttgttcggataagagtgactctatatcctcttcaaatgaatctgggagagaaatatacatgctgacttgttgtatcatctttgctgatttttctggattctggggacagttcttagcataatgtcccttctttcggcagatatagcatctgtctgatttgtggccttgattcctcttttttccggaaatatctgaatccttttgaacgcaactttctttctctgaattctttgtttctgcgcgggtatttttagaaatgatgtccgatcttctttttatgactggagcagacgcagtttgaggccttgcatttaatcttgaggtggcttttgttacaggccttttgaacaatcaaatctcgctgggataaccttctaaacaattcttactggtcacataatctctttatggaagagagagtgaattgacaaatttctccaagagtgatggaggtgactggtttctttgttgcggcgatcatgttgttgacttctggttgtatctcgtctcgtaatgaggtgatgaaagtatatttcaatgtatcatcactgtcatgccctccaatgacataatatagtttggacatagcagaataatgtctttccagatcctttattttcaacgaacaacattttcaatcaaagtattcttgtttttgttatcgtataacaagatcataactttcaaggaactgattatggaggactgtgaccgcagctgatggagttggtagcgtcacaaattggagcctggtatactcaggctgtgacctaaaccaatctcttaaacttcctgtaaatctcgtaacaaattcagcaagaacctttttaagtgtggcaccatcaaaagtcatttggagatcaattcatgccaaaaattcagaaagcttatcattccattttgatggaggcagatcatcaaaggagaaccaaggtcctgtgccagttgtcgattttaaccttgggtatgaagctctagtaggagcaaaatatgattgtgcatcttcggtgccatcttcaggttccactacttctggactgggttcagtagtagaggtattcatgagaatttatgtgatatcagccatctcagagatatttgaggaagaatcagaatcatacgggctgatgagtgattggtctggcaatttattttctttagaaactggaggaggagatattttcttttgttgggttatggagccttttgggtatagatgtgagaaagtgccaaagtgttggtagagagtttcttcttgttctggctgtgggaggaaaggaaatgaagaataatatgagggagcaatgacagaagatgtagagactgctgatgtgaaggaagggattgtagaagatccatatccactcattccagtcctctggacatcatatttatgctgccaaaataaaggaacactttatctgggatgttgacccaggaatgtgcagatcaggatgcacctacggagatgatctcgattttgctgaaccaagttttcaacactctaagcaaaatccaagagacatggctccagaaactccatgttcagcatgaaaccaacatcagatgaccgggatccagatggtccttggattggcatccacagaaaataaaaagaaaattagagtaaagctcctcttcctatgtataaggaagccttagaacttcttgcaaaagaaggaaagactgtcattgacatcacctttgacgagatgaaggtacttttggcccaaatgggagttgtgtttaggaaaaagccttctactacttgcagagaagagactcattctgatttatcaggagttcaaccaccccatgcaatccaaagctgtttcatgttccagcctgaagatttccctcctatggggaagtccgaaaataaaagatcggagatcctcccctcaaggattactccctcaggatccatagagtttctcactccaccagatgaggtcctaaattggcagaccttaaattccatagtttagaattcttatctaaagaagatagatggaaaattggatcaggctcttcatttggctcacaagttggatcagaagttggacaccttctctcaagaagtactccaactatattcttctcttactgccaaatatcaagccttggatagagagcttcgagttccatatccgattacaccagctttcatccagaaagaaaaagaaattacaaggctcaaaagacagattgatcagattgaacatgatcttagaaaagatcagtcttctacaatcccttctttcacatcagcagtctctacatcttctgccattgctccctcatattattcttcatttcctttcctcccacaaccagaacaagaaggaactctttaccaaccctttggcactttctcacatctatacccaaaaggctccataacccaacaaaagaaaatatctcctccagtttctaaagaaaataaattgccagactaatcactcatcaacccgtatgattttgattcttcctcaaatatctctgaaatggctgatatcacagaaattctcatgaatacctctactactgaacccagtccagaagtagtggaacctgaagatggcacggaagatgcacaaccatattttccctgattgcgtggtatggaagcacatcattggctcaaatctcccaaacaaatacctcttaatagggtttgatgtttatcatcaagctcaaaggcttcaaattcttcccaatggaataaaattcaagaggcaatttcatccatacacagatacctctaatctgttcactatagcagatacagaaccaccattcttacaatacaaaggccactcatctaggaatgtctcttacagatctagcccttgctagatcagaatgcttgactctgttacaacagggcctcattgagcccacaacctcataatgggcctgtcaagtcttttatgtggaaaagaggtctgagaagttaagagggaaaaagagacttgttattgattacaagcctttaaaccatttcctgcaagataacaaattttctcttcctcgaatttcgaacctaaaagtccatatccaaaaggcctagttctattcaaaatttaaccttaaggctggattttggcgattgggtatccatccgtcagaaagatacaaaacaaccttttgtatcccaaacgcccaataccaatggacagtcatgccttttgggctcaaaataactccttcacaatttcaaaaaacaatgatagaaatctttgagcctatcctttactcctcactgatctacattgatgacattctcctattctcggagacagccgaggaacatcatcaactcctgaaacaattccttgctatcatccaaaagtatgacatcatgctgtcagagaaaaagagtatcattagccaacaagagatagagtttcttggcatgcatttcaaagacggccaatacacgtatggtccacacttgacaaaagagcttgattacttttcaaatgaaaatctctctataaagaaaatacaacagtttcttggaatactcaactatgtcagggaagtcataccatacctgtccagttacacatgtcattattctaaaatgctcaaaaaagacccgcctcctttgggaacagaacaaactacaactgtccggagactaaaagaattggcttacaatcctccacctctcaccattctatctacaggaaatcttatccttcagacggatgcatctgatcatgcgtggggggccatcctccttgaaaatctcaacaacaaggaacaactgtgtggttatgcatcaggacaattttctccatcagaaaagtattaccactcaacttacaaagagatcttggcagtcaaatacgagataaaaaagtttgagtttttcctgattggtcaacacttcctggttcggatggataattcttcatttccaaaaatccttgagtccaaccaaaagaccttaccagaacctcaattattgaggttaaaatcatggttcagcagatatgattttgaagttcagcatataaaagggacgagaaatctcatcccagatttcttatccagactgtcaaagccacaaccaaaacaccaacatattgtcctcctcacctcaacagttaacctccctataatcttcatggcctctttaaaaaaccctctgcaacctcccttaccaccagaccttcccacaaatctcacaacgagacaggtcaacgattttgccagaaatatgatgtttcattatttggcaactatccaacaaactttctcgctacccattcaacccaatttcttttatccagattacccttagtgcctaatttatcacctttttcctacccatccacaaattgaaagtgaattatagtttttatggtgcctttccacagtttgttatcatgctattgaaataccggtcatggatctcctatacttcttcaatagtgagacaaatacaggaacatatctatggaaatacctcacttggttcaaaaccctattccaatggaaaaaggatctcctcagagttattcatgaaaacaaattgttcacagacaataacttcaaggcttcaggatatcatgccatctacattcttcataggccttacctacagctctcagaagacacttatgcaacccaaaacatctgtcattattggagaacgattgaaatgcctttacatcttgctcttccaacaataacaagggatttaaagcacactctacaactaagaaatgacttaggaacgactaatgtttctacaccactagtctgcacttataatggacatctagggactgaacactccattattgagcattccacttttcctatactaccaaccccactagatgattcgaatttgaccactgaacaaaaggatgccattatgcaagattctcaacctatggatgatgatgactatgacagtgttttctgaactggcaatgatagtagttcgtgagctggatataaagactagccataaaattaattttactatgtaaatacccacattggacaataactaacaatctcaatttacggtgatagaaacaaagaaaataaaaaatgaaaagaacataacaactatagaagacataaaaagaaatatatataggtctcaattgtgttgaatcagtacctaatctaacctcgcatttatgtggttcatcttatttcatttcataaacaaggtgaaagaaaaataattaatccatttagaagaaagattggttttctaatgggagggaaatatagatcggagtaccaaagagcgtgtagataagatggtaaaatttttttctagtttaattaaaattttagattgaaattttaaatatacaactacgttaaaactcttgatgtagtattttgttatccgtaaaggttttatcatgtaggctgttgattaactatagatatatgaataggaaaagaaatgatttttaatgtatttgaaaataagaaaaaaacacttacatagcgttttgttgaaattcaaaaaatttacagaatttatttataaatataaaattaatatgctttaaatgggataaaagttaatttagtattctatataatcaaatttatatgaaattaattatcattaaactaaatgaatttcatattagtaaggcaatacattttataatactaaaatatcttttccgactttgtcattttgattttatcttatttcttatgtctactttttaaataaaacaaattcatttattgatttcaactaaatgtaatattaaaggtaaaaagataaaaagataaaaactctagttattttgtttgaatgaatagaagaaagattcataagatctcatcattgaattaccattgaattattatggcttatcctaaaatgtaacccaaaaaaaataaaaatcacagatataccaagtggagtttgcgatcctctgtgtggg

SEQ ID NO: 6358 - DNA, 1491 bp, Ricinus communis
  Intron number 2 from transcript 30018.m000550 (locus 30018 .t000010) derived from phytozome v7.0 (chr-ID 30018; pos 5 21012 to 522502)
gctggtatttgtcttatcattttcttttctgcgtggatagttcccttacaatttatagttgcaccaattaaagattctaggaaatttttcatattaaattttgaacttacaagtagatcaatttttttagtcatagcaaataatggtagatatggggctattgtgatgatagaataggtgtgcaatagattgtctaaaatctaaacttctatcttcttaggaatcctatgttgtatataaaatatcttcatagataggcagaaaaggcttattttttgtctgattgcgaagagagtaaaaaagaatctacaaatgattattgctaacaccgtacattccatgagttacatagttgggttgtccatttgcactcatgcatactactatgattaatggcctttatttagattttcctttgaacatttctctaagccacaagttccatttgagtcttagaatctattccattttctaatcgaacataactgttaaagtgcttgcattacttgtatcttcatgtgtcatggttttggaataaaattaatactctttaacttttttcttaatttctttcttagagaggcatttctcttcgatatgtgcatttgctaagtgtatatttatgaatttatgccaaaggaataatgtctcatctcaataaagttttattgaaattttaaatctagttgacgggtaacacattcctccctgtttaagccatatcatcgaccatatagcgagattaaagcgttgtttactacttaaggtcacataattttatgtctgccttttggcttggcttttctactatctcactctgcttgcttccttgccctagtttaattaaagatttactttgtgtaaaacatttgcagatatccttccctccttattttcatcaatttattctacctctaccttccccatgcatccaatcatttcttatttagtctgtccaaggatttcctcacatccaccgtaaagctttcatttttatggttctttttgcgggaagattctttacttagctgccaacattcgttcctgctggtacagttggtgtaattgcagtttatggaattttccttttagcttgcttgacaggcatttatggtcacatcacataactaaactaagctaggataatggctagagaatcattattcaattgaaatcaacttcacatcattcaggtgaaactctattcaaaagaaaggaatcttgtatcacatttcctggcattttggaactaaaaaatttttatatgaaaaacacattttcctgtatttaggagagagatttcagcgtacagatgtaagagatggtcattccttttctttcggttttaattagctgttttcgttaactaaaaaggagcttttctgttttaaaaaattcacttgcaaagagaaggcttctggctgtttgtatttatgaattactgttttccttgcaggcggaagtcaattatctagggcaacttagtcaccc

SEQ ID NO: 6359 - DNA, 3349 bp, Ricinus communis
  Intron number 2 from transcript 30089.m001014 (locus 30089 .t000028) derived from phytozome v7.0 (chr-ID 30089; pos 1 259538 to 1262886)
gttatcgagggtaattccatcttctcttttcgatttcgttgcttattgttggagtattggataagtctatgtcctttgcttataaatttgacgattaatttaattttgttatatattgtttatgctatgcctatatgtagatgaaagagcagttgattagagacaaacttgtacactggcactatacttaactgcaaaggatgaaatagatgttatggaagggagaattaggttgaaggtgtagtagtgactaaaataagaacagatgatttcatggctagaggagttcatcttagaaaacttggagatgattctagtttggtgagaatttattattgttattttttttcttaaagtaaatattcatgataatagtagaaaatataatagtgtacttggctattaaaactgatcaacatccaattgtttcatccattaaaatctctttttgtcctgtaacagtttcgttattgaagataaactctttgcatcttgtatttattttctttggatcttgtattattttcttttcctattacttgttgtgaaagttaaatttctcaggattgtgtttaatgtcaattttggtttcaaatctgaattttctcaagacattgaggtgtttgagagtagggtgtaaaagtttgtctctaggagaaatcaaatgaactttgttgaagagttgcatgtagcttccaacagctaactcatttcaatgatattttagtttttatcctggatctaaagtttttttaggttcggccaacttcagacttgagctgtaatgaatcctttccttctgattttctatggaagctgctttatttgctttcaacagtctatcattttgtttcaaaaagttatttggacatcacacctcttggaatctctttttcctatcaaaatgatggttggaaacaaatttcctaagcaatttgatttatttgttgtgtgtggcagaataagattctgagaattggataattattttttgatttatgcatggagtctggtataaaattatcctgcttttgtagtatcattgaaatatccacatcttattgtctcaattgtgagattgttattcattctatggtatttccatagattgtaaatgcatggcttgtatggtgttttagacacactatgtcagcacacacaggacttatacagtttcatatgattgtgagtatctctattaaatacagttctatcatgttcataaaactattatgacaagattttttaagatggtgagtgaaaagcttgtcttgattcttgagctagggatttggtgaggaacttgagatgaaaattaaaatgttaagagactgaatcacctaaaaccttaactaaactagttgggtgtaactatatgctatcttttcactctattattctaggtataggcattgtctagagaggtccactgctgctaaaacatcatcaccacttcatgtcatcataggtctaaaacctcttcttctttgcttatataacttggatgtgcttaaaccagtattccatttataattggtctttctaatcatttagaatgaccaggttaggatagcttggaggaacagtggccccttgattgacttaggtgggtccaccttaagtgcttttgtaccaaattactttatgtagttaaagtaagtaataaatatgtgatgtcaattttactagaacccagatcttctgcttcaaattgttggggacattgggcacatttttcctgctaatattaaggaatcagatcaatatctaatttactgtgatgtgttattgtacaatgcgatgccaacaaaggctttcaatagtgaaaagcttttaaaggaaaaatacttaatatatataatcacggatcgattttgaagctgataagtttataatgacttcttactttgctcgatcaaacatgtatgctgcattgcctttgatatgtagagaggcaccttagagaaactagctagtgcaatgagtttatttgcatatcttggtaactatttgttgttaaatatctgacatcttgatggcatttttttcctactccacaagtgcagtcctaattccaagtcctttctggaaattaagcgggaccccttaatagttattatttctaagtaggaaacttaaaagagcaaacttaatgttggtttagcatttcctattctttctattttgttagaattcccaagtggtaaagttttgaggagtctttatacttctaatctcaggcatttttgccttggtttaataaaattgttttcggtcacaatttggattctatcacatgcatggacagaaatagcagagtaatatgtaaacagaattaagagttgcttgaaagtccaggaatgcggaaggggaaggtgaagtaatctaaatctaaatcaacaaaatttttgccacaagtgtaaattgcctatgtggaatattttgaaggttacaagtatcttatttttattggatataggtggaatagtgggattttaatttcaaataaacctgtttttagtagcatatcttaggtagaaagttacttcagaaagctgtcttcctgatatgttgacacataaaatatcatatcatttgacattttgcttgctaagctttgacatttagttcgaactgtgatatagttggtggttgatagaggtatgcaatctttcaaccaaattacctacttcaatgagttacgataagattggttctgttcaattccccacttttatgactgggataaacaggataatcaaattacatttggtaattgatttttacttttctaatatatttagtattttgattttataagtatatgtattttgagatctatatttgtgcaaaaatgaagtccaattaaaaaaaaaaatcatattctgccagaaagtagaaatctgacaaaaaaaacatggagagctgaataaagcaatccaaatatattatttgcgactggtgatgtaaatggtattagatactttggcccaaataaacaaattcactaatcattaaaacatatatttatacaataattacaataaaataaattaaaattaaactaacagaattaataaccgaactgcagtggtgaactaattgaatctggttcttttgtcacttgccttggtaattttgtcttttgcggtcttttgattctttcagtacttgattaatgcagcaatgtccccaatttcacgtactttagttcttttctcataacaaaatttgaaaagggaacgatgttcaatgatcattcagagatggcattttaccctatcaacagttgtatgtatgattatttaataatttccttggaactgtgcagatctccataatcgggatc

SEQ ID NO: 6360 - DNA, 3877 bp, Ricinus communis
  Intron number 8 from transcript 30024.m001696 (locus 30024 .t000013) derived from phytozome v7.0 (chr-ID 30024; pos 1 87128 to 191004 reverse strand)
tcagggtcagtttaatttccagttgtgttgctgacatgttttatacttctgtgctcctagagttttcttggaattgtatgtacatttaaaacatctaccatccttcactcatttgactgctagtacttgtagcttgcaaattaatatctgtgtttgtgtgtcaaatgaatggttttctgttctaatgcaatctaattccctcttgatttgaccctatgaaatggaaatggattctattcatctgaagtttcatgcgtcatctctttatatgattattttagataataattttttgtttttatgttagatatgatcattttgtggcttacgcctggtcaaggtaagatttattttattttttcattttggatgttcagaaaatatcctaatctgctagaaggttttgtttcaataatttggctgagagtggtccaactaatatataagtcctgtgtcttctttatctaacataacatcccagcaaagctgggctggatacatcccaattttggtttaagctctggaagaaattaccttgagtggaccaaggctggttttcttaagctgagctggccacttggttcatgattgggtctatgttgtttcatgtgtcttaacttttcagttgtttcatttaggttttgatatccttgtgaaccaaggattattaaagaactgctttagaccaaggattatactttgggtttagttcaatggacttgcagacatttcatggaacttcttcattcgttattgaagtagttataactattcagtttttctttctagagcttgtacattttatattaattcggtggttgagagtttagctgttgaatatttgtcttcctttttgctcttcggcatttttattttgtactttatttctacttggttgcaccattttgttcttcaatttcttatttaaaaaaagaaaaagaaaaagagggggtgcatcacttcgttccttttgttttttgggtgtattagtaggttctatttagggataaggacattggatgtggctgaacatttttggaactttctgtactgtctggacttgaattgggatgtgattatgtgcttaatatttgcaatcaagtgcttcggtgcacttactctcttttggaattctctcctgtgtcttttttccccaccttttctacatttattcctactgtattttccctcttatgaccattgtctttattcggacaataaaacttgagaagctgcagtgccgctcatggtaagggcccttttttggttttgtcgttctcctacaggtgaatgtgttgcacgcatagtcagtctcattattacttgttttaagttgtgaggtggctttgacagctaggcatagcctttttagaagtttggtggagtattgagcatgttcagattctttagaggcttttcttttcttgttttaggatggaaggcatttggctttagaaaagatgccaaaattatttggaattgtgccttttattcattttgtttttgcaatttttgttgccctatcgtggaatatttggattgaaaggattgcaagcatcttcaaaaaaatcagattgtgttatctactttgctgtaggattagtttattggattattatttttagggcttatgctttaggagattttaacgactgaagtgttattcgtcttgattgttgtcctaatgattctgttgctttgtgccagcttttattggaagatgctttatgtttcttgtggcaatccctttctttctttgatgaggttttttggttgatggcattaatttttggcactttctctctgaaattagaattttaataaaatctgcaataccaaaatcaaggtggtggaagtctaatggtagattttaatactcaggtcaatttatgaagggtatttttgatagttagctgttatacaaccaattagaaaaggaaagtagactatattttggcacagatggagaaaggaaaaaaaaaaaaaagcctatcaaagtgggatggagggaatagttttcttttagtttttattgtagaattttaattttaattataatgatattcctttagtacaaatcttagttatttatatcctattcttgaaaatatattaaatcttatgaacattaagaggcttataaaatagatatagcaataagtatctgagactaatgtaaatgaaaatattgatagaatttaatagcaattattaaaattttaaagaagtaaaagttttgattgtttaatttagttacatgtaacatgcacactggacagaacaccaaactagatagctaccaaattataccattctgatataaaatctggatgtttaattgaaatggtattcagaaatgaaaaaccttatgcttaggtggaagaacttgtaacataaggggacgtgcttgacatgtgagttgcacagaaaaatagaacagttactttgtctcttcacaaaatcctcatccacctcaagtgaactctgcctggccctctattaagattccctaactgggactgaattggttgtgagatcagggtgaaaagtttagtcaggtcttgttgcactctaactcattgtcttggggagggaattattgaaatgccagattgcatccgagctaactgagcagattaattgctgagaatatctgcattcaagctgttctcttctgtgccagtcagtaggtcaaagtcatcttacatatttttatgtatcatctcttgattcaagaatgctactttgtcgagtattgtattacatgtttagattcagtattaaagatggctgctgagttcaatctattgcttggatgcactatgagatggtttttaataggcttagtatgctagaggaaggtctagcagtttacgtggttgggacattgctttacatggcagttggggagaaatcatgtttagttatatttactttcttatatgcgcatggcatagattgttaaatgtgcacttcattattcttgtgcatttaaaatgagtgaaaaattgaaaatgcatgatatattgaaagcatttttgacgactgggtataatggatattgcatcaaatagaggtggtgctcataccagaaaacataaaaaaacttcaagttttaaggtttccttattgtcattatatctgttatttatcatgggaagatggaaacaaaaagtgcattggccaaacaaattgcttcaggaaccacaattatatgagccttaacaaaatgtttatgattgaattgtctcctaaaatctcataactataacatgaatgtgcgattggccataatttgagaacaaagttccattcattttcaggagcattggctttatcaatgcggggccagatttttgatgagggttacagagggcaatgccctggcctaagctcaattactgtgctcccggacttgaaattaggtctttgaatttagatgacagaatctagtgatgtagttggtgatcaagagacatgagtggcttcacatgtctggggtgagattttcctcttcacagaatgtgaatcccgtgtcagtgacctagacgtatttttcttattcatttgctttcctcatcattttcacactgttggagagaaaatattcctgagcatagagagattaccatgttatattgaaatggatgggtttctacattacttgatgttgagaattgctggaaattaaatgtggggaaacgcatttaaattggagaaaaattactttgaagcatctccaaggctgtattttcaatttttttctttctttgtttcattgtgtaattttttcttctataaattgtacgtgtcttctttactattaaggtctcccttttcaggttctattcagaaatctccaggagagactcttcca

SEQ ID NO: 6361 - DNA, 579 bp, Ricinus communis
  Intron number 1 from transcript 29646.m001114 (locus 29646 .t000062) derived from phytozome v7.0 (chr-ID 29646; pos 3 60832 to 361410)
ttgagcgtgagcgtggtatcactattgcctctaaggttttaattttatcttaaatcctaactttcttataagcaatgcttgctcttctttcaaaatggtattactggatgtttgattcatgtccgtactactttacatttgataaattttagtttatgtgttctttatcaatgtgatttgagtagattttcaatggttcaattgaattctgggtagttaattctcctgtttgggaaactgggggggtttcggggaagacctatgtcgggaacattttgggtgtgggatgctcgtttaacctctgtaatcatctcgttacttatttacctgggtgcactgcgttttcagaagctgcctgttgaaccagcttctatttcattccgtgctggacactatagttgctaaaacttcaattgtttcaacttgtacaaaaagaaaagggagttctggaacatattatatcatgccaaaaggcacataatttgaattgaattcttgcaaatgaattatttcaaacaaggcctggcttttatatctcatgaaggaattattgtatgtaatgcaggttacatccatttc

SEQ ID NO: 6362 - DNA, 2119 bp, Ricinus communis
  Intron number 5 from transcript 30157.m000795 (locus 30157 .t000004) derived from phytozome v7.0 (chr-ID 30157; pos 7 8224 to 80342 reverse strand)
cttgtaagtcagtcagctatttcaggaaatttctaaatagcttttaggaaactgtactctatgagacctttctttttatgttttgattaccacagcattatattctataaagaatttgtcttgtcattagtttccttaatttgtggaaacagaaatcagattattagatattgatatgaagcttctttagaaaaatttagcaatgtgctaaattagattcttttggaaatcatttagcatatatgtcaaaaattgatgattggaagtctgaaacgaaacttggaacaacaggtgttttagttaagcatgttacttgtccatgcttttcaggagaggttcatgcagttagagttttgaacttcgggaattattttgatttaattatttgtcatgaaattcatgtctttcttgtacttgtctatttaggaagtttaggatttagtattatttaggaagtctattctcttagtaatgtttaagagatattttattactattatcctatctggaattggtttagtagttcctagttactattaaattttcaatcctaacaatccgtatggtttataagattacttaactaggccatgataagtaaataatgttacgcatatggtagatgttaggcttaacaatctcaaaggcttagctaacccataagatcaatttaatttaaaatcaagcctccccatgtctttagtaagtcatctccgctgggattactgatcccatgattcgtgatattttaatccctagaatagccttgattttttactttatttattcaaaatagccttatacagtctactttcttctctgtctctctttttttttttgctttttaatgaagaagttaaattaatttgcttcatcgaaattagagaatcttctattgctaatattgccatggtggtttgattttgaaatttatttttgcacttatatatgaaaagttttattaaaatagtttgtatattatttttcttttatttcatctatactaacaaatttgaattatgattgtttaagttccaatcaaagaatcactaaaatttatccaataattcatgtgataataattaacataaaaaaataatattatgaaaaactaattaatacctgagagtaaaattggtgtttcaagctaaaaatcggtacatactaaatggaaaaatttaaagcattattgagaaaaattctatataaacacatgtaaactagctattttattaggttaatcacgatttcaatgattaaaaatattaagccttttctgtttcctatagctgtttgcttgagtttgagttcgtatgtggtggtttcttagtgtttgcacatcacaggtgcaatgaaagtggacatctaatataatattcgtcaactttccatattacatgagttggttggttggtttgcttctacttgaaatttgtgatctctttgtatttacacattctacttttgctttctcaatctgtaaatgcatgtgttacaaagttttttactttactaattaaaaaaactttactttagtatggactgttttatacagtgacatttggaatttaattagtcgtgaacaggtgttagaattgatatataaggctgcaactttcattttcggcatagaaaattggatagaatatctcttctttcagcttgtgcatgttgttctaatatgctctcatggcaaagtttagacctgattgtgctgttgcattttcggagtgtgcctctatcttgaatttttaataaattagcaaaacaacttcatgaatagttaatcaggaataaagaaggcctaaaagctcgttcttacaggtccaagtctagaagcattccttttgactgaaaaatgcaacatatcaatactttcagcacctaaaattagtgttcaccatattataaaaagacaattcgtctatggtctagttaaactgaattatgttctggatgcaaaattccatgtggacagattgacaaatctctgtttgctcatcattttgtgaaacaccatttcctgcgtgtattagggacaaccttttacttatcctttatttattttcataagctttgtgcaactttccagctaacaatggaattgcagggcgacaat

SEQ ID NO: 6363 - DNA, 1583 bp, Ricinus communis
  Intron number 1 from transcript 30147.m014193 (locus 30147 .t000464) derived from phytozome v7.0 (chr-ID 30147; pos 8 89242 to 890824 reverse strand)
cattcttgttcaggggattattctttctgcgtcaggtatttgttataattcactattttctcacatttcttctctaacgaattgaaattcagctgtcatactgtataaattggataagtattatccaatttagtgtcctgaataactttgaaaaaatttgaagctggatttaactcttcaagactgttccctatactttacgaattaattgcttattgctctattgttctatacttttattggttttttttaacccattgcttaccgttctatgactctttgcctcttttttattatgtgttttgtgcacacacctatctgtctacataaactataggtagtataggccccagaaattcgggatttctttagttctagaattgctttggaatgggatcaagcttctgtagtttgatatggtaaagagaactaataaagatctgtggcaaaaagatgaagctttgacaggaaacttgcagaagcaaatgcttttatgacctttttttttttttatcatgtagattatgagttctgaatgcttattcgaataccacaatttaagggaaaggctagggaaattttttataggtatttgaaactgtaattacgagaatgaactttagggggctgtctgggttctataagcagtatccaagatgcaattgttgcagatgtaatttctctatcacatactagccgcaatgaactaaactctgatgataagcaagcatactgaattcctaaagtacataatatatgtataaacttgatcttatggtatcctagtcactctatggcttccagaaccacaagagtcattccaaagttaacgaagtcccagtacctcatagaagttttaaaacataagctggtagattttgtatttctgtgactcgttgctcccatttgtaaaatctattgaactacccatttgtttagttaacaatagagtaccctattttccaatttcaagcacatggtatacacatgtaagatggccagtgttacatcattacatgtgtgtatggagttcaactctgagtaatgactttgatgtgcctagtttgtaacaaagaggttatgctatccttgtgtaggaagatggctagacctaatggccgttcattctttcaccatgagatcataggttttcttcagttgtaatcttctcttggtagatgaataagtatgcccatcctttagtgaacataaagaaatgatccatgacacgcacttaaactagtttatcatagtctagaattaagaacgcaagaatgagtaggctcttcaaatgacactatgcaatcatgacatgtaaagttatttcagatctgcggagcacttaactttagaaactatttgacctaaagacataatggttatgtcctaatatgttccttcacattacaaattcttcaaaaattgtctaacattcagaagagacaatagaagacatcaatttgaatcttatctcagtttttatgatgaacttaattctagtttgatttaattttcttattctgttgtttccaaattttaaatattacttcttaatcattttacatcgacaggcttcctacctg

SEQ ID NO: 6364 - DNA, 1314 bp, Ricinus communis
  Intron number 1 from transcript 30147.m013986 (locus 30147 .t000257) derived from phytozome v7.0 (chr-ID 30147; pos 3 811083 to 3812396 reverse strand)
gaagaagcgggtcaggaaccctctggtacccgttggtaatacttaataatctcttttcctctttcggttgaatttttgttttcgttttttttttttatttcttttaaattttgttgttatgggatgtttaaattgaagaattttgataaattttttgtgggttttgttatatgggtcactttatttaagacctttttatgcttgattctttttcagttgtgatttagataaattttgaggaaaatgtgttacctttttaagtttttcgtgcattaagggactgcagagacatggttcatagagaattcaggtttattattgttgattgatgaatcaagattcatagcttcgtttggaattgaaccatattggtagttgttttgtttcctttatttttgaagaaaaatatcagtgtgttttcttattttatttatgaagtgcagaacaaggtcatgtgacattcttgttgatgacttagttgtataggatagctaggagggcttgaattgaaatccacagtgatttagatagcagtggaatagttagagctttgaaaaaggataatgcttgttagctgtaacaattgttaaatgtatgatttaacagaaacaatatccctgaactggttaaagcttatttgtccagtccatatacttaatcagccttcggaccatatgtgggaatggcatgtgagaaagaggttgaagtggactatggctggtccaaaattttttcttaacttgggagcattctgaggaatataacctataattggtaatattttaagaatgcattatttggggaataaacgttggattcggagtattttcaaaatatctagcgagaagctgcttaaattctcttgaacaaatttgtctatactgttgttagtcctgcttcattcatttgattgagctgcatgtggatttctatataagctcggttaaatgttccagtttatttatttatttttctccatagatcatcttgtggcaaacaatttggatgcctgttattttgttggagtcctgggaaattgttcgtggtattaaagatgtaaaacaggttgatgggctagtgcagtaagtttttccatgttgtgagcatttggatgtattcttgtgtcggatttatgtatgtatgtatgtgtgtgttggaaaatttggtaggaacactggctgtcagaactcaaatgttcagattacattgctcatatcaaagctaacatggcatctatgataccttaaaccaggtttccatcttgcttcagttcgactgacacgacttatgtatgtaaatattgcaggtgcactt

SEQ ID NO: 6365 - DNA, 3815 bp, Ricinus communis
  Intron number 4 from transcript 29912.m005456 (locus 29912 .t000182) derived from phytozome v7.0 (chr-ID 29912; pos 1 174231 to 1178045 reverse strand)
gcagctgggcattatcttctcgggcttatttacaggttgctcattgcttttctcatagacgtcataatccccatatttctgttgccttatcctttggaggttttgagtaaaagtacacactcattggcagtggcaaagccttgttgtaactaatgggggcaattgccccccctttaatttttgaagcaaaagaaattaccactacagttaacatataaatctaactacgcccttacacaattacaatacaggtgcccccacttatttcttcttgcaattatgatgtttgttaatgtgctgctctgtctgttcccctcccacccctactcctactctcgtcaaatcttggcttcgcctgtgcttattgggcatccttgttatcaaggcagctttattctaatatggctaagacttccacttcaaaagtgtagacccctttgcttgtatgcatatttaatttagtaggatgtgtagaattttatagagaaaggaaaaaagagaaatattctcttatttttttcatatatcaaacataggaaaaacacaacttatatagactagctaaagggtaaaaaaaatcctagataggaactaatttatcttatccctaaaccttagaatgtttatccatatctctaacaaacaaaaactaattagttattctaacttatcaacactccacctcaagttggagcaaatatatctgtcatgcccaacttgctaacttgaaattcaaattgctgactttggatcaaaacaatcctttagttatgctgtgtagttggtacaaatggagtacagataattccttcttcaagtttttcttttatgaagtgcctgtcaatttcaacatgttttgtcctgtcatataaaacaggattatgagcaatactgatagctgccttgttgtcacaatacagcttcataggtaaactcacagatcttttaagctcttgtagaactcttttcagccaaagaatctcacacattccttgtaccattgatctgaattctgcctcaacactacttctagcaactacattctgctttttacttctccatgtgactaaattaccccaaacaaatgtgcagtatccagaagttgaccttctatcagtgattgaacctgcccaatcaacattcgtgtacacctcaactcctcttttttcatttttcttgaaaaaaagtccttttcctggtgtacttttcaaataatgaagaattcgatatacagcttcaagatgtttttcatatggagaatgcataaactgacttaccaagtttacagcgaaagcaatgtacggacgagtatgggataagtaaatcagttttccaaccaacctctaatatcttcctgtgtctactggaacaacattctttacctccccagaattagcttcaattggagtttcagaaggttaacaaccactcattccagtttctttcaagagatctagaatatacttccgctgtgagacaacaatgcctttctttgaccttgccacttccattccaagaaagtatcttagctggcctaaatctttaatttcaaactccttggctaggttttgtttcaatctgcttattttaattatatcatctccagtcaaaattatatcatctatatagacaattaaaacaaaaattttgtcttcaatagaactctttatgaaaagagtatgattagacctttaataaactttgtgaacctctcgaaccatgctctaggaaattgtttaaggccatatagagatcgctttagcttacatacttggctccaaatttctgagcaaaaccaggtggaggttccatgtatacttcctcctctaagtcaccattcaaaaaggcattcttcacatctagatgattcaaagaccaatctagattagctgtaacagacaagagcactcgaatagtattgagttttgccacaggagaaaaagtttcatagtagtccactccatatgtttgagtaaatcctttggctactagacgagctttatatctttccaaggatccatttgagttgtacttcacagtaaacacccatttacatcccacaactgtcttcccatctggcagatccacttcttcccaagtagcattcttctccaaggatctcatctcttccaaaatagcttttttccactcaggaacatttaaagcctcctgaacactatttggaataaccatactagacatttgtgagataaaagcacaatatggtgatgaaatatttttataagatacaaaatttgacaaaggatgtttagtacatgacttgacacctttcttaagagcaatgggaagatcaagttgactagatgaattatttgtaggaagttttggagacttaccataaatttcatgatccaacctctgattagattcttgatggtgctgtaggatggtggctcttttttgtgcttgatgttcctttgaatatacaagacctttaaactttttcgcatagatatcagttgtttcaatattttgattttgagatgaccttatcaaaggctgttcagtattttcaatatttaaatcatttggttccacactttctttattttttgacctattttcttttaaaacatgatcagacccctaagaaataccattatttgaaaaaaaaactcaaaagttaaatcataatcagaatttaaatcagaaccagaatcaattgagacatcttcactagtgttctccccttgaagatgaaactcgtcaaagtatgattgtccttcaaaaaaagtgacatccatagaaataaacatttttttcaaaactggatcaaaacatttataacctttttgatttgcaggatagcctacaaaaatacatttatgtgcttttggatcaagttttgaacgtttgggatcatgattatggacaaaagccacacttccaaaaatttttaaaggaatgttgctagttagccgagttataggaaaacattcactaaaaactttaattggtgttttaaagttcaaaattcttgtaggcaatctattaaccaaataaatggctattaaaattgcttcaccccaaggatactttggaattttagttgtaaaactaagagctctaacaacctctaggatatgtttattttttctcttagccaccccgttttgctaaggcgtgttactacaagaactttgtcccaatacattattaaagaactcctttccattgtcacttcgaaaaattttaatttgagtatgaaattgtgtttgaaccatattataaaaatttttgaacacactttcagcatcaaacttctcttttaaaagaaagactcaagtaactctagtatgatcatcaataaaaaggataaaccagcgttttccagaaaatgttggcgctctagaaggactccaaacatcactgtgaatcatggtaaatggcttggactgtttataaggttgcgattggtaaacagttcggtgatgtttagctaattcacaaaatgcttttgcaatttctgcagtaaaggatgagaggctaagggaagtggcatcaattatgatgctgtggcttgaaatttttattgcttgttcaaatctcatagttttgttttttgtttctctttttgtttttgaagctacaagactatatttgcatcctgcaaaagcttgtagtatgataactatttttaataccctcctcaaaaggaattatgggggaagctttatatttgaatttctgaacgagcataattttggtgattttgtgtatttggtatatccatttacatcctatgttaaactcattgaagttcatctggcttaggtatactgatagaaggaaaa

SEQ ID NO: 6366 - DNA, 1864 bp, Ricinus communis
  Intron number 6 from transcript 29005.m000253 (locus 29005 .t000004) derived from phytozome v7.0 (chr-ID 29005; pos 1 9581 to 21444 reverse strand)
tgacccgcaggttataaaattctctgattttacatttctcctgtacatttctaatttcattgtcacatttctaatcatgcatacatgacagtaaataaaatgaagaacatataaattctttctttgttcattagctttttagatttgtaagatgcatgagacctactgccaccttcacctgattccgtcctttgttgctcaagcttaagttcctgagaggatttgcatataaatgcacttgtttatctttcttatgaaatattgaactacgaatcctccatcttgtgaaaaggggcttccggaagaggaatggcttgtgaaaatgatagatttctcttcctttttcttttaatgattgtttaaaatttttcttaatcttctagttatatatgccccaaaccctgatggtagagttgtatgattctggatctgaatcttacaattctatttgagtctacagtatttggaatggacttgaactgtggctgaatcaagaaatttgcaagtcaatcgggctaatcgctataattcagtcatttaagtcgattctttctttttcatgctcatagggctcaatagaattaaaaatcaaaatttatttcaaatttcatttctatgcgattattgttaaaaaggcaaaaagaaaaattatgcataaaagaatattaaacataagtgttaaaagttatatttatcccacatcgcttggttactaggctcttataatgtatagaagtggattgggcaccctcttcctttgagctagcttttggaatgagttctatccaagcctatttattatggtatcagagtcgacttttttgtctgctttgatgggtttgaatccgacccgtttgcccgcttcgctgctcttgtctctgtcaccagcttttcagatctttattgccatgaaggaacatctctacagcacgagagcggcatatcgcgggtcaaaaacctttgtccctgtctgttgacggaaaagagaaaggaagattgggcttgtgaaaggattgctgtcaagctcgactctgtcacgctaagcatgagggagggtgttagaagttgtatttatctcacatcgcttggtttctgggctgttatagtgtatataagtggattggacaccttcttcctatgagctagcttttggaaatgagttctacgcaagcctatttatcaagaacaaaacaactcttcctattgcatgaagttatatcttctactcctattctaatattttacctactgaataaatttataattgttttgcatattcctagatgatatggaatatatattatatgattttatattaaaataatatcatctaacaatatataacatatttaaaataatatgatagatgcttttcaatgtttatttgatttatagaagcatttttatcttagaagaattgatcatagtgaggtctttaacctgctttctgcccttatatgcaagcacgattctaattgggtaaatgatacactataattatctaaatatttcatattttgcgttattttgtttctttcgcatggatgtacattaaatttaattcattttaaaagtctccattgaatcttacattcgattcaattcttgattcctgattcacaaaataaggattttgatcctcgatttgacaactacgattgcaaggcatttctttctttcttctcttttctgtctttctctttgctttttttccccttaaaaaatctatagttacatatcctaaaatgtggtttgtaaattgtgtaattttggattagtcaattaaagatatgccaaaaccatttattcattcatacacttcaatctatatatattataatacaatctctaatgcaggtattgt

SEQ ID NO: 6367 - DNA, 928 bp, Ricinus communis
  Intron number 1 from transcript 30131.m007089 (locus 30131 .t000240) derived from phytozome v7.0 (chr-ID 30131; pos 1 450129 to 1451056 reverse strand)
tccccaaagcacccacaagtgttactgattttcaggtaattttttaatgctcaattcttggaccttttatcctgttttgctgaattcttaattttttattctttcttttcatatatatatatatatatatatatatatatatatatatatatatatatcttttctctctctttgcctggaggaagagagataggaatggtaatcataggattgtaacatatttctttttaaactgaataactattgggatttgcagataatggttttgtcttgcctcctgctttgatttatgtcatatttaggaaaaatttatatattctttcttggtagttggatatctggtagtttttgttcttaaacagctttcttgggcttcatttaataattattttctttgaaattttcaatttttcagtttccttcttcttagttcgtgttctattggtgatttgaaggggaactttgggtgtaggattttgttgctgctgtaattctcttgagctagttagtataaagagagttttttattatgttgtaactagaaatttctcactgataaatacttttgttagtattttcctttgaaatcctaaaaccaaatgacaaatctatcttatgattgttttgtcttaattcctttttcaaattatctgcatcgttgcctgttgaccattgtaaccatgaacacttaaagagtgcatgagtgtagagaatctgcttttagtgtctatggttttcagctttatgctaattgattgttttgcatattttccttgtgaattgttcctgtaccaagggagggcgtgaaacatgcatgtaacttaaaagtaccaaattcaaattctgcacttctgttttttccaatttgagacattcttatagctgttggtgatggaacccgtttccagtggccttttcagttgctcgg

SEQ ID NO: 6368 - DNA, 754 bp, Ricinus communis
  Intron number 4 from transcript 29482.m000170 (locus 29482 .t000001) derived from phytozome v7.0 (chr-ID 29482; pos 1 0433 to 11186)
gattacaagtatgataacttttgcacttctttttaaaatatataattaattaagaatcaagtttctgcatgttttaatattcaaatatttcacatattttgtgtttttccacaatcattttaaaattccagaatatgtcactgttgcattccacagttttttcttgcttgcatatcaggtaatgctatacatggcatcatttagcaattgtgacagaagtgttttcataagtatagaatgagggcttggcttgcctttgaattgtggtttactaggttattatccaatatagctcttttattaatattggtattttctcttttctgtaatttctcgactttatcatctaccaaatttcatttgccttttccactgttgcatttttttttggacaagtgactagattatcttttgtactagccttaacacactattatctggatttctttttctgtttgaatatcaaataaaattggactagccacttatgcttatctacctattgtgaggctattgatttgtgcgcttgtaaattaagcgctttgagaaacctaaagttaatgtccaaaagcaaagtgagaagggataaaaatcacatgctgcaggagggggctgatgctgacccatttataaatgtcatgtctagtttcataatcatactaaattcttatactatctaacagtgatcgctttagcttttccaattggaatttgcattaatactttctttacttgtttgtcagcaagtatagat

SEQ ID NO: 6369 - DNA, 1824 bp, Ricinus communis
  Intron number 7 from transcript 30138.m004052 (locus 30138 .t000226) derived from phytozome v7.0 (chr-ID 30138; pos 1 534932 to 1536755)
ctctgcccaattctctaattcttggaaaaaaattggtatgtcttcatttgctatatatcaaaattttgtaatgaaaacttttgaaacttctttgttgctgcattctagaacatcttttctacttgcagttgaagctttactcatctacttaaaggtgtttccatacaaatattttgtttacaaaaaaaaaattgaataaattttttcttaactaagtttcttctgccctaaagtccgactctgatgctcaaagtttacctgttaaatggcttgatgcttcatttctaatcatcagcagctggggtgttcatcaaacccaatagaacgatccaacaatttgtaaaactggaagactacggttttagaaatgaaaatttcagtgacgcttcaatttaatggctgatgtgtctgtttggctagtggaataacaattaaaaactgagtgccgattgaactgacagctgtatactgatatttagaagattaggttttgtaaaattggcagtaatgctactatttatctatactacaaaagaaaatgtttgaaaaaaagaaattttttcgatcttcacgcctaagtcctccactcctcctcaccttttatctccaaaatgatgcccttttctccttcatttatcctttttggtattctatattcacgatttaatgattcaagtttacaaagtgatttttaaagagatcttccattgctgattgctgattgcttgaagagagaaagttagaatttgagatatgtccttttaagctgttttcaggtttcaatttaaaaagatggattttgaaaatgttttgggttgaatacaatgattttattgttttgttttaaagaaaattaacatggagagttccacagaatcaatagtgcctttaatgaatccaagtttcgggatttttttacttttaatttgattgaaataatttatctctttgtgtactgaaggtgttcatttgatcatctatctttatccaatgaaatctcactaccggaactgactgaggattaatgtatatcggcttctcatctttcatagtcggtgttggatttgatattttagaagctgagtagtttggtttgggtagaaaatttcccatagccgaccttacccaaccagttacagccctaatcagcacatcagcagttaatgcttcatcccaatttggcctatagggtagacccttctggttcacttttgctggatatatcttatttctgggcattgctttgtctagttattggttactctaattccattggctcatatctgctatagattttgcatgattctcgcggacagagggttagtacatatggaactttccatttttgcccataactttctgtactgagaaattcagatgatagttaatgttctaggttctagtgttggtagctccctgtttgtgtatgaaacttcatgtgactaagctcttgccaccttagtctagtcaagtgggtaacgccctgatatctttcatgcatataatctggttctaacattttctaatttatttgacatcattatttgaatgcactgctttaacttctatgatgtctgtctatgaatagagaaagaagttataggagatcacaacataattcccaaatttattacaacctagatacattataaagtaaggttttaggttttatctgttctattgatgttcacacactgcagtaacatattccttgaagatgctgataaaagtggcttttttttttttccttctctctctcaatgatatcatgtgttgaatgcctctttacttttctaatgtctgttcattcagcttattcattgg

SEQ ID NO: 6370 - DNA, 987 bp, Ricinus communis
  Intron number 1 from transcript 29680.m001706 (locus 29680 .t000049) derived from phytozome v7.0 (chr-ID 29680; pos 3 20447 to 321433 reverse strand)
gaattcaagttctgagtttatcagtaagtttaattttaaactgttatttgttcttctaatcctttcctattttctttaaaaggtagcagttgtttatcaataaaatgactctgcacataccatttccaactcttggtcatcttttgttttaagaagaagaagaagaagaaagaattctcctcttggtcatccttggacatctttatttttcttaatcttaaccagtatacaagttactacaaaacccaagaaaggaatttagcttatggtatgaggatcaagggaattatactgccttaatttaacatatgggataaaagagtagataaaatttggctgtaattctgtgaatttgttgaagttgagaatcgttagtatgcaattctctaacatcaatccaagtagtatttttggtgttgagtagcagaaattcatgcatgaaaaagtgacgatgaaaatgataaaagagtgtgatcgaagaaacttaaaatgttaaatacaatttatttatttacttagctgctttactttgactaaagtgacacactgtttatcataattagattatctacttagttctctaatatacttcaaattgaagccaattatcccttcttttgagctggtgattttaaactagtttcgaaggaatgcatcaatgcttgatttgaccaagttttcctatattaccgtttattgtacttagttatctaacatgcttcaaattgaagaattcttaagtgattttgaagcttcaaaaagaattgtggtcctttaaattttccctttattaaaaagcgcagtatcggaatttgatcttttgaagtgatgcttccatggaaatagaattactttcaactgtatccctaatctataacatataggagtaattgttattgattttgttaagtgaatttaaaatatcttattatttcttagttcatattgctggagttttatgaccagaaactattttgatgcttgcag

SEQ ID NO: 6371 - DNA, 6727 bp, Ricinus communis
  Intron number 1 from transcript 30079.m000447 (locus 30079 .t000005) derived from phytozome v7.0 (chr-ID 30079; pos 2 93709 to 300435 reverse strand)
caaaaagaaattcaaagaggaaggtaatttagagtttaattacctctttttggtacatatgcaacttataattcattgctaacatcttatatttgggattataattaggaggaattcttttattaacattttctatttgttagaaggaatcaacttaagtggacaattagggtgctgaagtttatagttaaacttttgaggtgcaaagtattgagtttatgttatcaaacgctgggctccaattagttgcaggaattgaagtctacatttcatgcctaaaatggaaccccaagccacatcagcatcacatataggattaaacaatgtcaccgtccttgagaaacccctccaattgaaatttattaacaagtattgcgatcaattattaaaaaggacatatgtcatgagttatggggtcaattagaatgtgcctcaattgttgaaaacattgcaattccaaccctgaaaaaatatgttttcctcaaaatatgagttacctagtttcaaatgtggccttggagccttaaagcaaggtgcaagggcaagtttgtgtgaggggtgaggtgtaaaataaatgaaatttgctagtaaattcaaatttaagaaatttagactaatcattcataagtcagctattcaattgtggcacaccctgcaaacattggagaactatacatcatcattaagcccaaaataaccttcatgatcattcattaaagattcagctatttacttcttatgccttattgtttctcttcttcatttactttgatttcttccatgttagaacataaaatgtcagtatcacaaactttgtttggacttggaaggaaaaaataaaatagtcgaaataagggaataaagagcatgaaaagagtggagagagagagagagagagagagagagatggagggatcaatgcaggaataaaaaaagacctagagagacaaggaatatgtagaaggttaatcaagaaaaagaaagatatattagaaaaaagccataattaaagaatatataaaggagagaaagtggcagcctacttacaagaggcttcagcacccttgcctttgtcttttgccttctctttatatctatttctctttgtttgttcttttggaccgaaattagcagtccttttccttgtattcttctttgttgttttttctcattattataacacctcctaagcaagtagccaacttataatcagattatatatatttataaatatagttctctttcctagatctccttcttgttcttctttaaggaattcccgggttctctttcttatttttatgtgttaaattattggtgtacatgaatttttccctaaattgtacagatttttagatatgcatggatttgcttaattgtaaatattggagtccatctctctttttaacttgagaaaagtttgttatgcattgtaattatgtgaaaatcttcagaatccaactttattattaactttatgaaaagctcgttgtacattgctatttttctaatatgctttgtgtcttattatggtcaaagtcaatttaatacatacatagagctaattacataataatggaaaatttgacaagtctctaaaaagttaaataacaaattaattgcttttgacaaaaattatcttcatgtttttacttataaataaggggggatagaaaactatgactacattcttcatacaccttatatacctatagaattatatttgatgtatcttctataaaaattaaatcatcttcaaactgaagcacaaaatatgactggaataaaatatacaaggaaaagtttataaagtttggcagaaaacataacagatacagctttattgctctttgtatcttgaataggtgctaacctaggcaataaagttcccacgtcttatgtttgtcctgcaaccctagtatcctattaggtgctcctggcgcctgtccacattacacacattggggttgcatctttaacaactatgtcatctaggtaactaaaatctgcaaaaacactgcataagagcactaatatttttaaatgctttatcctttttccaaagttgggtagttctttgtaatttgtgctagttagttctaaaaattgcgcaacttcccttctcaaaaaaaaaaaaaaacaaaagaaaaaacatgaatgataaaagtattgaggaaggtcataggtgtcctttctttctcaagtcctccatgctagatttctaaagtcacttgaactgtcaaatgggcttttctggtttaaagtttcttttgtgtactttgagaattgaattaagaaatacattgtgagatagtaatcctgcaaaacattgttatttttggaaccactagtggcagcaacgtgaagcaagtgtgagactttccgatctctttgttttcatcctcgaatcattagatccccctctgctcttgcccattatcctaatactgcagggaatttgttccccttctcatcaaactaaagaaaaaaattcctcctgtccagacctactcttaactgttctagtgcagctccagaagttgaaacagagaatttacggatggaaatgaaatgtgtaaggaaccaactctttggcagatcgtaatcaaggtctattcatgcaaattcactttgaacatacagatacttatttggaatattgagatgaaaataaattgtggaaatgacttgagataattttcaagttaaactatttatttatagatggttttgggtttattggaagctagaaagtttaagactcgtgtgcacaattagggtttttaatactgtaatatttggaagcaaatagcacaaagtaagaatggctgtttgcaattcaagctgagtctggcaacaatttctgtgaaataggacaggttttgataacctgttctacatatctctttgcagaaaataaaggttttaaaattgaatttcaggtccgatttgacagaaattcaaatctgaaatagaagaataggaaaggaaatataaaaaactttttaaaagtcaacacttggaaggtttaggagtcacacctgaagaggattgaagcatacaattctagagcaacaatttgcaggaaatctttgtttattacatctgaaaaaaagctccctaataatagttacaagcctagatatttatagattaaactaatcccaacactacttggattaagaatcctaaactagggaaatatactaattaggaaatactaaactaactaaacctcttaaattagacttgaaataaattaaagattcctaaaataaactttaactattgctccagcaaaggggcaatacccaggaaagttagaaattacagaaataccattcggttattgaaattgtaaatattcgaccaaaatttcaaatctctttattttctgaattttaattttcttgatgttttccttattcttatgattctcctctggttgaagaaaacttgactccagttttgaaatgcctaagaagcaaaaacaataatacattggacttgaacttggccttcttaacaattggtaataaaggaaatactttaagcctccttttaggctcatctatgaactcatcaggaataatgaaattcactttttgaacactagcaatagatagcttgagcatctttcgtaacttgaacaaaaagtttgacctcttgttcctcttcaacctattgataatcatcttgtaaatcgtcattcaaataatctccaaacttacttgaattatcttcataaccttcatcaacattttcttccccaatgtgcaggttttgtttctctggacattgatatcctatttgttcaatttctccacatttaaagcattcataccttttcctttagcgttagtagtatttgaagaaaatggctggttgcaaagtagtaaatttggtgttgcacaatttgtcccaaatcctcttttaattgtcgagtccctagcttgaatcccaattcgttttatagatggctgactcaacccttaatacctaaataattctttcttgatatttgttcttagaccagccgtaagttggcccataatttgtgaagagcctctataatttctctacaaattgccaattcttcaaacttttgcctatattcaagacatgttgccttgccttaaagcgtacacctgttctcaagtcctctcaagataattataaggcaaacgtttttcctgtaagttgccttatatttgcaactcatattcaacatcgtactgccatattttcgtcaaccccgcacatttcatcttggaaaacctcagtcttcggttgtaatccatatgataccaatcaaagtgggagtcgatactatataaccagtcagaaaatattgttggatttacattcccctcaaaatctgggacatgtaccttgactttcttggtgatgtctcctgccaaatcgtgttcttggttacatagttttgcttaatttgttgatgttcccaccattcctacgcgcaacctataacacctaatcaactcctgcagctggtcattgagacttgggcatcaaatttggtggtcttgcaacattttcatcagtagttgatccaagcttctaatatgttagttgttgtgtctactcgattagccaattgaactcataatttgggtaactgttgcttcatgtcttgtatgcctagcatcaatctttgaattcagctcaacattggtcactattattgcgaaaatctaatcaataaacttcaaggatcttgaagctctgatacactccgcatgcataaaaaaatcgcagattgtggacggaagtggtacggtgattgatgtagtggaagtggggcgaggaggccaaaattaatgtaggcagattttgataacctgttttatgttgatttttgcagaaaatgaacattttaaaattgaatttaggtctgatttgacagaagctcatatctgaaatagaaaaatgggaaagaaaatatagaaaacttctacgagtcaacacttagaaggtttaggagtcgcacctaaagagaattgaaacacacaattctagatgagcaacttgtaggaaatctttgtttattaatctgaaaataaactccctaataattgttacaagcctaaatatttataggctaagctagtcctaatagtacttagattaggaatccttaacaaggaaaattataaattaatactaactaggaaatactaaaccaactaaacctcctaaatcagacttaaaataaaataaacactcctaagatatattttaactactgctccagaaaagctgaaaattgtagaaatactctttcggtattgaaattgtaaatattagaccaaaattctaaatctcttaattctttgaattttaattttcttgatgtttttcttatccacataattctgtaaacagcagtttaagggaaaatggctctttgagtctgtttggcagggacttacactggaaattctgtggaaggcttctgttccaaaatttgcttgcagagttgaatgacatcaaattattctgagctcctcattatacaattcctcagcatggcaatttaaatatattagcttctggtataatatttttacttcaggattcgaaagtcacacccacgtaaaccttgtgtgacaggttatagttctggatttcttaagcctttaaatttgttttctctatggttctgtgctttctgcatcaaggagaagcacaaactgctgtgctacattgtactaaataacagccatcatgtcgcatatgtaatgggaagttgcataatggctgttctattctcaaccttccatacccactgtagggttatagcctttcaaacgttcaaaacttaacggtcattacaaaattttgtgtaaaatctgcttgctgctttggctatttctcttgtacatcaacattttttcttcctcttatagcaatttgtctccttccttttggcttacaacagcttggaacttaatttctccacttaagcttttcttggtttcacttttttatcttgcaagaagttaaaatcattgaagtggttatattgaaaaggggcaagtgttgtattttcaattttgtttaaatcaactcgcttttatgctatatttatggtagctctaccaatgttatgcattcttttgttcaatctgccatcttttcctaattttacctatttttaaatttgatcataaatgaacttctaaacttgagctttgtttaattatttgtttaaacagttgttttgatggtaataaggttaggtaattgttagaagttactgtcatatgaacttattggatcctttaaaggaaatgagtatcacatagtgcaagggcatcttccagaagaatatacgagtactttggctttcgtttgaattcatgatgtgtgtttggctaggtgcataaggaataataaaggtatttttgggtttgaatagctttcaagcacaaaaacttttaggtacttgttttaagatgaattgaatatcaacttgaaagttctaatttcagatacactccctaaaatatggtagaagctgtttttcttcacatcctttgggatccaaatctttagtatgcaagttgtactaaaaagaacatgcacaaattctcagattcggaattttctaccccaatgtaatgaaaatgtatattgtaccctctcatttcttccaacggatttgacaatataactattatttgatgtagggctgccattgaaa

SEQ ID NO: 6372 - DNA, 2886 bp, Ricinus communis
  Intron number 9 from transcript 30192.m000553 (locus 30192 .t000012) derived from phytozome v7.0 (chr-ID 30192; pos 3 28208 to 331093)
ccctagaagtaagagtgcgactttctattttagttctttttgctttgctcccttcttgttttagctttctgagaaatgatgttagagctatagtgaagttttaaccattctacctatatcttggtgttaatatgcctctgcaaataagatagtttaggtactttctttgcaaagttgtacttgtacaaatatgtacctcgagcccaaaactaaaaccagtcaatgtgaactatgcttgtgagaaaatccaatctattttatggctcctttagtagcttaactatgattataaccggtaatatggagtctaccatttgagatctgctatttgcttgggtaaattaattgaacatgttcgatcatgtgctccttttctcttagaacatccatatgcctcaccacaagattaaggtcatttccaaaatccaaaatacagcaatacaattagataatggtttagactattaaagcaagtagaacatataattgttttcattaatctgcaacctattactcgcactgcagtttagatcagtgtctctgtatcatgagaaaattgcaatacttaaggcctttgctatcacggtttaatttaattagttgtttaattagcttgccagaaagggcattatataagaatagctgtagcaatgaaggattatatcgtgaaatgggtaaaactggctatgggtcagtacctgcctattcaggggtaaccatgcccgtatccgtttgagttgtcactatttttacctgtcccaaaacccatttataattacaccttagctatccatacccgtcccaaaccttgtcagtattacccatcgattatctttatctgcctaaatccatttattgtgttaaatttgtataatttgaaaaaattacgcaaatgagaatggcaatatgaacgtgatacatttttatccaaaaaagtatttaataatgaaaaaaatgcaaaatacagtcatattcctcaaatatttcaatcttattaatattaaattgtaattatattttatttttagattattattttataaaaaatatttaatttctcagaatcttttacttttttaagggtataagattagggctggtatagagcagttacttgaaaatacctgatatgctgtcattcctattaatggggagtagcagccataaagactaaaatttttcctgcgatttccaaataactgaaacgggtaaaatgtaaggataggaccaaatattgattatatcattgctgttaattaagagcacactcaaaatgacatgccattaatttgaagatttttgaatggctgtagtaaatagctcagtgatctgtaagagaggtattaagatgtttctacagagttgagtgtcagtatttagctggaaaaatagattcttctctcacaccctccagttgcaaaatgaagttggcccaacttttatgtgaaaaacattcctagtttaagtgtgtacttgtgagatttaaatgtttgaaggaatgttaacctattttcatttaggcatttatctggaggatttctgagagttgaagaaggcttttgcaatggtttgatttggggcttcttatcaattagaaaagataggtttttatatgtcaacggaagcagtaatcttgtgatcaacctgagtggcatctcattgatgactaaatcttattgtagtgtagaagacacatctgataagttggttgatattagcgacgagatatgtctagcataagaaagtacttgcggtcgaggtgtaaggaaatgctaacatgcaatgctcttatttaaaaagctattctcggctttttttagatagcatctggaagctgttgggttaactcaaatttggagcttttgactaataggtatttgtttcgaaaattaattaccagattattctcttaaacattgatgtctaaaaactattaaactatgttaactccgaagcaaataaaatttgaaaaaaaaaaataccagaaataatttaagggtaatgtgaaatctggagttcctcttttaatttttttccggtattagtaatccatacagcctgaaacaaaaaataataaaactaaaaatgagcctaatttcttatgtttaaaaattttgtttcaaagacattgagacaataattaatcaatatagacatcttttgattttcaaagtaagatgttacatttcattgttgttttcaatatgttaaatattttcctaaataatgcttaattatataggcatgaaataaatatgttcaaaatgatcaattgatgtctatattattaaacgactcataataatttattctcccaacttttaattagtagctattagctatgaacagctttgccaaacagaacctaactggcttaactatgggtatttcgtgaaatgttcttgaatccatttccttgttgtgtccttcgatgctaaaatcttgtagtgctggtgggttagatgtgagatgtaggcaatgaaggatttcaaaagtaacttgagcaacgtgccataaggcctggtagatccctaattttgcatttgttggtacatagtaaaacaggtggttgttgaaacattatgttgcattcttggataacatctcttctttgtagtgtttgagtatggtttctttctctatggagatattacctgattagcaggaaaaaagtagaaacaaaatatagaaagagaagagaacaattgatgggcaagaattgtttgttgattgattagttatgggcttgcaaaacaatatattaaagacatgcttgtcatgtttcgatttgtattacctgttcagtcaacattcttgctgttcggctcaatgaagtggtttgcaattgtaggagacaagaatagccattgagcaggtggttatccc

SEQ ID NO: 6373 - DNA, 2319 bp, Ricinus communis
  Intron number 9 from transcript 28035.m000358 (locus 28035 .t000003) derived from phytozome v7.0 (chr-ID 28035; pos 5 7891 to 60209 reverse strand)
ttattactcccctatacgaggttgttgcagcggtaagtgttatatttgaccccccatcttttgccttttggatataactcttgttgacattctgctaaactttatctgtgacatgtgattacacataagttcctgtttccctttagtgatatgatctaatgcattgttttagaacatctggtgaatgcactaagaagtggaagatatttattcctttggttcatctcccaacatttgtggattgagatttttttgtttgacttcattggcaagcctaatccattattaatttgaaagttatcatcttgggcaaagcatatagttctgaccagtgtttgaatgatggccttagtgtctcatatcttctggctcacaggaatcttggcagactgagaggggttacctattaagttgctgtcaatttcagatttacggtagtagcatctgtaactgtgactgagtgatacagacaatacttaccattatggaatgattcatgatcaatgattcgtaggttttccttggaagaagaatactaattaattttatggcctttatgtatccacttattaagtttagaaaaaggaagctattgcactatacattgtttttgttttcctttggaataaatcttaagattcaattaatccaaatttgtaacataaaacttaattccaaatattgtgttttcaatatggaaaaaattgttacgaccattactgaattatgaccagaaaatcacattttatttcttatgataagagtattgtcatatatatatttcgttaaatatatgttggagaatgaatttcagttattttgcttatttttacaaattcatagtagggctagcattatttgctatatgtatgtatttaaatattgtataaattgatggtagctaaagtttatgagctactccttattcagttcttgtttctctcaaaaacatacttaagaaggaatgcctggactaacaattaaggaatatgatgacatcagatgtgaaatagcattcatggaaaatagacttttaaatccaaataatgattaaatagcatttgtagaaaatagacttttgaattcaaataattgcccttccattaaggaggaaactagtaagaactattgctgcttgtactgagctgtcagagaaagtttgtattgagctgttagagaaagttgctttgcaatttgacatagactatgttcttctgtatgtataattaaccgcattaatttctgtcttagctttatattctgtgagtttacatatgaatatgtaattggagtgtactctgacaagacattaaaaaaaggcacttagtggttcaacattagagccagggactgatggtactatacttgatactgccccttcctagaaaagaaaatggtggcgcacaagtccaacaaattagctataggaactggtttttggactggatggattaccttgtatcctattggatgctaaaagatgcactgatataagctttcaagcagattgattgcctaaggtaatattaaatgtggattgaaggtagaaagcaacattagacctcttgaaatgatagcctgactgatccccattagactatctagaactagaggagcagcagcaagagaagcaaagcagcttttcctaatagagtgcctctctcaattcaaatagttcctcctctatttttcttctttatctgtagtgagtggtataaagaaagctttagcttactagctttttagcttggtgatccttatttcagtagcttcttaaggagggagggctttttgtttttttctctaaccggcactggaactgtaaggatgaaggaccccagctgtggcgcatagaactctaagcaaaaataaatagtactctgtgcttaccttacttgatactacatgacctgacattggaactatgaggggaaaaataaagtctatattttaaattaaggccaagttattcaattaggctttatttttgtaatattggcctttgtaacctggtcacttgtttgctacatgtggtgattgcatatggcatattcatgtgaagcttatcttgtcatatagatatgttaatttaaatgatttagaagtttcagcagttcttcctgtttgggataaagcttcctacctctgcacctaaaaaccagctttaggtttgttgaattattaccctgttgatacaatactatcattggtgattgcattttaagtttgcattgtgctttattttttctttctttttttgagaagacattgtgatttgatttatatttatcttcaataacacataggaagcgggaaaca

SEQ ID NO: 6374 - DNA, 148 bp, Ricinus communis
  Intron number 2 from transcript 29991.m000660 (locus 29991 .t000042) derived from phytozome v7.0 (chr-ID 29991; pos 3 08500 to 308647 reverse strand)
ggtggctcttatgtgagtatttgtgaattatttttcctttagattttgagatattctttgtctttgagaatgtggtgtaagtagctggatcttacttgacttagttggtataggaggattctgcgacggtggtgtcaacggtgctatt

SEQ ID NO: 6375 - DNA, 536 bp, Ricinus communis
  Intron number 3 from transcript 29346.m000113 (locus 29346 .t000002) derived from phytozome v7.0 (chr-ID 29346; pos 2 1109 to 21644 reverse strand)
agattgccgttctctattctactcccagatcagtgaatgccaaattttcttctctccaactatatatcatagtgcaataagtacaaataaactttaaacttttaatcattcaccagatttaatttgttctatagttatcctcttttgcatcgaaatatatgctatcagacatcctatttttgtcatgcaagtctcttcagtttggcaattttgtttacgttctaacttaatcagtgtttttcgttgagaacttgccaacattgaggagataggatttagaattttttctatgtcttcaagtatgataaatttgatgatcctatataatttttggtcgattctgctaattggaagtaaaattatgcatttcttttcattgaagcttttcattttgtcaaaatggtcacggatattttaattcctcaactctgtttctcataagatgcatcgtgatactcatacgctttgcaagatctgccatctactcttatcacttacaaattcattttaaactttgtcaggggttatttttgtcc

SEQ ID NO: 6376 - DNA, 1752 bp, Ricinus communis
  Intron number 13 from transcript 29637.m000724 (locus 2963 7.t000002) derived from phytozome v7.0 (chr-ID 29637; pos 18235 to 19986)
ctcctgttccctttattgtgagtttcacttattttactcttttatagactagatatcatgcagttcttataattgtttctttcaaatatatgcactatgcttcatgatttgaattatcttaataaaagatctctggcccagtccttgtattttctatgatcttaggattgaaattggtgaagaggagaattagaaattaaagttggctaaaaagactctaattttgcatcatgtggtggctgagcattctaatgttagccaaacttaatgctggctatcacttttatcctgtgggacctgttccatagtcagaagggtgatttgccaatatatattagaatttaatagagttcagaaacatagagcaacaacaaatgatgaacttgtcaactaagtaagatattacttcttaaatatggttcagattctttttacgctgtaagggttagtcaagtgaagaagggtaatgacaatatggaattaatcaggtgcttttgcaagactcatatcgcattctatgatttaggttgttgattttggtgtatttgttctctggttcgaatgtataagctcattatattggtatggcttattcatattccaatatcacttttttttgcacatcaactggaaggaataaaataatgttttgaagatgtcatactttggtgaaaggtggatgaagatgaaaaaggctgatgattgggaagcaagttagtcaatcatgagactgaaggccgggatatcaatctgttggaccgaaaatcagattgtgttaggcattgttcaactattaggcataagtttaatgctattggagagagattttgcatgaaactttctgcacatttcatcaaaggttgattgaaagataattacctacctagttactgttccaccgaacttgactctcaaaaaaaaaatttagagatagtcctaatattcagcatgtttgaatgtaaaagttcaaagtcatgtttccctggttaaaagtgcccatcatgatgtagcatgattgtttaacagaatatgggtgctgtaaataggagaatgtgtaagatgtaggaaggcttttaggaccatataagttgttaatcttgggcattatctcccagaagtacctaggtgggtgcataagcttatcccacaaggtggttggcattttgtgggtgttccctcttgtcttctgttttgggcaatcagcatgtaggcattgctctaggcatatgagaactaatcttccataaacatcatgatcttagtatttcccatattttcacgttctcctttttcttttgagcatgtttttctcatagacatttgaaatattctttgctaatttatattgctgtcattataattgattgttttattaactagcttgactgtttatagtactgaagtttttttgtttcaattgttaacactgcattcttgaagattcctgtaagaattttagttgatagccactaaaatgaggtgctcaggttaattgcacgaagtgtcatccaggaaactacatggaccaaaatctgtttctagtttgttttttagtcaagagtacaattggtttaatatataaagtgtctacttgcagaattctgctagttctttgtcaaaaagaaatacaaattagccaatgataagaacttagtagtttgttccaagcattactcacttttgtcgtcgttgtggtataaattaatttatttggcaggttggcatacaacaaaaaccagaagactggaagat

SEQ ID NO: 6377 - DNA, 1283 bp, Ricinus communis
  Intron number 1 from transcript 29848.m004647 (locus 29848 .t000203) derived from phytozome v7.0 (chr-ID 29848; pos 1 124449 to 1125731)
acgtgattcgggttgcgccaagcaaagccatagaggtaatacattttcatggttttatatttctcagaataatggagctgttaatctttgctaaccgatctcttggtacagtgaatattgttgattacattgttcttggtagaattgatcatgtcattaattgctgcttgctagtgtttatccgtctattaggaaaaaattaaatgctaggaaatcttgtttaggatacgaaggtaaatcatatttttagtgagactactttccatattctgttttattaatgtcatcctttttgtttgttcctgttcagttgttggttcatttatctaagagtgtcaataatgaaatatggacgactcatttataaaattcaattgttggtttgttatttgtttctttagtttttttttgtccgccgcatttttaagtttgtcacactcccttggtatctttctatgatgcctttgatgcaagtattcgtagctctcttaaagtttttcttgtagttgctactttttattctcttatgaacgtacctcaatacccttgttgtttcaggcatggatttcctgttgcactgagaggttgttgcctttgatttctcaagttgctttagagttaattataaatcttaaatagctataaactaaaacagactttggataaggacatgtctgactggatccatgtaggttaacattcagttgaatagttacggtgcactccattagggtttttcttttaacaaatttaggatgtcaatgctagatgctagcatgaaactgtctgcctatgttcttcatttcgattgcacctcacctggtaagcctaagattactccgtctttataattatattctctatagtcaatttaccaccacctgttatagagaatagacatcaaactgcttaaacccttctggttcatagagcttttagcaccaatattttgtatgtgagaggctattaattaatttttctgcaacctatcaccagtgcaaacttcagcaagcaatgtaatgttctttcacgttcccgtgctagtaaattttacaccttattcagcactccacaaagatgcaaaatatggtattgcatcatggaatttagtgaggattatcagctacattgtacatgacattatggactggcagttactgtctgttttgttcaaatagaagagaaatgagatatcattattttgattattgaaagtaattatctagtttctgattttcatttttttctcacatgtgattggttctcatctcagctgtttgcat

SEQ ID NO: 6378 - DNA, 2062 bp, Ricinus communis
  Intron number 6 from transcript 28460.m000081 (locus 28460 .t000001) derived from phytozome v7.0 (chr-ID 28460; pos 1 0704 to 12765)
gtgttgatctggttcacaagttcaaaggtagatattaattatttcttgtctgaatatttttagctatatggggccaagtaaaagaaaatctgaaggttttatttttatatctgatttggttgatcaaggggatattagctgactgttaaaactacaaaatctagcatttattagaacctttatgagtctagataatactgatttcaattcggaaggaaactgttaagttatgaatgtctactttctcccatatccaaagccattcatgctaaaattaagttcctggatcctattgtcactttgggcagtactatctcaacttaccaatatctgagcagtactccagggaactcctgatgcttttcaaaatctattttaaagatgcactcgggaggatagcatgaggtgaaacgtgccttcacatgaaacggtggtaaattgactcgggaagtgttttattctgagtgagatgcctatacttcataagaaactaaatacacttttctttctcccaagttgttttctacttatttaagcctggctgtgaaataaggtccttcagagtatcaagctctgttcctacaaattttagattgatccgattgatccctaaagctgcatatgctccctgtcacaatggagtagaattagttaataaagaaaactgctttctgactaaatattttccactcatcgttaattagttgattcgcaaggggctttctagtcatatggatggtttaagaggctctttcctccaagtagctttccatggagaacattctttgatatctactctacataaatttgttaccttgaagccttttcttcatcagcgtctacccagtttctcaccctaccctttctcccaattaaaggaaggaaaaagaagaaataggaaaatggaaagtaaaaggaaagaaaagagtactgtgaaattcatattaccacacaccaagggtgatctcctgttcttctgttgctcataacttgatctgccagggaatagcttgtttcggagcttattaatagctctccattgtaaaagttatctttcaaatgagaattcaatttcagtctttttgttaatttttctggatcacatatctagtaaaattcctacctgctctttaggtaggtacttaatggttgttcaaattgaggagtcaagaaataaacgagttcaacttgagagtgcacttgactgtataagtctctctcttgcttgctcttgctctcaaatacttctttgtgacaagggatgctgctgatgactattggacttgaactgcatctcagtaacttggaattatttgttctattcgagaagtaatgagattatgggagtaggtttattggattttggccaagaaagaatcttaagataagatacagttgtcttggtaggagtgtgtaatgatacagaatgagtaatggaaaaggtgtgtatagtggtgtacaatgaattaggagtttttatatttggttttggaaatcaattgggtgttgtacacccttcactttcagagtaaaaggcttgcaacttaggcgcaagtgacaatcttgctgactgacatcttttcttaaggttttggtgtctagtttatttgactttaaaggtgaaattgtctactaatggagtttaaatgacatgtgtttagcggacaaatatgtataattgattccttcatttatcaatattttgcttcaacgacggaaggctgaaaggttttccataaccttagactttgatgcttagcatatggggtaaaacattggaaatgattcttgaaaatctgcacttctccaaaaccagaaaacatatggaattctaggatttacatagtattgttctcttttcttgtctttgatattctgattatctttttctaagataaacgcaattgaacatagttgattctttaagataatcttgaagtgtgctagttctattgtgttaacacttaacatgcatctgtagaactgtaccattcccattgcttaaattggtgataattctgtgacagggtttcgtaacgccaacagccaaatctcagcctcc

SEQ ID NO: 6379 - DNA, 1762 bp, Ricinus communis
  Intron number 4 from transcript 29662.m000448 (locus 29662 .t000002) derived from phytozome v7.0 (chr-ID 29662; pos 2 2071 to 23832 reverse strand)
tcccacaagtaagcctttctttttccttttctgtcaataattgtctacacagatcatctttttgtggagcagctgtcttattttagttcttattaacaaccaaaagattatgctcattaataggaaattactgatacgtgaaagaatttcttattcactaggtcccttatgtattctttattttaagtttatggatttggattgttggcttgattattgcaatcagtgtaatgcaacatgaaatgttgatttaggtggctggttagccactgttctctaggatatccttggttcttggaggccgctacaattggctaggaaatgcagttcaactaaccttaatttgtttctgatttgggtttagcagcgtttcttgaatcatatgaatgaggttacactcttatacctgtcagtcttaacgataattattagcaatcaagctgatgcagttaaagaatggaaattgtttatattaaatgattaataatgaatttcatgtttttcaaaattttctatttaggattttattatttatatgttgtttatgaattctactttcactgtgaatatacagaataagttttttatttattcctagcgtatttatcactgttttagaattttcccagttagcattggtttagaactatcctgatttagaattcctaatcaaggtggtgggtaaaattaaattttatccataagtaaaagtaaaacttagtgatttaagaactatttgtgatttggattgttaaaaattaaatcaaagtttagaattttatgcccaccccccctttttgtaagctctttatcccccttttctgcctttgtttgacatttatgtttctacatcacaagcattgttttgtagcttataaataataaatattcaatttgttgttcttcttaatcaaatactttatgtgtctagagtccaaatatatggaaaaaatattcgcaatagtttttcgttgctttcagaattatattcaattaaatgggatgatttagaaagttttggcttgctatacatggagtgggaatcagtaaggagagcctatacggtgccttactgcatagatgtcaaccatgtctattttaggacatgtggtgccttcttatttgttactaacaaagttgcatttggaatctgcatcgctaaattataactgtcttcttttcaattacagaaattctttagactagtcttctagatttttggctcctttctttgacattggttgctgtctctctctctctcttagataatattactttgtcaatgcttgttgattgcccacttcctactacgggtttcattggttattagctgtctcaatggtttcatttaacagctggttgctggtgttgaattctgatttttcttttagcaatatatgtcatatgtatcacgggaagttgggcagaaaacaattgcatgtgtaacagctgttattatgccattagcgacacaataacagccatacaagtataatgtttagtgggtatgttgtaacatctatcattctgtgctatcaggttctagtcaattattagttgatatgaaattttttttatcttgataagggaaagagagcattatgatgtgctttattatatggtaaacactcatttgcgtgtttgtgttctctttataattgctttagcttataatctggtttcaatttatctagtagatgataattgtaatcttatgttatttataggatttgcacaaacagttcaagttggagtgacaaaa

SEQ ID NO: 6380 - DNA, 1267 bp, Ricinus communis
  Intron number 8 from transcript 30074.m001405 (locus 30074 .t000072) derived from phytozome v7.0 (chr-ID 30074; pos 5 34107 to 535373)
gcaacccaataattgtgctgaacttaattaaggttctttcaaatttcattcttgatagcgatctgtctatatcaagcttaattagttattgagttagccatgcattctcttttacagtgttattgaggaattctggtgtttgactttattgaacaaggcctttcatgtattgcgatttcaattgtttgttacagcatccaagctagcatggaaatttgttgctaattgctaattgccaattgttttttgatagtcttgctatttattccttgcagaacttttgagcaatgcaaatgcatttactatgattattaagtggctttggttggaatttcccttgaattttcatgagacattgtacattaatgagtaatgagtgctgagcctcttgttgatttttgtatttcatttcaaatggcaaaccaaaagaaaatgatgagtgattgtcttacacatttggttagcttagtgaagtgaccatgataaacatattgttatttttggctttggttaaattggagtaaaatggtgataagatttttttgtaattctttatcacatgccctttccattatttttctaagaggaaattatttgttttgtggaacatattttcctggttgatattacccataaataaataatatatggggataggcactgtgcattgattttgtgatcatgacagccatgataacttcccattttttcttataattttctcttttattgtggtagattaaaaccaagtgtaccagcatgaagtcttcatatgtccaaatgttctcatctctttattgaaggaatactctttctttttccaatctgctcaaacatccaaaagccagaaaaaattctattgatttaaatcttacaactaaaccatggaaaataatcgttttccaggggctttatttgaaaattgttttctactagtcagtttccctcaagtaaatggggtttatgacatgtttgtagccctatttctctaaatgtatgtttacatgcatatgtggcagtgtcaagaaccattccttgatatacttttgtttttggatggtaactatgaatcatattcagcttttacacaggcatagatttatttacgcatttgattttctccattatcatccaacccctatttactgcatctaatccacatttatcaacctatttacttgggctatgcctatgttcagatgtttttagttatcctggggttcatttatattctaacacgcagactgttgaaaaaagacctagagaa

SEQ ID NO: 6381 - DNA, 2400 bp, Ricinus communis
  Intron number 3 from transcript 29797.m000364 (locus 29797 .t000020) derived from phytozome v7.0 (chr-ID 29797; pos 3 95517 to 397916 reverse strand)
gagctgtggccgcagcttaatcaattaattcaggggtatgttattgttaacatttcttcttttatagttcttacagcatcttcatgttttatcttctgttctgaacttgtctcatttatccactctcgattttctattctaggaaaaaaatggttatgcttgcctatgattatcatctatgtctcgtttggcccgattaatgatatctatccatttgattttgtgttaacctattttgttttcaagtacttctcttttatgcggccactgtgttttatatttgttgttggttttgaaatgatgtaatcaatatgtttgatattgacatataatagatatgataacagagtctacgtttctatatgatattatttgtaatatattgttgacgcagatcatccttacattttacttgtagatacatggattaaatagtgtacataagcaggacgggtccaatgcactaatggtaagttgaggcgggatgtcacttgggggcaacatgagatcctagtgaatgcatgctataacttgtagactatttttcaaaaagagtgaaaaagaattgttgatataggatctaggatatgtgcttaggcagtgaaatagcagacaaatatattctctgtatggtaatgtaaccagcatacgagctttttaacagctcttatttcaccatttacattttacataattaggctgaaattttgatgtcccacagttcaccttttataagatttcattaagttgaaattttgattattgatgcatgaagaaatatttattgttgaaaggttcctgattgacaagggcatttattcacatctttgattgtgtttgtgcgcagagtgttttgggggtgaaggtgggatgtttgggatgattgataatactggggattggtggagagaattttaaagtgcaaacctgaatcctaagagataagagttgtcttcagttcttatctgtgactaatattatggggttagtttttgtagtagatcttcactaattcaatatccggcaatatgctttaagcttccttcaaggtttattagtaactagattatttcagaaacattcttgtgctccaccattcattatggacttgttttgctcacaatgcgctttttcttgcatgacttgtcagtcgaagtggattttaagtagaaagtttgcacggaagtgtctaatcttagacacttaaaaggaaagaaagacctccaaccttggaggtgctattacatccatgagattctctcgaattctttctctgaatctttgagttaatatagagcgtctcgtatttatgaatcaatagtctgtgagtggaggaacatgacatatcataactttgataaagaacatgctggttgtaatccgcacctgttaaggtctttattgttatctccatgagcggcaaagccacattatagaggagaggcaatcttttttttttttttttggaaaaagttattttaggtaagctttaaaaaatatccctttataaaaagacagttgccccacttacacttgataaaccttagcatctaccctttgatttaatcaagcttctattagtttgccccccctaagatttataaacctggctatgccactgatctccatcatgatatttgtgagtctgagagacatgagttcaacatagttcagcatagctatttgataagcaacaatatggaatttttaaaaaaaaatttatgcatggtcaaagcaagcattttattggagtttcctattatgtcaactgcgcaattgagaatgaagtcaggttgatgcttccaaagcgcatttccattcattattcggttctactccctttcagtatgtagtcaactagttatcgtcaataaatacactaaatagaatgattaggacatgtttagaagatgcatgtgcaaatatgccaaatccattaggacatgttttgatgtatattacttttggaaagagatgactttagatttttgaaggctaaaggatgggtgtttgccggtaaataataagcataatttgtaggcttaacagctaaagaactcctcagctaggtaaatgatatatttgtttaccttcttattcaatcacttatgacattcacgtgcagataattgaatcttgttctcatatacatacacaacattctaattatatcattgtggtttgcttctagttttaaattcttgctacttcatgttcttaaaagtggcagtaaatattcagatattcggtgactcaaaaaaggaaagataaaagttcaaaagaaaaaataaaagaaaaggttcatgtgccatgatgtccaaatatttaactttatagcaaggtttgttcttggttttgatggtagtttttctggccttaataatcttcaggttaaccagg

SEQ ID NO: 6382 - DNA, 1669 bp, Ricinus communis
  Intron number 1 from transcript 30150.m000481 (locus 30150 .t000014) derived from phytozome v7.0 (chr-ID 30150; pos 2 14105 to 215773)
acttacaggttattttgtctaatgtaaattgcaatatcttcttgttttgtgctaccttcattttgttaaataaaaaatgccaattagttggttctgaagtttaattttacggacctttttaaactaatattggctttctttctcctatttggtcaatgcatgagtgccgcgtcgctgatttattttgtctggtagattgtgaaattagctccattaataaatgtatttatttgcagatataattgcttgtatattcctgttcaagtggaaagagggaatgagaggttgctaactttcttgctgggtgatgtaataatcatgtcaacaaagtgttctttatcaacccatctcagcttagctggttgggaagatgagaaattgggttaagatcatgtgtttggatttcatttttgtgctctctcccataccaaaagtgtcctgtagtatgaaaagaaatggaacagaaatagattttctgtaatccagttgaacatgaaatttaggtcgttagtgctatttgtactatccacatatcaatcaattagatagaagattaggccatgcaacagtgcaatcttatataatgattttcacattctattcttggaggggggttgctacaaagatgaaagttctttaagttggacgacttataaaatttttataaaagagagtaatgccaacttgtccagactggatcacagtggaaaaatataggaagagtttgcttaagtgtattgaggatttcatgacagcatatacttgctcagaataacctatattttactgatttgagtatggtattagtgaactctgtgtaaatgacaacaaacatctttcttttgttttagagtaaacaaaggggctgcaacacttattgcagactccatattgaaattctggcatctgtctttcttcaaaactttaacaattataaggacatatcttagaaaagtcctcatgcgtatggaactaaagagaaattttgatcatttaaaagcaaacaacattgtgtactagataaagttgaagctcccttgcgatgagtagaagattctaatctatataacatatgttatgaggttagactgttagatataatgctaacatttgataatttgcccaagtcaagttgtatctagcagcagttcaagtcatcttctcccctttttcttttgactattttaagttatgtccataggttttataatgggttatcttttatgtaacgttgaaggtttggttgtgattttaattctcatttcatcaaaatttctttcattgaattaatcttatgcttatttttgatgttcacagaatatgcattcttgtttctctgattatgtaataaaagtggctagtttgctgctattctgagaattttctggaaatacattaattctatgatctgaaaacaataaataagataatgaatattcattgcgagaagataattgaatatttagtgtgaggaatttttctttttagatagtgaagattatgttgtttgtagataaaacaatattacagttgtataattttccttacaattctccatattcaatcttgttgtataccagttgctagagttgagttgacaatctttttatcattttttagctctgctttgtcttatttatctatttctcttaatgttgcgattcagggt

SEQ ID NO: 6383 - DNA, 275 bp, Ricinus communis
  Intron number 1 from transcript 30190.m011051 (locus 30190 .t000287) derived from phytozome v7.0 (chr-ID 30190; pos 1 507356 to 1507630)
ggactccaaagttatcaggtaatttaaagcttttctacctctcttttttttttttttcttttcatctctttgatttaggaacatgttaattgttggaagtggttgtctcatgtgtcctagaactaaggtggattaaatgtcattgagaaatccaagggtatataataaacagaaactgaagattgaaaaccacgattaactattaactcctttgaaaaagtctaaccgatgattctttgtagttcattcttattgatcattcttaatttggcagg

SEQ ID NO: 6384 - DNA, 4118 bp, Ricinus communis
  Intron number 7 from transcript 30193.m000720 (locus 30193 .t000021) derived from phytozome v7.0 (chr-ID 30193; pos 5 23293 to 527410 reverse strand)
agcttgaagcattgcaaggcagttttatatctcaggtaacctttctccttcctttaaaatagtaatagttttcatatatttttgtagattaaccgagtttcaagattttatttcaaataatagtttccttatccagtatgttagttttttaatatattagattttatttttcaattattattcggttatccagcctccacaacttccgttaagaaaaatttaatttcttcaacttaaaatgatatggctcagtctttttttttaatcattggtctaatttgttagtaataatatattaaatataaacagatgctaaaatcaaaactcaaagataaataataattaccaagattataaggacaatagtatacaaatatatgaacaacaaagtaataatatcggacacagatgtaagaaaaataggacgccaataatctgagaatttctgaattcaaagagagacattaaagcataaattttggcacaccagcataacgagatgaagacactaatgaagagaaattaggacattagaaatccgaggcttgtgtatcacacaatctccttaaaatagattcgcccctcaccgttggtgtttgaggatgatatgacctctgtttcctaggatacaacagatcaacacagttgatgaacaccacaacaattgtaccaacgaacttgaagtatatttaagctttatcacacttgaaagtaaagaagagaagatacgaggatcttttttcactttttgaatgaaagaaatatggatgatatatatacgaaatgcttaatgtagggaaataacatttgacatatcttgagacctttgatatatcatgattaattataattaatctatgacctttggcattaccatgattaattcataattaatttatgacctttggcaatttcatgatcaattcatcattaatctatgacctttgatatatgatatcacctttggtatttcatatgacttttccatgtcaatattcaataggtatcaatttatcatttacccataattcattttgaatgggccttcttcaaaataagtcatcatatatgtcacagaaattgtcaattttccaacaatcccccacatgaatgaaaattgataaaagaaacacaatttttttataaaaacctggtaatatagctcaatagtcaagcataggataggtagggttagcctttgaaccttcccttataaaattgtatttactttactagctaaatagtagacttggtgtccttgaactattctgtcatttatgtaatgatgatacatttcacacacgagtttttcctaacacacttcagttctcattgttatgttcgttttggccatgaacatctccttggttctgtgagagtttctaagggattgaaccctagacaactctcctttgaagcggcccacttctcccttacataggtgatttcttatgacatcctccataagaatcactaaaagaagatccttatttcacgtcattatcattgtattcatcataggaataggcagaggaattacccccacaatgatctaagcatgtttgtacaacttagttttccctttgaacttagatcttgggatctctagtcaactaggttgggtttccattgcaatgacatcttcttgcatgggctttagtcctattccgttcgatgatttatcaactaactctctgttcaaccctttagttagcggatccgcgatattatcctttgacttggcggcataataagatgccacatcatccatataaaaacaatatatttgttgaagtccgtggcgggtttgaacttggtacctcataatcttaaagagggttttattcaccaagctactgtgatttttatgagctactttttcaaattactattaatataactcttcagaatcattattagtataagagttgggttaattagctccatattgtctcttttttgtaatgagctcagcgttatcttattccaagatgaaattattatatttacttattttttaaactagatttaatacataaaattattagtttgaaatatgtagaattattctctaaaaagacaagacttaaagttataataaatatttatcaatattatttatgttattaaagtttttcattaatttaatatttatttattttattacttattaatttaatataatctatataattgagcatattttaattcaattgtattttcagtagacaattatgagatttatataatatttaatttgaaaacatttgtaatttggaataactctaaaagccttaaaaatctaccaatttttccttatttttagtcttccaaagttaagagcctattcaatgtggattatacctaagggaataaattatttgactaaagtaaaataaattgttttaaggttttttaatttgcttagaaataaggctatctattctgggtttattattgagtttaatcactttgctaattgcttatcaaaatcacagtagcagcaaccattgcgctcctattcaatatgataacattgcagcacttccaataccagtatacttcagatactgttatttaagaacctggatatgagcatcatagcgtacttaagttgcactaaaattttttgtgtggagttaaaagtatggttggtagctactcgctggttttgcctcatttcctgtagtatattcctgcaaacctctagcttgaatgaacaataaataagatcttgaccaaacaaggtaattggttcaaagagatggaaaaagttatgcccatatgatatgatatcgtatcataaagatggtgatctctcctatggttatactttcttttagagagggggtctaggaggagttagtatgccttagttctatttttggacgtgatattgtgtcataaagatggttgtctctccctaggttatactttcttgtagagagggggtctaggacaagttaatatgccttggttctatttttgcagatccacttattattataacgttgtttaaattggaagaagtctagggttttgataattatttcctccatagtgagtaattgcaaagtgcaatctaaaattacttatgtagcttccttttggattggaggagaaacatctccctttgactgtaaatgttcctcccttgcccccatttactagtaggatatagccacatatgatatattgtgattataacattttgcaagaagtataaaaataaatattggctgcttgatttttcactttgggtgttgtgatttagtcaataaataacttaaatcaattaagccttaatgccaaactagttatataatgcagtcaatacccaatagagaaagttgcatattattttctagaataattatgctggaagtaatgtgatacagaaccacaaaggtcaaacaaacacaaatgaaaggtacaaagctaaaggaaaacattgaagattcgttgaaggttcatacttttcttaaattaatgaattacaacttgagaaaatagctaccttagatgaggtatcaaagtttgtagagggaatggtctccttttcattatgacattaaaggagcatgctagtgtagaatttgtgagagctagcgaacgttcatgtattgttgttagtcttccatgcttttttttttctgcaactattattaaacatagatgttattttcttgacttgatctatgtcatgttcacaaaggagtaatgctactgatggctcaaggctctccttgtttccattatgacattcttttccactttttccaataatttacatatatatgctgatgtagtgattctgactgtaaggagatgtgagttatactcattcctgttaggattattgtgcttgggttttgaatacctcactgtacaaaaattggaagttgagcatctactcagaaaagaaaagcggaatacacacacacatatatatatatatatgtagtgcttggttttccattacctcatatgttaaacaattgaagttgagaatataatatggtggatctaattgtctgtttttctagattctatcatttcaagttgtttttttttattttattttatttttctagatatcaggcggttggagacacact

SEQ ID NO: 6385 - DNA, 1922 bp, Ricinus communis
  Intron number 7 from transcript 29700.m000762 (locus 29700 .t000018) derived from phytozome v7.0 (chr-ID 29700; pos 4 25323 to 427244 reverse strand)
gcaggtatctgtgattcctgaaggccaaatgcctaaggatgtgcaaatgctggcaaatcacatgtctaatgtttgtgcgtctgcgtattctgcgtcttcagatctcttattcaccttattgctagtgaatgaaatacttaaaatgacatgcacaattaatattaatttcataaagaaataaaatttgtggaaacatgcacatgtacataatcagtgatgagtattccttacaaaattaagattatgcattcttttccattaaatctagtttgcagtttccattgcttaacttttagcttagtgatgagtactagaagttgatttgctataggacatggatttagatattatgtaaattaatctattgggagccttttacctttacccttcttatttaagagaagcaaagaaatagattgtttggctaactacagttgcagttattgcccaaagacccttaaaccttgtactacctacaaattctaaaggtctatcagttaaaaaaaaaataataattgcgagttttgataatttaatccaattttttgaattgtggcaattttagccatttttccaaattatttacaattttatataacacaaaaaggtttgaatagaaaactttttgttccttgctagaacagataaagtttagctttctcacttcccctccttccctcctcttttcctttttctctcttcccttctcttttctcctctcttcttcttttaaagtttatcaactttttttttcaaaaaaatattctgataagtaataaaaaaaatctttttcaatttcatcatgctggctataccgaaactaattcactaaaattggtaaagttaaaagcactagaattgtcaaaactcacaatggtttgactcttagcgcccaattagcaattctgaagttatttaattcataatttttgtccttgttatactttacgcttaaaatactcaaatatttatctactcacatgacttaattctaactgaaaagctaactctaggcttagatagcacattcaaatgttttattttatacttatattctatattcttatattctgtactttaagaattattcaattattttcatttattttaaaattttagtggtgacatgtagaagttagattggtttagtcattttcctttgtgcatgtctattaaaggtgcatataaagtatgaagatgattctaatatttaatatttgtgctattattagtagttcaagttatcaaattacagccaacttcagatttgtacaattattgcaatttggtaatactacaagaaaaaaaaaagattgcagtgagatagccatagatgtttagttataaattaaaatccatggcaacaaattaaaatccatggcaacaccttctctgttacatgctattataagtgcaattgcggccattatcgtgattttaaacagttctgtaggatcaaatgcaggtgattttaatgtactatgtttaaaatactaataaatcaatcttctttttcttttttttccttttctctttttgtgcttcatagcttttagggtgcttgtgcatgattaataagaaatgacatcaatcaaaaagaatttagatgggttaacagagacatggattgagatgtaagaaccagcaaaggcagatttcctattcaattttatgaagtaaaatagtttctcattcagatgtattagcaattttaagacaatgcatgtattttttttgtatattcaagattttgcttgaaatatataaattcttttaggatgatgaattgagtcacattttgcacatgtattatgctagagttggatgttttggatcgtgtgttataatgatacacagttattggacccttaacaaatcatacctgctcaagattaattttgaggttcttcaaatgtgtagga

SEQ ID NO: 6386 - DNA, 10702 bp, Ricinus communis
  Intron number 4 from transcript 29724.m000853 (locus 29724 .t000033) derived from phytozome v7.0 (chr-ID 29724; pos 4 54403 to 465104 reverse strand)
gaggcaaaggagaagaggtgatcacttcatattgtttgcttggactttttcaactaacttatgaataagatcaaggtatctgtactattttcttgaaagcactgagtagtcataagtcctgttgaaactgttagcttgctatttataacctacgttggagttagatgaacagatgagatgtttctggatgtgttatggcacaatgatgtttcaggatagatcagcgtgattgctgtttggagtagtttaaattaaacaattgtgtctcttggaaattcattaattgtttttagacttcagaagtagttattttatcatagtaatatttaccacaataaaatatgtatattagcttatgtgttgtagtagcaagagtattacggttgtgatagtagagtttgtgatatataagtgattataatatgttgctgataaatagtggaccggtatggaatatgcaatatgttgcaccaccataaacattttgtttttgttattttactttgtggtttttgcacgagacatggaattctagatatttgagatgcaaatgtagtatgagtgaatttgaagttggagcactatgaagttaagagatgaattagttttttgaatattaatagtatctaatttaatttattcgattctcattaaccattagtgttaaagactggtaaaagtttgaggtggaaaggttaacaatacaactagcttgacttttggacttgaggtaaaatatatcgtgtggaatgagacctgttttgaagctctgcggaagaagctagagaacaactatatattgcactctcttgcagaccaattacatatgaagaaaaattgtactggtcgagaatggaggaaaattcacacatcagattattcttgcatgcaaaaggttggaagattagtctattagtactaatgttaaaatcagtaggagcaactcgtattactgtttaccttccatctttacataaaagtttggtagcgaaattgtttgttaggaaatagacttttaaagttgaaggagattaacatttttattggtatatatctgttataaattttagttttggtagtacattaaatggagttatttagtctggagaagactatttcaaatctttcaccaaccgtagactctatactatcataaaattggacatactaattatcaatgtcataggatggagactgatttagaagaatattgggaagcaacaaatgatttaaggattaatttaaaaaattttaatggattctagaatttcttttctattttcttgtgttttcagttagagattggcttaatttatgtggagtatgtgatgaaggatcaatgcataaaccaatgattttaaataggattctattaggatgttaatgtagaaactagatgcatggtggtaacaacggtgatgtgaggcatctgccacaacttgggaaaacattaattttgcaaacagagattggataatgtggtatgggtactttcaataaggaaggtttatgaagcttagtaggagtgcatagcaataatgaagagagaagattgcaagactatttatgtaagtacaagtaaagaaagaatatctattgatgctcgcaatgaagataaggtatacacgagtatgtggttgaataaaagaaggtgccctttgaagagaagggaaacatttgttgtgtatcctgatgatgaggtatcaaatcaaagttaagtacaagtaaaaaaagaatatgtgtggatgcttgcaatgaagataagctgtacacgagtatgtggtttaattaaaggtggcgtttgaagagaagggaaaaatttgttgtgtatcctgacgatgaggtttctaatctgatttgatttagcatgatactcaatatccttgttaaactttggtatacagaacttttaccatggaagttgcctgaaacaatatattttttcctaaatcagatgttaatgtccttttgttgaaaaaaaaaattaatgtcctgccttgtagcctgaaacatttgttagcaaaatagttggaagtgagataacattagttaagaccatgaaatgttacagaaataggttttaggccaaacaatttcatgatacacattgtatccaatttacgtctatgtgcttggataaacaggcttgtacaaaaagtgtaaaggtagttttgtcattttgcatatttccaacttgcaaattccacagttgtgttttatgtattgatgggatgtctataaattatgtttataacaaattttaggaatttttttaatttatcaatttaattagtaatataattaaaagtagcaaccggaagaattcttgttaatttcctattaaagtgaaaacttgttttaaccctctctgtttccacaccctatcccaccacacctcacacctctccctcccctgcatcaatctaatcattaaagagcttaaataggcatgatttcccatttaaaagatttttttagccttagtacttattataattatgtagctgatatttaaagtcatatcaactaaccttgatgtccctagaaagcaagtacttgcaagtatgctttaggtatgatgttatctcattgatgtattaaaagggcttccgatgaatgttagataactcctagagggaaggtgttacggtcctgcatttgggatcgagttatgggtttatgattcaccagaggatcgaaagcgggtgaagattatttgctggagtgtctacctttatggcctatattgagttacagttaagggcttgctagagagaaccctataatctctgaactttaggagtccacaaccttgaagaaatttctgctcctttattccataagaaaataacatttaaatagtacaagagacggtaggctagccctcaagccttgaaccctactggccataattaaagaaagataaataaggaagattcttagaatcagctataataattgaatagatccaccagccaaagataaggaaagatagtttaggaaatttcccttctcttcccttgtgagaatctcttgtaaaccaagattggtttttgggatataggggctgtatttccagttataacagaaggtgtgaccaaacctcggggatacaaaaacatgtaaaataatcaatatttttcaagtgaataaatgaaaggatttgataattagaagaggttgtcatgcgtgcgctaagaaggcacctgagatgtataatttataaccagaaataataaagaaaacacattgatgtatagtggctgtccgtgctttaataagcttatgaaaatctgttttggaagcatgtgaatctctatatcttcgtcatcattctttggatcagtgtagactggtctggggatgttgctttggtaatcaacattctggagtgtttttggaatatcagatgttgaaaatctgggttgagtttgagatggaattggttctttgtaaggagcatagataacagaaggaattttggatacccttccaatatctatggtcgaggttgaagaaccatcatcagaaaatctagaggaagttgactttctgttgaatgtgatctttaccattttcctcatcagaatcagaatcactattctgtttgaggatcaggctttgaagcaaaacagaatcattttgttgtttttctttcaactctttgagttctgttttgatggttttaatctccttctggagttcctgaacagtaggaagagatagtattcaggaaaaatactatcaattttgcattcagaacaaagcccaaatcaaattttttgattggtttcaaatttactgcaaagaaaatggtatcctttatccctttaaggataagtccattagtcctgtcacattacaggtaaggttgctaaggagcttggcatttttgtctttgagcagagaagggtctcctatgaaatgaagggtagtaagacccgacggacagggcagtaaagctgagagctgtggtccaggcttgtctagaaagttattttggtttaggttaaaatgaatttagaaccttttttctgtagatcttcttctttctctgagttttgatttgaagaacgatgctctttaaaacatttttatcgtttaaagaaatcgtgatatttggaaaacaattgaaagaaataggtcctttatagaggctcgactcaacagtacctaacagggaatcaccccaatcagacgggtgaaggattctttggattgtgcatgttgaatatgcagggtctttcaatttgaaattcttcctcactgtttgagaactctgattcagatgaatcaactagaagagcagaaatcttttgcaaaacttcttcttctatttgaagctcaagaagtcttttggaaaacttacaatacttcgaagtatggcctttcttaccgttacaaaacggcatttacagtcccattcggtcaatatgagtggaatgtcatgccttttagattaaaaaatgccccttctgaatttcagaaaatcatgaatgacatttttaatccattttcaaagttctgcattttaaaagaaattttaaaaactgaatctctggttccttcttctagtaagaatatttcagaaaatcatgaatgacatttttaatccattttcaaagttctgcattgtctacatagatgatgttttaatcttttcaaattccattgaacagcattttaaacacctagaataaagatttgtcatgaccttaagcttcaaagacagctcaaatgggagatgaaaaagactagacaggaactaggtagtttctgtaaccagtttgagtacaacccaatagagcccgtgtctagttgcaaagggaaatgcaaagttgattcatgaagatttctattcaaagaaaaaccatcttaagaaactttggttttttaagaattttttaaaagaaaaagatagtattcaggaaaaatactatcaattttgcattcaaaacaaagcccaaatcaaattttttgattggtttcaaaaaacccagtttttaagccttatcagcttacaaagccgagccaagaccatttccaaaagcaaactgagtttgccaaagcagtcagagaacagctgagtagattagcaacctctgagtcgtccaaaaatctagtgccagatactccccaaagtatctaacatatactcaagtccatgatcatccttggtcagcaagttggccatcaatatggacaacaagctgatttagatggacttggatcaataaactttctgggccaaattcaaggcagcattaatattttggctgagtattaatgttgatctccaacaaaatacttattagtactgttatgcaagtaagtggttgccaaggatggtaatcctattctaaataggtttcctagattagaagagcttataattagaaagtttttataagagtcaattataaaggtttcgtagattagaagaacttataattaggaagttttcataagactaaattatagctctcctagttctatgtaattttccaacttctattaataaactaatcctatttaaggacgtaagaaataaaaagaagacaagcagaattttaccaaacttaagagatgaacaactctctctttcaacgagttctaaggtttcaagctgccttgtaacgagcctgagtgattcaaacaaaataggtcgaacaaggaataagaacaaaggaaaagccttgcaggattttccgatcaatcgccccgtgatatgatccttatctcacagtcataacaatttgatttcagagccaaacatgatgagtggttttagtcagaataatgacgttcagtccctcctccaacaagaacgagcagcgaatgaggctaggattacggaggtggagacatggctggccatccaactacaacagttatctcttcaattacaagaaatgtttgctgcgttatcccataacactcgaagagattctgctagaactgctagcagcagcaatatacttaggcaaccacaaacccaacaagctccttaactgcctagggaaggagcaccaccaagtggggtggttcccggatatactgaactggattttcaaacttttaatggctcagagactcactgatttggctgcacactgaaagttcttctccaatcaacacacaattgaggcggatcaggtgggattggcagcgttccatattgttgtagtatatagagataagagaaagattgtgtattgatcaacaaaacatacagatatttatacaaaattgcaaggtataaactaggaaacactataatctaatccctaaaaatcagttctataatcaagctctaattatttctaacctaatcaacattacaactgtaacactccctctcaagctggagcatagatattgatcatgcctagcttgttataaagatattctatccgagtcccattaagagcctttgtgaagatatctccaagtggttctctagttctcacataacctgtagaaatcaaacctaactgaatcttttcacgaacgaaatgacaatcaatttcaatatgtttagtttgttcatgaaaaatgggatccgaagcaatatgaagggcaactagattatcacaccacaatttgactgaaactaaagttttgagtcctatttcagtaacgagttgatatatccacataatttcatatgcaaacttcgccatagcacgatattctaattctgcacttgaacgagaaacaacattttgtttcttgcttttccataaaactaggttagcacccacaaaaacgcaaaagccagtgatagaccttcgatcttctttagatcctgcccaatcaacatttgaaaaatactcaatcctgatgctaccatgtttgccttacaatatacctcgccctggtgcacctttcaaataacacaaaatttgtttcattgctctccaatgatcaaccgcgggagaagacatataatgacttaccatactaactgaatatagtgctcttctaaatgggtcattgattctagtgccacagatcatatgacagataattttaaactattctccttctttcaatcaaataatttcagttgccctgtcactttagctgacggatccacatcacttgttcttggttctagcacagttattcccagactgtactttctttgcacattgttttaagtctatctgatctgttgttcaacttaatttttgttagtgaactcactcgaagccttaactgttgtgtttcattttttctgattagtcttttttaagatcttttgacgaagaggattattggtaaagggcatgaatctggaggtctttacatccttgacagtactattccaaaccagtagtttgttatggagctgttactccttttaaggtacattattagttgggccatccttctctacctctgttaaagaaactctcttagaattttctagcttaccttctttggattgtgagtcttgtcagtttgctaaacatcatcgttttagtctcagtcctagagttaataaacggcttcctttgagttagtacattcagaaatttagggtccttgtcctgttgtatcaaaaaccagattcagatactttgttatctttattgatgattattctcgaatgacatggttatttctgatcaaaaatcgttttgaattgttttttcatttttctgctttttgtgctgaagttaatacttaatttaacctgtctgttcaaatcttgaggagtgacaacacaaaggaatatctctctgaatcttgccaaaaatatatgctgcaaaataggatacttcatcaaacttcttgtgttgacacaccatctcaaaatggggtggctgaaagaaagaatagacacattcttgaaactgctagagccctactattccaaatgaaagtccctaaaaccttttgggtagatgcggtatccacaacatatttcttaattaaccgcatgcctttcactatcctttcttgtgagattcctttctgcatgcttttttccagtaaatcattatttgcagttgagtctagaatttttggttgtccatgttttgtccgtgatgtacgtcctcagattaccaaactcaacccaaaatcctcaaaatgtatcttccttggttattctcgtgtttaaaaaggatttaggtgtttttgcccgagtcttaacaggtacttggtgccagctgatgtcactttccaagaagaaacaccatttcttcaaacctttgagtctatttttcacaagaggatgatttgcttatctatacggttacatcttatgatcctcctcgaatctgtcctcctatcacacaggttacactcaccgtgttccacatcctgagtcctctcttgtttctctagatttatgtccaccactggcatctttgtcatcggatcccatctccaatcctagtctcattcatgatcttgatcttcatattgctcttcgcaaaggtacttatcctatttctttttgtgtgtcttataattacttaccatcatcattctgtttttttattgcttcacttgattttgttttcatccctaagattggtcaaaaggctttaatccatcctggttggcatactgctatggtggaagagttgattgctttagatactaatggtacttggaacttggtagacccacctacaagtaaaaaggttattggttgtaagtgggttttcatggtgaaagttaatcttaaggggtctgttgctcagctgaaagcccgtcttgttgctaagggttatatgtctagacatatggtgtagattattttgatatcgtttctcctgttgccaaacttacttctattagactatttagttctatggcaactattcatgattgaccctttcactagttgcatattaagaatgcattcctacatggtgacctttaaaaggaagtttacatggagcagccacctgggtttattgctcgggagaagtttaggaaggtatgtcggcttcataaatccttgtatagcctgaaacaaagtccccgggcttggtttgagagattcaatcaagcagttgagagctttggtacgttgaaatgtaagtttgatcattctgtcttttataaacagtctgttaagggcatcatattattggtggtttatgtagatgaccttgtcattactagaagtgatgttacaggaatttcttctcttaagtctttccttcatactcagtttcacaccaaaaatttgggtttattaaaatacctcttaggtattgaggtggcaagtcagaaaggaatcctgctatgccagaggaagtatgtactagatctattatctgaaatagaaaaattggggctaagccatgcaacactcgaatggctcctaaaatacaactttcaaaagtgggcaagttgtttgaagatctagagtgatatagacgagcagttggaaaattaaattatcttatcttgactcatcttgatatcgcatattcagttagtgtggtaaatcaatatacctcttctctcatagttgatcactggagagcagtggaacaaattttgtgctatttgaagggtgcaccagtgcgaggcatattatatggcaaacatagccataccaagattgagtgtttttcagatgctgattgagtaggacctaaagaagattgaaggtctaccactggcttttatgtttttgtgggtggtaactagtttcatgaaaaagcaagaagcagaatgttgtttctcgttcaggtacgaatcagaatatcgttctatggcgaaatttgcctgtgaaattatgtggatatatcaactcatgacggaagtagaactcaaaacttcagttttagtcaaattgtagtgtgataatcaagctgcccttcatcttgctttaaattatgtttttcataaacgaactaaacgtattgaaattgattgtcatttcttttgtaaaaagattcaattagatttgatctctacagtttatgtgagaaatggagaacaacttagagatatcttcacgaaggtttttaatgggattcgggtagaatatctttgtaacaagctggcatgatcaatatctacgctccagcttgagggggagtattacagttgtaatgttgattaggaaagaaataattagagcttgattataggggctgatttgtaaagattatagagcttgattataaggctgatttgtagggattaaattacagtatttcctagtttatatcttgtaattttgtataaatacctgtacattttattaatcaacacatacaaaatccttctcttagctctgaatactacaacatccaaaatcaaatgattgatgtagtatattactaatgctataggtcatcttatactgcaacatcaaatgttcctttcctttattcaacaaggaagttaaaactttcatgcaatcccaagttaggaacctcatgggcagcccctagaacacatttttctaattaaaacttcatgtaaaaattgaacccaagattacacaaatgccatgtgcacctttcatctttccccacctgtgatattttattgccaatgtgctttctgtgtgaaaatggagtgtgatgaaatggaagtttgatccaattaagtttcctacaatgctgataatttgttcagttggcgtatatgtaaagaagaaattataactgttacttgctggattttcttttggattgtgcagtaattgctcctgcgtttc

SEQ ID NO: 6387 - DNA, 1110 bp, Ricinus communis
  Intron number 3 from transcript 29680.m001734 (locus 29680 .t000077) derived from phytozome v7.0 (chr-ID 29680; pos 4 95663 to 496772 reverse strand)
gacacgaggtatattatcatttcctcccttctatacgcgttttgtgtatatttcttttcttcttttaccatttatttgaggtgcctcattattaatatcaaaaatcaaattagccccaatattaccaagtcaaaaatagaaacttattttaggaattatccaccactatatatcaaaatgtaaatatttattattcaaaaattaaaatatatattaatcattgactatatatataatattatcatatatttatatataatatttagataaacaattcttaagtcaaaaatagaaacttattttaggaattatccaccactatatatcaaaatgtaaatatttattattcaaaaattaaaatatatattaatcattgactatatatataatattatcatatatttatatataatatttagataaacaattcttaaagaaacaagtaatattatattaaaaaaattaaaaaataataaaatagaaataatggatttttattttttttatggtatgcatacattgacaaattaatatgaaatttatttaaaaattctaattattatgttagaatctagttcagatatctacacaaattaaaatagtaaatttttaaatcaatttttattttatttaaaatatataaattttgactttataaataaaatttataatttttatagatttcaattatacaagtacctttaaattctatgaattttaatttcctaatatatataagcacgttagagaagaaatcatgtattgaataggagaaaaacaaacattatattgactacataaataaatggccaatactaaaaaacaagaaataaaaaaaattaattaattttgataccgccaagatcttaaattccatattaatttcaatcatgttcctatacaaccgaatttgtatccatcttattaattgattgcatttatataattttgattagattgagcccacaaagttaatatattttggaattcgtgttacatttaatttattaaacctttgacctctcatttttctcatttatttccttggaaagaaaaaattgttgttttgaggtgattttcttcttatgatgtgtgtgcatttattgtagc

SEQ ID NO: 6388 - DNA, 1674 bp, Ricinus communis
  Intron number 1 from transcript 29864.m001445 (locus 29864 .t000021) derived from phytozome v7.0 (chr-ID 29864; pos 2 89914 to 291587)
cctaataggacctcgaaacgcgccaaaaccaccaggtcagttcaaaaattcaatctttactattgaactccatattagctgtatgtgtgatagcaatataattgataaagattaggaatttcaagtttatatgtttgtgattggactttagggagctagaattttcaatttttgtagttaatttgagctccatttatagggtttctatatgtttggattgagtaaagtttgttatcaatccccatattggtattcaaacttgtggttttttctttttgtttagtgtgattcaatgtaaagttagttattatctgttttgtaaattagacttgaataaagtacacatttttagattgattatagtactgttcttttttagattctagataccaatgtgattatggacttgtaaaaagcttatgtgaagatgacctcgacaaacctacaaaagaaatggaatgtcaaatgcattaatctgcaatgcgactgaagtttttggtttttttttttttttggataattactatctactcccagatttttactctaatacacgagttaccaaaactaaccactatccccctacatccaaagtcaatgtagtcaaaggactaaattgattaataaaattattatctgatccttaaacttttactaagtataaaactcatctaaagattttttttttaatcaagttagagtgaaattattaatcttagtgggggattaatagttagttttgcaacaagttaattttagtatctaacaaaaatgattagttatcatttttttacttactctaatttttagcacaatttaattctaaagatttaaatatcttaaaaatacttaaatttgtagtagcattattaaattactacatattttaggcttaaattattgaaataaaatacaaatttatagtttgaaatattacttttgttattattttgttggacactagaattaaactatgttaaaaattaaaaaaactctactctaatttgataaagaaaaattaattttgaactagtctaatccttgatagaaagttcaaggatcatactgtaatatttttttatcagtttggtcctttgaatgcattgactttggactgaagggagtaatagttggttttaaaaaaacataagggggatttaatataataaaaatgacgcgagggcaatcaatgtattagaccaaaaatcaagggttaaatactaactaccctttttttcttaactactcttctttactagtccaaatccttatttacaatttgaaataaaagtctcaaactgacaatttctttccaacacttcctttgaaattttggcatgggaaacctttttaagcaaaacctatcgatgattaatggtttttagttgagacattaatatttttggatgcccaagtagacaaaatgtgccactaatagcaatatttcacactgtagaaattttttggtgtttttctaaaagctacaaatgccgctagatgatcaaatttttgtattgtgtattgaactgggtaaaagaaaagaaaggatctatagaactgataccaagctggtttggaattaagacttggttgagttgagtattattatgatttatgggcaattacattgaagattaatgtttttcttctttcgattccttgttagaggggagg

SEQ ID NO: 6389 - DNA, 1371 bp, Ricinus communis
  Intron number 1 from transcript 29851.m002479 (locus 29851 .t000121) derived from phytozome v7.0 (chr-ID 29851; pos 7 50508 to 751878 reverse strand)
gccgagccactggctacttggatcaaaggtgtgcgggtccagccaattgggttggcctactctgaggcttcactatcaatgcttattgactgttttagtgcctgaagcgaagaggacaccattcttcgtttcccctcttctgtttgttctttcctgtcatattctgcaaaagtagaaataagaatctgtgtaaatttggattttgtaattcctaattaagttcatagttaatgtttcttgccaatctcatagtaatagcttaaactatttatagaactcttagaacgaaaagggattctctgcacaagtttaattccttatgctcataatctctcagatcaattcacgcaaaaccttattggcaaaataaaaatccatgtaatattgtgctcgtctgcatggtactaccaaatatttttttaaaataaataaataatttatgcactatggaatgaatatttgttattaatttacacttaggagagttactaaactattaatctctcaaattatggagtaaatacattacgagcagaatcaccggacactctttttttataagaatgaagccagaagttaattagcacacttactgtgaccatggaagatcctctcaaaatagaactcggtttagtttaaaattgaatccaaataattagatagctgaaatttcaataaaatgaaattgaaaaattaaagaatacacaaatttttttatattaaattacgagtatttttatattttttagatatttaatttaaaaatgtatttacatcttcaataaattaatcaggtattataaatatattttataatttaaactttaaataatatatataatcttagaaagcttggtttgagttaacaaaactgaaacttataggattatgtaagacttaatttcttatttattttttaaatcgaaccaaaactgaattgaactaaaccaacgagttgatttcgatttttagtttttatcagatttcccagataccacatgcttgctgcggtattgagactaaagatagccttaagactgggaaaacaaaacactgttttgtcttttataactgtataatacacatagaattgttaaaaagaaaaaggaaaaacagcaacagaacactgtatcggacacatggttaattaattgcattacaaaatgtgtgtgctccaagaaagtggaaactgccccactccaatcacaaaaccagacttcaatttcttgttcatataaaacctctacacatctcaaaacattaaccattcgtcttcttcaaatatctctaaacatacttccaaaaacttttagccccactgccctcgattctttggctgctattccttagacagagattattatttcagtt

SEQ ID NO: 6390 - DNA, 1811 bp, Ricinus communis
  Intron number 4 from transcript 29827.m002620 (locus 29827 .t000093) derived from phytozome v7.0 (chr-ID 29827; pos 5 06747 to 508557 reverse strand)
tcttattttccacattgtccatctccttccctcaagtaagtcttctaaccccttatgtgaatatatgcatggctgtggtgtaaattatcaatatccaggcattttagctgcacctccttgaatgaggtttatagcaacttattgttaatgcattttgcaataaccttctttaaggatctgttcttttggtaagattttaaattcttaggaattttaagtattgagacttgtttgaatgatattctaggctttttagttcttggtactttaattttattgttctaattacttgagaatttagttagttaatttttagaattcaaatttcataataatttttaaatataatttatcttataattcttaaagtaagatcctatatatttgtttaaataggataagtcaagtttgaatgatactaaccatttaattttaagcaacggtctagatttatttgaaaattagattttatatgttggataaaaagatctcagccattcattttacattaaatggttgagatcttatacacatgatttataattttacttaaaagttagaggattataacttttatttagaaaacatttagaatttaagaattttaattctaatgggagaatattttacaatttattttcttatgtttagtttctgcggaacttaaatttttgtcttagatcttctaaagaacaataaacttctattaaattctcatgatttatacttccaactttattttcctatcaaaagagcagatactaatgaaactaccaagttgatgtagaaaaggaaaggggacaaagaattggtgctgtgaactgtgctccctttttgcatagacctgccttctataatcttctcttatcttttttcgttagagttagtggtctcattattttatgcaatataccatatctcagttttctttccagaaaaccatgataaaagcctaaccttacactcactatgacttagctgcacatgcaaacgcacaagtcctcgtccttccttttaaatggattgggattgcagggtgaactaatttaaaattagaaagttctttagaaagttgtatgtaagtaataagtgaggaagaatgacagtgagaggagaagattgggcaagtgccttatggtaggtgggggaagcatggtatcgagcctgaacacaagttgctgcttattactagagatagcgcgcgcatgcaagagtccgagacagttataattcattaaggttggttttatgtttcacttgatgagaaacaaattggaagtccatgcttcctgaaaacatatagttggcagttataccttaattatataaataatgctaggaaagtaatagttgcaacatattagtagtagccataatttatatgtaatactatgcttcagcaattacatgttgcatttttattaattacagactaaatatagttacccataaaagcagtggcagaaattaatgttagccgccaaaaattgtagcctaattctttatttccacttattaatcttttctaagttcagatggcatcggcaaggtgattctaagtattaaggaaattatttagagtaaatctcgtttgcagaaagaatttcttttacttctaaaaataatcttctagtcagggacttgtataattttctcaaactatgaatatcatgtgtcctatggaagttactaatctaaattcttgttatttttctgttttgaacatctaaggaacaagttgactggcttttcatttgtcatatatgctaaatacaggtggaagtctcgttcaaaggcaattttaactattc

SEQ ID NO: 6391 - DNA, 3341 bp, Ricinus communis
  Intron number 1 from transcript 29728.m000796 (locus 29728 .t000002) derived from phytozome v7.0 (chr-ID 29728; pos 8 776 to 12116 reverse strand)
ctttgttgtttgaaacaactacacctccacttcgggtattttgtttttcatctcttttaactcaagtttttttttttcctttttttagagatgtgggaatgattgatctaatgaaattgtatatagtgcaaatttggtggatgcaatttttgccttgtgcagaatggtgtgatataaatgtcgttgacatgcagatagcaatgtgattttctttttttgggtacctgatttaggctttaaacatagaattgattttcccaaatatatgcagtcttcttttttcattattaagctttgcatgttagtcttaaaggtgagtgcatttaggatgtcagtccattttcgttggataaattaggtgcttactcaaacttcaagtatgaatgaaatccttccaataaattttagtcaattttacatatactttcataattacgctggtcaaaatggtgagaaaatttcccactttttcattcttcaggagcaaaaactccatccatcttacttctctgaagttttgtttaatactcctgcacagggagttacggatcttttgagtgaaattgctgcaataagttgatatggttataatttatcttagatggcaattatacatgttctttttggtaggattctggccttaagaaggtcaactctggagatggtggaaagcaattgcaaacccaagggatctatattctggtcatggtaataaataaatataaggtctcataaaaatatgatgcaagacagcttgacgatcacaatttagggcttgttttgatgttgaattaaaagctagtaaaggtaggaaattttttctgaaactggggctggtgaagggggaatggctctcaagtaaaccaaaaaaggagaatatggattgtgaaatatctaagacagtaaattgaaggtaatttaggttatttctaaagctatgtatttagaaaaagagttgaagagttcttataaattgcttgcatatggtttgaagggagggatttgaaggttgaattgtataaaatacacctagagacttgaaggaaaacaacagaaactgcaaaggtaaaagtcattgggcttcatacctaaggttccttaggattacatgtagattgaattcattcgaaggagaaattgctgaaactgaaagaaacagagattcattagagaaagaaagattcaaaggttaattaagtgttaattgaagagttattaaaataagtggctatcaagagacttgaaaagaacctaccaaaaaactaatagtcgagcaaaccattttgatgcatggcatctaatgttctttcttgatgtctggtttctatggaaagacttgaaagatccccaacacttttttttttgaacccattattgtctgcatccaagtttggattgttcagtgtgagaagagaattcttttgttgactgaatgaagatcttaggatacaagtgctggtttagataattaggatttatatatttccaaattaggatagttgatttggagaataattggttagtgagtgttatttttatgacatatggtgtggcaatagttattttggtcagggagattgctactgtacgcacttggggaattttctttgaacattcacattcattttgaaagaatgagactacatgaaatgaaaccttatgatagaggaatctgattgaaatgtgtatgttcataaagattaacatggtcaggagtcatgattggtagatttgatgttcacatccatgtgaaaagaaagagaacatatgaaatgcttattgttctcttctggagcgaaaggccttgcacttggggaggagatcctgcaataatttctgagaaatggcacaagttttgacagaggtaggttatgcttatgtgcgagtatccagctgcaattactaaaaaagaaaattgctggttacaattatttgcttttcctatctggtaagatggtatgtttatgaagcaatgttgatttgtttcttttttgttcttccatcataatgaagaaaaacacatcatgaatataaaatgacaaaatctagaataaaaggctatggttagtgatggaagagaatagcttccgtgaatatagtgaatgcatatgacataatttatcaagttgtgttgatattatgaagaagatcattatacaataatttgtatagtgctttatgcacattaatgttcatacgatcttatattcatattttagtgggagaatcattgttatgactgctaggcatgactatatcatgaatggggctttaatggttattcttattatatattgagtggcaaaccatcctacttaattagtatgatcatctgatgtctccagcatagagctatttaggatgcttttagattggaatgaggcaagattataacttgtggagttttggctgtcaatggttatggtttatttatttctattatttttagcctactatcattctcattatgaatcatttgatcttgtgtttcccattcaaggtccttttggatactttagagaaatgaatcatataatataagtttctatatatcaacatttgggaacagaggaaagcaatacagcaaactggactcaactaatctgtaattccaaactagttgagtcaaatgctatggatccttttcttccattcgatctggtttagggctacatcttcagaaggacttgttaaagaaaaacagtctaaaagaaaaaacatattattttaccataccattattcgtgtgtatagcatatattttctttgtcttatttttcttggcctgacgttgggcctaggcaaaattgtgaggttgatccactgcaacctaggcatcacagtttgtttcagggaaacaggctttccgtgatgtgcaaggctgtgaagaaataatcctccctagaccctgaagtggtcggaggctcatgcattgggctgccttgctatgattatgatggatgatggatcactgtcttggaaacactatccttttctctctcacatcaattgctgttgtcaagttgtgttatttgcaatatggatgtcgttttaactttactttagatgtaaaaagcaggtataattctgcaaattgaaagaccggcggtatcttgaaattttgaaaaatatctgacatgtcacatttaagtcatgattactcttgcagttatcaattatacagaggatttgatgactctaagatgcagtgaattttttcgtcacatgcaagtcattttcctctttaatctactctgaaatgtcctattttgtacctcgatttttctttttctttttgcatacaattaagtggcaattatgtcatattttctagaggcgca

SEQ ID NO: 6392 - DNA, 2215 bp, Ricinus communis
  Intron number 2 from transcript 30131.m007298 (locus 30131 .t000449) derived from phytozome v7.0 (chr-ID 30131; pos 2 686851 to 2689065 reverse strand)
gcattgtggaaccaatatttaaggtctgttgttgcttttgctttgtctttgcactgccaaaagtttctataattgtcaatgtctttgcagttgacatctgaagtgccactaaattcatataattcttattttataatgttattcatgacactgttacttctaaactgaaaacattctagagtcaatagaacttcatacaacaaaggctagctttaggtgttcaaaacatttttgcatatgcctcattgacaaaaaaaactaactgtttatcttttcgatccaatccaactttggttgggaatatgagcatcattgcactgaattgagtctatgtaatctgctacttgaacttgatataagacagatttagataacctgttctatgttgaattttgcagaaataaagattttaaaattgaattctaggtctggttcgacaaaaattcagatctaaagagactaagaggaaagaagtgataagagaacttctaagagccagcacttaccttacaaggtttaggagtgcctaaagagaattgaaacactattctagaatagcaatttgcaggaaatcgttggttattgaatctgaaaactgaataataattgttataagcctagatacttgcaggagtactcctaaacctaaatagttttagacccctaatccttaaaggattctctaaataaacactttatcctcatccaacaaggattcagaacaagactcaacaataattaataaaattaaggacttccaaattccaaatttgttaagaaatcagaattcctgcaacaaccaaaaatcatattttttagaccttaaagtttccaatcagcctccccatcatcccaaacatgtagccaacgtataccatcaattaatggttaaattttcttaaataagtcagaatattaaacaaagaattatcttttattgatagtttattgtgcatgactatcaaataatagcaatggttaatcttaaattttaatctaatgcacttttgaagttattgaaaatactaaaaatttcattaaatttttaagggtaaggggttcactatctttgtttgattttaacttatgtactaaattgattgatctatttattagagtataaattaaactaaattcataatttaatttaagatcttagctatataggacctgtttggctaaactgttggtgatggttcatatttggtagctgatagctaatagctggtttaattaagtgtctaataaatttatcattagttgttaaatgtttactgactaacatatagtttgaaaaaaagtactatattttgttattatatttaatatgttatatatgatttggttgatgattatagatttatgcatatacatataaataaataagttttcatctataaaatatataaattaacaataataaattttttttaaataagtttaaatgtaataaaataatccttttagtttatctttttctttttttagcttaaagttatataagttactatgcatttaaaaaataaaaatattaaattaaacaaaattgtttactatgaagttattataattgattaggtataaagacatcaaatttttaaaaggataatatagtccatgacttcttatatatttatagttggtgaaaagctccaaataggaactggtatgaacttgtatcgttttgggtcctaatagccatcagcaattattaaaataaaatagccaaacacttagatgtagctgttgggacctgaaaagctttgacaaacaccacttagttgttttttgacttctactatgtaaaagcatgtaaacaacttttgggttctggatacagaaaaatgaattgctgtaagatccctttttgagctaagaaattcctaatatctaggcataattataggcagaaatagatctgcattttatagccataacggcgttatagcctgataagtctgataacggatgttatggttaaataacagccgttatcaatacaaaaataatatatccgtttagtgatggtaacaggaaggcaaatttctgttaaataacaactgttatataatgtgatggtggaacatgtttaatgaactatcttttcttgctttgcaattattggtaggatggatctcagtagtaatcttttctaacatccaaaatgtataccatgacagctagcagggtttaaattggaggtagtgaaaacatc

SEQ ID NO: 6393 - DNA, 928 bp, Ricinus communis
  Intron number 1 from transcript 30174.m009085 (locus 30174 .t000482) derived from phytozome v7.0 (chr-ID 30174; pos 2 966712 to 2967639 reverse strand)
attgctttgtaagttctattcttttttatgtaatctttgtaggtgttttagcttttgggttttgatttgttgatttttatgtaatctttgaactgaatttttatttttgaaatcttcttgttgtgattgaccgattttgctagtttatgttcctctctgggtttttgcatgtttaaagctctggactttgattacttaactttgatttacttttttcacgagggacgagaaattttggatctttgaattctgggttttagtggcttgatttaaaaaagaattataatttgttcctgatggaacttttttcgatttgaaaaactggaccctgatgtgatgtttttgtcattttctgttcttgctgttagtggtactttcaggtttggtggtagtgttactcttgtgcttgataccactgcttctgctagtcgattatgattctacaattctattgcttctttgaaataatgcagcttcgatttctgaacccatagaatgtccaactgggatctatatatagaatatccactgtccaagttcttttcatagttaaaaatctggtacagaggtcctctatagacaaaactgctgagttcttatatccatgaatagaatctcggctagtgtctcctacacattgcatggtagaggatccgacaacaaagtggcatctcagaaagccagtgcttttgtctcctatgagctcttggctcgctatgatgcttacactagtatcaccacttgttagttgttacatgtctaagtcatcagaacagcatgctttgtccgatgagaatatttgaatgatgtaggccaatggcaacgatgtactggcgcgtttgttgctgtatttgagataatcttataattttgcttgtcttctatattaatttgcaggtggccaaagacccatcagggcaagagatta

SEQ ID NO: 6394 - DNA, 2235 bp, Ricinus communis
  Intron number 6 from transcript 29678.m000496 (locus 29678 .t000004) derived from phytozome v7.0 (chr-ID 29678; pos 3 3881 to 36115 reverse strand)
ctcttggtgatcgtcggttacttgttctgaagcaggtgattttagttttccattgatgttctatactcataatcacttactgatatgagttacttaagtcttttaatttttggctcgtgatatacaactcatctgtttcacccttacttgagataaccctttttaacagttcttgcatttggatcttaatttgtgtcattatcatgaggtgtagcaatactatgaaaaagcataaaggtacttaagagaaagcttagaaagagtgataaccagttatataaaaaggggtacaaggaaaaaagaagaagcaaccttatttcaacacttatgttgcttggacttgggtgtatgtatctggtacagatacatatctaggagtaggatttgtcatgccctaaaaagatacctggacatggctaaaaagggtctggaatgtggacataaatatgtggatacgccctacatatagaaaattggaaatatttgatattttaagctaacttaaaatactgatttagcaataatatcttattcactgaagaaaaccgcaaattataatacttcatttgcattttaaaaatagtatttcaaactacaaatttggaagatcaaaactactaaaataattgacttaatgatatgaaggtatctgctacttttcaattgaagggtacacttttcaaattaaaaattttgggaaggatcccatacccatatgcagacctatacccatgtcatgttgcttgacacaggtacctcttttatcatatttcaaatcataaaataagtgatttatggagatgcctaattttgcaagagttctcctcaacttgtacatgttttctttgtgtgaacttaatcatctacatggcaatatattgttattttattttctatggactcaggtaatactaataatttctgtgaaataaaattcattaacttgttactgaaattttatcatttttatataactccttgaaagaactttaagtattagcccaagaaaataatggcacaaagcttgaacagtctaatggagggcagaacctgcaagaatggtactctttccctgtgtattgttatctgttgtctgagtctgtctagctgtgtccttggaactgccctgtcttactttttgtctagaatgtgtatttttttagatcttaaatttccatgaaaagtttttgatgcaccatttcttatggagtccttgatatggtttttggacattccaaatgccatttgagggccgggtgcttttgatgagagttctaaatattaagaatcctgaaatttctggagttatataattgaaagtatattttagagtttcatgttagtcatccaaacaattcaaatctaatgttttttaaattattagaatcccagagtgtgaaacagacttgaaatgagacaaagtgatggtagtggtggcagtctagctgtggtgaaggtataaacaaagatggtgactgaagtgatgtttaactgcatttgtgagaataatggaacaggggagtgacagtaatgctaatgtcaagccttgcagtgttaaatatgatatacagggggatgaagtggtgtttttaaaatgggaaaagggcgacagagaacgataggaccataatgatggttttgtagcagcagtggctgtagtggtggtggtggtggtggcggtgatggtgatcatagctgttgctagaaattagtgatggcggcaacaaaggtattggggatatggcagtgatggtcgtattgatatttttagctataaagtagagtgcatagaacttggatttcttaagtaacaaccttaacccagaccattactgatgtttctgttttgaatgattttgaggttcatcagaatttagaaatttcattagaattagagtgtgtgtaaccttgaggtttgcatgaaaatttgaggaatttcttatctataaccttgatatcatgaaaagaattgagtctggaagtttatgtaaatgttctttatcctgcagaacagtttatccttctagtgatcttgaaagctgatttggtaattttagtttttgtgaatacttaatacaagctgttgttgttgaaagctttttgtgtggctatatttatttcttatttgttgctaggatattagttgatcccaatactcatcgtaatggcttcacctttttgtttctgtattttttcccagcctgtaggtgttgttggagcaattacgccctggaa

SEQ ID NO: 6395 - DNA, 5360 bp, Ricinus communis
  Intron number 6 from transcript 30045.m000475 (locus 30045 .t000007) derived from phytozome v7.0 (chr-ID 30045; pos 2 03041 to 208400 reverse strand)
gaaaggtagtcctttcatgattatttaattgcatggtggaagacaaaaataacaaagttgttatcttgaaacataagaatgtcccatatctataataggtgtaagaagtttagtgtggcatactcccaacatttttctccatcttagtttgttttgtaaactccattgccataattgattatggctcccttgaaacccaacttctcttttgatacaagaagaatgcttgtagttaatggaatcagtaattgcactgaaagcaataatggggaagattgggagtggaaaaggagatataggaagagagaaagaagtaatgtaagagagagaaatttctcatggatcaaaattatacttgcaatgagactgctcttcttgttgtactactaacttccctcatataactacactatctcccatccattatgccccactttccacagaatgacatcctcttctcctttaaagaaccctcgtctcaagggtatgaatgctactgatatgaacagttactagtagattaagtatttcatgtaaagggcaacaatcatacaaacacataaggaatctaacaatatatctgcatgcttagatctggagtgaacttaaaagaaaataatattcttaaattgtattgctttctcaagttatatcaaggacaagctattgcacaatctttcaccaaagccaacaacaaataatgtagttggaaggtgtcacagactataagtagtatatgtgtaaataggaaattaatagagtacaattatagggattgactaagactgatttggaactgattattccacctttctattataggattcctacttcgtatatatacatatatatgaataaaacacaagaattgttttccttatctctgatacaaggtatcagagcatggttgcctaagaaagcaaattttaggttatctattttgcccaagttagtagtgggtatcaatggttgcttcattctttagagtgattgtttgtcatcactggcggcctaggaaggagctccataatcgatgtttctctaaattctggtgactagaaacctcatgcatgaaggcacgttagctgccgaaaaaaatcttcaatcatatatttctggttcatctggttctccatagacatctttgtgccttgatgtgtgaacattcattcgggtgtggtacttcctttggaacaggttcgggttttctgatttgttgatttccaaaaggtttgttttcttgttttttctgcatatttgccattatggatgataaaaaaatcagtagttatgtcggatgtggttcttgtgatatcagaaatcatggaacataagctcatggagtctaattatctggattggagtaaaagggtttgagtttatttgcgaaatatagaaatggacaattatatgactgaagatccacctaaagatgattcaaaacaaacatggctaggggaggatactcggttattcttgcagatacggaaattcattgaaaatgaggtaattggtttgatcaatcactatgaattttgaaagaaattgataaattcttagtatttgagtaaagaaatatctcccacatttatgagatgatcaaagcctcttatcatacatagaacttatgaagagcttaatatgttataatcatttagtcctgataaaagttcaacaaattcaaggagaaaagattgttgttatgagtttcttggctagtcttctttctgaatttgtaactgctaaatctcatattacctctagtccgaatatcttttctttacaataggcatttagtagagtactttcgacagagagttccccacctgtttaggtcagcaatgctattgtcaatcggagtaacaaatttgaacttgaagacaacaaatacaaatgtggttgtaaaggcgttgatacttgttgataggactcaggaaggattgtgtatcactattgttgtagcccatgtcatatgaagcgtgattgtaggaaattgcagaataagagtcagagaactcagtcagcccatattgcatcctttgatggtgcatttgagaagtccgttctaattctgcagatgactttgccaagttctctcagtaccaagagacattaaagtcatcatctactattactaccatcatcgagtcaagtaaactaaacacatcttgtttcttatcttctaaatgagtcattgattttggtgtcattggtcatatgataagtaattttagtctattatttgctttttagtcacatatatctacttctactattactttaacagatgggtcaagatcttgtattcttgggtatggcaaaattaccccaactccatattcctttgtcatctgtcttaagtttacctcagttgccttttaatttaatttctttaagcaaattacttgtgcacttgactattgtatcttacgatgaagaagattattggtaaaagacatgaatctgggggtctctacatccttgagacacaggtgccaacatctatagcttgttctagaatagtaaccctttttttgaagcatattatctgttgggtcgttctttttccctttgttaaaaagcctttttccttaatttcatagcctatcttcatgaaattgtgaatcttctcagtttgccaaacaccatcgtcttagttcaagtcctaaaatcaataaacgagctagtgctccttttgaattacttcattcaaatttcttaggtccttgtctcgctatgtctaaaacttgatttaaagctatgtctaaaacttgatttaaatattttgttacttttgttgacggttactctcggatggcttggttattgttgttttcttatttttgtgctatatatcccaaatcattgatatgtatttttcttcattactctcatgttaaaaaaggatatagatgttattgtcctagctagaagatatcttgtcagttgatgttgttttcctagaagacgcacctttcactccatcttccggtcatgtaactcagaagggaggatgatgacctggtgatctatactatcacatcctctatttttgcacctaccaagacttctatccttatgtctattctcggcgacaaaccccttctgatacatgtcttgtgctagttctttcggcattagatctagtcttaagtgatgatctttctattgcccttcgtgaggtagatgtacttatccagtttcttcttttgtgtctcacaatcacttgccatcctcttcttgttcttttattccaactctgtcttatcctgaatggcatagtcctatgatagagaacatgaatgctttaaatgaaaatggtacttattacttagtgaacttacatgcagggaagaagggtattggatgtaaaagggtttttgtgcttaaaagtttatcttgatggattagttgctcgattgaaaccccatcttgttgctaaactcaaactaatggagtgtattattctgacattttttcttcctgtcgctaagttagtttctatcaggttactcatttctattgcagccaatcacatgggctttgcatcaactatatatcaagaatttctttcttcatgaagatcttcaagaagtttatatggaataacctattggatttattgcttagggggggtatggaaaaatttgtcatctttgtaagtttttgtatggtctgaaatagaatcctcatgcttggtttgcagatttagttgagcagttgaaagatttggaattcaaaaaaggaaatctgatctcttttcttttataaacaatcaggagttgaaatctttttattggtagtatatgtagatgatattttcattactgggagtaatattaaaagtataccgtctcttaaatctttcctttatattatagtcagtttgacataaatttttttgcgatattgtatttcttaggtgttaaggtaataagacgtaagaaaggaattttcctatcgtaggaaaaatgtgcttgactattatcggcgatgagaaaattggtagctaaactgtgtagtattcatatggttcctaaattacaacccacacaaaagggtgaattgtttgaatatcctgagagatagaagattattcggaaaattatcttatagtaacttggtcagatattgcatatttagttaatgttttgagttaagacatgtgctctctggttggtgttttgagtcaatacatgtgctctccaacaattaatcattgaacagattttatgctatttgataatagctcctagacgtggtgtcttgtataggaattacgctcatactaagattgagtgttttttaactgctgattgggtagaatcctaggaaggtcaaagatctacttcatgatattatgtctttgttggatgaaatctagtctcatggaagagtaagcagaatgttgtctcatgtacgagtacagagtcagaatatagagcttttacacagtttgtgtgtgaaataaaatggataataagcttttgaatgaagtagggcttaaatcttcattactagcaaaattgtgatgtgataaccaagttgctcttcatattgcatccaatcccttatttcataaatgaattaagtacatttaaatgaactgccattcatttgtgagaaaatacaaggtttgattttcacagcatatgtgaaaactcgagaacacttggaaaatactttcacgaagcctctaaatgggctcaggttgattatctgtttaataagctagtcatgattaacctctattctccaacttgagggagagtattacaggttataaatagtatatatgtaaatatgaaattaattgagcatgactaggattgattaggaactaattggtctaccttctttttatagactttagaacagtgcttcattttgcattggattcttctcaaatgttcttgtcccttgcccaccacacccaatctcctatctgctatttccttaggcatcaagaataaggaaagtaattcctctacatatggaaagttgaaacaaaagataaggcccttgcacacctttgttatatccagcttcaatattgcatattccatgtatggttgttcaaggttagcttatcaagaattttgattgtcttgacaaaatttatgcagccaatgagcctaatatctaattgagtccaccagtgtagtagctgctgccactatgtgtgaaagctgcagttgactctccagaatagttccttcacttcctggctgcttgaataatgtagtcttaaacaagaagagctagtaaagttttataaatgcaaataagtgataggatatcctcttaagtggacacagtcaaagttctattaataaattcaaattctgaatctgtgcagg

SEQ ID NO: 6396 - DNA, 1171 bp, Ricinus communis
  Intron number 14 from transcript 30226.m002023 (locus 3022 6.t000047) derived from phytozome v7.0 (chr-ID 30226; pos 1407162 to 1408332 reverse strand)
cttcattacttctgccatactaaattttgctcaaggtagacaaggggattaatcttcaaggctccctgttgtactttactagttcacaacctcatgcatttagtgcacaaaatgctggcgtaatttttatttattgttttcttgaacttttattttgttatgttccatatgttctataaacatgctcttagttgttttacggttgcgatataatacaattcttaatctttaggaaaactaatcacaactgctttaatttcaaaagtttgattaatctgattttcatatgaatcacatcttgaaaacataaaaactggaagtttcattgtgatgataatcgacagatgatccatgaacacaaggattttgaagatccttttatctgacaatagtgaaacatggttaagcatttcatcagtaaacaaaagctttttttttggttgatagtttaaaattctacagaattaaattttgaggaaatgctaagctttgtttctcgatagcaagatttggaatattgaaattgaatttaatacaagttttcatcaataaactatttccagtatggataacattatttagttgtggattttaaatacctattaaaaggtgacattttaaatcaaatcattttttttgaactaattaaaatatgagctaactcttcatttaaataattcgaacaaaaattagattagatcctcaattaaaatcatggtatctaaacatgacttggaggccattattagaatttgtctggtataaagtaagattatgaaatttatgttatgtcaagtcaatcaaactagcaatgccctgcttccatgacacgaagatgtggttaagagggttttgtgtagttaggagaataaagctagtaaaaattacttggggtgctcttacactttgtggcaattctgataagccaactagactgcatcagtggcaaatctcttggtttcttggatttgtaagatatccttttaatatcaggttttgttttggatctgcttttatatacatcagaactgaataaactactatgtgctgtaatatgcatcacatattaatcaaaataacaatttgctctgttggaaaagttgggaactgatttatgtgctattgttatttttcagctgtgattgatataattctgagttggaaggcaagg

SEQ ID NO: 6397 - DNA, 1828 bp, Ricinus communis
  Intron number 1 from transcript 27471.m000423 (locus 27471 .t000023) derived from phytozome v7.0 (chr-ID 27471; pos 1 58379 to 160206)
caggcttgatcttcctaacaagctttacattccttgtaagcctctttatataaagttatgctacttttttttattcagttgctctgtttctggatgcacagttgatttgtgctgtgttagggctgtttccttttgtatttctgatcggggttgtttttaatttattgacatgatctttgtccgattaatatctggttgagtttctaacttcattttctctttcatttttgctattttgatttgtttacattggttagatatatgtattacttctttaatatgaaactcaagaaaactttgatttgctaatacctggttcaattgttcctgttgatgtacttagccccggacaaaaacattattctttgatcgtaaagatttgagctttcatcagtttttctcctttatttctctaagctgtcccagcgtttggttttcagttgtaatgcttggtcagctatatattgagtcatcttgttagttcgtatatgtaaattgctcgtttggttctttgatcccttatgtgatgcaagtaggcttttattaaggcagagctcattaactttactataaggaagcttgtaactggactgatataaatagatgaaaatgtatatagttatagcattccgaatacaagatttgccctttgtctttttctcatattgcattcaaatgattcgtactgtacaaaatacgttatgctgtgattcatttttcttgacattttctttatatatggacttttttctttaatctaatttaaattgttactttcgatgctagagatcgtggaagccaagcttgaaaagtgggttttagtgatcagattagtcttttgtcaaacttgatacgccactaagtatcagttaccttttctttaacaaaaaaacatttcaaggtttgctgatatttcctgctccctggcatgttttggagaacttgggatggtccacaagctatattctgcccagaaagatttatccatatttctgctgtttactacatatgtggcattatataatcatatgggatatgcggcaatatgatgaaaatgagcaacttaaacattattttgtcactgctttttctttccctgtagtttagttttgtgcaagagagagtagccctgaaagcataacgtccaagtttagcactaacaaaaattatgcatacgtggagacaagccaaggcttgtaactgcacttttgagaatggcaggctcatttggactagcacagatcacatgctttctaattcctactatttattttcttaatgaataatctgaaatgctgtcctctcttcttctggaaatgtcgttacagaagggaaaactaactggttacaagtgaaattgctctagaagaagataattatatctttagaagtttcagatacagttgttatgttttctatttactgaataaaacagaactgtctccactcctcccatactgtgccaaaacatcctgttagacccaaatctctgtaccttcagatttgtttatttagatcgcatttaagtagatagtaatgtaattaaaggtcaattttgtaatcataatgttaaagcatgcccctttcttgtgttcttttaattgttgttgataatattaataccttatgaatgaattgaaattgtcataccttaaactaccctaattttagggtagtatctggcttgctttatacttaaccaatctgtaatggcataaagaaatcatgttttctatgtggttctaattctaatttaattttaagtgcaagaaaaatgatttggatattgactttgattaggcagtaaagagagagggaagggagaaag

SEQ ID NO: 6398 - DNA, 6109 bp, Ricinus communis
  Intron number 14 from transcript 29814.m000728 (locus 2981 4.t000015) derived from phytozome v7.0 (chr-ID 29814; pos 82456 to 88564 reverse strand)
caactgtatgttcatcagttcatgttatgttctagtattatcttgtgaccttcattcatatcttcattttataatttttggtcacttctcttgccatatttcttgaaatctcattttattatcattcagttgttccattgcttatgatatatgtcgatttgagaattcttctaaacactacactgtaaattctttaaaacttgttatgaatttgaagtttttcggacaaaaggaaatataattgcttctgttgtttattcctacacccattaatctctatttatagggtttcacacatctctaaaaagaaagaatctctactgcctaatttacagtaatatgcatgattggctcctacaatcaagagtcaatactaattaactcctaaaattaagccttaaaaacatgggaacaactgtcaacactcccccttaagatggtgtatgtatatcagccatacccatcttgcatacaaaagagtgaaacaatccagtacataaccccttggtaaatacatcagctaattgattttttgaatttgtgtagctgattctgagactttgatcttctaatttttctttgatgaagaatcgatcaatctcaacatgttttgtacgatcatgttgtattgggttatgagcaatactgatggctgccttattatcacaatgtaacaacacacattcagaagatgtagatcttgcattaacttcttaagccataacagttcacatactccttgcgccattgctctgtattctgcttcagcacttgacctagccactacactttgttttttgcttctccaagtgaccaaatttccacccatgaaggcacaataaccagaagtggatcttctatcattaggagagcccgcccaatcagcatcaaaatatgcttcaattcgtaaatgaccattattcacaaaaagtattcctttacctgaattagacttgagataccttaaaattcgaaagacagcatcaagatgtatagttcgggaactatgcataaattggctgactatacttaccgcataagcaatgtcaggccgtgtatgagaaagataaatcaatctcccaaccagtcgttgatatcgatcaatgtcaactaattctccgacattttctttcagcctatgattagcttcaatgggagtgtcaacatgtttacagcctagcattcctgtttcctttagcaaatcaaggacatattttctttgggagatgaatatacccttttctgatcgagcaacttctatcccaagaaaatatcgtaatttacccagatctttgatctcaaactccgtggccaagtacttcttcagcctggtcatttcttcttgattatcacctgttatcactatatcatcaacatatacaatgagaatattaatcctcccttggagatatttgatgaacatagtatgatctgcatggctttgtttgtaaccaaaagcaatgattgctttactgaacctatcaaaccaagctcgaggggactgtttcagaccatataaggctttctttaatctgcataccttcccttcagttttttgattggaaaaacctggaggaattttcatatagacttcttcttccaagttaccatgtaggaaggcatttttaacatcgaactgctgaagatcccatccaagatttgcagcacaagttaagagcactcttactgaattcatcttggcaacaggtgcaaatgtttcttggtagtcaatgccataggtttgggtgagaccttttgccaccagtcgcgcctttaacctttcaatggagccatctgccctatgcttcactgtgaatacccatttatatcctactggtttttttctgaatggcatgtcgacaacctcccatgttccattctttaccaaggctttcatttcttctaccatagtatctttccatttaggatcattaacaacttcctcccatccctgtggtatagagatagaatgcaaagaagacaagaaggctctataggaaggagacaaatctttatacgaaacaaagctagagatagaatgttgagtataagatataactcctttcctgacagctattggaagatcaaggtcattatcacatgaattaagagatggaagttcattagacaagttagaaggaggagatagattacctgaatccacaggagttgagcccgggttgagtgattggctatgaagagtagtatcctcctttttcttgcgtgagtagcttaatagatcaagtttgtccaatcttttccttgcctgttcaagtattttttcagcatcagtttgaacatgatctccatcataagtattatcatcacttccgtgctccccctgaccattatacataggcaactcaagtataggttgaccaagagaaatcacatcttctatatgatcattctccccctgaagaggtgatggtggataaaaggcttctgactcccggaaggtgacatccatactcacatacacctttctagatgaagggtgataacatttatatcccttttgagtaggtgaatagccaataaaagcaaattttaaggctctcggatctagttttcctccatagttcttatgcacaaaacaaacacatccaaaaacctttggagaaataatgtgagagttattgccctggataagttctataggacacctaaaattcaaggttcttaatggcatacgattgattaaataagcacctgtaagaatcgcatcaccccaataagccttaggaacatgcatggtgaacataagagccctagcaacttctaagagatgcttgttctttcgttcagatactccattttgagcagcagtattaacacaactagtttggtgaataatctcatgagtgtctaaatagctatggaaggttttctccatatactctgtaccattatcagtttggaaaattttcaccttagcactaaattgtgtactgatcattctatggaaagactgaaagcaagaaaaaacttcatttttggcacgcatcaaatacacccatgtcatcctactgtggcaatcaataaatgtcacaaaccatttatacccagataaagaaactactgggttggggccccatacatctgaatgaatcatctcaaaaggcaccaaacttttattattagttgaaggatatgaagttctagtatgcttagcaaattcacatgcatcacaaactaaggtctttaaatcacattgcttaaataaatgaggacgacacctttctaaaacaaaaaatgaagggtgtcctaaacgcctatgccattgaataatttgatgaggagctgattcagattcacctagtaaagccttagaaattggtccttcatgtaactggtacaagccattgtgtactctaccatagccaatcgttttcccggtgctcaattcctgtatgacacaatgagaagggaaaaattcaatcttacagtttaaatctcttgtaagagcactaacagataacaaattatgtgagaaaccaggaatatgcaaggcaagtggtagtttaatagatgaagtgcaacttatagaacctttcccgatgatgggagacaaggacccatccgcaatatggactctttcatgacctgaataagaattgtaagtgaagtatttttttcgagaactggtcatatgatccgatgctccagaatctaaaatccatgattcactagaagtatcacaggtattagtatgcccagcatgtaaggctagatgtggtatacctgaatgtgcaaggtaagatgaaggagtggaagtagtggctgcagtggaaggggattcaaacttagctataagaagtttaagagttttcaattcttcattggaaagtccaccagaagggttgatttctcttggcaattcaatgtcaagagtttcggagacatgagcttgaggctgtgtactaccagattttttttcccactcgacaacatggtgggcgaccatgaagtttccagcatgtttctctagtatgccttggtttaccacaatagtcgcaccttctactgtcttgttctacttccttcagagagtcaattctagttgaatcaggtttcatagatgatgattcagccatcataactgatctttcagttgaaatagttggcagaatagcatttcgtcggctctcttcttgctgcacatggctatatgcttttcggaaggaaggaaaagggtcacgtccaagtacttgaactctgatctgatcatacacatcatttaatcctgccaggaagtcatatacatgttccttttccattattttatggaactttgttgcatcagctgtacaagacgcttgtaaatcctgataatagtcaagttcttgccacaagccattaagttcagaaaaatactgggcaatagtcagctcaccttgtttggtttcatgaatttctttccgcaattcatatacctgggcatcattacctgactgggaataagtttgggcagctgcatcccaaattttctgagctgtatcaaggagtaaataacctcgagcaatctgtggttgcattgaattgagcaaccatgacatgatgagagagttttctgagtcccatttgctgcatacaggatctgttccatcaggtcttcttttgtcattattgatgtaactttgcaatcccctagcctgaataaatagcaagcatgatcgcgaccaagcaagataattcattccatctagtttgactggactgatttggagagaagggttgtcattcatattggttatcatgtttctaccaccatgctcagtaggattagaagatccttccttctttccgtcagacatgtctaaaaaactgctggaataaaaatttgatttggttgaaatatgcagagaggctgatactagggttagcaatatgagagagtcaccctaaagggatcaagctctaataccatgaaggttttaggacaagaaatataattgcttctgttgtttattcctacacccattaatctctatttatagggtttcacacatctctaaaaagaaagaatctcttctgcctaatttacagtaatatgcatgattggctcctataatcaagagtcaatactaattaactcctaaaattaagccctaaaaacatgggaacaactgtcaacagaattttatttcctttcagtatatttgctgttggatttttctttctcaggaatggttataacttgtttacttgcggaaaagagttctttttgttttttcaatatttttattttattggagaactattaacttatctccccatcttttttactactttgactggtagataggtttaatatattaggattgatgaattaatgtgaaatggtatacaaatcctatttgaaagagtaaatgttcaaatgagctacatattcttctcaaactgtggtggatggcatcacttgaggtgctgataatggcagtgatggtactggtagttaaaatggttagatgatgtacaatgattatggcaagtgtcagtggttgtggacagtgacagcagtggggccattttttgtactaaatcagtgttggtggtggtggaagtgacacaatggtgacattgtgggcggtgagagtggtgctggcagaagcaatttggctgtggtggtgatgccaagtttggcaagatggtgttggtggtgctggcattgagtcaatggtggtggtgtggtgtcttggtgatgtggtcaaattgagttttttgaaaggaaaactgaaacaaacaagttttatttgatttattgtgtcagcatagattttgaacttgtccaatgtccatcttctagaattcactgcatttgaactaaaagttctggttttttattttttatttttggctttgtggattgtttttgggataaactttgtagttttgtacttgtaaacgggccctcattatctatttcttgtttgttctgtttgtatacttggaatgattcatagtctcttctttttgatcctttatcttcttccttcttaagatcattttcttatagcttcaccatttaaatttcttagatattttcttgcatttacttttccttttcataggttaacctggaccctaatataaggaatatacaaga

SEQ ID NO: 6399 - DNA, 3723 bp, Ricinus communis
  Intron number 15 from transcript 30075.m001192 (locus 3007 5.t000059) derived from phytozome v7.0 (chr-ID 30075; pos 521908 to 525630)
aggtattgacttcaattggtgcattatgcagaactgttctttgacactcagtattgttttctgtgcgcctgaatcaatgttgtctaaatcagatgggaaggctttgttgagctgaatttacatgcttgctataacaaatgtggttgtacgatgcggataaggaaaaatcaagaaaaataaaattcaaagaatcaagaaatttagaactttggtttaatatttataatttcaataaccaaacagtaattctgtagtttccagcattttctgtggggtgtttctgtaattaatagcttttctggaagggtagtgaagtttattttaggtatttattttattttaagtctgatttaagaattttaattggtttagtatttcctagttagtattatcctagtttagaattcctaatccaagtagtattaggataatttagtccataaatatctaggcttatagagttttttcagattcaataaacaaaaatttcctgcaaatagttgctctagaattgtatgtttcaattctctttaggtgcgactcctaaaccttttaagtgttcactcatagaagttttcttatattttctttctgtctctatttcatatttgaatttttgtcaaattagacctgattcaattttaaagtcaaatcagaccttaaaatcttttttaaaacctttattttccacaaaaatcaacatagaactggttatctaactatgtcttacttcaatcttttaatgattcagataaggaaaatatcaagaaaaataaaattcaaagaatcaaaagatttagaattttagtctaatatttataatttcaatacccaaagggtatttttgtagtttccagctttcctttttttgggactctatttgattttaagtctgatttaggaggtttaattggtttattattttctagttggtattagtttgaaactttcctagtttaggattcctagtctaagtagtattaggatagtttagtctataaatatctaggcctctaacaattattataggtttttttcagattcaataaatgaagatttcttgcaaaatgttgttctagtatttgtatgtcaattctctttgtgcgactcttaaaccttctaatgttgacccttggaagttttcttatattttctttccttcccctctattgcatatctgaatttccgtcaaatcagacctgaatttcaattttaaaacctttatttttttgtgaaaatcaatgtagatagattatctaaatttgtccttcatcaattttggtataagagcttcaagatatttgtgtgctaaaaaccaaactggaccagcttgttcaaccgggaaccagtgattaatccagtccgtcggattaaactggttttcttacatatatttgtaaaacaaattattaaaaaataaagaaaaaatttgttataacaccaaaaattgaatgagtttgtatttaagctcattagaacttgcatttaaaagaaacttaataattattttaaaagatttaatgtttataatttatttcttacaatttatatattttgttttattattttacttatagtatataatttattgatatgcatctattcaaaatttgttagttaattatttaaattttagtatttggactttattaaatattattaaaagttaataatttggtttattatacttactatttttaaagtataataaataaaatataatcaattccattagaccggttcaagttcaaccagtcaaaccggttgaaccaataaatgactctttgactgattcactcttcggtccagtttttagaacacgattgaggctatgcaaacaagacatacaagacatgaaacaacaattactgaattgcgagatgaattgactaatcagttagacacaacaacgaacaaattagaagctaggatgaaacaactgatgaaaatgtcttaagaccaaaatgctgcccaagtaatccctcaacttccagttgcaagagtttataaggtgttacaagttgcatgtaggaaaggtggggaacatcaacaaattagtcaaaacctacgtaaccaaaaacaaaatatggcgggagataacaacaagaaagtcaagatagatatcccggatttcaagggcgatgtaaatccagcaatattttctgactggttaaatagtattgaatcttactttgattggtataatatagtagacaaacgaagagtgaggtttgccaagatgaaacttatgggttttggcaaaaatatggtaggacaatgttgagcatgggttgcaaaaatcaggacaaccaccaataacaagctggggtgatataaaggcaaaattacaagaaaaatatctgccttataattttcttgagaggttttgagaacatgttactaaatctgtagtaatttgacactactagtacttgggagagaaattaattagatgttgcttattctaattggtaattgaattaatgcttatacaggctctttttttttttttgcttataaaactcaagagcagtcttttctcatcctgtcctgttttcactttgaaaatttatcattagagtggaaagcgaaaagttattcttgtgatgactggatatatctcactgcagtaagatcctgataagtgacccagtgattaggatgctgcatatattttggaccttagtaatcaattgataggttactcatttttagatttcaggaaaatgttaaataccacatcatgcggttcttattatagtcatgcgaaaatgaaaatctaggttgtgcttgtgcaagactaatcctaatccattgacacgattgtacccttctgtgggcatgtagttatctttctcagatgctgttgaattgttgaagggtactttttctcagctacattgtttccatgattgtcttatattaccttgtataaatgttagattatgagatatcagtaaaaaattgaacaaatgcaacaactcttttgtgatttcagcaattgatctacttcggtgctaggcggctataactttatgaatttctcaagtcatggattacagtgttaacataatctaagagacagcatattttgttaatcctttctcaaaaatgtcatatcaatttgggaaaatacatttgactttttgagctccaatcctaatctatttaacatgtcttttaaccttttttctttatcattttttattaattttgttcggctactttgtattctcatctctagttcttttttctacattaatgtttcattaaacagcttggtgttggtttcagctatgttctctttggaaatgcttacatttgaaatgcattttttttttctttcaaaacttggagcgaatttcatatgattagatctgttaccaaatgagagacccatttctgcagttagcttttcttattgctatagatgtcttagtatgcgtgatatgtctcttgtgtgcttaaatgtcaatataatcatgattttctttaaattcctctatctttttgtttaggattagttcaaataccttgactttctgaggctgaaggagcacacctttgaatatggttatctgggacaatatgttctatttttgtaccttaaatagagaatttattggatattctaacattggatatttcacaaacacatatgggctcaaatgttggttggaatttgcaggctgaaacagattctggtactctgatacctgaggg

SEQ ID NO: 6400 - DNA, 3491 bp, Ricinus communis
  Intron number 2 from transcript 29602.m000220 (locus 29602 .t000012) derived from phytozome v7.0 (chr-ID 29602; pos 1 53845 to 157335 reverse strand)
aaactgtgaagctagctattcgtgctttacttgaagtacgtcatttcacgtgtttttatatatatgctcacattgcaaattgcttattctcttatattgaagctgcattgcatttaatcaattgatatgtggtgatgcctgatgggatcaatagatattatgcgacttaagttgtaaagttgatcatagtttgatttgattgtggatgttgatagcgttgctgcttgccgtgagttgcttttaatgttgttgctgaatgggttttaacttgtatgcatatatgagtgggtgtgcaacaaagacttacaagaacttaaatagataatggtgtgccctgtatatgctttgctaaagagtgattcttttgtcctcatttattttgattaccaaatcttttttcaatggaggaaaattcttggctccctgcttttagtattttttatgattatgaacgaagttgtatgtgtttatgtaagagagacatgttttctctgatatacaattcgtaacagaagtgcataaaggtgttttgttttaggtttagctccttttgtttaacatctatgtctgctgagaatggataatctgtcctttatgctaagattgtcattttctttccagggattcctttgcacttgatgattttacatatctttgttccgtctccttgtgtcccccctgcaggccttatcttcttatctagttaatttgtcgagcatagacgagtatttaattaatttctattattattattttctttttgcgtactctgtatattcacctttgttatgatttataatcaattttaaattcctgatatctatatatgatctcaactttttgtctgaacaaaatcttgcatatttattaggttggttcagttttcccaatattgttataatctttcatgggttcacttctgcttctttattttgtgtggacttttatgaatgtccagtgcagctgtatttaagtgtattaaccatatcttggcgtttagaatatctaatctttgggatgctgaaggttctcgcctcatgtatccacttctttttgtaaaactagtgtacatttgttgaatgggaatctgtgattactagaggtggtcatgcttggttttagtttaactgatttctttttccttttcagatcaaatgaatactgtaaaacttttaggttctttgaatatgcatgcattgaaatgacagtttgaatttgtgtcatcgtaatacctaatgaaaagctattaactcttttgatattgtcaaattgaaatacgccttcatgtcaaatcctcatctgagtggactctgatgagattcatttgcaaatttaggctccttatatctggaagctcaaaaattgttggaattttatagtctattttcttggacttgattaagtttaaggcaaatcttatagaaattggtagatattgaatttaaactttgaactacatatacacactacatgttgattatattctaaattaattaattctatggattagtatgtaagatacgaaacatgagaacttatttacaaacaagtctattatgaaattcatatacaaatggaatgagcttcatattcatttggctccaaatacaatatgagtgggaaccttattgttgttgtcatattgttgagcacctgttgctaagatgaatcattataaatgaacaatagatatatctaatctctttcacattttaagagtatgtatgctgccattagaaatcggtgtattaactcaataattatctaggtgatattactcaaaagcatactgggttatctgaggttgaaaagctgctttgttggcttaatcgcaaaccgtgatcaagatgtaaatgcccaagctcctaccggaacctatcaggagtcatttgtctagatcatgtttggaatgttttttgtatgtttgccctccttgattattgatgacaagatttttggttggttatttataatttccatgaatgacccaagtagaaacttatggctaagagagtgtgatctaattatacaaaatagagaaagcgtgaaataattatacacgtttcttctgtttccttttgacatctcgagggtgattacttctaactcttactatttagcagagcacattttctatgtttctgtattccgattgtaatgatatgcttgcataagagatgctactctggtagacggggattcaacccaagtttctcaagcttgctttacaagacatgcagcttggaattgaatgaacaatctgaatggttcggttgatgatctcagtatacaactgtctgtgctttctcggcattaagtaaattagtttgttagcatgatggagctttattatagacaatacttgcaatagacgagaatctaactgaagaatgaggataatggtttaggcatagttgtcaaaggcgtgccagaggtgagcggtgcacgtcttagcgcctcgtgccaagaaaggcaggcgacttcactaaggcacacacctttgtgcacctcagacctaaggcaaggcgcgctgttgtaatattttgactttattttttcttttaagacatcaaatgatctcagcccttcatcatagatttaatataggttgtataggcatgctcacacctgattatctccaaaaagatttagaaaaaaagaaacaagaaagacgattaggggaaaaggacctctgatcgagaaaaagaagagaagaagaagaagaggattttgatgaagaagaagaagactaaatggagcgtaatgatgatgattgatgggtgatgtgattactataattaatatttagtaggagactattagtctaggagtaggaccaagatcataattatagacttatactaaattagttatggaagatactttaggatttctactattctaggacttttagttatttaaaaaactatattttacttttcttgtctcttttgatcatatctttttattatttgttaaatgctttttgaacgtgattatcatgatctttctatttctttctttggttatgttacgttttttattttattttatgcaagcgttttgttatgagtcctaattttgttttattttattttttgcccctcactcaggcgtgtgcctcgccttgctcctcaggcaccaagttattgccttggtgtgctttttcgcctttaacaactatgggtttaagactgataaataatgtgatttataagtgctctctgcattaactaacatcttttttaagtgtatgctgctttattttgtgaatcgttgtgcttgctaatgttaagtcatcatctgttgagaggttgactggtaaatggggctagttctagaaactttctgattcagtagttatgcaattgtatgtttctatgtctgtcatattggaaaagaaaatatctgcattttcttaactgttttgttttatgatttatgtttttctgttaggttgttgagagtggggggaagaacatagaaatcgc

SEQ ID NO: 6401 - DNA, 2293 bp, Ricinus communis
  Intron number 3 from transcript 27660.m000086 (locus 27660 .t000005) derived from phytozome v7.0 (chr-ID 27660; pos 3 6387 to 38679)
gttcttgcacgtgttccgattcttgaaagtcagaagtaagtccaattattaaaaagaatttttttctttattggagagaatgtttaagttgtttttgcctttcttgaaatggaagcagtgtcgaattagagcatcagtaatagttcatagaaatttgaagttatatcaagactcagttatttatttttccatgagaatgctgcttccccacaatccaaacccaatattgttttcttaccaacgttggcaactattggacttcaaaagaatcataaaatcctattcaattttttaattaaaatattggtacgtaccttggaaccattgcgagtcttaatataagaacggagttagcgaactggtagtaaactttccctacactttgatcaatgcatatccacaagtgtgctccccagaactatcttttaatattcacgtggcccctagtgattacatataaagtggtgaagcctagaaggtatatcttatctgattctattatggataccttttacctttatcgctcgtgtaagaagagctttaagtatttgcataatcctatgtaattccttcgcagaaattatgacttaagacataaaagcttaatgaagtcgtttacatagcgctcatgccttgaacaaaattgtgtctgcagtgcagctacatccttcctaaacttgtattcctgatactttaatgctggacattaggtataggttccaaactggttgaatacccttttcaactgagtaactgattatatatcttgaatcataaaatcttctggacttctttcactgaactgatatacttatttactaaaaaagatgcttattttatgtttataatatgatgtagtgctccaatgcttcttttattcacagtgattgaggttgcattttttgtgagttttaagtaatcagaatatcttgcttcacagaatttcagtttctaattaaaataatatctcaacaatatcaattagagaatatgttaagaatcttcggatgagtacttggtttacctatagaagtgagttcttccttctctataccacaatttaaacatttagccttatctcaaaattcagcaaagtctaaattcaccttccactacttgcatctattgaagtattttgtttgactggttgtttccaaaaaattatttctttgattgttgttgtttcgataatcaattataattaaagctcggttataatatctgatcttggaaaacatattttgtatacctctacatcggtctagtgatgtaggacagctacgttgatttttgttagaaataaaaggtttaaaattgaattccaggtctaatttggaagatgttcaaaaaattcgtatctgtgattttgggagtgagattattttatttcttttacaatttaatgggtttggttatagaggtataaaagttgttcagttccccattggagtctgaattctgatcatagactaccaacagttaaagcacacacacaaatactaatataaaaccttttatttaatttgaaagaattagttcttaaaccatttttcttgcagttgccctctctctggatattatgtggtgcagtgctaatcctagacttaataccagcagcagctaatattgattcacaatatttttatgattccataaggaaccaactctattccatgttatatgaaagtatttttcatattgtattcatgcccatcgatgaattactggaattatttcggacctaaaagatctcaggttttctttttgcctcatacaacgtcttgggtttccttaattttgtactctagatagtcaatcaaattcattaagaatggcttttaggatagtgttctcttctattaagtgctaggtctgttttcagatgtaaatttttaataagaaaaatgcaaaacaccaggcatttttatacgaaaatctaatatagaaacaaaggcaggtgagcaattctttctcttcttattttttgccttacaaagtaaatgttcatttaagaaaatattttcttaaatcgatatccttttctatttaagtctatggattattagggggctactgaatttgaaacaaagccagaatacttgtttatttttttggtggcataagatgcttaaatactgtcttaatatcttgtgggtttgtttccctattctctgatgcaatactgggtgcctttggcaacactataaacaatatgctctaatgagagcactcctgatgtaactcagctatgcatgctggacaactttcaactgttctctctatatgacaggga

SEQ ID NO: 6402 - DNA, 1965 bp, Ricinus communis
  Intron number 2 from transcript 29869.m001136 (locus 29869 .t000001) derived from phytozome v7.0 (chr-ID 29869; pos 7 102 to 9066)
ataatagacctgccattgaaatacgcctcgttcaggtcagttgattgatccaacaatttttcaacaattttttggcaaactaatcaaacatttactgatacaacatcactgtttgttcaaattttttcactttctattctctttattaatatctttaacttacgtttcttagtacctttagcttttcttgatgatttttgaaaatttgcgagttaattattaggccttcaccactcaatgcctgtccttttagacaaaataattcataatattcctcttaagttggatttttgaccttattccatcattgtttttccttttagttactggtcatgaatcatgtattgtagaaagttttcagatgtgctaagtaatatgtaaatgttgaggctggcttaagtttgctagtcattatactcacaagttcttcactgagatcaactgttttttctagaatgttgacagacagtaaggaacattatatcaggagcgatcatttctgaactcagcttgatattgcattcatagcttaaaattctgattgattatcaattctaccaatagcttatataacgttagcaattgcaagaactgttgtgatgcgtctcgattgtgcttggacttgtttgcaatattatagtttaagttcacaaagtaagatccatgatggttttgtactttcatatggggcaagtaaggtgatatcctttttatttctctatttaacatatttaactagtaaataagaggcatggaaatgcttgaatatggtttaggatgatgtttaatgcgtgcaattaacactagtgatgttgtatgtgttcatcagagagtgattattttcagagctccatattttttttctctagtatcttttgtcgtttttaaagattttaatgcaagagactagaccgctaccgattgatgcaaattttcatggtggaagtgtctaataaattttgtatgccaaagaaaacctgaatattctttacagcattgttatcttgtcagtttgggctatgaaaagttccttagtctttatgctgagaaaaagttcaagcatgataatctgttcattggtttaattataatgaatgatgtaggatggcctttaactatatttttgttcatctttgattatgccaataaaaaataaagattctattcatgatttaaatttatattacaaaagttagattacatagtagtattttaataataagtgtagaaagtccaatagtgcatgttataaaccctttagttactatataaatggtacatagttgtggacaagttcatttgttgtcacaattttaatggtaagctatgatatagcagatagttacataaaaccattttctggaaaattatcagtaagatgagaaattatctttttcttgttttgaggttatgcgtgcgcttctatgttttcctcaaccttgcttttcagactaagattattgattcatcttctgatcttgttccactaagaaattttatttttcttgttttgaattatgcgtgcgcgtctatattggtgtcactgatattactttctgctcaatagtatgtctgatattttcccaagtactttcttaagagtggatatctatgcgtttagttataacaatttttctcatacctagatgttgttttatagtggttaaatatttcacttatgatgtatgtcagtagccaatttaattgattgttctctgtgaattgcttgttgatcattaggttaagaagtcgcaatgtgtgtctcacaattaaaataatttacattcctcatctcccaatttttgtttctaattgttgcaagtttgcaggtggcaaaacttccatcgaatttgagttatgtacttgaatttctatttctctctttaccccatctccagctttgctgaatgggaccttatagtttgtcaatcaatttatcttgtgtgcaggttccaccagtttctg

SEQ ID NO: 6403 - DNA, 988 bp, Ricinus communis
  Intron number 33 from transcript 28035.m000359 (locus 2803 5.t000004) derived from phytozome v7.0 (chr-ID 28035; pos 127129 to 128116 reverse strand)
aggtagatccatctgtttcaaaaatctggtgcttattcaatgctactaagacgatatgacttactatattgtgcaacaacattgtttgaagtagaggtctgaatcacatttttaccttagcttgaagcatgtagtacacttgtgcaatttgaccaccctgtaggaactttgcaaatgattttttcctatagttctttcagtaggatatgtaatcctgtttacatgctttatttgccaaataagaaggattctgttaatctttctggtcgatacttctagtaataagtaaatggtcttcattacatgttaatctattgaagaaaataaatcccataaattaggctagtcttaatgaataccgcttccaagctagttgctttctatgattcaaaagagggataaaagtaactaaaggacaatggagaaggctagtaataatgcttggactgttggtgggaaacagtccatcatatatctcattctgcagaaatgaaaagagtgcatggcgttgtaagaaatgatgatggcctgcattatggtccgaggttgggattgaaagaattggactatgtcttgacatttgcttgcatgagcagttcacaattctggaattatgtttctgctggttctgagaaatagtgccactttgctgctttagcttgcatgagctatagttattgatgtttgctttcttacactatcgcactgtgggcgcataacaaatatgcatggaggggatagtgtaaataatgtcattggacttagatgtgtcagtccatgtgtattgccagattttattccatctacttcattcttcatttccaagcccgaaaattaaattgtatggaaaatgaatgtgggttttgtacaaggtacaatatagtttttctagtattaaagcactattatgatcttggtctttcccattttattgtccttctttccttgtgcaggtcatttatcggatcaaacttcccggaccagccat

SEQ ID NO: 6404 - DNA, 718 bp, Ricinus communis
  Intron number 1 from transcript 29657.m000470 (locus 29657 .t000011) derived from phytozome v7.0 (chr-ID 29657; pos 1 03456 to 104173)
aatcatccaagtctatctacgatttcactgtcaaggtaactgctttaatcttatgcttttgggtttatttcattgctattctctatgggttgtggagaaaactaaagaaagttatcaattttgtgttttctctgttatctctctctcaaaacacagatgggaaagttaaagaatctgtgctttgattattatggttttaaggttatagagaaaaagacagagagagactttagtatagtatctctttgtcagtattttttatttttgcttcagaactgtgtttctcctcttgtaatggttttattacggttctgttcttatgatttgacttatttcctgaattttgagtttttattagattcagttatatttacgttactgaacttgattccaagtttgcatttctttttgcctaaagctgggaatctcagtttgaattgctcccagtaacaagttttattgagaagtatgtcagtaatggcaaattctccaaatttaagcctctgtttttcttttttcaaatttttcctttaccatttcttactttgataggatagagtcggataatctacctatcacccaatttatgtgacatagatttctaataatttcaggaatagagtttggtagtgagttttacttcagcttctttgaaatgaaaggcttggttgtgtagattgagtgtataattgcatctgattgcaggatattcgcggaa

SEQ ID NO: 6405 - DNA, 2061 bp, Ricinus communis
  Intron number 1 from transcript 29569.m000150 (locus 29569 .t000006) derived from phytozome v7.0 (chr-ID 29569; pos 4 5396 to 47456)
cagaagagagaatcaagtataaacttgaaagggtgagtggatgtttaactgttttcttgaatcctggcttttgttagatattgaattgtatgataccttttgttgtctgcatttcaccttgtctcatgttctagcatattgtcattagttgtgagaatgtgttattgcagctcaatgcctttaagatattgtttattgttaaaaaacataggttttctgttaaattttgaatcttcaaatcacatatagtcttttacccttagggaatcttcaaatcacatatagtcttttacccttagggcatccacaatggggagtaatagagtgtgtaatacccttcattacaccaacccattacactctctcctatagtgggagctaggacttccataatggagctgaaaactgaagaaggaaaaggtgtggcattatacttggtagagtgtatgtgatttgattgtgggcccatgctattatactctagtgagtgatagtgtaatgaaagaggagatagtaaagtgaggacatggcatatagattacactctaaagaatgtaaaccattgtagatgctcttatgttgatgttgttacttttggaaaaggattcaaattctgaagccagttttactgttgcagaaatggggaagttgacaggaaagcagactatatggtcttggccctaaatgaactgtctttttactgaattattggaatcaagtatgagtgtttgtcaaaactaagcaagaagaactaacttcgtcgcttgactgacaattttaaaataagattgtcaaactgaaaagtgttaggatactactagcttggatgaggcttttaactttatctaaaattctttctaaacaaatgctaattcatttttattaaattgatcacttagttgcgttcaaaagtttcaaagtttttctcagttatcttagccaaagaagaatcttgatagattatagtaggacagccacagtttaggaactgacgattcacgatttcgtggcaactggaaccggccagttccggttcacggttacagttcagctggttcaaacatattcttaaaaagattttaaaaataagagcttaaacttaattaaatcattattaaatattaattaaataattattatgttaattattagtttgatttttttttttttttgccagtttggaactggaacttccggtaccaattccatctaaagagaaccacccctgaactagctcccatgctttcgagctggtacgagcccggttccgactaaccgattttgaccagttctgaaccggcctgtggctacccctaaattatagtcttcagatttacttcccaaatatttacaaactatcagcttattgttagtttgaattctcatatgtgattccgattctgttgtttactttaatttggattgtagttcagttctggcattagattcttttagatcctacgataatctgcttcaatttacaacttcaaatttttttctccatatttaggtcctttagtgcagactttaactaaaccatagctggatttgaacttaaattatagatttgtatctatgctcaataatctcacggagatgtatctcattgccttcagtatcatagaaaaaattatttttggatttgttattctgttcgcagaggtcaatttaaactttaaacaaatgtggagggagaagttttgttgtgttaaatatattctttctcatttttttttctaaaaaagtaattatataatggttttagttagtatatttataataccaattcctatccctttagattttttttttatttttttttggtaaaaataggcaccttgatgctaattatctctgttggatagctcctaacttgaacataatcgttgttctttaacatatccatttctcgtctattattctctgcccaaaggagaaggaaattgaagtggtgtaatttttttaaattttctgaagttttaattctgttaagtgatgaattttcattcctttcttacaattacaggccaaaatcaaagaagccttactggttgaaagact

SEQ ID NO: 6406 - DNA, 8644 bp, Ricinus communis
  Intron number 2 from transcript 30225.m001707 (locus 30225 .t000031) derived from phytozome v7.0 (chr-ID 30225; pos 9 95249 to 1003892 reverse strand)
ttgacttttgtgaggtaaccaactctttccatttcaaggaacctaaactttatatctaattctccatgacattatcataattatgctgaagtattttgaactttccaattgttggaatgcttgctaaatgtaccatgacagtgccacactagaatgaggttaactgtacaattttcttgatttgtatgatatgtgaatcttgtctggtaactgtagttcattataatgtaacaatacctgtcttaaatacagtggtggatatagaaagatcatatcatatagaagtatataaaagtatataaaagtgcgaaggagggaagataggcaaatttactaaaatgacgttattgattatttagttaattgagttaaataaaattgataaataaaattaataatttattatttacatatcaattctagaaatccaactctattaggatttttcaatgttggttataaagtagaataaatctaaattaaaaaaaagtataagaaaaaagtggagttggagtatgacacttttttagtggattaggaataattataacaaataaatttctaatagaattagacaagaattttaattctaaaaaatagtttaatattatgttaattaataaattaatttgattttaaggatatgaatgaagcatttgtaacattgttgagaaggggaaaagacattatatgacgtacaataatgaatcagtcaaatccaaggacaccaaccgttacctgacctaactaatttttttcatcaaactattgcctatatttatttgggtggattaattagtaattattttattaattaagttactaattagttaaatattaattaagaatagcagtaataggactaaaaaattcttaactaaaatcctaatactattatacttctactaataattaataaaaaaaaaaaggtacgggctaagcaacaattccccatcacaaaattctcatttctcttgccaataatcaagatttgaatgaaacattttctgaaaaaaaaaaaacgaataaacaaacataaaaagaaatctcagttaaaattaaattaataatggtaaacttttacaataatttaatcattttattaatttaacttaataattaataatttatttagtataagtttaactctaaaaggccaactctattaaggtaaatttactaaaatgactttattgattatttagttaattggattaattaaaattgataaataatattaataattcattaattacatatccaactctattagaattttttaatattggttataaagtagaattttaaaaagataacaaatctaaattaaaaaaaaaagaataagaaaaaaagtggtgttgggagtatgacactttttttagtggattaggagtatttgtattttagactggaagtctagctacttaaaattaaatgattagttttaaccatgatttctatataaatataagatctaattatcaaaaaaattataaaatacaaacacaagataaaaattatatttacccaaccctaaaataaaaaaatatattaactaattggttaagaaagtaacatattattaacatattaaaataaattaatccattattaatacgaaattattaacatattataattttattttcaattccactaaataatgtaacaaactaaaattatatttagctagaaaaacttataaatgaaatgaagataaatttcttatattttgatgtcacttatgttatatgcataaaaatataaatgagatatttattaaattaacatatatatatatatatatatatataaggttagataacaaatcattttattgtattgtgaactcatttgagtcattctaataaaagtcctagataagtataagtaatttttcttttagtaaatagaggtgacattgaacaataaattgtaatgaacatattcaagaagataatggttaacgacgacgactagattttcaagacattactaaaattgtggaaaattattcatttatttatttaatttagtaataacaacataaaacatttgaagaatgataaaatcacgattaaatttatttatttaatagtgccacgagcaatgtatattatctaaaataatgaattattaacttatcattaagctttagcaataattttaaagtaattaacatgatttaaacataaaagctttataaactttttgtaataatctgaataagatttttacgttttaaaaattattgaaaagcaaattatcaagctttcatttaattatacttatcataaacaatgatattgacttaaatatattttagatatctaaacctatatataatattagaattataaaattttaattttataatttcttaaagtaagaaaagaaaaaaatagttcgtatcggaaagcgtttactatattctaccttattaaaaaaaaattactattattgtatcattatttaattatattaatatactttacaacatatgtggatcttaatttttttgagaatatattaaatttatatattggtaactatacaaataattagtataaatttcataagtcataaataggttcatttaaagatgaatttaccatgtaaaaaggattttatcattaacttaatactagaaatatttacgatgataaatttaaaaatatatattattttaattattaagttataatgagttaaataattaatattatataatattaaattaaattaataaatgactaaattaacataattaattgagtaattagtaaggctctattaataaatttattcgtcctctctaatatgattaattttgattattttttaattgaaattattaatagataatataataattcattaagtacaagtccaaccctaaagtccgactctattagacttttaatgttgattataaaatagcaattaaagatggcattcctgttgtttacttttttctgatagaatataatttctaataaaaaaaagaataaacacgcctatatatttataaattaaaaataggatttaaatgatatattttaggattagacttatgctaaatgaattattaattgtatatattatatattgttagattaaattattaaaatgactaaattgacctaattaattgagtaattaagccctattaataaatttattcgtcccctctaatatgattaattttgatttttttagttgaatttattaatagataatattaacaattcaataagacaagtctaaccataaagtctaactcttttaggcttttaaatatctattataaaataacaattaaagatggcattcttgttgttgatttttttctgatagaatataatttctaatgaaaaagaaaaaatcacctatatatatatgtgtgcgtgtatgtgtatcaatttatcataacatatatgacagtgcgaagaagggggaggatagataaatttaccaaaagagccttataattagtgttgttaacactgaccaatttagtcttttattaatttaatagaaaagataatagataatagtagtatatggataaaatttatatagagataggacactacaagattataaaaattgcttttactaatttaatgaaaaagataatatataaacagtattagaataaaattcatatagaaataggacactaaaatattaaaaacaaaaaaactaaaattctattaaaaaaaaaaaaataacagaaaaattaaataccaaatttacttaaatataaaaaagcaaacgtgtatctatataaatgtgtgcacgcaggagagaaacaaatgaagagaaacaaaagtaatatgcgatgcgttaactaatagcaaaaaaaatttgatttcaaaatcaataaaaaaaatttaagatttttgttcttaaaaggaaaacaaatattataaatattaaattatttaagatttatagtatgattctatatgataatactttttagtcatttaaattattttattttgatcatttagaataatattccaccgagaaataaaaaagaatttagttattgtctacctcaaattctattttaggatataatttaagattcttttactaatatactatattactataataataaacatggatgtatattctgcaagaaaatatattattttaatataataatagtaataataataataataataataatagatgtaataaagatttatagtataataaacattagacacgttcaattggttatcggggtgaattctattttaggatataatttaagattcttttactaatatactatattactataataataaacatggatgtgtattctgcaagaaaatatattattttaatataataataataataataataataataatagatctaataaagatttatagtataataaacattagacacgttcaattggttatcggggtgaatttagattctatcttatgaaattatataaaatctattactaattattttatcatttacaagtctaactactgttagataaaagaaaagtatttttattttaatttaatggattataagtatttaaatagaaactaattgcctagaagtctaactacttaagtaatattaaataatcagtttcaactataatttaatttataaataattttatacaaaattataattaaggtagaaccggtaaagtaattatatgataaatctacattttttaaaaagtagatagacttttcatatcaccaaactgaatcattgatatttattgaatgaaaaaccaaactatttaatataaataaaatcagtactaaatctatatgataaaataccaataaaattatattctagctaatataaaaaactttaagttttctaaattgaacaaatatgtagatattgactattgaagaagttatatgatcaatccaaagtttgtgaagatacttaaataacatcaacaatttacataaaactttatatttattttgtctaacaataaagaaattgagtcaatattttagaatgttgactcaaccataaaatttacttaaaataaataaaattataaaagtagtttagattatatttgctaataatgaatttcatccgtagaaactcttccaatttgtgcattaggaatttgtatcaagtggactaaatatatatataataaaagctataaataaaaactctttcaattatgtgtatttttattatgaaatagcaccagatgatctatttctacttacatattaaaaagaaaaaacatatgatgagatgtttggagaaaaaattctaattttggttataatgtatcaacttgttaatgacaaattattaatgttagtggaaaactaatttgaaatagtggaaaactaatttgaattatgagaacattgagtttaattatttgaaaatttaaaaattaactcaactaatgcatttatagatataaatggattattagttttcaaaaataaaatttagataaatcagttagtaattattttattttttattataaatgagttcaattattaatattcacgtgcaacgcacgtgagtaaaaactagtatactataaatgtatggagatccaagctatactataaatatggttttctcatatattaaaaattatgatggtttaaattatgaatttttaattattcatacacttggaaaaaagagctttgtaacaacactaaaaaatattatacaataagcaagaagtgaaaaaaaattattgatgcaataaatataagatatttatataaacagaattaccaaaagatatgataaggttgtcctggaatgcatgttactcatacaataaaaatgaataaacgacaagcaaacatataatggtaatgcattggattataaaatcttaaattattgagattaataatgaaaaaaatgatgattttattaatttgtaatttaacaataatcttattttcatttataagaactgaagtccggtatttcaaaattgatgaattaacttaactaatgcgttaataaaaataacaaatcaaattataaatgtaattaaaaaaaatatgatacaatcattctatagtccatattaactcatataatgaaaaaaaatatatatataacatatttgcgagatgagtactaacttggaaaactatatgaatatttaagtttaatgagttatattcactaaacaaacatatgatgccatgtttagagaaataaaaatcatatatataaaatataattctatatagaaaacttttaattaaagtaaaattctactaaggtttaattaaatttaactaacacaaactatcaaataaagaacatagtttattcttggagattattttaatatttgacgacatttctatcataattgtatcatatgattgattttggcttacttgagcaattaaatatcaacttgatttatagagtatcaaatgatgctattcgttacatccttgggacatagaatgcgattaattaaaaaacttttaggtaaatacttgagatataaattcttatttgaattatatgcctaatttttaattaatttgttaaaattaaaaactagataatgtaaaaggaaacgatggaaataatgaaaagctactaaacataatttgagtaggtaatttgaaataatacaaagtattatttaaatccatttaattaaatataatataccatgaaaagatattatttatgtttttaatatgtttgtctatttaattcttaaaattattaacccgattgatgaacacatcaactgaaacaaacatttagtgtatttttatcattaattatttttttattaaatatttattattaattgaaactgctctaatgtaaacaaaaaactagtttaatagaaaagtcagtatgtatgcatgggataaaatagatatagtcttatggatgtgtatctagacatttcttttcttagcgctgcaagttattggttagagagaaacaagtgttaatcaatttgaatcggaattacgctcgagtttaccaaaattagattttttacatgagttttcttgcttcactatttataattggcactatttctagtggaaattttaataccatgcaatttttattaattgatatgaccttttgattatataacaatttaatcatagtttcctttaagtgttttccttttaaaaatataactataaacaaagatttaacacaaatgaatcccttgtaatcgaaaaagttcccttctcaattgaatactagaagaaagtgcccggaaatccttattctcttactccattctatggaaattccatcatatagtgtatgccaatatgaataagatccatcatggatgaaggcctcctgactaagcatgtacaatgatagccctgagtcaaatatttaagttattctgtataaactgaaattgctaaaaattggaaatagggaaaagggtggacaggttacaatagaacactttatggaattctgcttttcaatgttaaaaagatcttcctgccaaccaagaccaaaaaaaccatagttggaggatggatttcggaaaaacaagaattaatatgttagcatttcaaaccgcagtttattaacttaattagtcaagagtaatttatggagaaaatgaaagaagaaatttttgtaaaggaaatttgaccctacacaaggtaataatgccaaatgttaacatttataagtatttaatcttggcctattgacatctactttgcaaatagagccaccgtaaattgactaagctgtaaattttctaaaatggtaaagttttatccaatttaatttggatttattaatttttgcctttgcaggggcaatttacaattaagttaactaaactagataaagtaatatctagtgggggcaaatggcaccactacatctattgtggctccgcccattgcttagatagctaaagtttttgaagcacttaacattttagagcaggaagtcttatgttaatcacatggtgtcgtggtaacttgggtttttcggggtgtgtggtgggaaggtattccaattgattcactgaaaaaaaagaaatcctagatccttttggaaaaaacgaaattaaaatgaaattgaggaaattgcaaataacagcatgacttcatgctatccgaaacccaagtctttaaatacatgtttgaacaatctcagttgcttccaaaataaatggagttgaattgaaatttgtaataaaaataaatttcatggaattcattatcttactcaattgagtgattttttgaaatctcacctcttgggtaggctcattttcaaggaatttggtgaacgagagatttgccaaaatccatggatactatccaatttatcgtattgggttcttataaatctttaacaaattccttgaaccacaaattgccttggttttttgcaactatattgtcattatttattattcttttacttattctttgttccttacatctcttgtttactctatgtatctaaagaaggtagtaaagttattatatgagtgtaaggcttgacttgattgcatccataaatatagtatgtactttttcctttaaaaaagagttttaaactttgtgtttgcaggaagagattg

SEQ ID NO: 6407 - DNA, 7588 bp, Ricinus communis
  Intron number 7 from transcript 29948.m000717 (locus 29948 .t000031) derived from phytozome v7.0 (chr-ID 29948; pos 3 94844 to 402431)
catatttggcatatctgcaggtaatctttataatgactcgcaaatggggggctgttttgtgtctatgctgtatttcatttttggtatcagttgctttgttgtcagaacaaattatattattaaaatattcatccttttccacttttatattctaaaagagaaaaaaaagaaagtagccacaactgaaggaaaccataaaaagtggtcttctggtcttctcaatcgtttttcttcaaatttacacttttttgaaatctggaaacagaaaaagagaaaataaaaaacaaaaaccagaccaaaccaaaccaaaattgataccaaacaggtgaagcatctcacttttctcttgtacccttttgttacttttggtaaatctatggtggaacgtgaaatgtaatcgtctaaaaggcctcatctttgaggctcatttaccaattcaagactgaaattttcttagttgaggtcgctgatcctgcattattttcttcaattgctaattggataagaagcgtgtcaataccaagacacactgtcacttactttacaagagtaattatcataggtgtgcctgaggcataacggtcaagccctggtgccctggaagcttataggtgcgatatgttaatcaggtgcatgccttattgtcaaggcacatctctgttatattatggtctataactgtttttccccttttctttaactatttcttcatctaaaatctccagcattgatctaaatatgtaagtgatattacaaagatctcatgtatgcctagtcaatttaaaacaactgtaagaaagatagaagcccatgtctagattctatatctttcaatattttagttctcttcttttcttctcttttatgccttgtgtctttgaggcgtgcgcctgcacctcacacctgagctctaggacccctttgccccttgatatgccttatgcctttaataactatgtgatacgtggccttgtttactcttagcaagacttagtcagtagtttgttacaatttattccacttaataagctagttagaactagtcctaagcatgttcacgttattgttttagtgcagatgtgccaggtgaactggccttagtcttttcctcatttatagccttgtttgttaaattttgagttgtaagactattataaatagtcagtcttgagttcaataaaggacagcaaatacattacaaatatccttcttctcttcttctctcttccaacttctccacttataattcagttccaacattttggtatcagagccggtatcaacaatggacactcgtggtaaaacgaatgctgaatttcgtaatgatgttaatgaagcattagctcgtcatgagtctaattttgatcaaattcctgctaccctgcaaacagtgttaactgagatacaatccttacgtatctctcgcattaaccccactccccaacctgaagtcaacccattttcccaaggagaaacttcccatttcccgaacacaatcaaacctctcactccaaatgaccaccatcaccacctcaagctatacttcccaaaattcaatggagaggacccaagtggttggatttacaaggcagaacaatactttgattttcagaacatcagtcctgaccatcgagtccaactagcctcctttcatttagaagatattgccttacaatggcatcgatggtacatgaaatttcgtggaccacaaaattggaacgaattcaccaaagcagtcgtccttcgttttggttcaacagattatgaagatccctctgaagctcttactcgccttcgacaaacctccactgtggcagcttatcaagaagcctttgaaaaactttctcatcaaattgatggcctacctgagggatttcttgttggttgttttattgcaggactacgagatgacattcgtttagatgtgaaaattaaacagcccaaaacattagcggatgctataggagttacacggttggttgaagaacgtatcgactacagaaaaagccacctgatcccaagccgcttccaaccagcaataacggcatcaaaaataaactcaacttcagcttctggagtactaggccctccactagtccaacgtggaaatcccaatgcaaatgctaatcccaccacctttcgaagaatcactaatcaagaggcgagggaacgtcgagagaaaggattgtgctactattgtgatgagaagttcaccccaggtcatcgatgtcagcggccacaattattcatgatagaagatgtcggccactcaagcgttgatgaggatgaacaagctaaagcagaacctgattatcaagacgtcatgcccgagatttctttccatgctatttctggagctagtcacctacaaactatccgtgcactgggtaaattaaggaacaaaaatgtgattgtacttatggatgggggcagcacccataattttgttgatcaagccatcgtcaccaaatttgcattacccatattgcagacaaaaaaatttcaagtcaccgccgccaaccgtgatcacatagagtgcatgagtctttgcaaagatcttaccatccacatccaaggtaaatccattaccgctgattattttgtgcttcctgtggcagcttgtcaagtggttttaggagtacaatggttggcaacacttggaccaatagagacagactaccaaaaattgaccatgacctataaggttggaggagagtcatatacgatccaaggtctaaagcagggaactttagaagccttatctgataagtagttccattgtctacagggtactggattcctattccaaatctcactctctccaaatattacccaaccaagtccccacccacctgacataacccatattataaccgaattctctcaagtactcaaatcacccacagacttacccccaaaaagattacatgatcaccgcattccattacaacccaacactgaaccagtaagtgtcagaccatatcgatatccctattaccaaaagactgaaatagagaagatggtgagagaattgctgcaatcaaaattgataaggcctagtaatagtccattttcctcacctgtcctattggtcaagaaggcggatggagattggcgattttgcgttgactaccgagctttgaacagtatcacagtcaaggataaatatccaatcccagtcattgatgaactccttgatgagctatatggagccaaattcttctctaagttagacttaaaggctggatatcatcagattcgagtgcatgaagaagatatctcaaagacagcctttcgaacacatgaagggcattacgagtttatagtgatgccattcggccttaccaacgcaccctccaccttccaaagtctcatgaacgatctcttccgaccttacctcagaaaatttattttggtctctttgacgacatcttggtgtattcacgaacttgggaagagcatctatcacatctccgaatagtccttactattttaaagactaaccaactgtttgctaaagaaacaaagtgcaggtttggtgtttcacaagtggactatctgggccacatcatttcagaacatggagtggcagtagacccaacaaaaatacaagttgttcttgaatggccaattccgacaacaacaagagaagtgcgaggatttctcgggttagctgggtactaccgcaaatttattcgtcactttggatgtatagcagctccgttaaatcaactcttgtctaaagaaggatttaaatggagtgaagaagctgaactagccttcaatcgattaaaagaagcactaacatcgccaccagtcctatgcctacctgatttttctcaacaattcgtcattgaatgtgatgctagtgggatcggaattggagctgtactttctcaaaataatcgtccaatagcttatttcagtgaagctttaaagggatcagctttgctattgtccacttatgagaaagaaatgttagccgtcattaagtcgattcggaggtggcgtccatatctcctgggcaagcgatttatagtccgcactgaccaaaagagccttaagtatttactagagcagcgaattaccactcccgcacagactcggtggcttccaaagatccttggctatgattacgtaattgagtacaagcgtgggtctgaaaatcaagctgctgactcactttctcgtgtggttgagtttcagttcacatccatttcaaggccatgtgcagattggtggccaaaattacaagaggaagtgcaacaagaccctttctataagaagttgatgctaaagaaacaaagtgcaggtttgtgtttcacaagtggactatctgggccacatcatttcagaacatggagtggcagtagacccaacaaaaatacaagttgttcttgaatggccaattccgacaacaacaagagaagtgcgaggatttctcgggttagctgggtactaccgcaaatttattcgtcactttggatgtatagcagctccgttaaatcaactcttgtctaaagaaggatttaaatggagtgaagaagctgaactagccttcaatcgattaaaagaagcactaacatcgccaccagtcctatgcctacctgatttttctcaacaattcgtcattgaatgtgatgctagtgggatcggaattggagctgtactttctcaaaataatcgtccaatagcttatttcagtgaagctttaaagggatcagctttgctattgtccacttatgagaaagaaatgttagccgtcattaagtcgattcggaggtggcgtccatatctcctgggcaagcgatttatagtccgcactgaccaaaagagccttaagtatttactagagcagcgaattaccactcccgcacagactcggtggcttccaaagatccttggctatgattacgtaattgagtacaagcgtgggtctgaaaatcaagctgctgactcactttctcgtgtggttgagtttcagttcacatccatttcaaggccatgtgcagattggtggccaaaattacaagaggaagtgcaacaagaccctttctataagaagttgagttagtcacaatcactccaacaactagtgcaacgggatggagtttggttcaaacatgggaaaatctacttgagtcccacttcaaccttaatccaacaaatcattgaagattgtcattcatcaccaacaggtggacattttggattccataaaactctctcacgcattaaacttagtttttggtggcctaacatgcgtcgggtagtaaaggaatttctacaacaatgcgaaacatgtcaacggtacaaaactgattgcatgaaaccagccggcttacttcagccattacccattccaaatcagatgtggattgaggtgtcaatggattttatcgagggactaccgctgtcaaatggctattcagttatcatggtggttgttgatcgcttaacaaaatatgcccattttgttgcgttaaaacacccatacactgctgttacagtggctaaagcattcattgccaatgtcgttcgcctccacggtgtcccaacatctattgtcagtgatcgagataaggtatttatcagttctttttggcaaacactattccagttacagggaactaagctatgcatgagttcaagttaccacccccaaactgacggccagacagaggtggtgaaccgcactttggaacaatacttgcgatgttttgcaggtgaccaaccacgaaaatggtctgaatggatttcttgggctgaatttagctacaatacatccattcattcatccaccaaaatgacgccatttgaagccgtctatggcattccaccaccacatttgctaacttacattccaggtacttcccgcattcaagctgttgatgagtacctacgtgatcgtgacaccattctacgtgaactccgttataacctttcattggccagacaacgaatgaaatgtcaagcagatcaaaaacgacgggaagtctcttttgatattggagactatgtgtatcttaagctccaaccatatcgtcaaacttctgttgcctttcgagcttcaatgaaattggccccccgtttttatggtccttatcagattattgaaaaagtgggtatagttgcatatcggttagcccttccaccaaattctcaaattcataatgtgtttcatgttagcatgctgcgcaaacatttgggtccagtacactctcctatttcaagtcaacctccaccagtgtctgatgattccattattcttccacaacttgaagctgtacttgatcgcagagtcattcaaaaaggaaaatatcgtcccaagtctgaagttttaatcaagtggaaaggagctccaagagaagatgccacttgggaaaattaatggcgctttaccaggtcgtatccaggttttatccttggggacaaggattcttaagtggggaggaatgatacgtggccttgtttactcttagcaagacttagtcagtagtttgttacaatttattccacttaataagctagttagaactagtcctaagcatgttcacgttattgttttagtgcagatgtgccaggtgaactggccttagtcttttcctcatttatagccttgtttgttaaattttgagctgtaagactattataaatagtcagtcttgagttcaataaaggacagcaaatacattacaaatatccttcttctcttcttctctcttccaacttctccacttataattcagttccaacactatgatagtgatggtcatcagcattttattttcagcaacctttcaggtcttagtgtgcattgagaagttgcttgagttattcctcttttgggcatttcatttatgttatcagaaagaaaaacgaagcatgtgtaaaaccaacactatgtaactccaaatgaaaaggaaatcctatctggacagtgtcccctaagatccaaagcactctcttgatagctccatgaaatcccataagaaaaggcaaaactatctgaattatgctccttaacatccaaagtgctctagatagcttggtggtgctctggattttcaccatcatgcttttctaacctgaattcaaccaactgcagttggttagaaggcttaaataccaagcagcccataattgcttaatccctttaacttaagatgttgtgaccaagaaaatagccaacacttgatggtcttcctgcctttgcaggggctcaatttgaattatataacttaacctgtaaaatatagtgtgaactcgttttatttatccagagtgtctattatcaatttacatttatcattatgtatgacaatgcatctggtcattgtttgctagggatataaccttaatgtaaagtaatatttttagcccaagtttgtcttgattaacttgcatttctgctgagttgacaaatacatttatttatttgatgtgtaatctgtttgtttattatttgttttgaaatatggtatttctgcatccttcacgtgttctgaaccattatatcaattattcaatactgcctctatagctacttttattactttatttttaggtttctgtggtgaatcctgcc

SEQ ID NO: 6408 - DNA, 1775 bp, Ricinus communis
  Intron number 1 from transcript 29854.m001120 (locus 29854 .t000031) derived from phytozome v7.0 (chr-ID 29854; pos 7 96036 to 797810 reverse strand)
gccccactgtaaatctttctcctttccttttcacttctttgatttcctttctctttttttttttttttctttttcactttattcttgttttggatccctaccctctttcattttgttgtttctggatccttgtctccatctgggtatttctgtttatgttgattgaattggactttttctgtgttataatcatctggataatttttttatgtgatatcttttacttatcttaacttcagtctttccttttatttgttttgtgggtagtttcatgctagattatttattggacccttgaattttggctctgatttggtttcatgtttttatgtgcttgattctgctattgctttaatgcaactctctttataatgagttgtatataggatggcttctctttgctaattggcttttacatcataacctgatattacatacatgtggattgcaatagttctaggtctgtatattgattcgatgaggtgagatcgaacttcaattgcacatgcaaaatcaaagcacttaaggctttccatattctgttcttgctacgaagaatatgaactctcatgttacaaacaacaagattttgttaacaagtaaagcaagagacttgagacattagttggttgtctacttggaaatgagtgttagcagttgctctaaagagggttgaagttgagatgttggtgagctcattcatcatggtcagtatatgtcaggacttccttttgaagcctggtctgctttatggtcaattagtatttaaattttgaactcacaacctttcaaattcttagagatgcttcttatatctttcttccctctcttactttcctactctctttcagaaggagccttttgggaaggatatggtggctttggatacaccacttctgaagtattgccagagatataggtgaaaccattttggttgaattccattagttaaagatgggttccgggtttcactttcttgacagtaaggatattcatccgaatctcaaaatccagctaatattcttctcattttatcaggaaaggagttaatactctgagtagaagttctaagggtacagtctgcattattattcttcaagtcgaaaactttagctgttagctttagagtcaaaaggactgtaaattcactcaagttcatccaactgtcttctaacttaatggtcatgatcatgtttgtttggcttaactaccaagggcagaggagaactattgtgctacaattgcttttgtttaatcttttgtatcttcatactaactggataacaatgtttggcattgtttgcttttcctggccttatcttctaatccctgaattagaactcaatctgggcacataatttattttaagtactgtctgatcccatttcacaaaatcttcagaaaagcttggtcttccaaattccaaataaactcttgttattggcattgtagaccctgtctgtatacacttttagtaaaaggaaagagagaaaagaatatggatattccagataatgtcttgctctctgcattattttcgtgttgttttatactgattttgaaatttgttattttatttgatgtaatcttagaataatatttcatggacctgtagcttcttaggcatattatttcgcatgtttaaatgatttttttgccatttgaatgtggttctgcatcttctttattgttcaatgtttgattaacacttttatattattattcttattgccttctcagctgaaaactgtaagagaggcagcaaaatttgcttt

SEQ ID NO: 6409 - DNA, 5601 bp, Ricinus communis
  Intron number 1 from transcript 27651.m000097 (locus 27651 .t000002) derived from phytozome v7.0 (chr-ID 27651; pos 3 3944 to 39544)
gtgaaacatcggccgaggaaggtaatgtttgtgtcacatgttgctttctatagctgtttttatacgttttctggatctactgcatttccagttacttcttttaaacacttgccatctcatatttggtctttgaggaagttggtggattagcgagtataggagatgactgtttttatttatggaattaattttgcttaaaatgtaggagataaaatgataactgctggtttgggccttaatgttttatgaagtttagaggataaaatgatcttgttcatcataaaattgtgacttgacattttatggttctctacatatagatatttactagggacctgcttaattgttgtggtcaaattatcattaaggccattccttgtgctggtgccttgcaatgagtctgatgggaaatattactaccattaagaacattggtattgttagttgacatatttgtgaatccttagggcatagaaattcctcaacaaaagtatcacagctatataattttttagtttagcactcatgccctcaagatcaagaaatgggttttaaacatagaatttctagataagttgctagtgattaaatttgctttattcacaatgtgaaagcatagaagcaagctgctagtcctttctggcaattgctatgactggatatttttagtacacaaggacaataaaaatagctggaaggctgcacacaccttaggagtgctttgtcttaggatcaaataagaattctcaatccttggtacttcaactgcactatgccactattcattgccaccgtaatcctaagtttagcgcttatgtagcagctttacagcctcttttttgaaacatgatccgttattgatgatgcagtggtattgaaacatttccaagtaatgaaatctagaaggaaaggtggcagcttaagtaaaaccgagctgcattctttttttgtgcgggagcggggataaaatggtttcatctcctagctatattttgagattcgattagcgatcttcacgtttcaggacatgatccggaatagactattaaatagtccaaataggcttctaaagaggtcttattggtttctagacgtggttcatgtagatagcgataaaagtcattaggtctttgtgtttaattggcaacggtcagaatttccttgcaacatgactcagtacaaaatgtaatatagtaatagagttgtatggaattgagagcttcaccaatacccatagttattaaaggcgcactaggcacatgcccttgtgccttagtcagccaaaggcgggtggtgtcacaaaggtgtgcaccttggtgcgccttgacttgcaggcgaggcactctcaaaaaggcgtgcctttgtaacattgttgatatataacttttctaatttcttttttaaaataaagtgggccttttatttaagttttaaaaggagcttatagtaggccttaccacacccaattatttcaattaaaagaaaaggattaaaataaaagaaagaaagaaaaagaatagagttaggacagccgttcaagacaaagggcgaagacaaagaagttgatttctttcaatttccaactcctcaagagtgaagacaaagaagcctttttgtgaaatccaatcagacattgaagcgttgatatgacgtgtgagactctattgaccccatcttgttgaaagatatagatgatggtaatgaatagttgatgcgtacaatggattaagagtctgataatgaagatgaattggtgtttgatgatgacaatttgacgtggggtgcggttgctagagctagtggagttgaagaggagacatactgtactagaggcaaaaatgtcatatcctcttcctcttcaagtgttaggcctaaggaaatgggaaggacaaaggcatcttctcaaatgagatctaaccctcctttagtacttagagatgaagaagaaactgattttgaagaagatgatggagaatatgaagaagacgagaaaatcagaagtaatcaacttgaatttgatgatgatgatgatgaagaaaatattgatgtggatgagaattaattgcgtttctataagtgttttaagaactttttagtattactaggattaggaagcttatatgttttatatctagaaacttttattgttaaaaatatgtttttttttgtcatcattatgtgttttgggtactaatactttttctttttttaatttaatttttttgtgtaccttgtgtgtgttaagcgtgtgtctgtgccttgcgcctaagctccaggacccctttgagcctctgttcgccttgcgcccttaataactatgccaataccatagttgtgcatttatactggggctctgccatgcaatatgtcctatgacaaccaactcatgtctgtttctccatttttaggatatctacaaaaacagtttctaaactatagacataagcattttagatagctagatgtattaatactcaactttatcagtatcatatttgtgtaattatcttatgatgcttcaatgaatgatgtgatccttgatgatcaacaccctttctttccttgctcattattgacaatgtacactagactctcctgtagttagtttagttggtagattaaaaaattaataaatattagaagtattaattaatttagtttatgaagaatgaaaactataaaatactacaagattgatgtattcaaaataaatcacatatataaacttaaaattaataaattacgatatcaaataaaaaattaattatgaaaatacaagttaaatacttaattttcaatcaacaagttattgccatgacaaaatggatgttctaaaatgatttcatgatgattacactttcttttaatagataatataattttcacttcactttctttgttttggtggcatgtgtaaaaataaattctttgcatttgataacttctaaatttgtaaatttactactattataagcattcaaaatcaaatactagcactttattcggttgaaattttattaaggaacttatttaatttgcaaaaatatttcttatattttatgtttgaaataaattacaattataagaaaatttataaagataaaaggcatgagtcaaaaatgagaaaattaaatgaaatattagatttgaaagtggtattttagttttataaaacttattggcgtatggaatttatttaaaaattctatttattttgctagactttaatttagatgtaatcatttccattggtttaatgaattagaattctaagtgaactttcatttcaactaaacacataaactttgaatttgtaaataaattctataaaactttatgaaaatcacttcaacataacacaataaaaaaaaatagaaaattagcatttctcttctaaatattctctctaataattagcaattacaagtaatttttctaaattctataaattattgagcaataggcttattaattattcaatgagaagtgaaattggtttctcaaaattttattaattaatagaattattaatttattaaatattaaatataagagggtcaattatatatagaacaatttatgttgtgtacttataggaattagtgtttaaattataatacatggagagaagttcaaatactgcactaaggttacttcaagtttcatcagtaaaatgagacttttccctactagtaagagtgatctaggaaaatgctatgagattgagttaaacagtttctgaattctcggtgtgtaggttaaataagttttttttaaaaaaaaaaaaatataaatatgtgtatagaagtttattatattgttgttagttggtatttatgtttgaagagattgggagataagtcatcatgcatgtatcatgctgttaggttggctgcagaaatgcggttagttttttttgcttcatttgagatttaaaatggaccatgccttaatatttaagctgtttggatggtaaagagtggtgtctattattgtgggcaacattgaatagcttggaggcagtattcttctgttatgcgcaatctatggttggagaatagagaggaagtttggtgctttttggggttcgggcatttgatcacctgtaaataaatttggagaatgtagagaacgtgctgtgcactttaaggatttggccagctgatcacgtggaaataaaattgagaattatttattctctctgcttttggttattttaaattgatgttgaattatgcagttattttcttgagtttgttaaggttcagtttttgacctcttctttcttttttctttttctttaggaacttcaattttgcagtttgtcgtagataagttttatttcctccgatgcatctactttattaataagaacgtgaatcatggcaatatatgcaattatgttgcaaaggtagaaaatactgtggagtgaatggtaatggtgaagaatgattgtggaactatcatattcattagtgtggttctgcaattctatctttcttttgccaagtttaattcttatttcatgttctatctaccaaagtattccccaacctaaaaaagttcaattcttaggagagggaagttttagcttttaggtcgagtgtcttcagtgcaatacctgttcatggacttggggacttgatcaagctacctggcctgatcctaaagtatgggtttgagctgacttagcttatacttgacaataagctcctctggtcttggatgggtctccaattttctgtctggattgggctaggcagtcatggtcttaggcatttaaactccagtgtagtcaactaccagttatattaagtacttccctcttttgatggtacaattggttgactgagtcattaatttgaattaaaattctacgtttgatttgttatttttatttttttaaattccgtacagcatgcaggattgatgccacatgtgtaatgcttggttgcatagttaagataaatttcgctaatttcgtggtccttgtactaactattgaattagtgtttggaatagagtttgctgacgtttcgatttctgatatgtatatgcctgtatgacatatatatgtaaatgtggtaaaacaagattattggtttaactactggattcaaatatgtcgaactagtcaaatattgtttttattatgtgttgatacttaatagaattattgaacctttttttttcttctctaatttttaccatgtatgggaactatgtgaaagagcattgttactagatgtggatatgtcttgcttgtggaagctgtgtgccatcaatgcttgaattttagtgttgctaggttgttgtagttgataacttggtataagtgcagtatgatatcaataacaaattagattaagacagtgaacgattgccatttgcattaaaacgcgccatatatgctatcccagcaaaccaacaatattttggcggcacacaaataaggaaagaaattctggaatacaatgtcagaaatttcatgttagttaacttaatttagagatgaatcttactatgtaaatgtttaaataattggtgaacttgtaattttccattttcataagataccttgatctgcattgctaggtcgac

SEQ ID NO: 6410 - DNA, 3606 bp, Ricinus communis
  Intron number 7 from transcript 30074.m001376 (locus 30074 .t000043) derived from phytozome v7.0 (chr-ID 30074; pos 3 20620 to 324225)
caatttaaatagcttggaaattaaattaaaggtaatgactcctctctatctaaatctatgagtatgtgagggtgcacttaagtgtatacatgtgagagcatgctcactattccgcttgtgattttttgcacttttacattaagtgaatttgctgcatttatttagagggtgtttggttcagaggtttgatgcaactgataactgtttcttactgaacagctatattaaagcgtgtgataaagatttaaaaaacagcagctgatagctaatttaatctcgattagctgcctgattgtatgagttctattttagagcttttccttatgagctgatagctgatttgatttatttatttattcggacactattatccttattaaaacttattaataataacttactttaagttgatattatataattagattttttagatttttttatattttataataaataattattattttgaaattagtcttaatagttaaataattataatatctataattatagtacttgaaattagaaatttttattagtagaatttaaatttaaatttctacttttaaactaacttttataaatattttaataataagtacaattgagctaaagaaaataaatattttaataataagtacaattgaactaaagaaaattaattttaatagttttaattattgtaagttatttttattaatttgtatcattgaatataatataataaaataaaatatatttaacaataaattataccctcaagagtcatttaacatattagcttcaactgttaataaaattttatcaaacggtttaatttatcagctatcagccaccagctatcagccatcagctactagttgtattgatcagccgaaccaaacagtcccttatttcaagcaacagtttgattacattacaagagaacaaagaggcaaagattgtattcttcatttattatgataggttatatgctatcaaatagctaactaaccatgatttttgttgaaagaagagctaaagatgcatatttttatggaaagatgctatttaacttgtctgctgtcattttctttaaaattctgtgtgtgaataatgactggagcttaactgaagatggtgtttgaccaattctgagataactgagggtattttggtggttgctgatgtgccaacatcttgggaaagcacaaattagtatatgcaaatttttttgtatctctgtcagccaattatccatcaaggaatttaccatctataaatctcaaaatatccaaatctcacatctctaaagatcattgtagagctagcattgtcatacggttgctgcaaactaaagcttgagctagtttaaatttttactagaatctgctcaaatcattcttgagtgcttgaaaatattgataccacatataggttttctttcctttttcttttcggaatgcattgcatacagatgcagttttagctccttcatccacatgcaatcagaattgcatgcagtggattacgtttttcacttcagtcttgtagttaatacatgttttatggaaccaagcaatacagtagtgatcctgggtggcctattacactcttatttctagtttgtcctgaagaactaagtggttgtttacttactgtctgccaatgattttaattatctcttcattgtaatttaagagctatgcatagagcatattaacccatgaagcaaatatgaagccccaaaaattttctacgcaggcaggaaggctaggcatgattaggaagctagtctcacaacgatgactgaatttctgattgatatacatttgcacacccccaggtgcctgtcatctaagctgagatcgctgaacccctttggacatggcctatgtacagtttcgtccaactttcaattttgtcttgcaaacctgcatattctttgatgatgttatcgactatttcttccaattctcaaatgaaaattcaaaatcttacaagtagcttgactgtgtttatatggtggagaatatcacaatgcaaatggacattggtattcttccggagtaaatctgaacgttgctgcttgagtgaatttacagagaattaagtgagattccttaaagagatttctaattttagccgtgaagaatgattaaaatagtcgtcagcaaagatgaaggcataattcacaataagataaaatagcaagattcatggctatttctattactgccaccctttacttttactatggttttggggcctgttatagttttgtaaatttggttcttcgcatgatgtagaaggtgttaagtataaatcaaactgtgaatatggcaagaattaatttgttgttggcttcttcctgtaaactcagcgaactgtacgactgtcttattacagtaattaatagacatacgaacttatgccaggtttgtgttcttaattattggtcaatcataggatttgagatttgtgcttggtattgcataaaagggtaggatggaacgaccaagctaaacatgcattagttactgtccttctcatactgcttttgggaggcaaaaaaatgacatagacgaggagtaataataatggcagttttctactcttttagaggaaggaaatattttctgtcaattacatgttggtaattgtagcggagttaaagggaaacatagataaagcagcgggaatataatatattttcttggaataagcaaaaagaaaaatcatttaaattagtcttacatgcataagaaatttgcctgtagacaggcaaaattttgagtgtattaattgtgcaacagatagtgtctgtgattgagttgccaatactctggcataagtgatactgtagtggtggacgccaatgtggaaattgtactaagtaatggcagtgtcacagttgttgaatgttgctggtggaaagagggtcagctggtagaggtttgaagactggtaaggactgctgcagtatatgatactgatagtttagttttctgaaattttttattgaaaagctcatctgtataagtgtattctatatggtataaattcaatttacttggaaaaagatggccaaattatcttcaaagccgtgcattgaattttgcaaaggtaagattatcaaagtttacgctttggattcaggcataatttttagtggtatcatagcatataaaggaaaacagttgattcattgcagtgggatgacttttgggaagaggcttaacttggcttcaaacccttctggtttcatgacattgattaagacagttttcataatattatcagttttcataatattattctatcttctatgggttgagaacatgctcaaacgtgccatattacattggatttttattatatactctgtaagatggtttcactttctatgctaacaactcatatagaaaagataattaaggtgaacagttaatcagtaatgtgtctattactaagattactgattgaaaaatgcctcaattacatagtgatttgctgatttagaagtagtatatcatgcaaccaccatttttctacatgagctatttgctaacttatctcatgttaataggctcctaaggaggcattgttgcagactcgtattgc

SEQ ID NO: 6411 - DNA, 1504 bp, Ricinus communis
  Intron number 21 from transcript 29686.m000889 (locus 2968 6.t000036) derived from phytozome v7.0 (chr-ID 29686; pos 303362 to 304865 reverse strand)
gatctgtttaactattctctctagaggttagagttggactgtcaatctccttttactcttgtgtactgcattgtaattggtaaaagctgtgtgaccttttctagcttgctttctagtttgagatttttttgtttgtttttgtgcataactgaaatctaaagcaaacattatctgtttgagaagtttttgaggtccacttgattgataaaaaatatgcatagcagaagcaaaaaaatgttaaatgtatttcttttccccgcttctgagggtagcaaatatttttgccttaatgcactgcttatgtcttgaaattcataggatggatatctgtattctacttttaccttgtttctataacttgcttttgttatgatgtttctaccgagcattcttttgtatgaaaagttgcattttatttcatctaagaagtgaagctttttattactgtcaaacaatacccgatgattccatgagattctttggctttggaatttggagaatgtagtgggataaattttaatgatttcttcccttttacttgctggtgtgtattctccattcatatgatgcaccaactccttctgggggttccttcttcttttttccttgtgatgcttttgataataaaacataaggagcttaagaaaaataatgcaacttgagagaataggctcatctagaaacctaatggagaccttttgatggtttgtaggtggaccttttgatggtttgtaggtggacatccaagagagattcctttggaagggggagatatcatagtagatatcatttcttataatggggcacgattactcttgcttaaagtgggttgggattcaatgaagcctttcttgggaagtggttatggagataagtgaaaatcactctctttagtcatttagataagtgaaaatcactctataatctatatggtcaatcatcaaagtcaggttggaacatagtgatgggatttcattgtctagaaatcctcatggtgtggggtgatggaagcgtacttatcttctttgctttcattgcttttgaagtgggatttctttagttttcatggttcttagcatggagattttcttgtaagaaaccaatccctacgtcttttcatttgtttcgttcagggatgctttgactagcaatatctttaatatgagtgataatcattccaagttttgaaggaatctccatgattgggggatggagatggtcttagtttgaagaaagaagtttgtgaatccaatgagcattttatgtgaatgttgaccgaggaaggtgattgttactgtattgtttcaaattctactttttagttttgttactaaatttgtgtttttgttatctgaattggagttaccggtgtgcattatattgtgtaaatttcttaatctaattggctgtgaattattgatcagcagatttttgaaaaaatgcatcatataatctgaaattttaaagctttgctatacattgttggcagctcttgctggaaatt

SEQ ID NO: 6412 - DNA, 6549 bp, Ricinus communis
  Intron number 1 from transcript 28838.m000258 (locus 28838 .t000016) derived from phytozome v7.0 (chr-ID 28838; pos 1 21085 to 127633 reverse strand)
ctttatcaggttcttcctctctcaattttaattaatttccatttttttttttggctgtttttcatgatattctcatgtttttgcttttgctgttgatgtatgtaatgtttgttcatcatcgttttctaaaggcataatactgcctcttttcccttcttttgaaggattaactatatttccttccatgtgtggcccgacatgttaattttgagttctatctggacattgatgttcctatagggagctgcacttactacatctctttgaaaagattatacaacaatttcagattttattaaactctgatatggtagctacagcaatttttatatttattatatttttaatattaattttggaaacataatccatatactaattagtaagttactttccgtattaaaaaataatttcaattctaaaaatattatatattaattatgaatttattaatttaattaatatatttactaatagtattaaaaaaaagaatattagagtacaaaaattatattaataaccaattgtaatattatcaatgatattatcaattgtattacttattaaatttttactatatgcatttaatttattattaattaattttatactcataaagtttttaaataaagaaatagattaaattagaagaatatttataattaaagtaatagcaacttgttatgtaataatatataaattaagagcatatcactactagtattatataaatttagaattgattggtcttatctgataatatgtaatctagtcataatcctaatcggtaaatatatctttctgaatataaaaaaagtaatatgaagtttgacttttttaattttaaatatgtaattttttaaaataaaaaattataatgatttataaatcgaaaaaaaaaaaattttactttgatcaaccatcattattatattgctcgtatttgataagatgagtttatagtttaacaatttataattcattgattgactgtttttataacttatgaaattaacttgacggtagaataataaaattagtagctgttaaactctaaatcatgttattaaacgcgaataataataatatggtaataatagctgatcagagtaaaaataactaaatttttaatatttttaatagcaaaaagtattttctatcaaaatttaaaaccaattttttttttattcggaaaaaatacagaaactatacaaaaccaatgtatcacttttttatttatgaaaaaagggggctggttgctaaagaaatggagaatgatatactaataacccaaaacattcaggagggcaatctttttagccagacattgcaatcatttggactagctaaatatgccagcatatgggccactttgttaccatctcttcttgcatatgagactccgatgcttattcatggctaaaatcataatctactcttatctatagaactcacatgaaaatcttaaaaacaaaaactcaggagttatcactttcaaacagtaacattgctaaggatatgtatcccgagctaatacctggccttctcatctctaataatcacctcctaagacccgttctccttcatatttcttttataacaaggattttttattattactaattaaaataggaaaagaaatatcattgaagtgcatacatacaacaacaaatccgatatatttgataaggccagaaagaaattagaataatatctctatctacggttcaaatagccactctttttcaggatattacactacgtttctaccgcaggatcggtatattctttaggtaaatcacagtgggtgcccgcatatcctttctaaaaggaaattttgtttcttttgtgggagtgcttgttaagtttctccatctttcatcctctgccaaattcatcgtcttctggtgagtaatagtattggtacattagcagtgatgtctggaaccttgtgttggacgtatgtttataaataatcatacatttagtccctaaacttttattatttaccatttagtccctcaactttttaattactaacaacttcgccctgcagagtttctgattaacccttctacttttctttagtctttcaattaaatccctaactatttaatttggaccaaattagaattattaaagatagaaaatcacttatttacccttgcttttaaatgtactaaaatacctctaccgacaccttaaattataaaaataccaactacacaaatttttattaaaatcccatctactaataaaattatatttttaatctttattccaaaatttatttatcaatttaatcctaacacttaattaatcaatttgctaaaatttatcattccctaaataaattcttttataaaatgttatttactaattctttcgtaacttttaaaaatagaatttaattcatatattcatattagaaaaaattaaatggtaaaaaatataatttattttctaaagaatttatttaattaatttcttaaaaaaaataaactaattagatataaaaaataattcttttatttttatatagcattaaaattctattttaaattatctcaattcaattactcaaaataaaataaaataaaataaaataaaaatttatttattaattattattaattattaatagaaaattccggatattacaggattgcttgttaagtttatccacctttgatgctctgccaaaatcattgtcttctggtgagtaatagtattggtatattagcagtgatgtctggtaccttatgttggacgtatgtttataaataatcatactatttattagaaaagaaggccaatcaaacttgaaggcactgactccaccccaacagcgcccttttggctgcttgctgtcaactcaactcaaatttatttactcttacgtattttgtttcacatacttatcgaatataataattatatcaatcctgataaggatatacagtttgattttagtagttgaagttcgtgttacgtatcttaaacctcaatgattgatcacttatcagatcacaaaggtccatctcgcaactaattggcattactaagttgaatcttatttggaggttctgccaagttaacaactatttttccttcaacagttaaattaaatctattagattaagatccgtttactagatagccgatttaattctaatttatcaattttattttatatttttttattagtttagagattatttgaattctcattaaaaatcattagtaataattttttttattttaaattgatatataattattttttataattcatgataattaattgttattctaaatcatacttagtagttaaacaattatgatatttgaaattagaaatttagtagaatttaaatttaaattttaaaataatttttataaattcctttaataataaatacaattgaattaaatataattaattattatttttaattattataaaataacatgcatttaaagattagttatattttaaatgattaattaacatactaataacagttaataaatttcattaaataatttaatttatcaattatcaactattaatcattaattatataaatcaacagaattaaatagatagttacatgccacaaaattaaaacaccttttctcatattaattaggtcaagtttggtgggtaattgaatcattgatagaatggaaatggaaaacatgcatgataatttggtccccccactaacgagagaaacttgtggtgctagtagcctcattactgacacttgatttgtcttcgaaaagactttcagtccgaaagttaaagccactgaataaagagctatgcacagccttttgcgtaagatgattttgttggatatggatagtgtaaggctattacattgctatttagagttcatgaattcaaataagaggcaaagttttattatccaatgttttagtgaatgttttggggtttttgggttattcgtagattatctggattgagaatgatgttgatatttttgtcagattgggtgtgtataacctcaaatccaataacacaaagcatttctcacaagaaataatttaacccttaaaattaatggtccccgaatatcatgcatcctacaagaacaagacaatgttatgttcatgaagaaataatttattgaggagatacacacatcaattaaaataaaatgtaaatggaattcatttatttaaaaggctattcaccttgataccaactatattagtctttctacggtcttgatatttttatttttcaaaaaagatattgcaaaaatttgaaaattaatgtaaaatattatatttctacggtcttgatatttttatttttcaaaaaagatattgcaaaaatttgaaaattaatgtaaactattatatttgataatataaaattatacaaaaaatactataaaattataaaaatcactgcaaataatataatatttactatatgacttatgttggttcaaccgacacttatgaacacgttttgataaagtttggcatgaacggaccaatataagccttttgtgttttataaaaaaataatacaaagttgaaaaacattataaaatgtagttcatagtaaatcgtggaacttatgtgaaacaaatactataaaattttaaaaagttattgtaagtgattgaagttattataaaatttctaggcaccatttttatagtctaactttctcttttatcctttcatttcctaacccttttttctttaagacaaaacctaaggcttaattgttgttggatcttagcataagagatttatgaagattgtttttacgaaataaatcttattttactttcataaggcattattgaatgacaaagtttaatctatcacacagtggtatcggtaaagttaatatgtcagaaaggtaaaacaaccatacaaatatttattagactatttcttttagagaaaataaacaaaaacagatgaagggacttgtgttttggaatgatatagtctatgtattatgttctttttttcttttaaagaatgagttcttacattttcatcatctttaataaatatagcattaaagcatctttgagaataatgtttatatctaaaaaagttatttgtattataaagaatattttgtttaataatcggatataaagagtaggaaaattattaaccattatctttttcttacttaaataaagaaaaataataaaattgagcgaatttgacttgtgaggcataaagggtcacactgattttttttatatatttatattcatttaaaaaaaaaataagcctgttgagttgatgggtatatatcatagaagtagcactgattttttcctttgaaatatttattttttaatagtatctatgacgtggcatatgagtgtcagttgatgggtatatatcgtaaaaataactttttttaaacgtgagattttattttgatacttttcatctgaaattaaagttgaactttaggtgttaaataaattaaaaattaaaaattgaaaatgaaatatgaaatactatttagtgcaaaatttgaatgcacttggctatttaccctaaatttcgcttctgtaacatgttttcagtgacctgacagagaaagggatgacagcaaacatcgttggtctgcactcatacgtccatttaatctcgtctttcttttcctttaataacatgtgatatattgtaacccaaaaagaaaggtgatatatttatttatgtggttttcatatttgacacttctaaaatatatttgtgaaagattattaattgacactagagaaattcttatataaactctgtatcctttaagattcagagccatgtatttagagttgcaaactagtaagagaagcaagtggtaacaattttcgttctttcttcttttttcgtttttcataaaactggtctttgtcccgttctgcagcaagccataaaataacattatcttccagatccctcacggcacaaagctttcaacatatccagcccattgcttgtcagaaatattgactgtcaagttgcttatctctctccaacttctaccttgtcttttgtctctgcacctgtaaaatctatctatgccggccatgtctcaagatgaatcattgactgtgcctctcatcgttgatgaggagcaacacaggcttagatacaaacttggagatgttgagtcaaatggcaatcatattagcgaaggaactacctcttttttgaagaccattttcaatggactaaatgcgttgtcaggttttacttccacttatatttgcttttctttcatagctaaaactttgttgtttgtttcttgttggtgaataactttagtgcccaaatatgattctattcttcttcttcttctttctttttttttttttttttttttgggttttcgcatcatgactgtattatggctaaatctaaaagctagccgctcgttgcatgttgggtgttcatttgctaactctaactaagagctaatttctcttttctgcttaacattttcaggagttgggatactttcaacaccat

SEQ ID NO: 6413 - DNA, 4580 bp, Ricinus communis
  Intron number 10 from transcript 30009.m000828 (locus 3000 9.t000008) derived from phytozome v7.0 (chr-ID 30009; pos 602218 to 606797)
aacaaggtaaatgctctagaacataaatattatttcccattcttttaacgagtatacatatggatattctacttaattcatgcatgtttgttcattttgttactatttacaatagtcaactcaactaagctttatactcaactcaactaagctttaatctcaaacttgtttggtacaattatttggtttcttttcctctattccgcatagtatcagactaatctttagaaaaatttggagctattaatccttttttattattttccccatcatcatcccaggtcatccctttctttcttatctcctaactttagtaagctcaacttttcatatttgtgcatttgctgttttatgatgcatgcatctcaatctccattttctcaactttcttctatatgtgccaagagagagcatgcgggttgtttcccttgcacaccagcttgatctgctgacttatagttagttgttttgtattaagcattccttatgagatgctgatactttctatttcgtcgagccccaagcttgtggtcctcctttgagaacacgtctttagcaactgggagacagatttgactcggcagaagctattgatccttcctgggagttcttagtctagtctagatcgtttttctcgacagtaaatcttcttccttatccttgtatttccacactcactttaacatacttatttgctatgctaatcttgtgtgttgtttctgtagcgaccaaaatttattgacccatcaggtcataaacaagttgaatctcagatttattagactttcttttcaatagctggagttctgcaatcacattggactatagttgcacttctccattttgttcaccatctaattttgtgacatatggacgtacatcccgaaccaaaataagtacacccagataccctaggttcaacaggaaataatgttttgtttgaaaaaagaacctgataaggtgcttcaccatgaacaacaaaagatgacttacggttgatcagaaaacaagttggggaaacatcagcctttttttaggaacttgcatttgaaacaataaagcccttgcagtttttaaaagatgtctatttctttgctaagctaccctattgagatggtgtatcaacataagaagtttgatgaagaatgccatgttgaatcatgtaatcttgaaaattttcagatgagtattccttcacattgtcactttgcaatgtttgaacaaacacattaaattgagtgttaatttcagcatagacagttgaaaaatgagaaaacaccttgggataatttttcattaaatgtaatcatgtcatttgagaatagtcatcaataaaagtaacaaaatacttaaacccagttatggatgtaactggacaaggaccccaaacatttaaatgaactaattcaaaaggagcactagctcatttaccgactcttggacttgaactaagagaatggtgtttagcaaattgacacaactcacactctaatgaagatggaccctaaaacctaggacacaatttctataacacaaaaagagaaggatgactgaatcgataatatgctccaaattgggtaaccacttcaaaacaagctacggatcttggtacttatgtaccaaggatgtagagggccccagactcttgtcccttaccgtaatctttgttgtaagatcttggaaaaacaaagaatgaatgagatataacaatataaagctcgagtgattttgcttataaaactcaagttaaaagacaactaaggtaaactaaaaacagatgacgaaggaagtgtcggagttagaattattgtgctagacctaagaacaaaagacatggacccatctgtgagagtaacgtttgcgcgattgaaaggtagaaagcagactagaattacctgtcatgtgatctgtgacactagtaatgacccatttggaagaggaggaaagaaggcatgtattgtgtttacttgattcaacgataatgaatcttgatactgagtgaacttggcatattcatctgcagatatataacaaatttcttaaaggtaagagtagctgcaacatgagttgattatgccttcgtattttgcaatttcctgcaatcccgcttcatgtgactagacttatgataatagtgacaaactattcctcccaaatcttgtccacgagtatctgtgtttcgatcataggtactggatcgatcaaagttgcttgaacccacccctttactaccattcttatattgagcctctttcttgaaatccgtaaagtagctagaaagagacctatcacccttttttgtacgataaaaggctctgcaagcgtcagaaatacgagaaatatttccctttccagagtataagaaatccagatagtgtattagttctttcacatgttcataatgattaaccataccaattacctaactctcattagaattgcatatatgtgtaagaataactgagcatcctcctttagccacttttgttttgaatcatctgtaggtggatcttcagtcatgattatcaatatctatactttgcagataaagttgaactgttatattccagtcaaactaattagagccatttaggttatgttttgttatttttgatatcataggaaccacatccgtcataactacggatttcttataagtcattctactaaaaatatgcagagaaaacagaaaactaaaattttctagcaccaagaaaacccgaacctgttacacaagaacaccttcacccaaatgtcaaaagtaccaaacaaaacacatatatgtgcaacagagagagaggctagggcagaaatcttctgtcagcacatgtgatgcacatgctgttgatcgccggattttgtagagcctccagtcgacaggtggcactccttagaagggcagtaattaccaatgctcacttgaaagtgatgacttaattctttttaccctaggctgcaaaattttgtattttattttttgttttcagcagtcccaacaaacaagaaaaaaaaaattctccacctaaaacaaaaccctaatttgcactattagagatctgataccatgtaaacacacaaattgagaaaagtatttcttgtgtatatgattcatcattcttatcacatatttatatacaaagtctcaatcctatactaagaagaaattctatgtcggaagaataattaaaatcctacaattcctacatttaagctatataaatacttcctattttacttgcatcttataacaatttgcaatttgctctcctaaaatttcactgtcataaggggtttggttcttttaagcaacttactttatttttccctgattataaggataaggtgcttctcctccactccttggattttttatttgatatcagaatcttcttagggccagtttggagaaactagtcaaaattgctttcatttggcaaagctctattccagaactgactatttttaacagcagttaaatgtttggtaaatatattctaaaaagtacttttataggcgtttgtccattaaattacttttagtgggtaattttgtcaacaaattactcttaaggggtaaattctgtccataaatgccataagcaattaaaaatttcagcatcctgcaagagctagaaaaaccagcttttcccaatatgtgaatcttatctacccacaaaagctatttcacctggctttgtagttaccaaacacctgtagaattacgactgtaaaatattgtgccaaatgggcacttaaacatccttttaaccacatcagtcttacatctccaagacacttccaaacttaattgggattccatttgacccaacgcttatccatcctcatctgttttagagctttctcgacttctgatgttctcagcggttcagtgtaactaatttttcttttgatctattgcaatagtaaagtctccaatgcttccttagtggttacggcgaaagtgtctatcaaagtagctcctccatccttctaaatgtcctctttatttactaaattattcatgatcattgattatgcacataacttgagttggttttagtatttttttcccttatctgtcagtctgtaagcatctcttcccctcttgccaagcttttaaaaaacgtccttttgggacattttctgccttcttttgtagcttttttgtgcgtcctcctttcagctagcttttaatcatagataagtattaccattttcacatttatagcctcttatatcattttgtttcaatatcactagggctggagatattatgtttttgtcgctaattttcatttctaagtcatgaatatcttgcaattatacttttactaaagacaaattattgttgcatcgtgcatatgtatgtagataggtatgtctgttttgcatgtttttacttttgttaagacttaaaagtggtcttgttactatagcagctaaacaagtttgcagtccttaggatcacaataaactattgctggagccaatattggacttcttcttcctgaaactatattttgaaggtgtattgtgctttttgcaggttttaagtgcacatttccgtgcttatattcaagc

SEQ ID NO: 6414 - DNA, 653 bp, Ricinus communis
  Intron number 6 from transcript 30170.m014070 (locus 30170 .t000482) derived from phytozome v7.0 (chr-ID 30170; pos 2 621591 to 2622243)
ggaatttgcgtgccctgctctcaacactacactatgtacgtagagcttttaaactttctaatatatcaatgcttctataatgcgataacatactatgtagaatctaaataatcacagaattttatgcaattactattgtattgtgcactatataaattttgtagatgatatatcttcctttactggatattcctttggatttgattgtgttagccattccagctagggataccttcacaatcaaccaaaaacatgttgtagctacattattttgactctgcgctgcctgtttgattaaaacacatcagtaatcatgttgtgcttttctgaagcaccatgatgaagcaaataagaattgctacgcaggttattgctccaaaaatgttagcctgtcatgcctattggttttattattattattattattatgaatttccagcatggattgtgttgtttatcggctttattgttctttttagttattaatattccattatgagtttccagcatcgatggtcttacatccagatgggctaaacggttttaagctcaaacacaaatactcactagcttttttttcttttttcttctttcaacgttgaccctttgtacttgcagatccttagccccgacagtggctggcagccaattcc

SEQ ID NO: 6415 - DNA, 560 bp, Ricinus communis
  Intron number 2 from transcript 30115.m001223 (locus 30115 .t000049) derived from phytozome v7.0 (chr-ID 30115; pos 3 27837 to 328396 reverse strand)
tttcctactctcaactcactgtcgctactggaaccgtaagtatttctaaacttattattcaacatctaattaactagctaatttgttgtggatttctgttattggtttaatgctgctataaattatagacaaattttaggagatatttatatttaaaactgtttataatctgaaacaaatgtggaatgatgaaggagatattcttttcattgcaagttctgaatctaactaaatggttttatatttgaccaaactagaaaatatgaaaatggtacaactccggattgtccttattcacagctaaacagcacatatgaataaataaacaattacagtgtgattaaattattatcaattagatacatctcaatcggtattaaaattgtctttaataaaaaaaagttatagtaaaaataggtatcagagtttaaactttgtttctaattgtcattgctaatttaattatctatctgaagtttttgtttgtaggagacattatgatattagattaaatgggttttgcaggtacagaagttctatcaatcaagaaaaagtcaaag

SEQ ID NO: 6416 - DNA, 2102 bp, Ricinus communis
  Intron number 2 from transcript 29661.m000917 (locus 29661 .t000019) derived from phytozome v7.0 (chr-ID 29661; pos 2 15831 to 217932)
aattcgccgtctcaacttacagcgacgctggcgtggtacgtgtcctactattattcgaccatgatctattgttgctattttacatttacattagtaatttttgaaaaattaggtttccgattgctaatctaggtcctttttttgtcaaaccctgacgccaagaggttgttgtgttgattttgagtcgtttagtttgtgtctggtagtaacgtttggttgtggatagttacctgatttttcaggttttatgatgtggaattgatttagataaaggatatctgaatatagagtttagtttggttgtgtattaatttgaatggagcagccttgttatgtgtaaattgatgtgcttgtagagtcctcagctatactactttctgtttttaaattattcacatgcttttttgaaattaaaaaaaaaaaaagtgaaaatataaagttagtaattgtggttcctttgtgctcaatgcttgattcttgtgactttagatctttctgatttggcattcagtgttgcggttcagttactttagctacaagcttgttcacagagcaactcagattcctctccttgcaatgttttttcttgtttgaatgctaagtgtgaataaatctagtgattgtctttctacacaattgattagtgacaacttttatttttctggaagtttggatctcgagtgatgaaaaattcttcagaattgaatgttaactcaagaaaacatttaaatgctacatgaattcatttttagtgcattctagagttgagttgggaggtactaaaagtagatggcttagaaggaaatttgcaggtagagatctaagaatggaaaagttgatgaggtctatggcggttcggagctaatggcattgctaaagtaacatatttttggggctacaatatttgagcgtgagaggaaaagcctaggttcttaaagggcctaagtcattgaatggagtttgaatgtgtaaggtaagtaataggttgatatgaatagaaggtgttgcaggtcctggatggtggtgcccattgacgagtggctggacaaagctagattcattcgggaggtggtctattagggtctgacagtgatgaagtaactgtttgtgaggtcttatgatcatgattgtttcttctacttctattttgtctgagctttgggccgtgatgcatgcaatggcaaacgagcaactttgccttcaaatgctattttctttaataaaatgtagtatgtgcctgtatgcagctacgtattggcattcttagtactctcccatagcatatttattccttgaggcggctcctgccgatgttagtgatattgatgacgatgaataggaatattttgggctcagcaatcgccttgtttgggttttccagccttctgttgcaccataaataaaaaagggaaaagaaaacttgatgttaacagaattgaagtgttcagttactgtgatgatcatgcatataggtgttgggaagataagaatgacattgatgatggagaagaacatcaaggttcatttgcaatggaacagaaactgatgttccatggtaccagtataggtatttgagtttattacgaatatatacaggttttatccttcagttcttattgtataaattagaataactactgatatgttaatagaaaattatcttggtttattgtttttttctaatgtttgttaggtgcatgcagaactacatatattgttgtaaaccaatttctattgagatgggtaacgattctctagcaatgccatgaaccttattcactattaggactggatacatgatggatggattattggtagattttaaattcttaatgcatcttgattatgcactaacgttattgtgatttccagaatgcttgatgaatcatcactgaagaaataatgtatcacttaattgtttttcttgtttttatactattgttcacctttagaataacttccctcaagttgtgtggtacattttggctaaatgttattttacaatatgttcaagctattacttcaattagatacagttttcaagagaccttatcatctcatttttaggccttgacatcatctgctcttaaaaaaggagggct

SEQ ID NO: 6417 - DNA, 9376 bp, Ricinus communis
  Intron number 7 from transcript 30174.m008606 (locus 30174 .t000003) derived from phytozome v7.0 (chr-ID 30174; pos 1 681758 to 1691133 reverse strand)
cgaggtgggttttattacggtcctcgacatagaacagttggtccagtcacaaatgggcttgtcttgtcttctgcctaatatgaaactggcccataacttggcaattcaaagctcaaataaacactccttggacgcgaggattagtggcagtaatttccgctccggttgaccatacgagctatttacttttctattaagaaatgttggcatgcataatgcttttagatttattctcactgtcgtatgatataaaccatacttgtgagagtgagagtgagaggataaaataggatacttaaaaaataaaatgacaaaattcttttgtttgggttacatcttcatcataagtttactctgttacttagtgttgcgccatcagaaaacaatcacgtggacaacaaaatgcaattccttgatgtcatataagacagaaaagaataataaaaaggatcgcagagtgtgaccctgtgcacaagttgctaaagtgacaattctttagataagatgatttgattcctttttctcaactccaaagccacctcagttcttcaattcaggttttcttatattcattttcctaatgttgcttacgactcaagtccctcctctaaagataatctgttgatgcttctcttctttatatatatatatatatttcctgcagtaacatttcgctgactcccatcgatggctgctgctggtcgatatatgctaaaataaaaaacaaaatcgttttaattaaaattatcccactagttccttaggttgtccaattcataatcattgcttatgtaataaagtataatttcaaacactttctctcgagtgtaatacgaacatatatatagagtctctctctctcacacattttctttcttggagattggggtatggtttgggattccctttttgagggtaatattcgttgttcaaaaagatggggcatccgatgcttcagaaagagatctaatattgtagtgtaagaatcaacccaaaacccacccacattagttgaatgaagttaacttgccaaagtcacctaagttgtaccagtgaagttttaattaatttgataactatcttttctgattacttaataaacaaacaacatcaaacttttactctttttatttttttaagcccattacataattaatcagctagcgcgtattacataataaaaatagttattacatattacagattgtaacaataatgatatatttctagacggacagtgaataaaaaaattcaaactctaaatctttccaattttaaaaaatgaaaatactaatcgattattctctaattttcaaagtaaacaattattattgaattaaacttcttctcattgctttttaaataaaataagaagcagatctatttgcgaactaaactaccagtgggaacaaatcagctatatatacaataaactactgttagctagggctttgccgtcccaacaaatttgggtagctagatgacatcatttgcggagaccttacatgaaaaccaccacttaaatcaccatatacattgttagctgaaatgtttatttttgtatacagtgacctattatgacaatatgaattcaaccaactaatgtgctaaagcagtttttttatataaaaaaaaccataaatattggagtcagattcagtatgagaggaaaatgggtatataaaataattttcaataaaaatgtatcatataaattaatggagtttgttctccaacttaaccaataattaaactgtcatggtcattgttaataggtggttaaagtaattgtcactgacattttattttcacctgaatccagggatatatagtaatagctaggcaattgacacacagtaccactgtctccatctgcatgtagatggaaggataggaaagttggtggaaaatgattgaattagaaatgggtgcttcctctgtccagccatcccccatttttgtgaccccctccctgcctttaatttctttaagagaaagcaagaacaaaaaagctgcctttccctcactactagaatgcaaaagccttttttcttcagggctcccccccaccttctacattcgtctagcaatgacaaatatcataatatccagctcctccccataattttggtggatcactaatttgctttgccattgaaacatcgcccatcaataacattttgcttctaaaaatatagattttgagttcaagttatttcttgtgctagatttaaggtacatgtaagagcatgactgttcttattttgtagcttacattcaattgagccactccataattttcttttaaaaaatgccaagtccaaccatatttctctagatactaatagagattaattgaagttaagtaagatagagagtttccaatggaaaatcatcttttcttttccggtctcttttacttttttctttggcttagtacttaatttcacaagttattttttaaaatttaattattcaagttagttaaaatataaatataaaggtgtgacaataagttgaatgggtcactatcccagcagaggctgcacaaaaatagtgtgtcatgttcaagagtagatttcatattataagttagtggtcccccaaaaactcttgggctctagctctggaaaaaagaaaaaaaaaaagagaacatgattagattccatagcttggagatgacacaaaaatttgttactaattaacaattgcaaatgctgataagattaagacttgatttgtcttattattgatcctaaattgttattattatatgattagggttcaactaaaccacaaattctcatgagtgcataagttaagcatcaattccttaagatggataccttaatttcaaaagcctctcatgctcctacttttcccccacctcttgctattgtaatgtgataaactgataatgtcttccctaccattaatgtcgaaagaaaaatgtgaatggggcaagaagggtaagggagggtagcaattgtctcatatgggccttattagctccaataagtcaccattagggttggtaaataaatggacccaattgaaagatttttaattggtgggggacctaactctcatcttcaatgaatcccttttaggcatgcccaactgctccactgccgacactatgcctttcactctgtgcccttatggaaatcttttcccctgctcgcctgtcccaattcatttctgttaaaagaacaaaacttttgggcctcactacctgcaaaactctctattattaagatagtttttttttacaatgacaatacaaacaaatttgttttgatatctccatttttacacacaattcatcgagtaaactcttatggtagaaaatatatatatggtcactcaccctgtttctatataaactttagttacaaaacagaaagaggaattcatatattttatataatttatcattctgatttgactcgaatgagtataataactatttgaatagtacacatatagaaataatataatatagtttacaaataaaatatttaagttaactattcacacaaactcatttataaataaaaaatttatagttgaaactatgttataataataataataataataataaaatacactcttaattctgctagtttagataatgaggcaaaagaccgactaaattcgttttcaaaaaaaaaaaacactcatggtggccctttttttattttattattctttattaaattttattgacatttattatttttagatcgacagtaatttttttatttttaataaatagagagtattataatttactgttatacaaatattaaatttttatttaataagagttttatgatattttaatacggaggttttgagtactctttttacaaaaataatgaaaagaaaaaataatttaatggtgatagaatttgtcaacaaaatagaatgtgttgtcccataattgctttttttttttcttctttaataaaagtttatattaaattaaaaacattaatggcgtgcgaagtgaaatttgaaggtgcgttactggaattaaagatggggcaaaaatccagatttaaattccaaacagaaccatcattactgccataatagcattttttgacaaaagtggttggagtcaaaaacaagccaacaacatcatatgtttcatcttcttattctttatccgtttaattaccgttaattaacttaagtttccgtccgctatgatagtatttagcccagcctgatctaacggaattctcatctccattaattaaaataaaaagaaaaaattataattttataattttattactttaatttttattttttgtaaagaaaaaaatacccacaaacttaatttaataataattaaatattttacttaagagtataattttaaattcaagtcttacatttatcatttctataataaaaagtaaggataaatattaaaaatatcacctgattttactattttaaatttttcacatgtaattttcttttcagataagaaaatacatggttaagaattataataaaaaatataacttaatgataaaaagtgttgattcacaaatattcaattatctttatttcaattcaccattattattagtattgaataataaaaatagtattatttgatcgtcaaattgaacatattaaattaataattttttaaattataatttaatagttaaataataaaattaaaaattaataagttttaaactcacattattaaatacatagaatatgataataatgtttgatcaaaataaagataactgaattttttagaatcaatatattttaatgatgaaatatttttcacattatataaccataaatatataatagactagttgaaaataaaatataaaattatagttgaaaatacaaataaaagaaaaggtaatttagaaacagaactttaagcacggggcacggtaactttgatgttgttgtctgtttgttttcattagtttaataactaattaatagtcaatctatatattaatttatgagatttaaatatttttaatatatgtatttaattttttgatatatataatttttgatatatgattttataatttttttattaatttactgattaataaattatatttttaattaaatattgattctaattttaaaaaataatatattaattatattttaatattatattaattaataaataatttcataatatgataacaatattaatactattatagaattaacttattaattatattttaatattatattaattaataaattaattttttaatttaataacaattataattttaaaaaataatcttttaatttatatttttaatattatatttaattataagctaatttttaaaaaaataatattaatttatataacattaaaattaatttattattatttttaaaaatattataaattattattaaatattaaataatatttattaatttattttataattaaaataataataacgagtcaactattttattataattttaatcccagttatatttagccatcaattactcgggtaaatgccatctcagcgttcaacaagaaagagccgttaaaaaatggttcatcctcatggaattacaaaattatccctgaatttaactttttctacattctcacccctgcaaaagtgctaaagccattgatgattctttgtttgcgtatgtatgcgtctccatattctgttctcagagaaacccatacgcacgcgcgcgcacacacacactctccctctctctctagaaaacgaaaaagtgaaaagccacgaagcatcgggaggagagagaaaggcacaaaagagaagtttagagagagagagagagagagagagagattgtgactttgatgattgttgaacatggagctgctgcagagaagcttttcttcaatacaaagctctctcttgctctttgaacatagtgggcccaacaattccaaacccaactgtcacgtcttctccttcttcttcttcttcatttccttgttgctgttatcagatactctttgtaaagccatcaactttcactttcacaattgtcaccaccactacctcttttctttgttttttttttttttcttttttctttcagtctttagtgccttctcattttagaatttctgcttaaaaataatgggtcggtgctagataagcattttagtcttctctccctctctttttagttgtcaaaagttagatacccacttaccaaaactaaaaagaaaaacgaaggaataagaataaaaataaaaataaaataaaagtcctatttttaccttcttatgttgaaaaattgatctgtttattcattttccccatctgctagcttttatttttcatatttttggaggggtttttatctatcaattccagccaagttcggggtctgtttcgtaactatctactttttgctggcagcttctttatttttattttttaatgaatgctggtttatgtgcgttgaagaagatgttggttgatcgctgctgattgctaattgaagaaaattgggagtttcagtttgggaaaaaaagaagttctctttattcagtttgataatgtcagagggccaaaagattgtctttttttctggagttgtcaaggattaccagctttgaagattggttatatggtataatataagtgaaggcaaaattttgttaccaagtttctgattgttgtataatttagatgatctctgaaatcttttaaagggttgattcttcagctttcatccacctcaaccgttctttctttaaggaagatcaattggactatctaaagtttagtgaggaacttcagccgctggttaaggcttgtggttaaaaaagaaagatgggagattttctattgtcttaccctccaaagaaagcttaggaagccttgagcttgacgcttttgaggaagcttcagttgttgaaattggaaacttttgtccactttcctttggcttaagacacctagctgcattgttgtccttcttggtcttatcgattttgaggtatttgttctcttcattaatctataaaataccagcccgtaccaagattgatacttatttaagggctcttcctatttatttatctatcttttactcgaataatttgctgattcacgtgttctgtcttgtatctgaactaaattctttggaacagcatcaaaataaaaaactaaaaacaaaaaaataaaaataaaaattgtgtcatgatgctggacttaagatttgcttctggaagaggggagcaaaaactgtgttttgtgaaattgttgttgggaattctggggcaactgtgtatcagatctcattgggaggccgaagtgatttgggttagatcactctcaattgaatgttaccagtattcttgggaacatgcagagccttcgtgattgccagtagaatgttcttgattttatttcatactcgttgttcacctggacattacttttttttttttttttttttttttttctgtttaaagaataagaagtcatctgattgctgaacagtttaaaatgaggatgttgatggtcgatactacttccatacactttccctctcttttactttttgcgtaaaaggaaaatttgcatattggattgttctttttgggtagctattactacaaactttatgttttatctcatcttcgaggggaaaagcttgattttattgttaaagttcataacttatccagttttcttctgttctacaatgtgatagcaatgtctcaggaccattgcagaatttattggaggaccaccaatttgtatccgctaagtacattggatgcgggagggttgtaagggcattaacatgaacatccaattttgttagatggccttattagatgagcaagttcattcctttgtgccttttgcactgatgccacaaaccacaatcacttcgtttctatttatgttctttccgaaatccagaccgttatcaataaacaagccttttttgtgtttcctactctatgtatgtggagttttgagttaaaagcacctatctttaatatacttcaatttgttatccccctgtcagatttcaggtgggcatactaagcgtgcatttcagatgaataaaacataattcagggagagaatcaaccaaccattcatcatggcaaagaaatctcagaaacgccctgtgcgacatgaaagagaccaatctggctgcatgtggggtttaattagtatgtttgactttcgccatggtcgatcaactcagaagctgctctcagataggagacgggggactagacatgttggtaagaactctattctatagccagatgaatctgaaaagctaatgaaacatgccagcatgcactgggagaattccttttgggagaacagatgttatatacaacatgaagcacttttattttactgtttcttgttgccaatttccttaaaatgaagagaattcagagccacgatgatggggattgcttttggtgctgattattgaaagatagtattctaattaacatgctagaaaatgctattttgactacaaagcaatttgacagattgatttattgcttccactgttccaaatatttcttatgctttaaattaaattaaattattgaactgtgtcttttatcctgcagctcctggtaatgctttggataaacctgacttgttgataaatcgtgatgaaagttgtcgaggcactgttgtaagtctgccaactatttttcttttttttgtttttccagatcaacttatgctaaaattctttaagatgaaggaacctaccatttctttgaacttaatccattatgtttatgtgctgtactcattgtacattaccttatatatacttaacttacaaatacatcagggtggtgaaggaagcaccaatgtggcagctgataccggtaagccaagtgtgaaaaaacttatggacgatgagatgctctgtgagaaagatgcaaagaaggagacaaacagtgcaggagtggaaccaaaacagcctaattcagattatggaagccaaaaaaggaaaagccgcaaaagaacaaatagaagtcggacaaaaagttgtgagatatacatagaagatctggatgctgctgagaatttgcaacttgaaaagccctgccgtcatcgttcagaaaagcaatctactaatagtcttgacatggatgatatggtggaagagttctgccgccagatccgtcgcattagttgcttaaagcatgaccagcatggtgaacttcacgaccagccaaaccagaagaaccctgactttgaagagaaattgaaagaggcgattgaactttttataagacataggctcagtaagggtaaacacggtgcagttg

SEQ ID NO: 6418 - DNA, 3048 bp, Ricinus communis
  Intron number 1 from transcript 28644.m000923 (locus 28644 .t000030) derived from phytozome v7.0 (chr-ID 28644; pos 1 47565 to 150612 reverse strand)
ggctcttttgggttagtaactgaacttagtaatttaatatttcttttcaatgtcatgtttttatgagatgattatccttgtcatttacaatctatgtggcttgatatataagctttaacctaaatgatggaatgtatatagcctgtaaaaaaaatcatattgaatcagagggaagatgggttggtggagggaaaattttaaacttaattttctttagaattagtgtaataaaaacatttgaagatattttggaagaattagcgagactgcaatgtaaaagtctgtttcttcagttattgacaattgaatgactattttatgtgataatgttgccgtattgtaccatttaggaccttgctttgtgaaataagcttcggtgatggctactttctggaagtatagcaatgactctttgggtcaaagggtgaaggaggaaatgttgttttattagtgattatgagagggacacacggtaggagtctaggagataagtaataacaaataactgcctctaaagaaaaaaagaatttgacacaagttttggtcaaataatgaagatggcatggatcatagatatatcatcagcgaaaaatgtatccatatgaaggttgttaagtgcaatgaaatcggtgctgaaaacaaggagcttgaaagttgctgctatccaatacatggaagtctaaaacagactatcagttgcaatggttgatatgagtttttgactttcgttgaagatgcatggtcatgattaagttcagagttattccattctgtttgtcttttttcccttataatatctgtttatcaagaaaaagaaatttttttgtaaaattcagtttgaaaacttttatctctctctttcagatctgtgtttgaaacatgctgaatgcaaacgcttgcatgatttgtagataatattttagaagcattgtgattctggtctatagcatgtaaagttgaaaatgggaattaaacatatatccctttgagattttctttccgtgaaaattttataacaaaaatcttgtgcagaaccacctctattgtttgtttgtgacttttggtttatatggttggaaattagaactactgaagcacctggatcagacaatagtggctttgaaattcatgtggtatagctatgttcacctaggttactgcgatctctatctaataggacctaatactggcacttgtatgaacaggctagacaagtttagttgctttgtgtgagtgggctgttgataagattctcatgagaattgcagtataaaattaagttgcttaacatacatgtgtagaacttttagcgacttctgaaatactcctgttgaaaaatgtttattgctgtattattatctttagcttgcagttgttagacattccttgaaagttatttttgttttggacatttttccctctagcttcttcttggaactttcttttttcccctggtactatgtgagcttatacacttgtggaggaccttgttcttcttatagcatcatcacggttcatcattatctatatttactgtgtaagcagggataatttttgatacattaatcttttatagttattattccagctctctttctttgatttttagcctattctgtttggtggttttcttgcttgtttgagttccttctgctttgatctattctacattctattccctccctgatttcgtgtttcatgatttagcctccttaaccctcttatccagctaggtttagatggggctctgtcctgattgcatgttgctaattgtcatggaattttttggaggatgaatccatttatgttttctcatagtattttctaatggtgttgcaataaataaaactcaatactataaagactctgatcaaattattggatgaactgctaaatttcattcggttcttttttccgtaatttgctttgataaaagattcctgtatgtgcttgaagctttaatgatgctttcctgtagtgacagttaagacttttaagtaagtgaatggctgcggattgttgggggaagtcatggctgacgttgtttgtctgggtattatgttgagttcttttatcacctactggaaacttttatcaagaacttaaaagagaataaagaaaggttggggagaagggagacggaggagctattctagtctttatgtactctatcctcccaaaccttccctgtgttttctctctgtggatgtggttgcctgtgcacaacaccatgcatgactttagagctttgtatctatgtattcaaattgcattttcgatataaccgtaagcagaaaactttccagcttattaactgtttgattcattaattttggaagtaacacagagctagtgaacttgtgatcaaattactgtcccttttgatggcttgagaagccctgtatagctgacttaagaattagtcagctcacctccatatgggtgaaagatgggcaagagggaaatttgtctataaatatctgtctatttgcggtagcatattctgtgcaagcgaatctcatatttttttttccttgcatctgattttattattcaatttggtttcatgcatactgttccattgttattagtttctgggtacatttatttttaaggtctgatatttcaaattctgctttaaattgcttttgtagttgaagggacattgttgaaattacttggactgttgactttccgtgatattagattgttttcgtttattaatattactttgttctgtggattagtttcttaaggggaaatgcaaattagttggtaccttaaccttcgtcaaacaacttacaatggaggcacattaagcttgtttgatgttggataggttaagcagctgttttgtctgacatgaagtgtatctgctgagttactaagaggtcagtaggatttagatgataaggatattaattgacttgatagtgtcatttgacccatgaagatccggagaattttgagtgcctactgattttcttactaattgattgttgacttctcatttacctgctttttggctgcagttgacctcatcggctg

SEQ ID NO: 6419 - DNA, 1870 bp, Ricinus communis
  Intron number 1 from transcript 29841.m002820 (locus 29841 .t000084) derived from phytozome v7.0 (chr-ID 29841; pos 5 06615 to 508484 reverse strand)
ctgcaggattctatcaagagaagctgcagagtgaggtgagttcattttgtgattgtttttatcatttcaaatcacaaattctagcatgaaagtttaattatgttttccagatatgaaaagagaatggaaatattttagaagagaaaggaaacccttcttcttggctgttgaatgcactttcaaggcataaagttacagttacttgaaccgtatgcaagagtactacacaacacaaattacaaatatatgttctaacctaaatcaattcaaattgtggtggaagtgtctcaaagcatgaggaagttttcggaacaccattagatgatttgagagtaaatgttaaggcaagagggcaaagagtatataaacatgaataggaccttgagctctcaccatattaccaaaggctgcctttaatagcagcttgattacagacagaagttcaagttcaaaagctactaccaactttccttatttggccttaaaaacacttttaggaaacatattcctttaaatcaggttctttctactttttaactaccatagtacgacaatgtttcatccaggattttagatttattcaaaccaaaagattagcaaactttaatcatgcctaaaagtatctcaaagagtctcatttcaataacagtatatttgtgtctggaattgagaaagaatttggatttatgtatgcatcaacctgaggttgaagtgaatggcagtttgttctaattcacctaattaaagagcatcgatcttactatcggtgaattttatgtgtagattccctagatacccttttacagaattgatctttcaaacaatctcaccttcttaagactgacttagcggcatggcaatgaagaaattctgttctttgtttatagttggcacatagcgtgttagttgcccctatgtgcagccttttattttcttcctctccgttacctttttcttttggaagtaataattttgcaaaatgtggccaacgccactgaaatagattggtttcatttgtcaatgccgtgtagttactcttaagatgacttctgcatctcctcctacactagactgagggctcggatgccgcttatattttcctaccatggcctgaagatgttcaaatccctatatttgactgtttctgaataactttttctcttttggatagttgattggaacacatattagacaaagaagtttatcagatattatgtttggtaacacatctcttcccaaatagtgaagggtctggatctgttgccacagtatcctaacatttgatggaagaaatcagtttttgataccaaatactttactttttttggaattcaacttctacaaaaatccagtaatcatgcacaggtgctttgctgtgtatagatatggacaaaggtcaagatcaagaaacactagtcaatttacatggagtcttatatatcctactccttgtgctagacgcagcttgtactgaatttgcataatgaagaaaaaaaatcaaagtcagatgaagatataatggaataattagattggatctctcatttcagcccttccatctgttgtatacataagcaacccaatttcaattatttgagttccacagaagtagataaccatggacaaatgtcaaccctaattctgcttcaaataattggagctgttgaatctgaagagaggtacttgagctgcaaattgtgaaggactttgaaaccgagtagaaatcctctttatgattttcagttactacgtaattttatcccatttgttttctttatttcatgaggtctttaggagttgtcgatattaattcacaatttcttctgagcttgcagggatttgaggttgtgttgccagataaagcaaccat

SEQ ID NO: 6420 - DNA, 1976 bp, Ricinus communis
  Intron number 2 from transcript 29794.m003485 (locus 29794 .t000184) derived from phytozome v7.0 (chr-ID 29794; pos 1 223901 to 1225876 reverse strand)
cctttaatccgtcatctgcaggtgccttctgaattttcatatattttctgttattttattgctttaagatatgcatggcaccagttcgtgctcatttatgatatatagataattgatattacatcttcttaacagatgttactttaggtatttggtttttctgcaattatcatggtattaaataaatgaattctgaatcgcattttccctttatcttctatctatatatctacttctgttatttaagtagatcttgaaactagatgaatacggagaaaagaaattgagaccgtattagtaatttttagaaagcaagctattaaatttgtttgccaaaatacctctgaattaagctttcaaagttatgtttgagttgctaactgccctctggagaggggcaatcattatacttgaatttttggtggcttgtgtccactctttttggttttgtggtaacatggatgagctgtggattactcgcaaaatcttttagattttactcaggaaggatgtacataggaaaaacaagaagtgggaggatttttcaaggtaaagaggtaggcaagaatcaaattactttcatgaggtttaactcaggcgagagagcatttgggatcttccatgagtttatgattgtgattttcagttctcaattcttttgtaaaatataatttgggtttctatatgggtctactctgaatgactgctaaaccgaaaccttatctttttctaaggaaactggtcactgctcttatttctttccccttttatctatacaggttccgagatatgaatcatagtttaggtattctaacagttctaaactttaatcagtacctcaagtagcaaagatatattttgatcaaaatgtgaaataaatctggaaaatcatagaataatgaaataattcaattgctgaataataaaagtggcatgttatgaaaaagaatgtgaaattctttattcctcctaatctccggtttccttggagctttcttttccttttaattttaaaaaaaattgtgcttcagaatctattatttgctcgagtattatggaattagaaccaaaaatctagtttgagatgatatttgaatgacaaatgcattgtttaaattatggatgtcatcagagtatttaaattgatagaatggtcatgattgaatgattggctcaaaattatgaatccttcaatgcacaagatggaaaagataatctgacacctgttagtgtgtgttggggacatctcctttttctctcaactgctggtcaccttattggtggagatgtttgatggtgcagagttaattattacaattatgattttttgaggagtgatggcttccatagtggcttttaactctgttactctttcttgtatgaatactagcagttgttaatttttttctgatatctgcggatagaactgaggaatttagtgcatctgatctataatatcctgttgtagtcctcttgtgttaattttttcctgatatctgcgggtagaactgaggaatttggtgcatctgatctatagtccttttgtgttatcacatttaatatatgaaggtgatttagaattttggtattatccacttcattatgtctagttatcatctggggtaatgaatgaatgtattgaacaagtataagttcttaattctttcttctatgttctctttcgtgctttacttatattcagctgagttaaacattctttattcttatttagtaaatagacatggttaagttgcatttcacatccatacgtcgtggtgatgatcccggccaaagtgttgttcattgattgtggggatgattttcttggtcttctggttctgacttcacatattctgtggttgggtgcagaattttttgtgcttttcgctttttccagtgtaaacatcttattatctgacatatgcataattgcatgtacagccaccgctttgggaaaggtatcagcaacaggttag

SEQ ID NO: 6421 - DNA, 593 bp, Ricinus communis
  Intron number 23 from transcript 29726.m003977 (locus 2972 6.t000089) derived from phytozome v7.0 (chr-ID 29726; pos 530922 to 531514 reverse strand)
ggatcctgccaaaactgaaagcaacagaccatcgagtatggattttttctctagatttgccaaattaagtatttgatgtttagtagttgttgatattttttgtattgtgttgatcccagcaggattgtactttaatattttgaaatagcttttcaaaattatgattgaaaatttgaattttaatgaactatttgaaaataggattgacatacagtatgaatcaaggagtcttttgttttctcttggttgtccctgtttgagtttttcttgaacttattctttccaattcttggtaattcaatactctgtatttgttgaatctgttaatatgttgtcaaaagattcatgtggctacttccttatagtgcttaatttgtttaatgggttttttattttctttggggtggtgacccaggaaatcctatatatttttttgcactacagctttctaaacaccttttcatagttttcttgattgcgagtatttttgctctgttcttttgtctccagtagttaaaatttttgcattatactagtgttttgaatattttactactatggctgggaccatgcaggttcttttcttttcaaca

SEQ ID NO: 6422 - DNA, 3846 bp, Ricinus communis
  Intron number 3 from transcript 29743.m000294 (locus 29743 .t000005) derived from phytozome v7.0 (chr-ID 29743; pos 1 17716 to 121561 reverse strand)
agaggactaatagagcaatttgtgagcaaacgaaggtgaggtgcacaagagtcttatggatatttggtttggatacatgacccccttaacttcattctgtagtttcttaatgatttgtaatctaaaaaagactgaatgccatttgtcttttgcatgcttgtgtatgtcgttggggaaactttattgttatactgtttgctttattctccaatatgtagtcagtccaataatgtgacttgggaggcgatgcctctagttgaatatgtgaaactgtttgatctgaggttagacttgctatttctgacatccaaaacgaccttgaaagtctgtgtggtttgccatgaattttctgtaactcctttgtttccttagtttgaggcaagagaaatgtgtcaattacaatccttacgttatttctgggagtttcttgtgtgtactttattataagtatttgttgttgttgttgcatgtgatttactttggcattcttttcatgctatatgtcctttctcccctacaaatctctttttgtttttctttttcctacaatacttatttctatgtgtcaatgcctttgaaattctggcaaagggcgggttatctactaactattggagtatgtttgtgcatctcaattcttgcagatttcttattctattttatatctagagaacacgattattatattatatcgcccttttcttgataataagaaatttacaatgaggaaatagaaatgcagttgatgctccatcaaaagatcggccataattgaatttgcatcttaaatgtatgtaattgatgaccgattaatgaacataagctatcatttagaacttgcaatgtgtttgtacatgcttgagggacatcagtagtatgatatgtaattattgatagtttggtaacagagaaggcaaaaatcgcattataatacattaggctagattggtggatttacatgttatgtgaaagagcaattagtcatggcagttttcctttgaccttttaaaggcttcctacaaggtattaggacgcttcaacttttttgatattgaactactttttcattattttttctccacataacatatctatggttcaatatattgagcaagctgatgcttttgacaagaaaggaactattttaaacagaatattcaagaactatttttaacatactaaagtataaaagcataaattgaagttttggaggtctaacagtgattgttaaaattcggggaaaggatatttaagaaatttcaatttaatttaaaactttgattattcaggttcttttcgaatttttttttcaggtaggggctttattaattaggtatattagattttatcacattagaacttatctatataaacatcttctacctattttgattaggtttatggttttcaatctctaataagttttggtgcctatataggcacacttcttaacatgaataaggctccatttcatttctggatatttgctttttggggatttttttatcatgcttggggtgcttaaaagaacctttaatggatttattttctgtcaaaaggttttgtaagctattttcaggaaatttgtcattatttttatcttttttccttttccagacaagaaagtcattttcttgactttaatctcctaaaatgggaagtagtgtatgagcctgatgctgcagcccactgcaattttagcctcctttttcttttggtggagcatccttttctatgtaaccttatttagaaaattgtgaattctgtggaagtacaaagatgcttgttgtttccttctattgtcatttagtgtcataattgtacgtgtaaatataatttttttatggtcttcaggaaatagagccaaaagatattaaattgtttatactttctctttgctttaaagacgagagagaacattttcattttacccactttctttactacattaagagaggggggcacgttttcatttcactgaattgcctttgtttgctgaacaagattaggagattgagagatgtgagtttctgttttaccaaaattccttctgtacttgcactagattaaaaaaatagagagagaacaattttcaatttatcggagtgccttatttgatagcatccgagagagagagagagagagagagagagagagagagagggatagaattccttggttgtggcataacagtaatattataatcattttttagattgtatgtttggcaattgtgtgtgtgtgtgtgtgtgtgtgtgtgtgtgtgagagagagagagagagagagagagagagagagagtaacaacagttgtagtagtactttcctaattgattaattgatttatgatagtcttatgttgatctagcactaatcttaattgaaatataatttaaaactatttaataatattttttcaattgaaatatatagtgcaaattcatcattgtggctttttgcgtcattctttttacaatttatgtcaataatactatttttctaaattaagtagtagttcatatttattatttgcttaataatgattctaattatgattaatcattatatcttttactatatagtaataatgagtttagcttagacaaagttgtaatttaattataaatttattaaattgggaaatcaatgataaaaaaattgaatgtatataatagtaataatgagtctaattagtaaaattcatgtgcaccgcacgtggaaaaagaaactagtatttagaaaggtggatgggagaaagttgtaaatggcagatacactattttatagttgcatacatgcctcttggtcataaacattgtgataaatggaagcatcattagaaactgcttagaactattaatctgagcagtttattattgatctatgatattcttgatcattaattggacatcatttaaatatgaaacatctatcttgagttgggacctgttggagttgagttaatttttaaagtttctctttttctttaaaaaaataatctattatgcaacccaattactcactttctgtttgtaaacaaatctctgaagtcaacatccccatattcgaatactgtgctttaagtctcaaagatgaaatccccccattctttcaatgactcctttgaatttatttctgcaacctttcagacaaaagaagtctttcagggttttacggcagcaggtttccttttaaactatgggcaggacaggggaaaccttctatttcaaaatggaaaacagggctcttagtggcagcagagtttaattgcataacttgcgcttagtgtaattaccaatctagaaacagggaagtaaataacaaatgggtttgtatactgtgttaggatagaatcaaatgggtatcctcatgtagagttaaagatctaaatcaaggcaggcgttacattttggagttggcattgtttcataagtgatggagaaagaaacttagattaaaaggaaactgtcagaatttttatcaatgtttcagtttttgatataattgcagtgacagactgtttcttttctgtatgatataagaaatcttgttagtttaacgtgatgtccatttaaaagcttaatgaacttgatatagtgctttagtgatgtggattggtaggttaggaacttgattaaggattccagattttctctagcttgtggtcattttacaatgatgaattgctggtgtctgtcctatgctctagttgctagcagcttctgtaaacttcatttatattgcgtatagaacatgtgttcttttacaatcttcgattatccactcaggatataatttcttcctgaactcaggcgatccaaaggagccatctaacttctattgcaaa

SEQ ID NO: 6423 - DNA, 2539 bp, Ricinus communis
  Intron number 7 from transcript 29983.m003305 (locus 29983 .t000204) derived from phytozome v7.0 (chr-ID 29983; pos 1 062936 to 1065474 reverse strand)
tgcggcgttacattgtagttgaagcagtgtaccaggtacttttctcattttatgcacaaaactcctttttccaaatttgtctcttctttcatgattcaattacttcagcaatggtcttgagtctcacaattagcattttctgatttgcatttattagttttttttaatctgaaagaaaattgaaattaatctctatgatggatgcttgcaccttattgcagtttacacctttagtaattataatctttacttccgatttgagtgtatttggccactgaatttttgttgaatcctcaagaatatcttctggttttgtatctgagaaagtaaagagtctttcattattgaaagagcaggataatggagagagagagagagagagagagagagagaggggaagagagagtcttttattaatgaaaaagcgggagagagagaggcattcaaggggggagaaagagagggagagggaggcatacaagggatgcttagcataaataggggtgcattgtaattatcaattggtagataagtataattttagtatccaaatatagagatgcacacacctcatttaatcaaatttaaccatttcatatttcacataacactggaagtatggtttttttatttgaaggcattttttttactgccttttcatattattatcatagttgtcatcactgttgttagaatcgtatgattcacaattcgaattgtaagagtcaagtcgattctcacacaaaacagttaactctaatgttgaattgaaattttttgtgactcggtagcaaattgtacggctcgacacctacttgcaacaattgctcgaattgcacgattcaattgatttttattcttagtaaaattaatgagataaaaaccataaaaactcattatccctccaatgggaaaaaaggaaaaagaaagagcaaagaaagaagaagaatgagatacgaaaggtctgcgtgcagaaaaatagaagaagaggaaataagggatggcgactgagttagaaagtgataaatacctagcatttgaaagaagatggaatagtagttttggacttctcttgggcctgaactatacaatctaaataaaatttcaggctacaatactaaaagttttatgtgctttgggctctctaatcgtgaaaatcaaattgcattctcttgttttaattcttttatatttttgtttggcattgttatgtactataagaaacaaaacttaataaaacttaccaaattaaacatgtatttgaaatagttatattctaaatcagaatattaataatttatattattatatattattcttctaaattatgtagtaatttgatttttgtaggttatagtcgttttttattaaaataattttatgttatatgttacttttaaaatattaggaacttccaatgaatcttatgatacgattcgattctcgattcgtaaaatgaggaattcgattctcgatttgaatctcgatcagataactatggttgtcatcctttctagatggcttgtgaaataaacacttagccccatctcttgttactgttgagtttgtccatttagcctttctttttagttattctttatatgtagaggaagacaccatgtgtgcatctgtgtggagagagaggtgcgggtatctaactgaaccatgatttagaatagcaattcaactaagtccacccctctgttctgcgggccctaacgaaactgttctgtgtaccataataaattatgctgtagtaacactgggtttaatgaattttttatgaatgtttctttggttatgaatatttgcctattacatcttaagtttttgtgaaaacaatgctaaagtcaaatgaactcagaaagtaattggggcttggatataagaatgaagtgaaagataatgtttgattattgaatcttttaggtgtatctaagacatggcatggatcacattaaaagatatttttatcgatgatgtgttttctaaataagtatgttttggacccatttctaattaatagtttatgtcttgctaatattttgcaataaaatcactgccacagttggtcaataaagtgctaacggtgttactcaaagggttctcaagtgtcgagaattttctttaagaaatagaaaactatgaaaccccttttatcacaaaggcaatggtaaaagatatatagatgacacttttgcttaattacaaaaaggttaagaaaacccttttggagaacatctagaaagattaacagcaacatcaatttgaataagaaacaaagagtacgccgtcttttttatttttatcagtttattagaatctcatcttattgttcttggtggcttcaatttcaggtatttattctcttctacatacttcaattatcagtaatttaatatctgagagttatttagtgataaatattgttattattatttttgtaaggaaaaaaaacaaatgaaaagtaaacttgcttgactgagattttttcttttgatcttgaatctttagaattctggccaaatagcaccactga

SEQ ID NO: 6424 - DNA, 5209 bp, Ricinus communis
  Intron number 3 from transcript 30146.m003590 (locus 30146 .t000167) derived from phytozome v7.0 (chr-ID 30146; pos 1 178731 to 1183939)
ctgactttaaaccaaaggtatatatataggacagttttatgaagagctaagggtgtggttatttttttttttttgcatttatgtataatttttatccgtcaaacatatatattcttttatttaatttaaagttcatattatcttaattggaaaataagactgatatatatctaggtcatgtttccttgtccttttaaattgcattatatgaataaatctactgatcaatttagaccatgtttgttcaggttgcagattttggtcttgtcaagttctttcccgaaagtgttagtgttactcacatctccagtctgtgtaggggaactcatgggtatggtacatcttttttttttttttttttttttaatacattacatgaatgactcagttgttttatggtgaattaatgagataagaatataaacgttcactatattttacttttaattttattttttgattataaaattttaatttattttactttaattatttagttttattagttacattactaataaagaattgacatgtcgcatttatttctcttaattatttcttttattagctatttttgtcatgtgtcaatcttttatttgtgacatgactaaatagaaatataattaaattaaatgaatgaaataaaataaattaaaatttataatcaaaataaaataaaatataaattttagtgattatttatatcattatttcaaataaaaatataaaaattcaggaagaggaacaaagaaaaaaagaagaggtcaggtttattttttaaagacgtgaagaatttattattaactaagttattgtttcattcactatattttaaaatgcagatatgcggatcttgagcattatccttctcagaaggtttctgataaatcggatgtctattcctttggagttgtccttctagagctgataactgggagacaaccaattgaatttaggaggaatgcacgtatagttgattgggtatgcattacttgttccctgactatagttttatgataatttaaagtggtgaagattaattagttctacgtgaattataccgtttatgcagtgtttggtatggtgatgtgttatgttattttcatacaataagtaatagctgctaagattaaaagccagaccatttgtctggaattgtatattcaagtgatcattttttattctgcttattgttattttgtctaatacatagaaatcatatatatgagtgcaattttttttccttcagttgctaacatgtagtcaattcagtattaaaagaattaaatcccattgtctaagttcttgaatttttaaattacattttcttaaggtcctaatgtaaactataatatcccattgatctaaaactttatatttttcattatttaacaatgaaaacatacactgatccatgtttaatagagtgttatttctcttccttttcccttatcttattgatgaatactctaatcttttagtttttgtatttgctataattttttatgatatgagcagactcttatttataaactaatggtggttttccatcaaagcaccaatggttacaacccttcatgtcataacatttaccaacagtcataactattcaattcacaacttttcattaaccaatagaatttaattactaatatcttattataattatatgagtcattaatttcttacccctaaactttatttatatcatattagccccttgtattaatattttttttgcaaacagtaaggatttgttgatgaattagaaatttaactaatgccattaaaagaaaagaaagcaaacctattttcaggactttgaatttttacaattattaagcccctctagtcttatttacataaacaatattgactaatttcattggacttaatagaattaaaatatacgcactgcaagataatgtgttaatatagacaattacactgattggaaaatagaaaaaaaatagtatattatggaaaaatggacaattacactgttatgttgaatacgttatcttttaattaaattaattaaaaaataagcttctctttcctaattagcacaattttatactaacatgcttttttatggcacattcatttcattttatatattagggtaatgagattactatttgcgtaaataaataaataaaacaagagatgtaatgtaacataaagtgccggagcttaataatatgcagagtgaaagttctacctttctctttttctttagtggcattcttactttatagaaacaagtccttaatgtgtatagaaccaagaggttaatgcaacaaggttaaaagctcaatatatttattcgctgaaaataaaagttttatttccattaagatgataataagtaattcgtaggcataaaattttattattatttctagactaatctaatattttaatatactaaataatttagactaattgaattaattaattgagtaaaattaaatatatttttgacaaattaaacatttgatttattatctaatatcatatttaattaatttactttaatggtcattcaaagctttgaactttgatgattcaggctaggcttctgattagccatgctttgagatctggtgattatttgtctcttcttgatccaaaactgaaagggaactgcgataaaaatgaagtggagcgaatgattcattgcgctgttgcttgtgtatataaaccctcagagagacggccaaaaatgaaacaggtaatatataatatatgtgtgtgtatttgagtattcagaaacacatcaaataatgcaatcgtcaaagaacacagttttgcttttatgttactaacctttctaatactaacgcaatgtagatagttcaagctcttgaagggaatatgcctttgaaggatatatgggatgtgaatgacattgctttcttgcgcggtatactttctttagtttgctaaacattgaaaattttatgaaattcatatatatatatttatctatataccaaactaataaattattaaacatatttattagttataaataaccgagtatattcaattatataatattaaatactaaaatactcatatatatttatgtgttagtctactattagttacaatatatacataggggataaatatttatacattctctgtcttttccatccagatttcccatgtcaaaattcactgctccagcaaaggttgttggagctgcctatcactataattgaggacagtgattacgaaacgcttcaagattatcagccaaagggatttacttttcaagaactagaagtggcatctgatggtttctccaatgccaacctacttaaggagggtgattttttccaagtctatgagggagtccttccaagtggtgaaagggtggcaattaaaaatctaaaattttgtactgaactgcaagaagatgaatttgagaaggagattaaggccattaacagcgtgcgccacaaaaatcttgttaagctggttggatattgcattgatggagacaagaggttgcttatttttgaatttgttccgaacaaaaccttgaaatctcagttacatggcgagcccacctaaactcattctttttttttttttcgagttctgagcttaattatataaatatcatgttccagaacttatctaagcaattaatattaatatctggtgtgaaacacacaacaggggatggtatatcacctttggactggacaaccagaatgaaaatcgccagaggctctgcaagaggtttgaaatatttgcatgaagactgtaagtactcccagcttcatgcctttagcacttggccattatacacattagttatgtttacaggtattaggttcccattgcgattctggcatagttatatatgtaagtatgtatgtatgtattattttcaggtaatccgaggatcatacaccgacatattgatgcgaatcacattcttcttgatgataattgtgaaccaaaggtaaccttagtcctgtaatttttcaaaactccataattatcccagaacaaaacttctgtaaagccaagcttccactccccatcacttctcccccgaagtgggctgctgaactcagttttcttgaagttcttcagatttcctgttctgaaaatcaatcctccactcaagttcatccaccatttccaatgcaaatcattgttctataacatgtctatcagtacatgcacattctatgatatctagtgatcatccagaagaaaatcttactcagaatgagggtcagacgaacctgtacggttcctccaaaataagattcccgacacggcaattctgtacttttcagatttccagctttggaaactagtttctgaccgaatttgagctcttttttctacttcatgccactcgtcaaatccgcccatctcttgtactggtcccatatcaatgacttgcccttctgccatgtcatcgtggtcgcacccctgccgcatatcatcagtctaaatcctcctgtcttagtgcttttggtgtatcagtatgttctctactgccagtcatatcttgcctcgtgtccgcctcagtttggttgaattaaacctattgacaaagttttgatgactggttcgactactttgaaatctaatttttcatattgaggatcgcttctgaaggttcaaacctttcgaatatatacttgaagtcgatttccacaaattaagctttgctgaaataggaaaatctttagttttttttttttgtcatctgcctgcttgatgtcggttcaaaccttctggtttagttggcaagagtttggttgctgttttggtggtggtttctttctggtctttggaggctgctctttgtagtatttggtgtcctgcgttttgcggtgtctttgtatttctttggttcttctgctgtatgtttgtagtttttggctcttgtttttctgctttcagttttcttgtctagaaacttgaggctgttttgtttctttgttcagttttagggagagaacaaaaaaataaaaatgataatactctgtattaaaaagattgcttcgtacatgcacattcaagagacacataattctttcttttctaatctctttctcctattatttctacaaccttgttctgtttgtttcgcatttgatgttgaccttgtataatgatatcaattatttacaagggaatcatttttttcagcttgcagattttgcaa

SEQ ID NO: 6425 - DNA, 5423 bp, Ricinus communis
  Intron number 5 from transcript 30063.m001441 (locus 30063 .t000045) derived from phytozome v7.0 (chr-ID 30063; pos 5 82237 to 587659 reverse strand)
aagatagacataaaaccacggtcagtatttaactttccaaatcttcctttactttcaagtctaaagattaatggtaaattgcatttgaataaatgtatgtgaaattttaagatttgattttgatggtaaataataaattctctttgattgtttagattcatgaacgtgggttaggttgatgaaggtggataacaaccttattcaagtatgaattaaattacctgttagaaaggaattttcttacgctgtgtttggttgaaaatccattaaggaattgattttatttgagaaagaagacaagagagagaaagtataatgaaaattataaagttgaaagagatattttggtgttatgagatacattgacttgttaatatgaaattcatttaaaaattctatctattttattagaatttagtttagctattaccaattctacaaaattgataatgtagaattctaaattaactttcatttcaatcaaaacgcacaaactttagatttgaaaatgaattctataaactttatggatttcaaccaaacacaattttcagatatatctacatttgttaatctaataaattgataagtggttgatctttatctcacaaaatataatctgaatcatgttcaagtctctcatttgtaattcttccatctatagataatattaaaaaaattgtttgttgcatggtgcgaacaattcatgtagtggtgaataaaaagggctacttgtcatattctccattcttgcctatatttctgcagatacaaaaatgatatatttacaatttatgatttcctgtcttgcttggataatttgcgaacctctacatagaagctaataatagtttcctttatgcttgtggtgactattaataagctgacttttaaatggctgcatgtggagtaaggcttagactttagtgtatttattttgatacctatatctgcgaggtagttgtagtttttcaataatactgtagttcctcggcattgcagtattacaattataaataatacaatcatgtagtattcacgagcatatggacttgcttggcgacctcaaaaaatgtggcatgtgtggcctatatcatcatgatttataataaataaacaaaatttcctaaaggttgagcttaaagtttctgtgttgaaatgtgtgttctttaaaggcttagtcatttcatattcctttgatcgctgttgggctccatcactaaatgtagacagggagattgaaatgagttaacaaacacatgtccaacgaatgcatttggtccagcacgacgaacgtatgtaggtagtgagaatgaatatgatgaaggggtaaatatacattgacctaaggcaaagttgtgaaaaagtttttacatgtgcaccgcacaatatcatatttaccaaatttatagggtctaatattgttccttgaacagtgtgcaacacttttttctttttctccttaaaaaaagttactatctttctctactttgtgagggtctattctattcctagaacaatgcgaggcgcttctgttttttttgggtcttttttttgttcgaagttttggtattcctttttattatgtaatgttgcaaatgttgctttttgtatttttatcaactcttggactatctagcccctgatactttaacaagaacagtgctaggcatttctctctgtttttttttttcataaaaagaaattgttttacttttacttttattttttaattttccatttcttagttcttttcctcggactaattagctatatttgtgctattggcattgtttaatcttttaaagtttcttaaagactaatggttttttttattcttacaaatgaaagagtagggttctaaatctttgagaatttgaagaatccaaaaatagtgccattttttctttttctatttgccctttttctaactaatgttcatcattattatttttattaaaacactttaaacatcatatttggagaatgttaggaaggcaattcgtttagaattaaaaaaaaaaaaacttattagtagtctatttggtgcattcattgattaaaataatgaaattgaaacttcaagtatggaaaatgacactttgactagtatattactatggtataggtgtagtatttttgtaatttcaaatacattgtcatattaatataagttgtccctagatatataaattttggcgcatattgcatgatattattgaatactagagaaagattttgcagcagacacggggaattgatgcgaatcttattggcactaggagtcctactccaacaaggaatcctatttcaacttcttttgatatagattaggttcatattaggaatagtgcaagactattttatattataggatactgcaagattagtacatacacacacaaaatgtctaagtaaatattggacatgcttcatgctcaataacataaccttatttttatttatttatttttgaactacagtaacatggctgattgcttgcaataaagtggtaatataagaactctcggtaccttagtttctcataagcaaactaagaaattatttaatttttccttttatgtgacccctttccgagtatctaggatgactcagagaagagtctgccaatgagtcttgcttcttaatcttccttcctcttcgatgtatggttagtaaaaggaataaggttcaatttggcccttgaacttcttgaaaaagatcaatttcacctcttttaccttttttgttcaaaaggaatgtcgacaatactctcttttgaacactctcttagacaattgctatcttatgggctcagtttatccagttttttcgacctaataacttgttagctatttaacaagttaaactaattttatattctttcttaataaataaaagtaaaataaatttatttactctttcacatacataatatgttataacttaagatttactattttaatttcaattttaaaaatattttattacttgaataataatattttttatttttaacaattttatatttttataattatttatataaaaataaaatttacttaaaattattagaaataaaaaatattgttattcacgtaataaaatatttttaaaatagatcgttaataaataagtttattctattttattcattaagaaagaaaatatagaagtagtttaactttttaaataggtagcaagttattaggttgaaaagttaaacaaagtggaccaatagaagaacaattatctaagagagtgttcaagggagtgtcactagcatttcttagtttaatttcccctttagttgagagagtgagagccagtctctctcttaacaagtaaaaattaatttaataattcttaaaaatctatttcttaatttaaaaacaacttaaatatttaattagaataaacaaactaccttagaccactactaccatcgcccctgccatcactgctactgcccttactactgctgcagctgccttcaccaatattggcagcaccctcaccatcactactgctgctgcctttaccaccatcgccaatgcttccctcaacacaaccagaactaagttttcatcttcatttacagcagaagatcgagacaattttcttcttcttcttcttccgttacttctggctgctgccattgcatgatagagatagtttactgtttcttgatttccttctttgagatatttttcttggtcgtctttatagatttcgagaaccttctgcaattgttgttgttgttgtttgtgtgagtattggattgaagtctctctctttctctgagatgcatttcatagagtgcaatagagtgctttaattttgtccctttctatatttagtctttaattttgtttctgacatacactttttttttgtgtgtctctctctacaaagctttgttaagagtttgtattggagttttggattttaattggcctaattacaaattaaatcctgaactttcactttttaacaattttatccaattgtttcaaaatttaaaacaaatactcgttcttttaatttattcttaaaaatactttttgataacaattttaaagtttcacaataaaaaagatgatgtaggaattcgattatgcttattaaaagaataataattatgaatcaacaaaaatagtttatcctagatttaataatatgatcattaaaaatctcatgtatgtgcattctttcacatattttacatctaaatgcaataaattttttattaactcggtaatttttatgttagtaagcataactgacttgtcacgtcatttttctcattgtaaaatctcaaaagttgttactaataaatgcttttgaaaataaattgaaagtataggtatttgttttaaaattttgaattagttagataaaattattaaaaaatataaagttcgggatttaattagtaattgggccatttgcatttgtgagcaggcaggcaaattggttgttgagctataggtgttggcctgctgagcttagacccaaatgtgaggatgtctatagtggcggaggaggggttatgttggatgtttggttgaaaagaggtggtggtggaagaacaatgatatttaattcatttatttatattttaattcatctacacattttatcttgagagtgaattacatgcacaaaggtatagggagaaaaggggttaagtgatctaatttggtaaagttctgggctggtttgaacaaaataggtcaaaaggggtgaattgatctttttggaaacatcgagaggcaaattgacccatattccttagtgaaattctgtattgaagattctcggagagaagctttggatttccatcgtaaacactcagattgtctgtgaaacatagttatgttctttcattccttctctaataaaaattacaacagattcttcccattggttacttaacttactttgaattcaaaagaaaaccaccctctaacacaacgacttccattttatggcacaagaaagtttgaagagttgaatgtacaataattgaagtgaaactgatagactatgcaagtaaacagcagcaagtcttcttatttttgtaccaatgtgtaaagtgcttctacacctttccacggaatggcaccacatgaattttaacttagtctttccaaatgtactgctttccagcttgtaattctgtgggatattactgtaatttaaaaagatatatggtttggaaataatgttgattaatgctatatatatttgcttggtaagattgtcctctgtacttctctctgaagaacaatgtagagatatatacatgtttttaaatagtttagcgatctaataaattatcagttttaaaagctctgcaaatactttacttataggaactcattgcttttattcactgctttgctccatcagagggtcca

SEQ ID NO: 6426 - DNA, 2803 bp, Ricinus communis
  Intron number 3 from transcript 30051.m000527 (locus 30051 .t000010) derived from phytozome v7.0 (chr-ID 30051; pos 3 66665 to 369467)
ctgacttcatatacttattgaacatacttcttcaggtacaatactcttttagctccttgtgccaaatcctcttgtcatttgtttatttcctcgttttttccccttttgttaatttgttttctttctaaatctgccatgtctatctattgctgaaatatgtctctatacttgggatagtttgattatccaacttataacttaaaattaatatttccagcacttattactttaaatatggtttgataatgtaatatgggctcaatttaaaagtttcaagtcagtcaaaaaccacttaaaatggtaagtcaaaatagttaacattaaatttcttcttaaaacaattagttgttatttttcaattatttttaatggagtgatgtttatgcctttgatacatcttcaaattatcaccaacaaaccaaaaactctttatttgacttttatgcccttaataaatccttaaaatcattattgaacttttgtgatattgtttttatatattgtgaaaagaattattgtcattatatgattgttgtttctaaatttttttctttcttaaataattccaaatttataattgatggctaaatcttaagaatcaatattataaagttaaggagggcatatttaattaagacttttaaagacttttttttttaaataaattacttttaaagagttgctggatttttaatgacttttacagagttcatgaatttatgaatgactttcgcagactctacttaaaaatacttttatagacattgacttttattgattttcacatactaatatttatttattatttaattatttaaaaatgaatttaatcattttgcttttattattttttcattttttttttgcgtttactttaaacattaatccacataatgttatatacaactccatatacaagtaacggatttcatttcattgttgtgttaaattcataccatttttaaatttttttatctcacaacatgaacactatttttgtttgtcaagagaataattcttctaaaaagaaattatcatatattacaatttttctccaattaaaccaccaaattcatatcatactcgttatattttgtttattacttatttgataaatacttaaatcaataataatcacgcttactaattatttgataaatacttaaattgacaattacgcttaccaacagaaaaagttatccaaataatcctaataaaacctagaatactatatatagtggagttgtttactcaaaacaattcattaaatacttcatttaaaattcatattttttatgagggcttttctaaatttaaattaaaaactttcaattaattttttgtatgtgtgagtataagaaaatattaatttttagcttctgagtttcatctaagttcttatatctttgaagatggagaatatagtaaagagaaatgaaaatgataatgcatgagaatttgaaaagaagaaagatgagttttttaaaaaaaaaggtctattgaaatcttgagaatttttattcataataatgcataaaagtcattaaaagtatataaaagtccatgtttataaaagtcgatgactttttgaatactagcttacttttaaagactttataaaagttgtaattgaataccccctaatttttatagacttttttaaagtctttaaaagtctattgaataccccatgacttcaaagttttttaaagttattattgaatacattatgacttttatactccgtcaaagtcttgaaaagtcttaattgaatacactctcctaaatatgtccaatcaagaattttaatgatttgtagtaattacagttatcaaacaacttaattagatttaaaacttttcagtaatattatatttaatgtctaatgtttcggcacttaattctcagttttaccaaatactaccttagtatactctggattgtatttttcttgcccaaatttcacaaaactcacacaatttattgatctttaatgcactacaagttgcttatattcacctttatcccttgccataaaatccttcctagtggctacatttatagctagccatacttaatatccaagttcacgaattcttataatacaagattactttcttgttaaaacatgataccatgtcattgggctactaatttggaagtattttattatttaacatgatatataattactttagcttactatttccacttccttaaatcaaattcctaccttcctagattcatatcaccaattgtagttttcttaattgtagttgttgttgcagtgtaggtcacatataaaagttttcttgtagtgtgagggttaacttattctcgtggtcattgagatgtacactaaaaaacgtcactttatggcaatgacgttatttaatttcaatttaaggtattatcacatggttctgactaaactcacctgattatcttgattgcaacaaaatcaaatttgagtgatcttattgctatgaatgtattgagcgtcagtgtaaattgtaaagacctctagaataattaatgcataagtttgagactattcagtttgatgttcgatattacatattaacctcctctcattcttcatgatctagaaatttctctttgcctgcctatttaatatcaaatctgtcttagtcaacactgggatgccttaattatagtattttatctatactgaagaaattaattggattgatgtcaatggatttttttaactcttattttatttccctttgtttttttcaatgcagtttaggctggcttatatagctcctgagtctagggt

SEQ ID NO: 6427 - DNA, 1588 bp, Ricinus communis
  Intron number 1 from transcript 29930.m000609 (locus 29930 .t000005) derived from phytozome v7.0 (chr-ID 29930; pos 1 63379 to 164966 reverse strand)
gagcccttgaggtgagtttggtaaactaactttttttctttttaatttacatactcatggtaggttttctgttccttcattacaaagaatattattgacatgtattacaaagttacttgatgtctattttcttaaaaacaaaagaaatattttctattttaagtagttttcgatcgattatgtattaattaatattcgattaatatatatatatatatatacttttcttttaaagttcttttatttaatatttcattttagagaatactgtatatggttacattcttttatttttaaatttttattttttcctttcaaaaagtttagtttcaaccctaaattatttcaattattttgttttgatcttcagaatctcagactgatccatagtaagtttagatggatgttaactccatttctcaagtgattttatgtttaatttacagtctgaactatatcctttatttatacttacatttatgtagcaattttctgtttctggatcttataaaccacttaattttgcttctatcccccttatttggtatcatttttatactagacttcatttgaactctatcaaaatttcttatatagtgtacttttaatatatacaatatgatttcatttagttcaaaataacttattttttaataatatattaatttctgagacttaaattttttttaatatgtgtttattttttttatatataaaatttctattttgttatggatacttatttttgacatatgaaattcaagtttacgcataattttatagttttttctattaatttattgattaataaattatattcctaattagatattgattttaatcctagaaaatatcataataataataaacttgttttctaattagataatgattattataaaaaatagcatattaattatattttaatattataataactaataattaatttctaattagatcataattttaattttagaatataatattttaaatataatatttattaataaattattttttagttatgtaattatttataattctaaaaaataataatatcaattatattgatagtattaatttatataatattagaattaattaatgattattactatagtaatttttttatattagtatactaataaaattttaaaatattgaaaaagttaagaagaaaaataaaaaatatttaatttacttgtattttaaaatataatgaaaaaactaaatatttaaaattttattaaattttatttatacatttgatttcataatcatataataaaaacgaccggtgcaaaatacaaccaaatgactaataaaattaaatcttaatagctattttagttatgctcttaataaaaggagataattgaccattgggataaaccttttctaatcgtaatttatatttttaaaacatgaaaatttgtaaaaccaaatcattttcactatattattttcttgatggtcattaaacaaaagtgaaattaatatataaatatatttttatgtatgtcttcgcatctctagtatgctaaactaatacaccatttgtcatatttcttacaaagcacaggat

SEQ ID NO: 6428 - DNA, 8470 bp, Ricinus communis
  Intron number 7 from transcript 30162.m001270 (locus 30162 .t000015) derived from phytozome v7.0 (chr-ID 30162; pos 9 72189 to 980658)
accggtaggttgtttgaaatctctatctccttcatgatatatatgtatattatattcttttctcccttattaatggctccagtataaagaaaagttttgttgaacttgaattgagaatccacaaatacaccattatccttctttttcttctagcaaatagataaaatttctattgataaaaagatgatgacaatcaagtctgattacttactgaagtattgagcgcttaagctgttccataattaccgtcttacttggatttggtcaaatgctatattttagaaattgtaaggtccaaatttttgtgaatctaccctggacctatccatgcttttgttttacatttccatggcctctatttcgtatggtatatgcaaaatttcagaacatccatatgattagagaaatagactctagagaaagtgggaaaatgtcctatcggtacatggcaaatataagaattgtttcaacctgtataggaaagtgtatatatcttaattttaagagactaattgatgcctaactaggagtccttctttgtagtgtaaataggagttctctgtatagaattccttcccagaataggacttgcacttgtgtatatatatgtgtgctattataatgaataaattacaagaaactcttatctcaaagtgtgtgtttacatggtatcagagtaatagaaattatatttgagagaatatttggtttggattcagaatcagcagtagaatggctgtttgtttaggtcacacctttagggaggtgaccatctgtcatcgcctgcacaaggaggaacactgcctgccaatcagcatgtctggagagtttggttgtcagaatttctgcatgtgagccacatgcaccagtcaaagaatctgcctgacttccacgtgccacgcgtgagggcgcgtgcttccctggaattgtttttggtttgttctcctggcttgcctagttctgtagaactgatttctgaggtctattgggtgattgggcgtttggtgctcaagttctttaaaggacaggtttgggctttctgttttggtttctggaattttcaatttctgtgaaatttctgcattttgttggtgttatggcagagaaaaagtctgtagtcatgtctgatatgattcccgtaatatcaaaaataactgaacataaactcattgggtctaattatctagattggagtaagattgttaaactttatttgcatagtattgaaaagatgatcatttggttgatgacccacctaaggataatgattcaaaacaaacctggcttaaggaagatgcgcgattgtttttgcagatacgagactctattaatagtgatgttattggattgataaatcactatgaatttgtaagagagttgatgaaatatttggactttctgtattctggaaaagggaatatctcgcttatgtatgagctttgcaaagctttctatcatgcagagaaacaaaacaattctttcacaagttattttatggattttaaaaggacttatgaagagctcaatatgttgttattgtgtagtctagatgtgaaagttcaataagttcagcaagagaagactattcagcctagtgcccttgtcagccgtaataattcctctgagtctggaagacaacaatataatagtagtaataagggtgttgtttccagcaattatgatgcttgaaacacggatactcaaggataggattcggaaggaatagtttgtcactattgtcacaaatctagtcatttgaagcggaattatagaaaaattgcagaataagaaggcacattcagctcatattgcaactactaaagatacatttgagaaatttattatgatatctgcagatgaatattccaagttcatttagtactaggattcattgaaatctcaatctactcttattattgctattattgagtcaggtaaactcaatatatgttttgttttctcatcctctaaatgagtcattgattttggtgccacatattatatgacatgtaattctagtatgttttactccgactttaaattgttgtatcttattcttttcggattattgtttatttcaagatcttatgaccaagaagattattggtaaggaaaatgagtttggggtcttttatgttcttagtttaccttaattcttcgtttgaagcacactgtcggttcactcatttttccctttctatgttaaagaaattgtgttctcagttacaaagtctgtctccattcgagtgttagtcgtgtcagtttgctaaacatcatcatcttagtttaagtacaagagtcaacaaacaagctaatgcttcttttgaattagttcattcacatgtttggggtccttgtccaattacatccaaaattgagtttaagtattttgttactattgctgattattctcgaatgacatggttatatttaataaaaaatcgttttgaggtgttctcatttttccgccttctgtgctgaaattaacattcaatttaatgtgtttgtgataatgctaaggaatatttatttgaatcttttcaaagttacatgattcaacatggcgtttttcatcaatcttcttatgttgttacactatttgaaaatgtagttgttgaacgaaaaattagacatcttttataaactgcaagagctttattgttttaaattcaggttcctaaagccttttgggctgatgttgtttccacaagttgttttctgaaataccacatgttatcttctgttcttcattttgaggcacgatatcatattctttttccaaaaaaatcattattttctattgaacccagggtacttgagtatacttgttttattcgggatgttcatctgcatgtcacaaaattagatcccaaatctttaaaatgcatgttttttattattctcgcattcaaaaggatacagatgttattgtccaacttttaacagtgtgtctgctgatgtcactttctttgaaaatactccattttctccgtcttgttcttatacaagttagggggaggatgttgatttgcttatctatactatcacatcctcaatctctaatcctattaatcttgtttctctcaagtccatgcctcctatagtacaagtgtattctcaatagatgagttatgtagacttaggtcctaaatcagttccttcgtcatcggattcaatctatcaggataatcatcctattgccctttataaagataaatattagtgtacttatcttgtgtcttcttttgtgtcttacaatcatttaactccttcatcttattcccttattgctccttcggattccatttctatttctagaactataaggaagcgctctcatcctggatggcagtagtgctatgattgagaaaatgaatgccttagaggacaatggtacatgaactttggtggatttacctgcaagtaagaaagctattggttgtaagtgggtgcttgaacttaaagtgaatcctaatgggtcagttgctcgttgaatgcccatcttgttgctaaagaatatgctcagacttatggactaaattattctgacactttttccttgttgctaagttaacttttgttaggttattgatctctctggcagcccctcatgattggcctatgcatcaattagatatcaagaatgtctttcttcatcgagatcttcaggtagaagtatatatggagcaacctcctggttttgttgcacagggggtgtatgagaaagtgtcattttcaaaaatcttcgcatggcctgaaacagggtccttgtgcttggtttgggaaatttagcatgggtttgagaggtttggaatgcagaaaagcaaatttgattactctgtcttctacaaacagtctaaagctggcatcattctgttagtagttgtggatgagattgtcattattggtagtgatgctatgagaatctcttcacttaaggcctttcttcacactcagttttacacgattgatttagagatgctaaagtatttcttgggtgttgaagtcacaaggagtagaaaaggtatctttctatctcagaggaatatgtgcttgacttgttgactgagacaggaaaattgggagcaaagccatctactgctccaataattattaatgtgcaacttggaaaaaatggtgagctatttaaagatcctgaggaatatagaagattagttggaaagttaacttatctaataataactcgtccaaatattgcatactctgttagtgttgtgagtccatttatgttatcccaacaaccaatcattggaaaacttcggaacatatttttgtgttacttgaaaggagtatctggacgttgtattttgtattcaaatcatgggcacactcatattgaatgtttctcgagtgcagattgggcaggttctaaggtggataaaagatccacgttaggatattgtgtctttgttggaggtaatttggttccgtggaagagtaagaagcaaacgttgtatcacgctctagtgtagagtcgaaatgtcgagctatggctgtgtgaaataatgtggatatattagctcttgactgaagtaggtcttaagacttaattctagccaaattatggtgtgataaccaacaagctgctcttcattttgcatccaattccgtattccatgaacgaacgaagcacattgaaatttactgtcgttttgcttgtgaaaagttccagcaaggattgatttccacaaggtatgtgaagactggagaagaactaaaagatatttcaaaaaactctaaatgaggctcgggttgattatctttgtaacaacatgggcatcatcaatatctatgctccagcttgaggggaagtgttacaacttttataggaaagtgtatatcttaattataggagactaatcgatgtctaattaggagtcctttgtatagattccttcctagaataggacttacacttgtgtatatatatatgtgctattatagtgaataaattacaagaaattcttctgtcaaattgtgttttcaaggatcctagaatctcaattctctcacatgacaattattaccaagtggaacttattctcaagcatgaaagcccaatcctactcaacatccatccctaatcggtcactacccaatatatatttggcaataaacataacatcaaataaatatctaaagtggtagaattaaaaaatattatatagattaaaacagatataagataactaaaatcatggcacaccctttagtttgtagtaagacaaggtcatgcctatggtatcaaaagcttgtggttgggttctttgagtgtatctaacttgaatggagggtattacttttctaaattgtttttgttggtcatattggtagtctacagttgtgttatatagtaggattctgtgtcctctgtggtgtattcttctttctttctaaaaagaaaaaacgcttatcttatcttatagatattaaaagaataaataaataatgcattgcgcccgcaactgtttcaattctcacaatgtaagaagttaaaaataatgtttgcaatggaaaaaatagattatcaaattttacattctcatggttgttctgcttttatcctttgtattgtcatttggattgaatatctctcattatgacagttcctcattgtacagaaattgtagagatttacaaggttggttttctgccattacatcaattaaatctaggcgaatttctagatctatctaaacaaggaagtaatgactaattagatttatctaaacaaggaagatacatctatactacttaattacaatatatttacagatgtagtacataatttatgccttgatatatgttgtcatcccctctcaaattgatgttggtcaatcaagaagcatcgctttgcccataagaaactgatgatgttgtcgtgtcatatccctggtaaattcatcaactatttggagaatagtggaaatatgaggaagagaaataataagagtgtccaaagctttgcaaatagaatgaaaatccacttcaatatgctaagtgcattcttggtaaacagggtttgtagcaatttgaatagcactaatgttatcaacatgaagtggtataggattagattgacagaaaccaagctcggctagatgtccatgaagccaaacaatctttgaacaagcagtagacatagcacggtattcagatttagttgaagattcagaaacacgagcttgcttcttactcttcagatcatcgagtatccagacacctagtccaatcagatccactataggcaacaagatgaagaggagaaccagttagaaagaacaattcatgactaggtgtcttacgaaggtatcaaatgatacgacgaacatgtaaatacaaatgattggaatgttgcatgaattgacttcttgaacagtaaaggagatattggcctcgtaatagtcaaatggttcaagctgcccgttgattgtccatagatagtaggatcagaaataagagcaccctcctcactatgatactttgtgttgacttctagtggagtatccacaggagaggcaacttgaagatcaactaatttaagcaaatcctctgtgtatttatgttgattaaaaaataccaaaggaatcagaatgaacttccaaacctaagaactaagaagaccaagatccttcatacaaaatgaggcttcaagatgttgcaaacgagaaattaaggcggaatcttttctggtcaatttctttatggtcaatttcatataaaggatttagggggctaaagtacttcttaggtgttgaggtgataaggagtaaggaatgtatcttgggagaagtacaaaaaaattttctatggtttgatgcttgcacttaagggactgtagtttttttttttgttacaaagaagtatcttgtgatttagttttcttatattcttactactttacaaattaatatctttaaatttctaaattttaatattaatataatactcattttcaataaaaagaatcacttattaagtgatttagcatataattaaatatattgaattcatgttaaataaaagtaatataagttttttaatttttatcaggaataaaatgaaataatttttagaataaagttaaaatatttttaggagtatcctgatagttgatttgatggtagatcacctataaaataattctattattgaaaatgaatataaaactaatattaaatcatacaaaactaaagatattaatttataaggtagtaaaaatgtaataaaattaaatcacagggtacttctttgtcatgaaaaaaaatcagagtcctctaaatgcaaaagcgcctaactataaggtatattctcgtactttttccatgtatcttatgttaacagaagtatgtgcttgacttgttcgagacagggaaataggaggctaaaccatgtagcacttaaatggttcctaatttgtaggttacataagatggtgaattgtttgaagattctgagacatacaagagattagttgggaagtggaactattttactgtgactcgtctagatattgcctaatttgtcagtatggtaagtcaataaatgtcttttccaactgttgaacattgaaaaattgtagaacaaattttgtgctatttgaaaggagcgcttgggcgaggaatcctatatggcaaccatagtcataatagagttgaattttttcagatgctgattgggcagatccaaggaagattgaagatctacttcaggctattgtgtatttgttgaaatttggcttcatggaaaagcaagaagcaaaatgttgtcttacatttgaggacaaaatcagaataagggctatggccaagcctatatgtgaaataaggatatatcagctcctcaaagaagtgagtcttaagatttcagtaccggctaagttatggtatgacaaccaagtcgcactttgtatgcatctaatccaatttttcatgaacaaactcaacatatgagattgattgttcattttgtctgtgaagaaattcagcaagggtttgatttttgcaggatatatgaaaacaagagaacaattgaaagatgtcttcacaaagtctctgaatgagttagggttgattatctccataacaagttgggcttgatcaacatctatcctccaacttgagggggagagttacaaccattgcattgtatattaaatatgaatgtacagctatactagataggaatatactaaataggagaataattatagggatttgattaggaatcgttagttgcttttattcctaaactagagatatagctttgtatatatagatgtatatcattgatggatggacacaaaaatttcttcagacttttattttcagagtcttagtttgcacatgccaaataggtgctcagccaagatacttccttcgtatctgatcatcctatatgccttagaaaatcactatagtacttatctaaacatgcaggattattgaaa

SEQ ID NO: 6429 - DNA, 5880 bp, Ricinus communis
  Intron number 7 from transcript 29958.m000940 (locus 29958 .t000010) derived from phytozome v7.0 (chr-ID 29958; pos 4 71758 to 477637)
ctaagaagagtccttgaagtgagtaggatttatattgttttctatctccataaaacttaaaagaaaggcctaattaccaaataattcctgaactttcaacattttttttcatttttaactaattgtttcataagttgcatttaaactccgaagcttgtaaaattttttctgtttcactattccgacagtatttttaaaattcaccggttgtagttgcttatgtggcaatcggaccccaaaataaaaaaaaaaagaattgacttgatgagtaagcaaataactaaactgactcgttaaaacggtgtgttttgctcaattacataacagaaaacacattggctttctttactctttgtagttaatttctttacattggcttttactctcactcttttctcctccaccatccccacgttacaaccaacacttcctcccccacttccccacttctcttccagtctctgtcactacagccttactccactatgcttcaacttccaacaccaccattgcacacaagtcatccactaaactctccaccatcgccatccactctccactgctgcccacccccttgcaatttcctagtttttggcttaacccatgaaacctttttgtgaaaatcacttaatttccatggccgtaccaatctttcttgatggaagtgagtactatgtgtcgaattttgaaaagattcacctagaaatcgaagcttatgacatagagtaaaggaccaaagtaagcgaaatgaatgatcttttatcagtagcacaagcacaagccaaagatgggtgtaaaccagtacaaaatttactcttctcagattgcaagctaggcgtaaacaacatgccaaatcatattcatgaagttgcttgggatgtgattctaatggacggtccacgtgggtatttcgcggcggcaccaagaaggatgtcaccaacatttacagcctctgtaatggtgaggagcaaaagaggtgaaaacatggaaggcaacttcttagcaagagaggtgagaggatttttgagttctgtatctttatccggacatggcaacaactttgagttctctaaaaattcaaaatcaaaaatatcgtcgtcgccacaagcaagtcaattttttattttattttggagtccgattgccacataagcaactctcgtcggtgaatctggaaggaataattataaacatagtggttgaacttgttaagatttaacaattaaatgtctaaactttacaagttataacttgttatataaacttagtaaatatttatgattgagtgtatatagcaggttaacagcaaattacaggttattcatatcaaattcttataaattggtgtgcctacttattaaaatttaataatcaagtgtttaatcttttaaaaatttagtgtgttaaattaaaaattattaatatttgaatatgtgaaaccaattattatatatataaagaaaatctaaactagacaaatcaaactattatattttcataataaaagataatatttatatgaaggaggaaattttttttaatgtaaacaataagaattacaaagatagataaaaaatgtataaataaatattatatatttcataagaagatgtattaattattaacattgtagtcaagattattgtcctcaataataactaattttgttttagctgtttgtagtgatgggtcgaagaaaacaatgtgttgctcaaagttggatagaggtttctttagaaaaattgttgaaaatataacagtgtaatgatgttgataatgagagcaatgtattaatctattaagaataaatatattttaaagattttttgccatattattttttttatctacttaaaccgataatatgtattttaagattacaagtccgtaactgctattgatttgctaaatacactcaattataaatatttactaagttcacattccaaattgtaacttttaagagtttaaatttttgatgtcaaattttaataagttaacataccatttttgtatttatccagcttcttatatataggttaccagttccgtacacttaaatgttaataattccggttttgcacactaaattgtaacttttaatagtttaaatacttgattgtcaaatcttaacaagtctacacactatttttgtaattattccaatttggaaaaaactgctggagtagtgaaatagaaaataattacaagcttgggagtttaaatgcaactcttgtaacaattagttaaaaatgaaaaaaagttataagtccatgaattatttggtaattaggccgaaaagaaattctattaattttgcctttgggccagctattatagttttcacatgagtgcaaagaataaaggcgatttcatgataacaagtggtgctctttcttttgctagttattgtcttttgtaatgtttcttttgccaactattcatataacccaaacaatttatagattatagcaagtcattgtaatttgagcaacgttttatttttcagctcaattaggcattctttgcatgtagggtttctggaagcaatgttctatcaagtggtacaaaagattaggcaaagggtgcatgctttcaaaatgtctggtagttgttgcttttaattaaacaatacatgtgtagcatgtttatgtttcatgtgattggtaaagcgttttggccaaatttgatgctgtttctttgcaagatctagtggctctgttgtttagcataatggatgaacgtattgattatatgttaggggagcaaaaatgatccttttgtgtgttaggggagcaaaaatgattccttttgtgtgaccatgatacataaataaaaagaaagtagtggagtacaacactccatgtggcacaatagtgggaagatattctgctaattagtttcttagttgttatttattactagttattatttactattagttgtcatttagttgttgataatttaggataatatttctatttttattgagataatttaggatgagttttgtacttatcactccttacaagtagggagttatggtaccttggctgtgtgtttgaagattagattgttaatgaagaggcaaacaaactttcatctaaatattgtgagatcagtgagctctctctctaattaagctctcatactattatcagtcagtcaagataggcagaggaaggaaaaagctttgtaagtctccttctccaataaagttaggagaggattatgcacttcaaggtcccattacctgatccaaagtcagggctttaatacaaatttggtattagagccaaaagtaatgggagatttgcaaaccgtataggagcaatttaatgaattcttaacaatctataaagctgagcaagctgcaacctgtgcaagataatgaaccatggcaacacaactggaacaactcacgcaaactctaaacacctagcaaacagagattcgagtccgaagactagaaacttcaatgggacagatcaatcgtgaacctcatgagcctagaaacttcaaggggatagatcgcactgaggatcgccaagtcttccctcgttatacaaagattgatttcctttgttttgatggaaatactgatcctttggtatggttgaatcgtagtgggaatttcttccaccatcaacgaacgcctgaagaagaaagagtatctttagccttgttacatttagaagaaaatgcccaagtatggtacttaaaattagcaagggacaagctacaattgacatggatgaatttaagcatcactgtaacttaaggtttggtcccccaacaagcaataagttaggtgagttgtccaaattaaaacaaataggatcggtggaacaatttcaatgccaatttgaaaagttatctgcccagaccacgtccttaatctcggagcaagagatgcagattttaatcagtggactacaagaagatatagctgttgaagtggaactccacaacccacttgacttatcaacaaccatgagtcttgcacgactccacgggcggcgaatctcagctgaaaaaggtgcagcacaatctttcatagaggtgaagggaactccattcatataccaaaggaggctggtactcaaaattctccttatatccgatgacttgcacgaactgaaatggaagatagaaaggcgaaaggtctctgtttcaactgtgatgaatgttttgttctgggacacagatgcaagaaactatttcggttagaagggattgaagagacagcaaccactgatagcgacgtactagaacctgaaatttcgttgcatgctataataggtacccaatcttctcaaacaaagggaaaatccatggaagaccaatactgatccttactgactcaggaagcatgcatagtttggtggatgaatcctttgtgggacatcttcagattccagcagaaaccaaagaaaatctaagggttgtcgtggcaaacggcaaaaagcttaagtgttctggagtttgccaaatattacctattaaattgggtagacaaacatttcaatttgatttgttcttccttccattatgtggttttggtgcagtggtaggggttaattggctcagaactcttatgcccattcaatgggattttgccacaatgaatatggcttttcaatggtagaataccccaatacaactaaatggcattaaggattagaaaaattcaaccatcactgccagatttcagcaatagctttttggtagagtgtgatgcatctgatagtgacgtgggagcagttttacaacaagaaggcaaacctgtagcattttcagtagaccattggtacaatgccatcttcacttactagcgtatgagaaggaactgactggtctcacaaaagttgttcgtcattggagattatttttatggggcagaaaattcttgattagaatgttttgttaagtttctcttggaccagtgtattaccactgcacctcagcaacattggttgtctcaattgttaagatggtttatctcctatagatgtttcttggggagagtgccagccaacttatagagaaacattcagcattcacaatcgaggtcaagcgcactttggagggagagagtgatgatacagaaataaaaggaaagaagtagagtacaacgctccatgtagcacaatagtgagaagatattctgctaattagattcttagttattatttattattggttgttattagttgttatttagatgctgataatttaggataatatttctattgttattgagataattcaggatgagttttgtacttatcactccttagaagtagagagttatagtaactaggctgtgtatttaaggaccatattgttaatgaagaggcaagcaaactttcatctaaatattgtgagatcagtgagttctctccctaattgagctctcatactattagtaatcagtcaatataggcagaggagggaagagtcctaataaatctccttctataaagttaggagaggattttacacttcaaggtcccattacctgatccaaagccagggcacataccagaccatgtctttgatgtttggtgtttgtttcttcaggggttaattgagtttgtgtagaaaatatagagatcaagcttaaagcttggatggattatcatgtagatcaacattaaattgtgaacattctgaacactactaaaagaagagttgcatcttctttggttttaggtggctgaatttttttgttttggttgtttaatactgtaaattttgttgagagctccttttgcaaagacatattatacttctaaattacatgcatgggacccccttcgtgtgcttctgaatagtcatacttatggattgaagttattgtttgctatcacagtcaag

SEQ ID NO: 6430 - DNA, 1947 bp, Ricinus communis
  Intron number 1 from transcript 29877.m000467 (locus 29877 .t000005) derived from phytozome v7.0 (chr-ID 29877; pos 5 0505 to 52451)
aggttaaggataaaaatgttaataaatgaaggaagcttgtaattgataaaactaaaatttgatctaagatatttttttttatattatttagggtttatattgctattttgttttagtattttgttaataattttttttttgttatttagggtatatttatgattttttaatttttttgatatttttttatttgataatttttacatcttgatacattgatttaccataataataaatagagtcactggtgactccgtcgtggaaagagccgcttctttcttacttgatagggagatttatttaaatttaaaatggaatattcattttattaaaaaaattattaataaaatgatttttatatttttttatttcataattttttactttataaaactgtaatttttttattttttaaaattttatttaatttttacttttgcataatctattttacatttgcattgttgcttttgtaaggttgatttttagtttattttaagtttactttatttttttctgtaatgtatttgaatttattttttttactaattttttttttcagttgtggtcattgaaagtgaacgtcgaagatcattttagtgtcaaagttggttatcatttgttttatgatgttattacaaacattaaagataagtttgatgagaaacaatcgttgatatttaggaatagttgttttggtagttttttagatttttctgtttttaagttgcattcccagcttattcgtttcttacttcttaagaaggttaagcaacttaataattttgagatgcggtttgatgtttatagttatagattgagatttggtatagatgagtttgctttagttacaggtttgaaatgtcatgaggagttgaacaagtttggttttgctaaagattcaaatgttttagttgataagtattttaaagatattaaatggataaacaagcaaaccagtgagaaagcttttttgtctaaaaggtggttgtgtgatgatgatgttgtgaagcttgcttgtttgaatttcttgcatctttttttctgttctcttcaccgaaagagaagttgattttgttgtctgaatttgatatttttgaatttgatagatatgataattatccttacggtttataggtctttaatcttactcttgattttttgaagattaagtatatgggaaagggaaaaatattcagaaaggaaaagaaaaaaatattattataggttgattggttttccttatgcacttcaatgttggttttacaagtgttgtccttcagttgttaactctattactattttggtgagtagtgatgtgattcttcggattttaaaatagtaagttactaaagtttcgagttataaatctttggataatggtctgtttcggaatagaggaaagaaggtaattagttttcttgttgatttttttatttttttataaatactgtctttttatatttttattttttttagttgaagctgaaaaatattcttctcactactgctgagagggagaagcttgatttgaacagttgtttttcaaatgataagagtaaatctgttgttgatagtaatgaaaacaatgataataattttgaagatattgtcccttcttattttttttattcatctactggttataaacgtaaaatgaacaaggaatttagtttaagttcatttgattcaattaagaagaaattagattctcttttgtttggttagaagaaattgcagggtgatcttaatagtcttaggctttatattgatttgagatttgttgatatttttgaatgtttatgaactttgaaaaagaagctgggagttgatgaaaaaattgatgatgtaagtttttttatagttgagttttagttgattttctttttattgtttgatattttttttttggtaatttgtaggatcatacagataacagtgttggtg

SEQ ID NO: 6431 - DNA, 3292 bp, Ricinus communis
  Intron number 2 from transcript 30189.m001648 (locus 30189 .t000016) derived from phytozome v7.0 (chr-ID 30189; pos 3 11286 to 314577)
aacaacactcaaacggaaaagccctttacttaaaggtacttgtttttacttatcccttttacttaagcatacagcattcaaaagtggattaaggtctcaatatatattacaaaagaaaagtgtgataatgaattgttttaattaattatgaagtacaaagccatattatatcctttgcctacgaaattactactgtggtaattttgttaaaagatatgggaatttgttttttttcctccaatttttgagctgaggcagtttaaaatattgaaatcagttgggcaatgcctcgtctttgatgtgtaagattttggtttgtagttggtttaaagttagagatgagatgtaacagcagatagtttgaatgacagaaacataattagcttgaaaattattattattaatttttttcaatgacagattagatttcaatctaagattataattatgggccaatgtgctttgttgccttttgggaggcttcacttttcatttttgaaatctttaattaatttttggctgattttagtaagaatctaatgataagtcttaatttttcaatttccttaatattgagtgacttatcagtttattttgatctatatttttatttcagaattctttcatcttgatgtgatgtctaaatatgataaatcgtgcttaaagtattgctttgtcatcttattaattcttctaataagatgaattgaggaaaagttttgtatatatatatatggaaaaacatgtgtaaaacctttttgttttacacgatttttcatccattgatttccaacacatcttaaggattaatctcatatagttttctaatcttatatcctctctcttattcattaaataattacatttattacttaactttcatctatgacaagaatctccttccctttatttactttttttctttaataataaaaaggaacccccaacgaaaagcccaaaacacaaaaaaaaaaaaaaaaataaaaaataaaaaataaaaaatgaaagggaaaacatgactaaataaggaaaaaaaaaagaagaaaccataagattgccttgttttgtcactttccgaggcctgtacattttggtaagcaaagaacatgggatttttatttttatcatggagataagtttgtgaatgtatatgtaaaaatgtgcaatccatgtttataagaaactaacaatttgatgtcttccactaataattaattatctgtactagtaataattttttattttgaactgaagatgaaactccattaagaagtgatagctagctcagttatgatggctcatgtaaaatcaaagtttcgaataataatatcaaagacattaggcattttagacgacagagtggtacatatgtaattagagaacatgagtaaattgaatggaaaaaataaataaatgcaaataaaagaaagggctatattcattccaaaaaatattattctcttcaagctgtttattgattatttgagctctcttcgaataaaagaatattattacaataaaaataatataccatatttagtaaaggatgtagatttttgttatagttggaaagtacataattttgagtcgttatacatagtgaaaataaatggttaaaatgtgcaaaataaagtcttacacaactcgtttcctcgttattgcatcattcttttcctaggatttttatttgaagtgaacttgtggcttttccctctcttagttgtctttactgtgaagacaatgtgtaagtggatcccctcccctatatatacatgtatgtgtgtgtgtgtgtatagtttcccatgagggagtatcttgctggttaaaaactaagatatgcctattaaaaatttgaggtttaaatactactatctgtggttgctaatcgtggaataagaaatatcttgctggttaaaactaagatatgcctattaataatttgaggttttttgttttatttactcatacatgcaatacgttatttcactcactaatcaatgtgctaatacagtgaaattagtgggtatagtggaataaaagaaaaagattgattcaggttaattttgtaaatgttaatagttctctttttaattattaatgatacttgtataataatacatgggccttaatgtttgtgttttgcatatatcatttttgatattatgtctacaattattgtcttatcaaatagtccattttatcctttgcacattcactgaataaaccacttcatttgacaatctagaaacaacaaaacaacagaatcgctttagtgacatgtactaataattcaatcgtaaatcattgggtataaaattaattgcactgtactttactcgtttctttttcttttctttatatacagtagttcatgtatttcaaaaatttaaatccatcaagttttagcataatgtagtgatatgtgctttttatttggattaaatcaatcattaataaacatttatttggtcaatataatgcaactgatagatcacgattatctcaagcaatctataatttgttacttgatcttctcttctttccctctttatgtacaactttctagaatttgattattgtgttgtgcattttacttttcctattgtatcatgtttgccttattgaacttctgagacagataagattactgccattgcagggagatattacccatctgtgtttcttaccattgttatacatttatgtgatccaacagagaaatacttacatgtcctgtatttgttctggttgttgaatacatttgaaggtggattatgatatttgttggaaaaggaaaagctaattgtttgtctatttagatcaagaacaatttaaagttcaatcaagttcttttattacataggattatctcagtgccattaaagaagaatctgagggtattgaagtagacttcaattacataaggtttattggacaagaagaaatttatgatagtaggcaactccaattcattgttatttcattgtactagtttattaggtcaaaatccagagggtaaatagtagttccccttatttttaattatgcaaacttatatacgtaacttcttggattttgtgccaattatagcttaatttagatggtcatattcctgcagagtccccttactgtattattttttttcttgatttttgtataattgtctttaacacccaaaattggagaacctcatcatgtgaaaaatatgagctcgtagttttctgattgcaaattttatactctataattgtctgtttcttttaggtgggagaaagcttttgagcggcctgga

SEQ ID NO: 6432 - DNA, 973 bp, Ricinus communis
  Intron number 9 from transcript 29848.m004557 (locus 29848 .t000113) derived from phytozome v7.0 (chr-ID 29848; pos 6 59755 to 660727)
atcatcgtgtgcttttgactggaactcctcttcaggtttgtactcagtgttggttagtgataatgcaaataaactacctagatttaagattgcttaattgctgataatagcagttgcatattgcaagtataaaactggaaaataatgctttgctgcagatacatgtcattcaagatcattacatatttctttggtaacactttctaatccaaatttcaacttttagttgttttattgatggtacttttcatgctgtcatggatgatttcgtattcttcaaaattaatgaagaggaaggtcattatctaattacttaagaagattgtgccataatgtaagctctagaatattgatgcttcctgagtgcactcatcaggacaaagcattttcacttagatacttctggcttaatcttctggatgctgaggctgtgtaattgatgtcatcccctgcaagttcttagatttatttctattaatcttagacaaaatttcatcctgattgtatatgctgcttgaattatgagtttagctattttaaagttttctcactgaattaacgtggttagattattattcaggaagtaattatggagtaaattagatagaagtattctatttaataaacaaaagaccaaagtctccgcaacacttacagattcatgcattactttctttcttctcttctccttcgtagttcttattcttattaccttaatgcttggattttatgttatcctcttggcttcctgattgcttttttttttttttttcccttaagtggggcaagctaatgttttcatacaaggactaatattcatttggtttaatgcctggttgttctgtggttattttgaatgcttaaagttggttaaagtttgagtaaattttctcatctcgttactgttcacatgtatatttgttgaattcccaacttactggcatttatccgatactttctcagaacaatctgg

SEQ ID NO: 6433 - DNA, 2923 bp, Ricinus communis
  Intron number 12 from transcript 29955.m001156 (locus 2995 5.t000001) derived from phytozome v7.0 (chr-ID 29955; pos 19294 to 22216)
aaagaggtacttgtggttttaaatttgaatatctacacttgtttatttgtttatatacttttttgtaaatattaattggtcctctgtcaattcatttctctttttgaatgtctgaaagatacattgaccatgcatcatcatctttaaaagtgtgagaacataacatggaaattggattgttccttagaaatgactatatccaatgaggggaccttaacatgatagaagcagcggaagctgaagcagttatgagagttctcctagttggaaatttatattaatttttcgaatcatgcttctttcttgtctgaacttggtagcttacgctcattagattttgtattgtatgcctctaataatatgtgtagtgtcatccttgtgctagggtttctttgcattctcattataatgtagttgaaattccttgcttagcttctggtcgctaggatttgtttttggctaatcaagggatcatgagttgtttaattaggaatatgggtggcacttctttaaccatgccatgggtcctgttgtgtttattatgttaatgatggcccgggtaccgggatagtctcaaagaaggtgggcttcctttgcatactatttgtcttgggggattccaaggttaaataaataacaagggaaagaagatgaccaacaagatgtttggtatttgaggcgatgggtgtctccatgaggggaatttgaatatctcatacttatttattgtgctgaataatgggttagataggctgtgttttttgaaatgctgaatgtttgcttcagagttgttcgagggggggttaccttatgatgcttacataaagggccttttcatggattgaattattcagaagttaaatggacaaagggtcaatttgccccttgaacttatgtccaagggtcaaatttatccaatttaaactttttcagcaaatagcccctgaacttaagtccaaggatcaaatacaccaatctaaactttttcagcaaatagtcccatgaacttgtgtccaagggttaaatatatccaattcaattctttttaaaatttaggttttaattaaattataaaaattaaaaataatatttattttatttatttactggtataatatctggtgatgtgctatacaagagtgtatttgaaatattttagattttggatttaatttacccaaaatgacaagtattaaataagtcaaatttcaattttctaaggattaaatatgtcaaaattcaattttctaagaattaaatacgttcaatttcaactttcttaataaatggccccataactcatcatttttgggtcaattaaatttgaattttaaattttgtcaaacacactcttgtgtagtgcgttattatatagtgtattagcaaatgaatgaaataaatattatttttaatttttataattcaattaaaacataaaaatctaatattattttgcttttaaaaaaaaattaaattgtgtgtatttgactcttgaacacaagttcagggggctatttggtacaaaagtttaaattggatatatttgacccttagacataacttcaagaggctatttgctaaaaaagtttaaattgggtctgtttgaccattggacataagttttggaggcaaattgaccctttgtccgaagataaataggcctccaacagttcttggtgggaatattgatatggttatttttctgcaaatccaggtgaaggaatatggtagagagtattatatgagataattgttcaagttttcaattgttagtgtatgtttctccatttgaaggttattgttgcgtgcttttagtgtttcgagagaattctaccatatgaaggtttgactattcttaaaggttggctgtggaaaggactgcatcaatgatcttcttgtttccttggtatatatggtcttcattagaactggtgcttctcttgataacttgtgttgtggcttaagatggatatctagtgaacttgtgaagggatggtgacaacttctgttgtggcgaaggtggagaactgatgaacttgtgaagggatggtgagatggcagtagagtggggattctgctgtttttgaagttgctgtcaaattgaagctgtccaagaaggagcttgaaagcatcattgctggcagaaatcttggggcctccttaacagaaaaatctgaaattacagttaaagaactttggctttggttcattttagatagtgatcatcttagaagactgctgttttttttgccgggataaagtttcacagatgccttggttaaatctcgagttttgatatgatagtgtagcttaaaacttgctattggcaagtggtgatcatcattgggacttatgcagggttttaattctctaagtcattgatataggtgcaaatagcagtggattgctttggagaggcctaggagggacaatttttttaattgttcagcattctatcttgcgttggttagtgaaaagatatggagtcgatcaggtgatcttacattcttaaagatgtaagcctgtttcgctacggtggcgaattatcttaaagatgttacttctactgtagattttggacttatcatctctctctctctctctctctccacatatatatatgtgtgtgtgtgtatgttttttttttgtttcattccctttttccatgtagtgtttgtctattattcctcatccgcaataatggaggaaatgataaaagcaacaagatataatgtttgtatttgctcctttttcatttacatgaataaacctagtccactttttgtatctgctgtgtacatcatatagtcgcatgcaattttgcatgttgaaaaactattattgtactgaatgtatgtggttcttctgtgggatgtgtatttatactgacaaacttgttcactatatagcggaatatagtaga

SEQ ID NO: 6434 - DNA, 2208 bp, Ricinus communis
  Intron number 4 from transcript 30098.m001738 (locus 30098 .t000033) derived from phytozome v7.0 (chr-ID 30098; pos 1 133499 to 1135706)
aagaaaagaaggggaaaaactgcagtgtgagtatattgaacatacctttcttttgctatattgctcggttgttcaattgtcttaacttgggatatataaattttagtttcatatatggtgaatgtaatttcttggtggaaaaggctgggtaatttaatatctaaatgtataagatccgttttgactggtatatctgatatacatgagcatgcttgcagctaaattatttctcctgtgagaagaaattcttgaactcaaacttcacatgtagtagtgtatcccacctaggaaacaatttgacatacctgtttttattgccttattgttaactctgtcatatgcctgtggtactcagctccctccctccttcaattctttaaaattttctttttttatctactaagagctccttggaaagttatttaaggtcatccaatgtagcgtcacttagaatgtagcagatgatatcatggtgtcatcaaagccagtttcacggtagtgctttcatcacgacacagttcattcctttatgaactttatgttttaagtttgggattttgacttgttatttccagcattatacaagagatttttccacaatgttatttctatttcaggtcagcgaagcagtcccagattttgtgtttcctattgcaattttaaattttattttgcatcctaaagtccctacaatttagttttagtaacaataacattcatttagctcagttctgaaagaaatcgtactaaaatatgatatggtatcatacgaccatgagcttttgaaacgcataaaaatattaaatctacgtcaagctatgatgccatttcaatgtccgcaatgaaatttttccgtaatcaggcaaaatggattttagcgttactaaaattaaagtgcaatgatttttgagatacaaatggaaatttaaagactgcaatagaaactacacttaaaaattaagaactgcaggtgaaatataccccaaaaagtttcttcttgtgctatcactgacttgcctcgttgaaaactgaaatcaatcacaaaaaacaaaacctttaggcagctagtgagaaacagaacattatgatgtttgaaggaatagaatgcaggtgatatctcaacgcaattagagactaaggctcgggaattgttttgtttcaatactttcttttagtcagttctattaagggtttatcttcttattaggaagcttccccctataggaataattatatttagaaagcttttacttctactaagtgatctagcatatcaacatttataagatgcagtccttattgaacagataaagtagtccatctgataaatatttatatagcttggttaaatttgtaggtctttgattcattagatttgaatatgttatgactagctgttttgatggcacatggacttctctagcatgatttctcttttgtccacctctcttctttttgttatgcactctttctctcaaggcttccagccacagtaaccccaagtatctgttcaaggcactccaaacagtcatcagatacccttttcttctccttttgtgcaactctgtgtcacatccaatgtagtttttgagatattttgatatacttatgcctatgaaaattctttggatgcatgcttgtaggctatatatggaattgaaagagctatgatcttgtttgctacatttggtgtaacatgcttaaatgtaaatgtcccctttcctttcagtcatggaaatagttttgccatgttaaaattctgttacccctttacgcttgtgatttattgctctctgactaattttccgcgccttttcaatgatttaacagtatttacttagtttagtaaattatacctgaatttgttttggtgttttttgtttcttcttttgcgtctctgcatttgtccgaaatcagtgttgatattttataactaagcaataaatttgctgtacatttgttctcttgggatcaatttgcaattcctccataaattaggttttaaggtaatgttattcctcaaaaagaaagatgaagtgaaaattaaaggcttcttaagtagccttattttgcatcgagtcttgggaacttttggtatcacactgtttcttgtatctagatgtttaaaatgcttttgattctttactgagtttgagcatggttcttttctcaggaaccaaggccactgtcccagacagatttggagaa

SEQ ID NO: 6435 - DNA, 2535 bp, Ricinus communis
  Intron number 1 from transcript 29904.m002979 (locus 29904 .t000093) derived from phytozome v7.0 (chr-ID 29904; pos 6 14148 to 616682 reverse strand)
ggaacatttcctgtgaaggtatgctactttctttctatctgtttcaatgttaacgcagaactgttgtaatttaaggtgcttgttgattagtttaattgtctcttcattgttgcttgagtaatattaaactccatttttctaccatttagtatcaaattatttttctgatttttgtgttaaggtttgggaataccttgattttcttaatgagttcatagaactgtgtgactttgacttccatcattggtcttgcccatcctcagaacttcctgaaaaagtgtgtttcctttgaagctttactgagcaatctatagcttggaggaccaagatgttcagatgtggatagccgtatacatctcaatagaattctaactctaactgtttggtttatactcgggtatttgaacaatttaaggttgatgcttctttggcttctaagtgtcgattctcttgattgtcaatattattgtctacatggtcataatttccgctgctcttcttttgcccgaggttactgaccacaccccaggttctgaatggtggcagacaagacaagaagaatgcgtttggttcagacgtccactcagtatttgtaacatcaatcatgattgtcttcattcctctaaacatcacaattctgctcatctttttttcctcaaatctcttctaactcaatgttaaactaatactgactattgcttataatgtgtgcatgtattagtctgttgctaatttatgggcatgtatatgaacttgttcttgacttcagctatgcaagcaaattataatggccttaatttagagttatgcaattgtatgtgactgttcatattgggcttgttggagcttaaacctttcatcaaataatctgaatattttagaaattgagtatgtccaaatttgattttcttcaaatgatatagttccgagtctttgccaccagtaattaaaaattttggggcaagtttgctgctgtctaaatttatcttttgggcatgattataccttgtgaaattctgtaacggcacatgtcatttcttggaccctaacaactattaagttgtctttcttagtagccaagacaataccgaactacctacggtaaagaaacatagactcttctaacacctttgtgggtgaaatatgatgtctgcttgctgaactgtttttctcttttcttttttccatggagttagcaattttcaactgaaggaaactcagtgactaattaagtaataataccatgctaatatggcctgacagaattcaacttcagatggatctggctcaaaaatgccaaacaggagagaagaaatgtttccttttggctattaagtgttttgtttcacagggaaagaagtgttgatatttattcttccattgtgaagttgcttttgaatagtgaatttaatttttcttttgttgactgcctccaagaataataaaggagttgcttgaggatacatttgaaagcagctgaagagattggggcttgtatgcttcatttctgtttttgcatgcgggagagaaatttttgtacttttgaaggagtggtttctctaatctgaactaaaagacatcctgtttaagttccaaccttttcatgtataatgcatattgatgctgttatatgctttgcatgaaaggtgaaaaaagggacacatgttagaggaactaggaacttaagtaggaagttgatagtgggggagagctttctgaattgatagatgttttagtctctggcagagaagcatcaggaaaagtgtttttgaggcttgcgactgttttttttatcctaaacatccttcgtagatggcattttagatctgtatctagatatcatatctaagttgacatatttatggccaaacaggataagttctctgttgttatgcacagtgcccaacttttgttgcaactgttatggtgcttgtactgattggagaaaatcagagtagatgggcaataggttctaattaggggaaaaatttcaagtctatcccctgaatcaaggcattctggtatcactaggtcagtacccaaactgaaaaggctgcacaattatgccttcaacttttgcacttagtagcaatcaattcccttgttagcttagtgtgggttaggttcttttagcaactgaactgagatccatctattaaccaacttggagttatttactaatactaaagtgactttctatatataccatgttgttgtcattaaatttttttgcagtattaatcgttgcatagtctctcgtgcatttttcttcatagtttttgggttcctgatattgatctaactacattatgttttgtacttggacaagttggtagaagtgtaattcttgtccttgtgagatttcagaataaatcaaattaccattcatagaactgattccaatgtccttgctcttttcatgaactaacttctgttttatatatcagttttattttgttctcttttagataatcttgagagcactccttgttacattcaggttgctatcccagtagttcccaccatcagggtact

SEQ ID NO: 6436 - DNA, 1457 bp, Ricinus communis
  Intron number 10 from transcript 30027.m000845 (locus 3002 7.t000038) derived from phytozome v7.0 (chr-ID 30027; pos 334216 to 335672)
aggcaacaggtacattcacaataactattatctcctcagaaactaatattctggttgcttactataaatgtgaattccttttaaaagtcggatttaaaaaaaagaaaagagctgcctaaaaggattcctttaagccatatggaaaatttaacttgatttatttatttgtttgttcttcttattcttagttttcttattattattattggaggatgaagttgacagaatattacctttttgtttttggtaaaagaaaaaaggaatagacaacttatggtctaacttatttgttgcttctatgatcagttttccgtcaagaaaaacttcgacacttaaattttctgttatttgtctcccagaaaaaagatggtaaatctggggaacaatgccattttttactgtggctttaagactgtacttatggtagttaggaaagcaacagcgatcttttttcagtaaaacttaggttaggtgattaaacaaaccccactgagatttagaaatttataaattctttgtgaagcatatgcattccattgaattcttagttattcatccacataacgataaatgtggaatctactatctagctgaaaaaaaaaagaacttcattaataaggccatgcttaccaatataattaagaaaatagctagtattatggttctttaattagatatcctttaaaaaggaggaaagatgtattaactgagttgttgaaattaatatttttaaggggataatggtaggaaaattgttttgatccctctcaacaaccaaaactcaaatgcttttacaaataggatttatttatgattactttaactctaattaatcgttgtgtttttagtacaactgatatgcattttgatgataaatcacttcacaccttagtacttaattataacatatgatcaaatttgttgaattgaaatgcataagcctttaacttaatgtccaataaataatgacaattttgtatctgtagctctaaatgttggaaaactaaataaatttcgaaaagcattgacgatagaattgaatgaaaaatcaattataaaattgctactttttgtaacttgagtagttcaaagtgttggcaagtggcaactatgcttctaaaatatgacatcttactgagaatgtttataattacagtagtaaatcaatcttgaagtgaaaattcctatagtatttacataattattctatatattaagtggcattttctttatgcaaagtatattttttattcatgatataaataattaatggtcatattgattttgacccgactgggtataatttttggctctgctgctgtagaggttgtcatatttccaatatataagcatggttctggcacagtgaaggcattgtttagatggggaaagtaacttacaatcattgctagcttaagaactgctttggtctgtattaacaaaaacctttgtatagg

SEQ ID NO: 6437 - DNA, 12808 bp, Ricinus communis
  Intron number 7 from transcript 29743.m000297 (locus 29743 .t000008) derived from phytozome v7.0 (chr-ID 29743; pos 1 97101 to 209908 reverse strand)
tgctgtgtgcattaattcacaatccagaggccactgtaagatcccaaagactcagctctacatatgaaaagaaatggatgtattatgaatttttacaacactctatccagctctacataagatatctgttgcattggtcatcttcatctcatcatagaatttgagctgaaaacatttaggtatcatttgatagtgaggttttgtctctgttgcaatattgctaagtcttgtcacaacattagatagagtttgtgaaattatcctatgctgctgtgacaatttgactcgatatattttacaaaatgcaaagcatataatattgtcaacatataacataaaatagtaactaaaaaccatgcatggtagatggagaaattattttggacctctatcctgaaatatgaaagttttattggaataactcatatttggtcccctgtacttctatttttcttggattgagtccttgcacttttatttcataacattaagtccttatacttttatttttatgaaatttaagccttagtttaatggtagttaggaacctgtattacacgcgcagttaatgcatatagaaataatttttaagttttatgttctgaatttttgtatttctattttgctgagattgagtctttgtacttttattttcatagcattaaacccctatacttctactatggtaacattgaccccttgtaaaatatcatttaaaattttaacttgtaatagtgattaaaatttgcttaatgcatatgtatgcatttggtctaaaaatttattataatttaaaatttaaaatatattttctattttgttaataagatattaatttaattggaatgataccacttgattttaacttatttaaattaattagttatataattaagacatggtgttttaattaataaaaataggagatgagctaatagtaaaagagacattagctacttataaaggtaattatataaaaaactctaatttttagcaaataataaaaaattaagacaaaaaatatatattttaataagaacttattaattatacaaatatttaattagggtgttagtcaaatcacatctattaattaaatatatacacgacaacgaccaaataaaatatgtactgattcatatatatgtcatggaatttgaatgttcattataaaacaaatctctaaattattcattattatataactcccgaaggagtttttatcttttttaatttaaataaagtggtctagtcaaattcctaaaattttttaactaatctttaaattaattttaaatatttttattgtgtcaagtaaaattccttaaaaaacttaaggccttaattggttaaaaattaagatgtaaggacttggtgggtaagatttaaaaatacaaggaccaaatagcatattttgcacacttagttaacactatttataccttccctaagaaaaggacttaaattttataaaagtaaaagtataaggactcaatatcagcaaatgaaagtgcaaggactcaattcgggaaaaaaggtacagggggccaaatatggattattccatttttatttcaaggtatatcattttcatggaccacgtgcatcatattatgagtaaaattgactataaacttgaataacaaattataagactaagctaagtaattgcagaagttttgtttaaagaaatatatttcaatgacctggggctgatatagcttttgttatatagtccattgaagtttaaaaggaagcaagggctttgaagggaatagaggaaaatgaatctatctctatgcctatgccttctgccccacttcctcctatctcccccttcccaaccctgttgctgctgcccaaatgcgtattttaccgcttgtcttcgtgctagcttgtaattgttgattcaatgtggaccaatttatataattttaacaaaattattatggattagaatcgtaagactaaatctaaccatgtcatgtaggcttaatagtgaattttaaatcattgttattgctattatgtcaattgtcaaatctaaataattccctaatagcagtagctgatataatccatctcagctacactatgatctgattcatatcattttgaaaaccctggccttaaagatgaaatattaatatgctcaatttgaaatcttaaatattgctatccatcctactgccctgttcgagcaggtacagaaattttaccagaatattgttgactcgtaaaatgatttgaagtgatttgagaagaaaagaaataatttcacttcttattcctctaacgagcagaaaggtacatatacatacaagagttagcagctccagatctgctgataactaagagatatgattatctaactaatttagataattattctactaaaccaggaatcattaaagataagaattaaaactaaccaaatccttttattctagatagagctcctaaattctaggactcgttaaaatagattttcaacaccctccctcaagttgggtagtagatgttgatcatacccagcttgcaaatcaggtaatcgaaatgagtcctagataaagcttttgttaaaatatcaacagtttgatgggctgttgtagtgtaacaagttgacagttccttcttcaatcttctctttgataaaatatcgatcgatttcaacatgttcggttcgatcatgatttattggattcttggcaatattaatagcagcctggttataacaatgcattattataggtctatcaaatggaattctcagttcctctagcaccctttttaactagattccttcacacttcttgagacattgtctgaactctgcctcagcgctgctccgcgacacaatatgtttttgaagtttttaggacaagaagaaatataattgcttctgttgtttatttctacacctattaatctctatttatagggtttcatacatctctaaaaagaaagaatctctactgcctaatttacagtaatatgcatgattggctcctacaatcaagagtcaatactaattaactcctaaaattaagccctaaaaacatgggaacaaatgtcaacactccccctcaagatggtgtatgtatatcagccatacccatcttgcatacaaaagagtgaaacaatccagtacataaccccttggtaaatacatcagctaattgattttttgaatttgtgtagctgattctgagactttgatcttctaatttttctttgatgaagaatcgatcaatctcaacatgttttgtacgatcatgttatactgggttatgagcaatacttatggctgccttattatcacaatgtaacaacacacattcttcttctagaagatgttgatcttgcattaacttcttaagccataatagttcacatactccttgcgccattgctctgtattctgcttcagtacttgacctagccactacactttgtttcttgcttctccaagtgaccaaatttccacccatgaaggcacaataaccagaagtggatcttctatcattaggagagcccgcccaatcagcatcagaatatgcttcaattcgtaaatgaccattattcacaaaaagtattcctttacctggactagacttgagataccttaaaattcgaaagacagcatcaagatgtatagttcggggactatgcataaattggctgactatacttaccgcataagcaatgtcaggccatgtatgagaaagataaatcaatctcccaaccagtcgttgatatcgatcaatgtcaactaattctccgacattttctttcagcctatgattagcttcaatgggagtgtcaacaggtttacagcctagcattcctgtttcctttagcaaatcaatgacatattttctttgggagatgaatatacccttttctgatcgagcaacttctatcccaagaaaatatcataatttacctagatctttgatctcaaactccgtggccaaatacttcttcagcctagtcatttcttcttgattatcacctgttatcactatatcatcaacatatacaatgagaatagtaatcctcccttggagatatttgatgaacatagtatgatctgcatggctttgtttgtaaccaaaagcaatgattgctttactgaacctatcaaactaggctcgaggggactgtttcagaccatataaggctttctttaatctgcataccttccctttagttttttgattggaaaaacctggaagaatttccatatagacttcttcttccaagttaccatgtaggaaggcatttttaacatcgaactgctgaagatcccatccaagatttgcagcacaagataagagcactcttactgaattcatcttggcaacaggtgcaaatgtttcttggtagtcaatgccataggtttgggtgaaaccttttgccaccagtcgcgcctttaacctttcaatggagccatctgccctatgcttcactgtgaatacccatttacatcctactggtttttttctgaatggcatgtcgacaacctcccatgttccattctttaccaaggctttcatttcttctaccatagcatctttccatttaggatcattaatagcttcctcccatccctgtggtatagagatagaatgcaaagaagacaagaaggctctataggaaggagacaaatctttatacgaaacaaagttagagatagaatgttgagtacaagatctaactcctttcctgacagctattggaagatcaaggtcattatcacatgaattaagagatggaagttcattagacaagttagaaggaggagatagattacctgaatccacaggagttgagcccgggttgggtgattggctatgaagagtagtatcctcctttttcttgcatgagtacgttaatagatcaagtttgtccaatcttttccttgcctgttcaagtattttttcagcatcagtttgaatatgatctccatcataagtattatcatcacttccgtgctccccctgaccattatacataggcaactcaagtataggttgaccaagagaaatcacatcttctatatgatcattctccccctgaagaggtgatggtggataaaaggcttctgactcccggaaggtgacatccatactcacatacacctttctagacgaagggtgataacatttatatcccttttgagtaggtgaatagccaataaaaacacattttaaggctctcggatctagttttcctccatagttcttatgcacaaaacaaacacatccaaaaacctttggggaaataatgtgagagttattgccctggataagttctataggacacctaaaattcaaggttcttaatggcatacgattgattaaataagcagctgtaagaatcgcatcaccctaataagccttaggaacatgcatggtgaacataagtgccctagcaacttctaagagatgcctgttctttcgttcaaatactccattttgagcaccagtattaacacaactagtttggtgaataatcctacgagtgtctaaatagctatggaaggttttctccatatactctgtaccattatcagttcggaaaattttcaccttagcactaaattgtgtactgatcattctatggaaagactgaaagcaagaaaaaacttcatttttggcacgcatcaaatacacccatgtcatcctactgtggcaatcaataaatgtcacaaaccatttatacctagataaagaaactactgggctggggccccacacatttgaatgaatcatctcaaaaggcaccaaacttttattattagttgaaggatatgaagttctagtattcttatcaaattcacatgcatcacaaattaaggtctttaaatcacattgcttaaataaatgaggagctgattcagattcacctagtaaagccttagaaattggtccttcatgtaactggtacaagccattgtgtactctaccatagccaatcgttttcccagtgctcaattcctgtatgacataatgagaagggaaaagttcaatcttacagtttaaatctcttgtaagagcactaacagataacaaattatgtgagaaaccaggaatatgcaaggcaagtggtagtttaatagatgaagtacaacttatagaacctttcctgatgatgggagagaaggacccatccgcaatacggactctttcatgacctgaataagaattgtaagtgaagaatttttttcgagaactggtcagatgatccgatgctccagaatctaaaatccatgattcactaggagtatcacaggtattagtatgcccagcatgtaaggctagatgtgatatacctgaatgtgcaaggtaagatgaaggagtggaagtagtggctgcagtggaaggggattcaaacttagctataagaactttaagagttttcaattcttcattggaaagtccactagaagggttgatttctcttggcaattcaatgtcaagagtttcggagacatgagcttgaggttgtgtactaccagattttttttcccactcgaccacgtggtgggcgaccatgaagtttccagcatgtttctctagtatgccttggtttaccacaatagtcgcaccttctactgtcttgttctacttccttcagagagtcaattctagttgaatcaggtttcatagatgatgattgagccatcataactgatctttcagttgaaatagttggcagcatagcatttcgtcggctctcttcttgctgcacatggctatatgcttgtcgcaaggagggtaaagggtcacgtccaagtacttgaactctgatctgatcatacacatcatttaatcctgctaggaagtcatacacacgttccttttccattattttatggaactttgttgcatcagctgtacaagacgcttgtaaatcctgataatagtcaagttcttgccacaagccattaagttcagaaaaatactgggcaatagtcagctcaccttgtttggtttcatgaatttttttccgcaattcatatacctgggcatcattacctgactgggaataagtttgggcagctgcatcccaaattttctgagctgtatcaaggagtaaatagcctcgagcaatctgtggttgcattgaattgagcaaccatgacatgatgagagagttttctgagtcccatttgctgcatacaggatctgttccatcaggtcttcttttgtcattattgatgtaactttgcaatcccctagcctgaataaatagcaagcatgattgcgatcaagcaagataattcattacatctagtttgactggactgatttggagagaagggttgtcattcatagtggttatcatgtttctaccaccatgctcagtgggattagaagatccttccttctttccgtcagacatgtctaaaaaactgctggaataaaccactagaagaaattcaaaaaagtagtgactttctcttctctctacttgttaaggcaggatagaaggagactccttcctgtaggagtagtgaagaactaaaaatttgatttggttgaaatatgcagagaggctgatactagggttggcaatatgagagtcaccctaaagggatcatgctctggtaccatgaagtttttaggacaagaagaaatataattgcttctgttgtttatttctacatccattaatctctatttatagggtttcacacatctctaaaaagaaagaatctctactgcctaatttacagtaatatgcatgattggctcctacaatcaagagtcaatactaattaactcctaaaattaagccctaaaaacatgggaacaactgtcaacagttttttatttctccaagttactaagtttccccatacaaatgtgcagtacctagatgttgatcgtctgtctgtagttgaaccagcccaatcggcatttgtgagaactgtaacccctttttatgctgttttcttgaagtaaagtttttaccaggtgtcatttttaggtacctcaagatcctataaacaacattcatatgcttcttggtaggattgttcataaattgactatgttcataaattgactaactgcatttattgggaatcctatatccggtctagtatgagaggtaaatcagcttccctacaagcttttgggatcttcctttgtccttaggtgctatcctttattgttcctagcttacaagtggaatccatacaggtggtagctggtttgcaattcatcatcatagtttcttttaacaagtctaacacatatttatgttgggagaccgagatacctcctttagatgaagcaacttccatgcccaaaaaatacttgagacttcctaagtccttggtttcaaactttttctttgaaacttctttgaatctacctatgtgtataatgtcatccccctgttagaacaatatcatccacatatgccattaagatggagattttctttcaaaagaatgtttaataaacagtgtgatcagtttgacactaaatatatccattctttttaactgctcttgtaaatctgttgaaccatgttcgtggatattgcttgagaccatacagcaattttttgagcttgcagactttgctgccaccaatttgagtttcaaatcctggaaggatctccatgtagacttcttcttccaagtccccattcaaaaaggcttcttgacatttagttagtaaagtggccagtcattatttgctgccaatgacaacaaaattcaaattgtattaagtttggcaactggagcaaaagtttccaagtagtctatcccatatgattgagtgaacccctttgctactaaacgggctttgtacctttccacactctcatccgccttatgcttgactatgaaaatccacttgcagccaactagatatttctcttttggtagttcagaaaattcctaagtcccattcctttctaaagcttgcatctcttcatatactgctgacttcattctgctatgctaagagcttcttgtatattgtttggaatatgaatttttttcagatttgtgacataagctcgaaaacttagtgacagccttgcataagaaatataatttgcaataggatacagaggatgttttgtatattccctagttccttagtgtaataggcaaatcgtcatcagttttttctttcctaatttgtatcagattggagagattaccttgaagtgtttcagcagtatctgaatgctgctcgatttcatgacctgagaattcgggtcagcttcttgggctagcttaaaaggagcttgttctactacttctctttgaggtttctgttttcttgtgtatataatcaggtctttggtagttctttgtttgtattgatcaggtggttgagaagaactaggacactaaggtgataatgattcaggtatggaaaagttatcattatctaaaggctgacttattagatcatatgcaggttgataaggctgtgtttcagataaagatggagactttctttgaataggaagttcaattgaaggagtaggaattataacatcccaaaattgataatcattatcattgccccttaaatatcagttttggcaaaatatgattgatgttcaatgaatatgacatccaaggaatgataattttttttttttgtgattgttgagcaacacttataccccttttttgttggagaatatcctaaaacaatacatttgatgggtcttggatcaagcttgttcctattctgattattgatatgaacaaaagctgtgcacccaaaaatctttgtaggaatactagaaataatcctagaattaggaagatgatgtaaaagggtttgacatggggtttggaacttaagaacacttgaggggatcctattaatgagatatgctgctatgagaacagcctcccccaaaaaaacttttggggcattagttgaaaacatcaaagacctagccatttcaggaaggtgtgttttttctctcaggtactccattccgttgtggtgtatcaacacacaagctttggtgagttataccctcatttagtaagtagtcccgaagaaaagaggtaaaatactctttcccattgtcagttcttaagattttgtaattttgcatgaaattgagtttgaatcattttgtggaaatctctaaaaatttggttgactttagacttttccttaatgagaaaaaccccaataaactctagtgtggttatcaacaaacagcacaaaccatctagcacctgtaacgatattcaccctagcaggtcctcaaacatcactatggatcatagaaaatggataaagatgatttatatggttgaataggttaggaggtacgaatatgcttcgacagctgatatatttcacattgaaatttttttgaacttttatcattgaacaatgaaggaaacaacttctcaaggtacataaaaattggatatcctaatctatagtgccatagcataatagcacttccattattggttttagcaatagacttaggatagaaactagactaatttttttgagaaacatatgctgccttatcaagttgttttgcaggatagggagaaaccttgaaaatgtagagtcccaagctcatctcagcactgtcaatcatcctccttgaatttaggttctaaaattcacaatatttaggaaagaatttagaaatacaatttaactcatgtgcaagtttgctaagtgaaagcaagttacagtccaagttgggaaccaatagaacttaatagagagtcaagttgtttgatacagtaactgaacctataccaacttcctttgaaatagagccatcagctatacgaactgagaaattaccatcacaaggactgtagtgactaaagatacttgggtctcctgtcataaaatctgaagctccagaatctacaatcctggaacttatctttcctttatttactattaaggcacttccaaaattacctttttgagccaatgtactagttccaaggttaactagaaaagcttttgtaacatctccatctgttctttattgaatggacaagatttagttgcatgacatgtttccgtactagcagctacatttccacggctctacttgtcacttgctttgtgagagggcttctagtttgctagtttcccatgaagtttccaacatatttccttggtatgactaggtttgcaacaatagttacaccatgatttgccactgttcttttgctgaaatttactagtgctatgggttacaagggctgaaccataattttctgccggtgatgtgatagtagatgaacccatcattactttctttttgctctcttctctacagacttcagaaaaatcctctcgaatatttggaagaagtttgattgctaatattcttcctcttcatcaagattctgattcaatcctaacaaaaatttgaaaattctttgctctataattgttttaaactcatttccatcttcagcaagttccccatttatactcttcaaacaagtccaattgttttgtaagagtatgaaagtattgggtgattgtagagtcccccctgtcacagatcatgaagattgctttctgtagcaaacaattaggatgtgttatcattatttgagtagatcttcttggctgcatcccatatttcttttgctgtctcaacaagcaagaaattttctccaatgtcattattcatggagttaatgagccaagccattaccatattgttttcagcctttcaacctttgtacttaggatcctcctccttgggtattacaacagctccagtaaggcagtcgtccttacctttccacaaataaacatcatcatagattgtaaccatggaagataattttgcccattcaatttatgagcagtaatgggaagatgacaattattgggaccatcagctccattattaccatgaagagattgctctgaccctgaggcagttgaactctcaatagccatcccgtatttaatcatgagatatttcggttcagagaaggctctgatactatgaagtgatttgagaagaaaagaaataatttcacttcttattcctctaatgagcagaaaggtacatatacatacaaaagacaccagctttagatatgctgataactaagagatatgattatctaacttatttagataattatcccactaaactaggaatcataaaagataagaactaaaactaaccaaatccttttattctagatagagctcctaaattctaggactcgttaaagtagaatttcaacatgattgctgatcttatatgtacttaaccagtaactaatcaacttaaatacacataaatgtaaaatatacagtttatatttgtatttataatgccaggatttgcctttaccataattttggagcttcatgttgtctctctgaataaggatttacataattaaactcaactagattgggattaagacttaattgggctgagtacattgtgtttgatatatgagtaactctgaaattcaaatgcttcagaaagttctaaaacattgcttgtcaaagattttataattgacatgaaagttagacttggttttgggtaataaacaaggttctcccttgctttgacagatgatttgtatccttatatatcttttccttatttcatgtgcttttctctaaagcatcttattatattatgagattgtgtatgtgactagatatatggacaaatgcaatgcatgtggacatacactttatctaagttaacttttattttgtgtatttggtcatgtcttatatgtatcttattacagttgcaggagttgttggaatac

SEQ ID NO: 6438 - DNA, 1408 bp, Ricinus communis
  Intron number 3 from transcript 30039.m000232 (locus 30039 .t000005) derived from phytozome v7.0 (chr-ID 30039; pos 2 9055 to 30462)
ctaaggtgagaaatgaatatgtaattgaattgattttatctgttagctttatgaaattgtgtgttttgtttagtgttatggtagatgtgtttaattcatagaggctctgtttagaataagttattttcagggatttaattcttccaaaatcatgtcattttttttgcatgatttcgtttctttcaaaatgtaagttgaaaggattgaattcgagcaagtaccaatcatgaccttttgaaatatgagaattgactacagtaaaacctttctatagttatacacttaggaccaaataaaatttaaatgaatctttattaattcttaaaattttaagcccaagaagagcagttcacaaccaagtatatatacagtaaaatatctctgtagtcatacacttgggatcaaataaattttatgactatgatgaggttctaacttaatggaggtttgagtactaaaatttttctttggatttaatatttagtcttgtagataaaatgatataaactagaaataagatatgttaatatcttgtcatattatacgaataaaattgatgagacaaaataatattacagtgaaacaaacgtaacataacatatattttttaaaattatatatacagatattactatatagaggaatattttcttaagacgggagttaaaaaatttataacttattacaatagagagtttattcctatttatagctggcacaaattggaaccgtaattttttattattatgtagaggttattcctatacagagtatcactataaagaggttttactatataaagaattcaacattttaataggctttccaaccattaatatgtatgttgtgatagtaattgcatttttggaaggctttaaagatgctgttttcatttttattctttttacatttgatacattttattttgtattaatgaaattatgggaaagcaaaagcttatattttgaaggtgtggagtaggaaatttcttcactgtcaactagatgctcacaacttcatttagacgagtaatggctattttgaaagccatttcctatggtttgtcctccttaggcattgtccttggggaggggggattaattatcctattattttgtaattcttcatgaagttgaaatatccacttatcaagtcaatgctcctaaccttggttttctggaagtgaatgattgttaattgtgcttttgaattaagtgatacagatccaaatagttaccttggtctagcagagtacatcttgcagatacaaagatgattttctttgtatcattttgctgatctatttttcacctctactgaattatgaatgcatattctgcattcttctgagcaacactttatatgacttctagttactggtggattggactcgaggaaggaatctcat

SEQ ID NO: 6439 - DNA, 6789 bp, Ricinus communis
  Intron number 2 from transcript 29661.m000905 (locus 29661 .t000007) derived from phytozome v7.0 (chr-ID 29661; pos 6 4500 to 71288)
tcattaagattcttaaaccggtcaagaagaagaaggtgagttttgtttattgccaggatattgttttcatcactatactgctgatgctattcttatatatttatttatatatcatcatatatacagacaggccatgaaaactaattttgaagaacatattgtaacttgcatacagtgtattgcgaagtcttatatgttaataggaggtattctgtgcttgactacttgatatgaaataaatgaaatcacatggactctgtgatactgtgtggcctattgtggagtctcaatgaaaggggatcatgatttcacatgaaagaaaaacttgattttaagcaattattgccaacttttattggaagttaatgctgttatactttatttatctttatacatgggttgacaagctgtagtttacaatgaacgaaggtcatactggcttgcttttgggttttgaccattattagtaaacgactttgggagtcaccaattgtgcctgtaatttacaaattaagaaaaaggaaaataatcacaatttatgtttatctataattcaatgctagttcagtctatataagtactagtcgttttacaattttatcctaacatttatcctccttaatataggacaagctagaatgttccacctattgctaggcctttattgcatctaatgacattactcatgtatgataaatatttctgctggctttctttaataataaatatgcaatgttggcatttacttgattttttccatgtatagcatcatggtgagctatttatataaattaggaatattatttaaaatatttgtttgaagtgacaaaaatatgcattattaagttctttgttttgtttctgttttacccattgatgttgttatacacactcttttattcacactattgttgattagtgcgattgtttcttaagaattacataaatgaagttagtaaaaatgcttataaatttagtaaattatgtctctattttgtgtttttcccctaaaaattccttatcattacataaaaagacattcttaagttagaaccattgcttttggaatattataattgagttgtcttgcattcatctagaagtattattaattgttacaatatgtccaaagtttgaaaatgttgtttcttgtttggtgctacgtatgtttgcatgtaagaattcaaaatattgctgtttttcttgttatgtgaccgtcaaaattctttttaaattgaaaaaacaagtttttcatcactgcaatacggcttgaaatgatgcatgctagtgagttttgggcaatcaagggataacacgtaccaaatgagtgtttggaggtgaggatgataagatagatgtgcgggtatatgataatggatagagcatttaatgaatgtattagggaaaaggtaggagcagcttctattaaggggaagttgagtttgggcatatgaattgtaaactattgatgcactattcagaaaggttgatatgttaaggttgatgtattaaagcaaggaaggggtaaacctaaactaacatagagaaaattggtccaagttgatctaatagccatacatcttttagttgatataaaccaaaattctttattgtggagaaaaggatctatacagccaaacccaattaacctgagattaagccttagttgaattgagatcgaggggtgtgtcaatcatttcaatggccactcaaattaacatcttactgataatcattagtttgacttagttttgtgaatcaaataatatgtaacatcaagtgcaaacctcctaattccataatcctttatgcaacacagtgttaaaagtattaatataagatagtgctttaaaatcttttctgctattctaagagagtaatttataaagcttcaagaactattttcaagattttgtagcaagttttagaagattcatttctatgtttcttgtgttgttttttgttattttgtccatgttatgtaggaccagcaacacacgaagacaagcccaagcacacaactatgagaaatgcacaaaaaccttttttttttccttttatcattgaaatcaatagcataacctattaaaatcgttggcttaaatgggtttatatagaacccaaaaataatcctaacactactaggattgaaaactctaatctaggaaaactataaaccattattcattaggaaactactaaccaaatactgaatgaaataataataatgaaataattattttaaatattcgtaatgagagtggaattcccaaatgatactaaatcagcctaaattttctaaatattcaagaaaaacatgaatttcgtagcaaacaattaataaacttgtaactctctagctgcatcattctcccttgccggagaaaaatcaacctcaagtttttaatgctgtcgaaaatgaataattggatttggaaaatatgtagtcttattttcttcaacagcagcattaaatggaaattttagacttcatttttatcttatgtcaccaagcttattaatacataagaaaccaataataggttgcaaggttgactcgctcttaaattcatcataaataaaaaagctaattggatttagaatctcctttatctttttcatgttctttttgttttttttccaaagtaggtttttcacatttttctagctcaaacttatcatatcgtacttcaactttgactctttaacttgtttttctttctctacgtgacaagtttcttgtcttgtgttgttttagatgtctctccccttaaataaatggctttaatcccctctactatcaccatcatctcttccaaggttttctctacgtactcatcactttggtaataggcttagttttgaaacatattatctcttataagatgatggagtatttgagcaaacatcattttttctatagtttgaatcactttgttcctgaatataagaagcttgttaatagcgcattcttcatcatgtaagttgtttttctctatctcgtcaagtatgtttgatcatcaaatattcatcagataaaaggggatcttagaggatcaccatatgtatctctaagataatagctaaagggaaagcacaaagcgtaattgttttagatcattgaaagcgtaatgttacataatcaaataactagcttacatcagtttataaaggatctaaaaaaggatctaaaaatgatcctaacattattaggattgaaaattctagtctaataaaattttaaagcaatactaactaagaaagtactaacccaatgcttaataagataataataataacataataacttttaaatacccctgtgtcgcactttaaatttacacatggattaagaaatttaggtttcttaggttgatgctattaatttctatcacttccttttggaaatacccttgttagacctttgtgaatcacacattactacacactttattaatgcaggttgcaataacttgtgaaggatatttttgataattagctataaactatcaatcaaaaaagaaaaataaactatagtttgggacgaacggggaagaaaaaaattaaaatgggatactatatcctaaacttcctgaataaataagtaaaagaaaaatacgaatataataaaaaactaatttaatgaaagtaatttataaacttgtaattttctaactacatcactatgtttccgagtaaggcaccctattagtgcttgaaaaatgtgagacttagtatgcccataagaggaatttaagactcactttaacttggtttttctggctttagcagtcacttcgaattggctaagaggtgagttagggagaataagtgcagtggtggagccacttataggagaagggggcattttgcctcgttaattttggaagattgcactattagcactaaaaatagtttcaatgttaattctgcccttttacgaaatatgcattgacctccgaaatgtgtaattgtattacaaaacaatattaaagcttaactcaagatgctataattggcccattatcatttttaaagtacctttgttgattttatcattttttatataaaaaagtaaaacttaatttaaaacaccacaattagatgcattttttgtacttcgcgcgatactataattataaacttcaatttaaagttttctttctattttgtttttaaactcctcacatatttttgttaactatgatcttgggatccatatatccagtggcttatggagcattacaattctttcggccctggattataaattttgagaaagtatgatggataaaactgaaatatgaatagtattagtaaaaaatatttataggatgttgctctttcggcctatgagaagtattagtaaaatgttttttattaaataaaaagtttgggctcccctgtgtctgccagtccaaataccatgattgattaaattttttaaatcatggctaaacaaagttgttactgttaacttttagttcttagaagtgtattttacattaattataggcaaaacccattattaagctcttgaatatttttgttttattttattgagcctttaaaattttaatttgctttattgagcccttgcactttagttttactaaggacttgtacatattttttgaaacttttttttgttctgttgagccactgtagttttatttttcctttaattaagaaccattaagtcctcaatataagcaaaaataaaagtataactgctcaatgaaataaaaataaaattaaaggacttaataaaataaaactgaaagttcatggacttaaaaatacattttgccttaattattacaatgtttgccatgcataattactttcgtttggaaaaggatctatatggtatagttatgctaaacaattaaaagaaatggaagtttgcgtttttttttttttataaagaaaatttacgttttttaaaataccttttatattttgagaaactaagttttgtctttttgttttttgttttttccaacgtttggactgtaataattaatttagtagcagtgagagtgatgtttgtttaattcttttattaatttattagcaatcaaaggaaagttttacgatgcatttagttttcaattgaaattatttacagatatgtgcatttctagtaataaaaaaatttcatatcttaatatttgtaaagttgcatatgttagaattttagaaatttaatttttcaaattatgcatagtgcaaatttagaaagtagtagaagaatacttttagaaaattcatctatctcttagtggctttaaaaaataaagtcaccataagtctcccatgaataatgatactttgcgccccttagtttagcattatggcttcgacactgggcaagtggtatatcacctttttatttcccttttcagttagttattacttgcaaataatataatttatgcaacttctattattcttaggcaactttagttggaaacgattttttatgaattttttttttttttttttgaaactctttagtagtaacttgaactttccttgtgtattaaaagaaaatcattagtatgtatttgtaatggtaggaatgaaaaaatgaatcatttatcacactccaatcatgataggttctaagaattgattaggttttacgttttacttttatttgttcaagagggagaaagttctagaagcaaacataagattaaattgatatttagaaaataaaccatataaagcattctggtatgcttggcatttgaaatatttatggtattatctttactttctatgtattcccaaactttattacaaacaaatgctacgagttaaaaagaataacaattgtattaatataggaatctcttcaccaatcaaaattttagaggatctgtatattgttaataatgaaatgacgatatttattagaactccttaagaaaaaacaaggcattatagatttagaatcaatagtatttatagcatgttaaattttagctgcaaggatattttggtagcagggaattttttgttcttggttatccaagaaagttatgatatatggttattttttttaatatagatatcttaaacttaaggtaataagcagggttgctgggtgggtttatgagtaatacaccattacctgcaattgccccatctctcattggggctactgttattcttttgttagggtaagacaggggccaacatcaattatcagactcaccatcactatattcctgtcagctgatgcatgagttctgttttttcttccttttttttttttgttcagacaaaggtacttttaataatgaatctttagccttattaatataggccacaatcaaactggtttggaggggttcaaaaaatggattctgcatattggattctttaggatgcttagtatattgactgtttgattcccttacttcgtcgtctttgtgttttccacattggggagtgatgttatgtaattttgttatataattttcaagttctttagttgtttctgtaattttcctttttttttgatagaaatttgtagatttgtgctagcattgtctatccgttgacctttgacatttttgttagtgatgaactatatcgtgctttgcttttaaataaatagatattctttgtgcttgtgactagaaaataaatcattaattcccttttttaattgtttttatcttgtgtggcttgggtcgtatgatatcttctgggaactaactttcttaatttttaattgcagattaagagggagattaaaatactgcagaatctctg

SEQ ID NO: 6440 - DNA, 918 bp, Ricinus communis
  Intron number 2 from transcript 29726.m003977 (locus 29726 .t000089) derived from phytozome v7.0 (chr-ID 29726; pos 5 40570 to 541487 reverse strand)
aaggaacattctttgccatatcaagtgatatcaaggtgagacttttctattgattttgaattttgttccattactacgcccgtttctcatatattctttatctccatatgttaatgagaaatgtgagaaagacaagtgaagtctctgaataattgtttcgggactgctagatttattgtcctctcatgtgaggtaaatttacttaatcatgctaatgaggtaataaccaaagcatttaatggtgactgaattgattataacacaagtcttttatgtacttaagtttaattatggtactattttggtatgattcaggtggtgatgttaatgtatgttatctgactcataataataatatcatcccatttcgtgttcatgatttcaagtatgagacagcacatgtctggtggaagatacaattggttatgttttcttgtgttattaacttctggagcttcttctttcagactgcaactcaattgtggcattcattgaccacagaatagtgctgcttgattgaaaatctagactgaaaaaaatgattgtaataaaaaaatattttagaatagaataatttagtgattgtcgctttggtgaatgtggtggttactgcatatttggcacttaaaagggaccttatattgtccgtataatgtgtgcatgcaaacataatctcattacatactgcaggatcaccttactggttgttacaagttgtcttgtaatttgttctttgtttatctctggtttagttaatcataactatttttctgttattttttcttatctagttgcctattgtacttctgtatgtcttattgtcgcacggtatagttgagattcttcttttttgaacttgttaatggggatatatctctctctggtagttatttgacaaaatttttttattcaagggcc

SEQ ID NO: 6441 - DNA, 1125 bp, Ricinus communis
  Intron number 1 from transcript 29930.m000610 (locus 29930 .t000006) derived from phytozome v7.0 (chr-ID 29930; pos 1 71838 to 172962)
cattttgcctgttaagttcccacagttctttactggttagttgatttatcataatgttgcaaatcagttactctgctctctattctttcacgaaatttaccttgctatgtgaccataaatattagttggcactatgaggaaatcaacatgtcaaacgtaatggaattagcaactcgtttagaagctgagattgtgctgttgtaaattgtattctctgtcattgttataataatccaagtaattttttgtcaattctccttgaatatgaaatgggagcggtttatgtaaagtttttattgaaatccttttcagtttttggaaggaacacatattcctgtcctcactggaagtccacaatgtaactgttctctccattttgtttttctttaacttttttaaatattaggagaagaggaataaatttcatgcatgtaaatatacatgtacatagatattcacatatatgcttatacgtgaaattatgtacaaagacacatacattacatatgataatgccagaaaaggaattggcttattgggcgttcctattcattttccttgtcatacaaagtccgattttttgtttgtgagatactcagaatattgtgaataaacgatgacagtgttcgagcatacagctacaggctattttttcaagttgaagtgttaggatataagtgtctttcttattttccatctgattgacaatatgacatatgtgttagtcacataaacttcgtagctgttatagggtgatctcaatttttttttagttatagcaattaattggtgaagtctaattccctcagttttatagttcgtgttctccaagggcatcaaaccatcccattttcccatcactgcttgctaccttttagacaaataatgtgctatatctacatatttttcaagagatataaaggaagattaagattctgtgtgcttgtatcgaaaacattttctttttccccttctactgaagaacagaaatttacacattacagggtcaaagcctgtttagttaatatttttgttcagttataatttattggattttctggcttggtcatcttgagatactgaatttaaataattatttgatacttcttcagggaagcgaaaacc

SEQ ID NO: 6442 - DNA, 7981 bp, Ricinus communis
  Intron number 2 from transcript 29939.m000539 (locus 29939 .t000017) derived from phytozome v7.0 (chr-ID 29939; pos 3 70371 to 378351)
ggtattctttaatcccctctctctctctctctctctctctctctctctctctctaaattgttgggttttttcttatagttatgtcttgattcttctgtgcatttctttagtgaatgagtcatacaagttttcaatgcatttctagtgattggggtgggttaagtaagcttcaatggagctaggtgtacagtaccagtcaatgattgaggataaagctatagcctttgtgtactagatcagtgtacacttgtatactcttttctattgatacccttgcttagaatttggaaagtctaaaagtgcaagaaacttaattcgattgaattctagttagtcatttttcttgggaagatgaaattttctagaattcaattcttcaacttgaaaacaatgcagtttaaagacattctgaaaaatcatgcaacaagtaacatgatttggcaagaattcggttgagttgaattcttgcactccatttatttcaaacaaggtgttagtactgtaatagcggatttcatgactaatttttttttctttggcatacattgcttgagcttgctttattagatagcttgctggagatagtgtatagccatctcatggtaactgctacatataccttatcgtgccacattaatgtgttaaatcgattctttcttttttcttccactccacttcctctgtcaaattggagttctggggcaatttcaagagctttcaaccttccatcaattgttttgaacagcaatacctacggttgatttcaattgctgaaagttgaattgctctttcagtgtgctagatgcctaaacttttatgtagttacctactgattaaatttgattttattcttagacttgtctaatattagtgtttaattataggggattcagtcgttgatgtttccttttacattttgttttactccgaacttttataaaaatcatacaaatagtttaggtcttagctgccttcccatcttggttgtgtggacttttaataatatagaattagctataagccagtatcaaaatatcgaaggattttgactacaccaacttctagcttgtttgttctctcagtttccttctctgttctaactgtttctcacatttttttaaagacattagctaagagaaaacactcctgataatttcaagttcagtttttattaataactaccttacctgcaattcaaaatttgagattaggcactggatagtgtccaaactttcactttctccaaacaaaattaatttctctataagttagaagccaaaacaaaagaatcaaatgatgcaggatattcttgcgaagttgtttaatgtgttaatttcacatggctaacatatatatatatatatatatatatataatttcacatggctaacatatatatatatatatatattatatttatttattttcctgtccgaaacatacatgctttatgaggggagttagtacagctcctagtggaataaatggatttatcaactatatttatgtaattcatcatttgtggtaatctaggcatccagagtataaatcatctgtttgattttatttatttattttttcggataaataataattaactttagaaaaaccgataagagagcttccagcaacattgagtaatacaaattgttgtatctttcaccatgcagcacttctaatatcttttccaacttcaaagcaaacccttctagcattttaacagtccataaaaattataggccttgccttatgaatcttgaatgctcttttctagtttaccgaagcctatgaattttggataattaattgtgttcttcctaactgacaggaatgcgtcacccacaatctcttaaacaataccaggatgtacttgattagactttaaaatttgggatgtagtttcttgcagctatacagaaaaattcaggttccaattaacttctctcgtgtttctgctttctactttgacattagcccgcatgattaacttaaccgtaagcaatgattttggatatcgattaagatcctgatatgcttgtgggctgggacccacttagttttgcttatttagctggttgtacttttcaagtgagtttgaacttaactaggatttcctttaggtatagcctagcttcctaggagctctaagaaactaaaacccaaatctaactacattcaggaccctgattgtataaatgatgatcaaactcgtcttcttttccatgcagcaaaaggagcccaaataggttgttagactggataaatgcttttcttattatcttgattttatcccatttggtaaatgttgcatcttccaagttgccaaatcttctttcaggttgctgaatgattgatttgcagaaaacagttgccttgaaagtagtctgaaatagatcctaagaggagaacctactttacacctcatgaggcttttcctttcccctacataagcctcctattcctggccatttcttataagctatacctcctccatcagaactaattgacttctcaaactttaacctcaatcagaccagcccatataaacacacatgtgcacaaagaaatgaagagtagaaatttcatatgctcaattcttgcatcaattatatgatagcattgtcagtgaacaatagatgtgagactgcattttagttgtctagacctcacgatgctggtcataacccttttagagaaaatcttcataattgcaaatatgatggatgtgaatggagcataaaatagctctaacagattaaggttgattgaaactcattatgtgatcatgtagaattcgagaagaataattgtaataacttttttatctcatcgttgaaaaataatttacaagagaatatatactgatttttaatgacaatattggaaaaatcagtgcctagaaaataggaataaaattagaaacctactctaagtattaagctacaaatcagaaaatataatacattgaaaaaaacaaactaaaataggaaattaaaaaatagcatagcttgatttggtagatatcggattattccaagaatctcgcagaaatccacactccccctcaagctggggagtagatgttaaccattcccagcttggatgtgagtctcaaatgtcactctaggtagagccctggtcaggacatcaacaatctgttgatgagtaggtgtatatatcaaacttataattcctttgtcaatcttttccttgataaagtgtctatcaatttccacgtgcttaatcctgtcatgatgaactgggttcttagcattactaatagcagcttgattatcgcataacatcttcgtggaatctttggaatagattttcaattcctctaagagtcgcactagccacattccttcgcaaatgccatgggccatggctctgaattcagattcagcactgctttgggatacaactggttgtctcttgctttgtaaatgacaagattcccttaaacaaatgtacagtaacctatagtcgatcttcggtctaacacgtcactagcatagttagcatctatatagatttcaacactcctctcgtggcccttcttgaagtacaatccttttccaggagtcatttttgaatatctcaatattctatatactgcttttagatgttcttcatgaggatcattcataaattggctaacagaactcacggcaaaacctatatctggtcaagtgtgagacaagtatataagtttgccaaccagtctttgataacttcccttatccatcggagtactatcttccttcattccaactttggtctttgtttccacaagagtatctgcgggtttacaaccaagcatacccgtctcttgaagcaagtctagaatatatttttgttgagatatgagattccactcttgtttcgttccacttccatacctagaaaatactttagaggtcccatgtctttgatctcgaactccttggcaagaatagtttttagatgatccatttctttaaagttctctccagtaagaataatatcgtcaatgtaaattatgaggattgtgatttttccattactagtgtttgaagaatagggtgtgatttgcctgtccttgtataaagccatgaacctttttaatcccttggagattgtatagaccatagagtgacctttttagtctacatactttgttgacattctccttactttcaaaactcggagggatctccgtgtacacctcttcctcaagatcaccattaaggagacattcttaacatccaactagtgtaaaggccaacctaaattggcagccaatgataagagaattcgaactgtgtttagtttagcaaccagtgcaaatgtttcttatagtcaacactataaatttgagtaaagtgtttagctaccaacctggttttatacttgtcaatgctaccatctgacttgtatttcacagtgaaaatccatttgcagcaaagggtctcttgccttcaggaagacttgataagtaccatgtaccattcttctcaagagcttgaatttcttcattgattgccttcctccactcaggtttcttcattgcttcctgtatattactaggaatttccacagaagaaagattggagataaaggtttgatagctcggtgagagtttgtcatatgacatgaaatatggtattgaatgttgtgtataggatctaattccctttctttgagctatagggagatcaagatcatcattggaaattggaatcaaagctagagggttctcagaattacctgggtttgcagtttttgaactcggattggtcgtttgacaatgcttgagaagatttggaagttcaatctgcatttcatttttgaccttcttgagtacactaggagttctttgtttttttttacccttgatggcttaggaaatacttttggaacagattcaggaatgttattttgaggagtagactcagaatgctggttctcagttggactcagtgctagtggggctggacttgacttaggcgaaatttcacaagtggattcaaactgccaaaactgagattgaacactagtactctccctctgaatgaaagttttggtgaagaatggttggttttcaaaaaatgaaacatccaaattgttattaaatttctcagtgaatggagagtagcacttgtagcctttttgtttaggtgaataccctaggaaaatacatttgagaggtttacttttgagatgatcaagaatacgaacaaaggctgaacaaccaaacactttaagaggaatagaggaaatgagtctagtatcaggataatacttgagaagtacctaacttggagtttgaaatttgaggattgttgaggacattcggtttatgagatatatggttctaaggatggtatccccctaaaaatgttttggaacatgcaaggtgaatagcaaggccctagcaacttcaagaagatagtgatttctccgtttggcaattccattttgttcgggagctccgacacatgaactttgatgatcaatcccttgagtacctaaatattctccaagaatcgtgttataatagtccttgacattatcagttcggaggacctgaattttcatttggaattgattttggactattaaatgaaaattcttgaaaatttgggttgtttcagatttttctttcatgaggaaaatccaagtcaatttggtatgatcatcaacaaaacttacaaaccatatagtgctcgaaatatttttaactcgagatgggccctaaatatcactgtgaatgcggagaagggttgcaaaggagaataaatttgatcaaagtatggaattcttgtatgtttggcaagctgacagatttcacattgaaatgaacttggatttttattgatgaataatgagggaaataatttggcaaggtacataaactaggatgacccaatctaagatgccatagcattattacgttaatgttactagagtttgataccgacaatgatgattttttcctggaagatgcagatgacgtgcaataggaactacgagttttggttgtagcaagcctatctacttgaaaaaaaaatagagacctgcacacttcttagcactgccaattgtcctccctaagtccaaatcttgaaaaggcaaatgagagaacataatttagcaacacacttggagtctctagtgagcttactgatagataacaaattgcatgaaagaaccaaaagaactgattgtaatgtaatttctaatgaaatagaaatagatccgataccaactactagggataaggatccatcaacaattctgactgtatacttagtaggacaaggagaataagaatgaaatacaaaagcatcacctttcatattatcggatgctctggagtccactatccacgaacctgttttttcggttttttttcactgagagcattgttcaagatacctttttgagttgtagaactggttgcaacaacagatgagggtgcataaatagaggcctgatctttcccaaacaatttttgcagaagttgtagttgttccttgctaaataaggcgactttggtttttgaggcttcatcaatggtgtttgctattaatcctcgactttcacgctattgctttcccctttttggtttccaatctgctagttttccatggattttctagcaagtttctcgtgtatgacctaaatgacgacaatgatcgcaccaaggtcttccaaattgagtatgattgttaccttgttgggaattatgggctgcaagggttgagttttcaatcacctgtggttttccttgatttcctatcataattttcttcctgctttcttctcggtggacttcagagaaaacaacatgcaaattaggcgttggtttctgtcctagaatccttcctccaacttcatctaggtccttaagacccaaaaaaatttatagatttgctccttttccacaatcttcttgtacttggctgcatcttgaggacaattccatttaaatttttttgaaacatcaagtatctaccagtatcgagtgagaagattgtagtactgagtgacagaggattcaccttgtctcaaatcatggaggatgcttttatctcgaaaatctctgatgtattttcattgtcagagtatgtttccttggcaatatcccagatttcctttgctgtcttgtagtacataaatttttggctaatctcagtgtccatcgtgctgattaactaggacatgagcatgtgattttctgctttccatcgtccgaatttcggatcatccttcagtggtggaggcacaacacctgtgagatggtcatctttcccttttccgcttatgaacaacatgatggagtgtcaccattaaaggtaattttttccatggagcttgtgactgctgattggaataatggaggtttcaagttgtgagaagtcaggacatcctcaggaacagaggtgacgtcagaggtggaacacttttctgatgtcatctcttggccaaatttcaccatgattagggtttctgaggaggctctggtaccatgtagaaattgagaggaataattaactttttatcccatctttgagaaataatttacaagagaatatatactgattttcaatgacaatactggaaaaattagtgcctagaaaataggaataaaattagaaacctactataagtactaagctacaaataaggaaatataatacatagaaaaaacaaactaaatacgaaactaagaaatagtacaacttgatttggcagatctcagattattccaagaatctcacacaaatccacagatcattctggaacttttgttctaccctgtcatataagagatagattatttttttgaaatatataaggagatagattagtgggtctaatatattaaaatgtaaagatgtataaggaaagagagagcactaaaattgatatttctgcagattctcaagtatagtttttctattgtttcagagaacaagctttggtttcatccaga

SEQ ID NO: 6443 - DNA, 504 bp, Ricinus communis
  Intron number 1 from transcript 29827.m002625 (locus 29827 .t000098) derived from phytozome v7.0 (chr-ID 29827; pos 5 36715 to 537218 reverse strand)
gatcaggtcttctcatctgggcttctcttttgatttgtgatttttaaaaactttattttgataatgagttttatgtttcttttttaatctttttaatttctgggttcatgaattgtgtcaggttgatttagattattttaaagtctcacctttctgggatcctatgccctgtaataatttgagtactaaatgttgtttgctaaagaagttgaaaagggatatattacatcttttattttgtaaattttcataattgtttttggatggatgcaactccaattggtagctcttgtgtttttatatatttggatttgcactcacaaattttggtgattttagaacataagggtaagagcttttacaatccgttcatacttaagtaggcagaatgtgaactagaaaatgtctcatcttggatatcgttgttgttggttgtaactagatataatattctattgctcaatgacaggggtatatagtccttaacagaccctgggcctttgt

SEQ ID NO: 6444 - DNA, 7109 bp, Ricinus communis
  Intron number 4 from transcript 30157.m000798 (locus 30157 .t000007) derived from phytozome v7.0 (chr-ID 30157; pos 1 90571 to 197679 reverse strand)
gaagagctattacaaatatacaatcattctgaaaggtctgtggaaaaggttttgtttctacatatttgctttctctatttacttttgtttgtgatacttcaaaattgatagtcgacgatcttcatttagtatatgtagatatatttatgattgatgttggtttgttccttcttgaaatgtcttgcaaatatatacatgttcggcacgtttgggtactctgctgactggttcttttattgtggtgctatatcttgtaatttattttaaatttgacatataggggaaaaaggttgattatgtacatatgactaaaagatgtggaagcatagaaacaaaaatgttctatatggatgtaaagtaaaaaggcataatcagaaattctgcagagattaaatgtgcgcaagggtcgtcaggaagagtgagcaaaaaggaagaagagaagtcaaactagtgatgtaggttagaaggagaacacattctaaggactagatttgcttaaatagccaaattttgctctgtgggaatcttgagtttataagtagatgattgttatttccacatatttggtggttcacatttcacatgtctaaacttttactatctggtatctatctacttgtcctcaatgccatgtccaccttcctatgattgtatctatttttcatctgccctgcacttgtatctccatgtgcttatttttgctcctcataattacttatcctaatcttgtgtgttagagtcatttcgaagcctctgaacaattaataaaaacaaggaaacaaatttctgtgcatattttattttcttcaatgccaatgctgattgtgatactaaagagagctaaaagttggaataaaaattagagagacaagatttctaattatgtactaccttgaaacattaaatatgcaaaaaatttaaagcacaaacatatacaaagtatatgaaattgatcgatacttattttctcctgtttgatcgcatcaaaaggctcttatgatgtaattctctgttggagggatgtaaaaatggttttatctttttgtttttaacaaaatggatcgaatcgtcctctcttcttgagaagatctttcattatataggcaagactgccatctacacaaggaaactagagctgtacatgttaattacatagagtgatcctatgaagctatgtattgtaagctaaatctcctacctatttataagaatatttacagcctaaattaatggcttaattacaaaagtaatttagttgttgatcccatttatggctttccattgacattccctcttaaattgatgcgggttatctacaagtatcaatttgttggcaagaaagttatgtctatgctgtgtgagaaccttagtgaaaacatctacgacttgaagattgcttgacacatggggaagagaaatagtctgagcctcaaaggcctcatggatgaagtggcaatcaacctcgatatgtttagtgcgctcatggaagataggattggtagaaatgtgaattgcactagtattatctgcatgaagaggagtaggactatgttgagcaaaaccaagctctagactgcgaagccactgtatcacagtacaagcttaggatatagctctatatttggacttagtagaagacttagaaacacaatcttatttcttgcttttccaggaaataagggctggactaagaaacatacaccatcctatagtagaacgcctagtgtcactacacctggcataattagcatcattatacgccataagatcaagtgaggtagcagcaggatagaaaaggccttgggaatttgtgccatggacatagcaaattattcttcgaactgaagccatatgtaggtgcctaggagaagccatgaactgactaacctgttgaaccgcataagagatattaggtctagtgatggtaagatagaccagactaccaactagagtacgataggctgcaaggtctgataacaagtcaccctcatctttgcacagcttgagattaactttcataggagtagcaagaggagtagagtcttggagaccagcaaccatcaccaagtcctgagcatacttatgctgagacaaaaagataccatgcaagccggcagtaatttctataccaagaaagtatgtgagagaacccaagtccttcatgaaaaatgagtcttgtaaatgttgctttagttgagagattagaattgaattagtacccatgatgattatgtcgttgacataaactaagagaatgacaatgccaagctcagttcaacaaagaaacaaagatacatcatacttggctttgacaaaatcaaacttgagtaaggtggaggtaaatttctcataccatgcacgaggggcctgctttagaccataaaaggagcatctcaatttgcacactgcagaggtagagttagaaattaaacctgccggaggatgcatataaacatcttccttgagattgccatgaagaaaggcatatttcacatccatttggtgcaaactccaagtttttgaagcagcaatagctaaaattgtgcgaatagtagtcatttttgctaccagagcaaaagtctcctcgtaattaattccatattcttgattattgccaagagctaccaacgggcctagtacctatccaaactcccatcagatttgaccttaatcgaatagacccatttacattcaagtggagtcagactagcaggacaatcaactactttccaagtcttattagcttcaatggtacatagttcttcctgcatggcctgctgccagcatttctctttgactgcctgtgagtaactagtaggaatagtaatagaagatatagtggcagagaaggcaaagatagaggtacctgtcttagatgatgggaatccatatcgatcaggtggaccagtgactctaaatgagcgacataagggagcagatggcacgacaggtgcggaagggggcagcactggaggtctgctttgatatactatacctggcttgaacctttcaacttgagtactatgagcactagaagggtcattaaaagaaggcaataattcaaacaaaggctttggtgatggagacagttcttgagacataaatacgattcgagttcggatcatagcataaataactcttttgtgtgacactataacctaagaaggcataacagacagattgggcagacaatttatttctgctcattggaggaagatgcataaaatagacacacccaaaagtgtaaagatttgtataagtaggatagtgtgatgaagtctgaaatatgggactcaaaatccaaaacttgggaagggagtctatttataagaaagttgctgtggtgagtgcttctccataaaacttagaaggaacggatgactcaattagcaaagttctaacatctaaaagatgatgattctctttttcagttactccgttttgttgcggagtataagaacaagaacatcgagaaataatccctttagtttgcaaaagagattggaactcatgagatatatattccccgctcgagtcagactgaagaatttttatagtagctgaaaattgattttgtactagagctagaaatagtttgaacatggaatacacttctaatttatgatgcaggaaataaacccatatatatcagctgtagtcatcgataaaggtcactaaatatttgtattgggcatgagagatagtaggactaataccccaaacatcactatgaattatctcaaagctttgtgttgctctactaccttcagatggaaagggtaaaatcttacttttgccaagtttacaagttgcacaattaagaaacatattgggagaagaatgcattttattattcaacaaaccagatttcaacaaataagatagaatcctagagttaggatgacaaagacgcttatgccagacttcatttgacacttagagctattacaaagtaaagctagtactggggaagaagagaagttgtgcgaaataggtagtttcaaagaaaacagagccccttcactatcaattgccctaacatttgatcctgcacaacacaaccatcatgaataaaatggacatcacaatttttggtctagaagttgactaacagatactaaatttgtagagagattaggtgatataaaaacatctttaaaggaaggagatacatcaccaactgccacaatgggtagattactaccattagctgtttgaatatgtgaggagccacaatattttctgatattacttaacctatgagaagaattagtcatatgattagaggcacctgagtctacgatccaagtagaagataaagaaccagtaccttgaactccaagtactgaaaatgcatgcacaatcatttcttttattgtctcacgagttaaaggtgctgaaggttgtaaagcaatggcagaagttgttgtagcagcagaagaaacaacaacatgataagccttgttggagcgtagaggacaagtaggacactctttaatgatgtgccctgaccgcttgtagtagttacaaaacttctaggacagttaggaataatatggccatatcttttacagctatagcattgggtggtattcatgtcgcgaccctttcccttaccatgggcagcataggcaaatgagataatattagaaggtacacgagcttgctccatactattctgagtattgatacgttgttccttaggcaagagttctctaaaacaaatctccaaagatggaacaggatctctattcattagaggcaacaggatctctattcattagaggcatgaacagattcaaaatcaggccgcaacttcattagaaactgatttatttgactggttttgtgtacttgatgtactgccaccaatccttctgcagggactttggctgtaacaagatttaaataatcattccacaaagttagaaaaccagagtaatattcttgaattgatagatcctcttgaaaatagttaacttcattagaaactgatctatttgactggttttgtgtacttgtactgccactaatccttctgcagggactttggttgtaacaagatctgaataatcattccacaaagtcagaaaactagagtaatattcttgaattgatagatcccttgagaatagttagcaacggctaaatcaagcaggaaacgtctagcattgttatcttggttgtagacttgcttgagataatcccgtatggcctttgcagacctatgcagacgtaaagaaggaatcagatatggctccatagaaacaagaatctaagtcatgatttaattatctttggcagcccaagttgctttgtctgctgcaatagatccttctttggtgctaccatctatatggccctataactccttacctttgagaaatgtctccaattgaaactcccacgtatcataatttttccatgtgaacttcacacagacatgatatgatttctccataatcactaagaatatgactgagaaagttaggatttcttaggtgtaggctctgataccataacaaaatagatcgaattgttctctcttcttgagaagatctttcattacataagcaagactaccatctatacaaggaaactagagctacacatgttaattacatagagtgatcctaggaagctatgtatggtaagctaaatcttctcccctatttataagaatatttacagcctaaattaatgttcttaattacaaaagtaatttagttgtcgactccatttatgactttccattgacaattttgtgttctctagtttaatttgaaaattgcccaaaagtttcccttttcttgaaattgaattttccctcttccttttgaagtgggaattgtgcttcagctgtataattccatggcatcttaaaaattgtgtcaaatgctgtactgtggaagcttcttttcttttatttttctgagcattacaaaagctattctcatacatttgttaggcaccctactctatactaaatcattctccctgaagatccattctggattcttgagtttggctattttgaatataaatcttgttcctataagtagataaaaggtgctctttcttttggtcattttttttgtttaaactctgatgtaaattaaagtatgaccaagagccaatgaaacatcagttacatatgtttcgtgccagtataaatttgttgccttatgttgcatattaatgtttcttttgttgttcctctgaatattagtcatattttcaataatatttagaggaaaaatttctctcttggtatcaactagtgtcttaggatgacgatcccaattcattgctggtcaacgacttgaatattgatacgaacaaaaggagattgatttcacttctcagcaacgactctatctgaattcctgttttcctaactattgaaagggaatttattttgttcaggacctcaaggctatacacaagcttagcttgtaagactctgtctaatgtagcgaaagactagaatgggatattaaggttgaaacataaaaaataattggattttaaagaaatctctcaattaaaaatgaacttgaaatcagaaaatacaatctaaatttgtgtctagcagccccatttaaactagttagtctgaatcttaatcctctatcaaaaagtaaccttaaccaactaaataaattattaaacaacatccaaaataaagatggaaaagaaacttaaccaattatactagctagtataattctaattgtctatcgaaaagtaatcttaaccaattaaatcctctttcaaaaagtaatcttaatcaattaaataaattactaaacaacaatctttaaagatggaaaagaaacctaaccaaaataaacatgaaaactaaatgaagtcctatattaaataaaataatgaaattcaaaaagaaattataatttgagtggaatctgcactaatgtttctgttgatttatcatagctcaattgtgtgtttataaaaatgattactatgaagtggatttctttttctttttatttctttcaatatgttatgtcattggtgatattgctgataatccctttcttattgctacagtgttgcacttgtagtggacagtcctgaattgttca

SEQ ID NO: 6445 - DNA, 855 bp, Ricinus communis
  Intron number 28 from transcript 28035.m000359 (locus 2803 5.t000004) derived from phytozome v7.0 (chr-ID 28035; pos 129194 to 130048 reverse strand)
ctttctttctcgtaagcattctttctattcatgtttgtagtagttttacgttgtgcattttctatttaaatttctctatgaatgacccaaagcaaaaataattctgttgcccattcgcaataggaaagtttaacaatgatgttacagctttaggggaagatcgcaagtgaaacccctggtgtacgcctatcacaaatcatttcacatgttattaattatgaactgtttatcctagtcaattcaaatttattatgaactattagtcagaaatcattccacataagattctaagatggctttctcatgttaaaaccaagaaaaaataatttgggcatctagatatttgaaatactctgtccttttcccttttttacccctgttctgctatacttagagcatggtattatgagacggatggaatatgataattgattgttatgcagactttattgtcccttgactggatactcagtccttttcctttgttacccctgttgtgctctacttagagcatggtattatgagatggatggaatatgatcattgattgttatgcagactttattgtctcttgactggataagccaagttaagtccctattgagcgtgatactttgtattaagcaggagtatattctgatgatattaaccctaacaacttcatggtattaaatctcatacaatgttgatgtactatattgttgttgttgttgctgcttattattattatctttttgcttttgattctcctttcttttaagtttagttgtttaacagtacaaagaatcaaacttctctcatatggttatttatcttgtagtgttttgactccatactacacagaggaggtactat

SEQ ID NO: 6446 - DNA, 634 bp, Ricinus communis
  Intron number 3 from transcript 29806.m000952 (locus 29806 .t000023) derived from phytozome v7.0 (chr-ID 29806; pos 1 63110 to 163743)
ttggccaacaacttgtacataaaggtttacttttctccttatccatttctttttccttttcttttcttcttttatcatattttactttctatttttaacggtaatataattagcatgttagcttatttagattagaggaaatgtaaaaaaaaaaaaagactgcacgagtctaataacatggcgggccttcattggaaagaagactgcctatcaggttggcttggcgaggctgagaataaacatgaactaaactcacccagaatctcagtttggaagcaaggcatttatgtttttggctctttttttcagcgagaaagatctctctatatttatggtactctaagaaatgactccacatagatattcatggctcttgaaggttttgaactactcaatatatttattactacataaattttttagcatgaacataaactggtatcagagtaatctctcaaattgtaagattatgagttctaacttgggtcagatccaaatgaaaaacaaaattcagaaaagcaagggatttaacctttctcaagttagacaatttagaccaagaaaattaataagatcaagtcttcttttattgctgctaggtttggactttgttcagtcaaacatttgggctgca

SEQ ID NO: 6447 - DNA, 2622 bp, Ricinus communis
  Intron number 7 from transcript 29615.m000503 (locus 29615 .t000015) derived from phytozome v7.0 (chr-ID 29615; pos 4 39262 to 441883 reverse strand)
aattatcaccaactggacagctacttttggaggaggtagatgatgccggagggtttcatgaatcatttcatttctttcatcaagtttgggtagtttctcatgcatcaaatatcgataaagaaaacacttaccccgaaaacgtgctgacgtgggaaggaaattgtagtccttcaagaatattctggcatattttttcttaacaggtttcttcttttttaacttgaaacaatttcttttctttcttcatctttttctctttttcctcttctcttttaatttatggtttatagaatcttcaagcactctaatactacttttagaccaatcttgttggagagaaaaaggaaataaataaatatagacgaacaaaaaattctaaacaatacctcacaataatatttttttattattaaaatatataaaacattgctttataagagataattttttcactttatcatattactaaaattataaattatttatactactacctacatcattctttacttacaaattgaattatttatatttatgaaacataatactcaaaatatataaatttttatatagttagacttttcatatattttataataactattaattcttgaaataatataataaatatttgataatttaaatttactatttttaacatattctattaaatattcttaaaattataattttttatttagtaaatcttacgattgaatgaataacggataattataagttttagaatatatattctttattttatatgaattattttttttaaattaaaaaaaaactcatttatctgtcaatttatatatatattttatattgaaatagtttgcaattttaatagaaagataatttaatttaattaaataattttattttttataattagatttattaaatatttttttaatttaaataaactattagaaaaccataattagtgggaagggagtatcattctattatcatccaactcatataacgatgagtgtaatgaacaactaaaaaacagataatagcaaggaacttttgtgttggcatttaagagattcaatgttccatattatattcctaacggaacttctgcacatcactgccacatctcattttccctctccaggcctttaagattagaccatttagtcaagtttgctgactacaaattgttttttttcttttcactgtatgcatgtgatgggactaatatcagtggacagcaaagaaatccatgaatatatatattatataatgttgtcaacaggtcattatcatgtaaaaataaaataaaataaagtttaaaaaacatagaaggattggtattttctttgtattgagcccctcagggtcatatttcttaagcatggtgaagaatattgaagcaaaagggggccacaaattagaaggtgatattgaaaaagtctggagaccttgaccttgtcactaatcatcttttgggaccatccttccttgctccctccctcaataattgaactcaatctattaaattatcattgcaattggcaagttattaatgttttgccctctctggtagtcccattttctaatggtaattgtgatcctgataatagcatctggctgattagatttttaatgggaaacttgtttaaattgccattgtgattctcaatatataaataggtcctaaaatagatgctgtccttgaatgacaatcattttataaagattgaaacgggtttatattcactttttaagtattttgattttggctttggtgcctgacctggaacccatgaaatctttatgttatgttgatcgcaggtaatgctgtcccttcatttcttttttcttttttctattttacgaaattattttcaatttcttactaaaattatatcctggtatcacaagccagctttcatgcaatgtatcttcaaaaagttacttccttgattcagccaataacgaaccgggccttttttttttttttttcttatcaattctatgtttcagaaatagcaacagagctgttctatgtgtcaattgttattaaaaaataataataagatacagtacggtcactcttaaaaagatttgctaattaaaatattgatggagaaaaaatattgaaaaaataaaataaaataaaaataataaaattagtggagatattttgatgttttgaaataaaatttaattaaaagttctaactacttttattaaaatttaatttaactattaattttatataaatttaattatttcatttaaaacaaattaaattttacatttgcaaatgcaaatgaattctgttatttgtccgaatttatgcaattatttgcatattatctcataataataaaaaacaagaccaagtttaatgttgatatacagagacgaaagtacatactaattatggcagcagccagaatagagttccaagtccctaattaagcaggaaagattctaactactggcagtattttcacaatgttatgtaaaaccagaaagatcaaaattacgttctctataaaacagactttgtttccatatgcattccttttctgttttttgctgctacattgctttgccagagatactataacaaagaacggttccatcagagacgac

SEQ ID NO: 6448 - DNA, 2547 bp, Ricinus communis
  Intron number 1 from transcript 29598.m000466 (locus 29598 .t000025) derived from phytozome v7.0 (chr-ID 29598; pos 1 21343 to 123889 reverse strand)
ggagcattggaaagactgtcaagagcttccaagaggttggttatttcatctgggtttgttttatttttcaagcacatgatacaaagtattgaactttattgtccgttatgctgtttaaggtatttcggttgtaatttaacaatatttctgctttgttgattttgattggaataaatttttctctttatatcccgtataactcgattaagattcaattcatcggagctttctggtttttttctcttgattaattgttggtttagtttgcatattattttctacattttttcatatcctgaataaccagactccccaacatataaaataggactactacactaagataataccgagaccacgaaaataaaacaagctcaaacctaggaatttgaaatttgatcagtcaaattgcattctagtgcttttagtttcaagctctgcatcaattacaagtgtggttgaatttctatttcatttggccttggaattatcttagcttgtggaaaagtggtatatgcttgtagtaatttattctccaatggaaaagaatcatggttgaatgatagaattagatctcaaaattctaacttctggggatcctcttttctcttctagcccattcccttctctccaattaggatgcttactggtccgtaaaattcttcccttttgccttagatttactgagttcttaacggactgtgtgagctttacagtaataggtcacaaggaaagtgcatcaatacatttactttgctactatctgttacaaaatgatattgttcaattatccatttattcctcccacccctaataaccaaattaaaaatccatcagtaaggtttaatctgggagtaacatatgaaattggtatgattcttccaacttgaacctgatgtgtaattaccattggtatctacactccttttaactgtttcgtccattttaaccacttcctgcataataatcttgtatacaatccttgaggtcttcccatgatcgctgaccattatttgcattaaggtctgtgaaaaaaaagttctttgggaggttactctgatttcaaatataattgcaataagtaaaatgctgagaatcttgttgacgaatctatctaagttatttgatggtgatggggtatatataaggatgccaaatttattttggctaggataaggtgtgtgttttgaattcaagctgtgcctgctcagaatcctgcttgttactgattagatctctctctctctctctctctctctctctcacacacacacacacacacactctctctctcgcctgacacacttttgcagatttttccttaatactatcattggagagagagatagagagagagagagagagagagagagagagagagagagagagctttcagttgctattgccattgatgaaagtaaagaaaattgtttagcctctttgagatggttaccctttcagcctttcaggtataagacctgcttttgggatacaaagatcttggcactagtgatctgtccaccttaaattttataaaaacagctgtgaatgcttttgatgaatctttggtctcaaattgaactttagaacattgacttccatggtgaagcagtggtactgtgatggttgtgttttcaagtaggttctcattccttgttttaactccttgtgacagaaaaggtttgttatagatcagcattcctggaagcagtttatgacttttgtgtggcaatgcttcaaagcgcatttgtggtcattgggacttaaaatattttcttacttttggtgaatgttgacgtggagatggaggccatatagacatgtctgtgctctgatttgccataagctctttgtttatagaggacatcatattgcaataattatgccttttgttgccttctgctatgcttgatgtatttaaaaaatataggaactgggtcctagttgatatttggtgtctctctcctggaagttatgctatgtgtttggtcattttggtggggtcagttttatttaagagaactcagcttcctgcatactcttaggatttggatgcttttgtagtttgtagtagttctatccacatcttaaatgtgtattcttttgtgcaataaaccattaaaaaacattaaattttggtacaaggaggagaaatttgagggttgaacgcatgaactcctactgttttgcatcacaaagcaggcacttaaccgctagaatgctgccatactggcatagcgccaaatgattaatcaagtttaaaatgacgtcctagttaactattagattgcttctagctctcatgatatggtagtaagcagcaatcagtaagaacgattaaaaaaataagtaaacaaggaatttatgccatcttcataagataattatgtgtgctgttaatgcttatttctgaacgttcatgctactggctaagtgtcttgatttattatatatcatttttgccatacattttataaggaatatagatatatatgatcactataattcgcaggctgcaaaagagtttgaatcagagcttaaaaagga

SEQ ID NO: 6449 - DNA, 2458 bp, Ricinus communis
  Intron number 1 from transcript 29844.m003197 (locus 29844 .t000043) derived from phytozome v7.0 (chr-ID 29844; pos 2 86824 to 289281 reverse strand)
tcaaacgacttgagcaagaaactagatttttagaggttggttcttcttcttttttcttttctgcttttctgtttcttggttcaaagtttgcttcttttgtttaattgtttgactgctcagtgtattttgcgtgataagcaaattgggtgtagtttgatgaagagaaaaaacactgaacttgcttagttttaattgattttgagctctagtttctgaagttcttaattctgatcttatgaattttgattgaaattgaatgtgatgttgcgtttggcaatttatgtaattttttgatttcattgaatttttggactttcaagatgctaagtaaacacttctaagattgcggcagaagagttctaatagttatgacagttttgatattgccgaaacttaatttatctgagattgtagattaaaaagtactgttaaagtctcaagacattgatgaccagcacctctcgtcgagatcaccattccttgtgtgttttcatattagtaatgtcatactgacgcacttgttgcagaaattttatatttgaatttctcattggtgttatttattcaaatttcactctccaggttgatatttatttagaataaatgtgcatcttagcttcgaaatagttttgaatatagaaaagtttattgttctcaacatactgggacgcatcccttccatgcaatttagtattatattgtagaatgaaggtggattccttagaaagttgaaaaaattatgtagggtaggaaagtaaggttacagaagacttgtaactttgagtggtagttgtgggaaagcttttagctgctatttaagataacttctcattatactatcatctcaaccatgttaatttgcacatcagcaatgccaaaagatatggggtttattccagtgtttgtaagaaatatgccatctaattttatcattacttgcaaattaccatctcgttaagtagttcttattatattcgagaaaaggtgactatttagtacactctgaaggcccattaaactttggtagctcagttagtgatggtccaagtcctctgcttgaacttgaagtcctctgatgagtgtacgcttcacaatgtaaatttattctggtgtgagcagtttttggcaactataataggttttctaaactctatccgtcaagtttatagccaattagtattagaagagtggtattttacggtatgtcagttttgccaagcatggtaattccttcttcctagatgtatgtagataaattgggtcagcaattggctacaaaaatcccttagagttcatgtatcagctatgccaagcgtggcaatgcctacttcatagttgaatgtagacaaggacttcatttgcacagtttagatatacagtttcatggtaagcccccagccagcaattggctacagaaattccattttgtgaaatctatattttaagaagagtagtcaaacatttgcatctgaacattggaaaattcttacctactccccaacaattgattgagtgcacatactggttagctatgaaatttaagatagcatgttactcatctattacctgagtgtataacactcgaggtacttgtccctcacccaaaggttggacgtaatccacccagagtaggcaattcattcacctgaacatatattggtgtttaaaagatattgcttgttcatttcttgagctttttcagaaactatttaaactcacatttatggtgcaattgccttgcgatattcttttgaaagtagattttcaagtcttaaagagaccaccttgaagattcaggtcaagcttttactgtgcattaaaaaaaccattttctacttggaaatcatgggaatttcttgttcttatgattctatctttccctctatacatatgcaagagagaggataatgagttttcttctcaagctttcagtggttctgttttcatatcagcagttttttttttttttcctatgtccctgttaaatggaatgaaactgatacttctattcctgagttttgggagttcccattcctctgcttgtttctctgcaccgaatttgattctctaaatgttaagacattaattgcaagcatgaccaggaaatctgtggtatgtgtgtttgctttactccctggctaccccatgtagaaaatgacatcagcttgaagaaaccgtcctgcacatttatgatgcctaaatggaatatagttacccattacattcttatgactaatttctgtaacaacttgtttctagtatttgaagaattattagtgcattgtaggaacaagtgttagggtttgccatttacccccagggcaagatctggaaatgctttctcatgcaattatctgataaactaagagtgctgtaaatgctagataaagactactaactttggaattggttgtttgaatgcatgtataaacagcaagagttggaacagcttgataag

SEQ ID NO: 6450 - DNA, 6131 bp, Ricinus communis
  Intron number 2 from transcript 29835.m000647 (locus 29835 .t000023) derived from phytozome v7.0 (chr-ID 29835; pos 2 20222 to 226352 reverse strand)
gttaagtcttggacgcaacaacttgacaggtacccttttgtttgtttttatttgtcttatcgatcttttatgtgcagaagcatttacatacacacaaaaaaagaaaagagaaaagaacaagtaaaaagataaaataatatgttacatcgttcatctaataattagattgacatccacagatcatttattatcaattaattatattctctctcaaatcccttaatctaattatacaaataaatacccatacataatacactttaacatttaatatatactttggattcctaaattttgaccatttaatcactttaacatcttaatttttaattgaatctaataaacacttaaatttatttttataatctattaaacacttctagttttcattttaacttaacagacacttgaattttgtttaatagtaatattaaaacacttatatataatacaagtggacatattaaataaagttgcttgtcaaaaattatttaaatattataaaaaatacaagttgaagtgtttattaggttaaaataaaagttaagatgttaaagtgactaattgattaaaattcaagtgtttaaatatgcattagacccttacatatctaatatataaaatagcatcatcattcttctctgggcataattaaaccagttatcatatagtaaagatactactacactataattaggaatagttccggccttaaccttggactagatcaaataatttctcatataatactttattaggattaatacataaaattattctatggttttattattttacaattttcagtatatgagtttttttttaaataaaaaatgtatgtagttacaaatcgtaataaaaaaaatattttatcgttaaaaattttcgatttgcaaggatttagctatcttcacttcaatcagccatcattgtcatatttttcgtgtttgataatatgggtttagagcttaataactcaaaatgttattgtttgaccgttaaatctatttcatcagattaatgacttcttaaatcgtgatttaacggtcaaatattgaaattatgagttattaagttccaaactcatgtaatcaaacacagataacataataacaatatcgatcggcgtaaaggtagccagatctttgcaaatctagactttttaacagcacatgtcttttttttctaaaaaaactacatactaaaaattataaaataataaaaccatacgatacttttatatatttatccatatgtctttattattttttgttttggaagataaacgaggcaaaaagcctttagcagattacatagtcacaactctcaggtaagacaccccactattatcatatactaaccaaacatttaaactaggagtttgaggcttgtgaaacctggttggcatattcccagcaatctgcagcaaaattacttcaaaataaatataagatgagcaatttcattagttaacaatctcacttgcaaggccaaccactaaagcattttatcttttgggtccattccacttccacaccaacttccaaattgggtccttgttgttctatttcagagatctccataatctcataggttaatttcactaaaagttttccattagcgttgtgagcccagtacactttgtccactcctttctccatacaattggcataatcatgttagctacctgtaaaaccaaactattagaaaatgaaggattcagagtttgagagaaaataaaaacttaaaaacagtgtaattcattgagaaagagaagaattgcattgactgaataattcatacaacacatgttaaaggtatgaatacaacagactttgtaattgtctaataatccataccaatgcacaagagatgtgtccattattaaagattttccaacaaacttaacagactttgtaattgtctaataatctataccaatgcacaagagatgtgtccattattaaagattttccaacaaacttactcattatctctaacatccccctcaaacttagagtagaaaggttttctactctaagtttgtgacgaatcaatgaaaacttagagctagagacagcttttgtaaacacattagcaagttgagtagttgatggaacaaacgagcatcaaccttcttttgagccaccttatcacgaacaaagtaaaagtccaactctatatgcttggctcgagcatgcaacactgcatttgcagacaaagcaactgtgcttaagttgtcacaccagataacaggaggtgttggaatccacaacccttaatggttgagagaacttgttgtttccgaattaagaactttttgctatctaatttaacagaaagagcatgagtaaaacttatcggttaaaatttagaggaggaaaaagaagaaggatcgtagattctcttcattgaagaagaattaggctctaataccatgataggattcaaagatcgagagaatcaaaattctaaaaacagtgcaactgattgagaaaaagaagaattgcatggactgaataatccacaacatacatgttggaggtataaatataacagacttttaactatctaatagcctataccaattcacaaaagacaaatgtccattactaaagattctttagtaaactttttaagctaaatataaatggcccctgaacttgtcccgttataaagtatataagagaactctagcagcttgtatttatacataactcaaacaacaaccaagtcccgaacaaatataaatctgtctgttgcagtgcaacacttgtagcaggcggaatacatcctacattttaaacttgcgtatccactgtcacacatgcaagagttgcttaccaacaaacgagaaacttgatacattcttcaccacccccaggccaaacgtgatgcagaatgacctctgaaaggaggagcaagtcatccgcaaaattaaaggtgcattaaagaaggattttttcagactaatcagatcaattttaaattctttaatatctttaatccatattttacctttccctttaaaattatctttgaaccatgtcttgcatattcaagagcttcacctcaatttcgaatctctagaagttttagtattatttaaatttatttttacaataacaactctacctttaactgtacttgcttaggtttttctatagccttaatatcacttgttatgcatcaatcacctatgtccggcataaataaataagaactaaatactatttacctctgaagtttttaaatttattatcaagtatcaaactcgttcaaaattaattttattatcaaatttcagtaaaatcttatttttagcacaagttagttttagtgtctaagtaaaataattattttaaaactctttttcttgctctaatttttatttttaatacaatttaattcaagcaaatttaaacattttaaaactacttacatttacaacaatattattaaattattatataatttaattttacttactaatataaaataaacacttctatttaaaaaatataattctattattatttttattatatattataattaagttatattaaaagtaaaaattaaattaaacaattatatcttaatctaacgaagtaatctaaacatcaatgttgtgttaaaaatagagttttttaccgaccattcaaatgaaattaatatgagtaaaatttttatttttaatataatataattttaatattttattaaaaataataatttttaactatttattttatttaaaaatttaaaattaaactacataataatttaataatattaaataaaaaataaatatttttaatacattaatactactacgtacccatctaacttataattgtgttttgtgatatatcttggcaggtgaaattcctgaagagattacacatcttgttaatttggaaatattgggcttagagttcaacaacttacatggtatttacttttatttcaatggagtaactaattttccttttgtatatattatattggaagttatatactaatggacactgatcaatttacaggaagaataccaatgcagattggaaattgttctttccttcggcaaatttatgctaataataactatttaacaggtatgaatatgttttacctgatggacatatataaaaagtgtatatttacacgtatactaattattctgttttctaaagttacatttaattttattttctatttgataaaaatatgaagaaacttataatgataatggttatgactttgagatgtttatatattaatttgtcaaatatttatcaagaaaaagctagggttaagattttatgtttaaaatataatattttattaatataaaacaaaactaatacgatacaagttaacaatgtcgatttcaaatatgattaatttcttttgtttgagtgaaagaaaatcatatttctaacttaaacacataaattaacttttgaagaaatttcatagggcattacgtttaaaaagaattattttacaatttttaaatttttttatttatacaatttatttttcttttcttctttttttcaaaatttcatcaaaaaaaatgccaaagatatttctaaaagatgttaaaaggatattacttttaattatattattgtgaagtcagtttttattttatattttttaaattttcagaatttcataagaaaaaagatactaaaaatatacctaaaagatatctaaagtttatttattttaatttgtaatattatgaatttttcttttcagaatctcctccaaaaaaagatactaaaagatactgaaaacttattattttaacttatattattatagattttttttcataacttcatctaaaaaaagatactaaaagtatacctatacgatactgaaaggatattattttaacttattttactgtgaaataaatcaaatgagataaattaatcgttttttattttatatctttttatttggtatacgtgaattgaatgatattacatattttttattgcaactattgtattttgatgacataaagatgtataattcaaaaaatgtactataatatataaaaaatatactaaatgcagtttaaaatatataaagatataattaaagtaaaattaaaaaaattatttaatggtaacaaacatatactaaaaggatacaacaaaatatcaaaaggttactatcaaacatttcttgtttagggattaattttatttgtaagtgttacaaataaataaataaataaagtaaagaaaggttgcatttactttgataccagccaacgttgctcctttctcaaattcaaatttcttgtctattaaactcatgagttttggataattctcatgaaaattaattattttattaattagataattactctttatttaatgattatatttttttttctcattcatttttgtctttcattccattctatttcactttttttttaacctttttttataaatttaagaaaattgtcattaaataattataaaaaattattacatccaataatagtgataatattttaatatttattttaaaaaattattatttttatttatagtaatataattttaatattattaaaataatccgccctatgtgtacattagtctaatctcacaccttgaactcatgtgaaaaaggaagcataattttttagtctaattttctttatattatgatataatacatataccgaagggagcataccaagggagattggaaattgtactcttcttgagatactgtccatggacagaaacaacttcacaggtaatacaactgttttgcataaagccttgtaattggttcccattattgttaatttggttgttgttaacttgtgttatagttttctacaaggagagatgctaaatattttcttagataagataattaattaatagcaatattttatttgttagggtactttcaaatgaggaatgggaagactcagatttaaaacttggctgaaattgaaatatatatttattgccaggttatttttgtaggtgctaagattttacattcttggttgtatagtaatataattttcacaatgtgtggcaggtagaatacctcttgagattggaaacctacaaaat

SEQ ID NO: 6451 - DNA, 149 bp, Ricinus communis
  Intron number 2 from transcript 29854.m001108 (locus 29854 .t000019) derived from phytozome v7.0 (chr-ID 29854; pos 5 06982 to 507130 reverse strand)
accaagtggtttgataccaactagtaagtgactaacaattttgcttcgtggttggagctattctttgtagttgtgtataaaatgattttatttttttcttttctttttgtgcagccattacattgtccctgaacttggaccagaagtta

SEQ ID NO: 6452 - DNA, 1039 bp, Ricinus communis
  Intron number 2 from transcript 29762.m000496 (locus 29762 .t000024) derived from phytozome v7.0 (chr-ID 29762; pos 1 84780 to 185818 reverse strand)
tcctgctttgttatatctggcagcttgtggtgttggtaagattaagatttactctttatgaactaatctagtactatcattgaatacatgtgctatgctatggtcacaagttacgacacattttcatttaatgaaatgggatatgctattatatagacaaattaaatgttaaagtttgcttttttatttctctgcatgtgtaaagcacaatcaagttttctaaaagtatcgttcaatcaatattctttttttacaatcatagttaagaatatttgacagtaggaaaagcataataatgattgagtgtaaggactaatgcacccatctaccatgactaatgggaagaaactcaagttactgataattgaagaaatcatgtctattgtacagtaaaggttactgatcatagtttcaggggaaaccagttagaattcaaaatgttaactacgaaataagttaggtagatgcttcagaaactgagggatgggtggaatctttattattttggtaaaatgccatagttatcattacttattttagcattttatcaagttaaactgccatgaaaagaccaaaaaagaaaaagaaatggtgataggattggagcgtgttattttgctgataggaggaatgttcaggtgactataacttgttcatggagaaattagcagtttttagctgattagtggaggaatggctaggataattatgttttgagttgcctgaatgacttttatgccctaagcatttatttgtctttgctaaaaacttatgaagatggatatattttctaaactattatctaggataaaatgctaagttaagttgacttagttatacagaggatctcttttagtaaaagaatgctcaatatcattgttcatcattaatattattctatgtaattgattctggtgaaattctaacaattctttatgttattgtaccgaactatttttttattcagatttgaattttccttttttgtttaatttaaaatttggggtttacctcacaggtcggttgggtgttgttgacc

SEQ ID NO: 6453 - DNA, 1699 bp, Ricinus communis
  Intron number 1 from transcript 28657.m000391 (locus 28657 .t000016) derived from phytozome v7.0 (chr-ID 28657; pos 7 7975 to 79673 reverse strand)
aaatcttttcataaatcatttggcaccaaattcatgtaagtggtttttgtataaacccttttacaaactacttgtattttttttttttttcattaagtcatcttttctatctgggtcttatgtgatttacttttttaattggtttcatgttatctgctttgtgttttgagttttcttttttctattattcaatttttttttgctgggtttgtcttaaactctttgaatacgctttcttttttagctacccatttttcagaatttggttttgttatgttctactccttggaaattattttgtttatgttgctttagattttctattaatgaaattcttttaagcatgtggccctcttttccagggctaatgggaaatcgatattgtaattaaagttaagctgtaatcacttttgggattgaagataagctctttatcctttttatggggactgccctaagttcttctgcagatttaataagtttcttacctcttttctaggttgcatgttaatttgtagttgatgttgtaatgcggcgtttttctatgaaataccagacgaaaggggaatcttaaaaggggtatagtgagattcatgatttttttttattagttcttccgagagaaataatccttttattttatgtgactgatagggataagctctggattgctttactaagttatgatggtttagcattttcttttacattgtgtttggttgaaatccataaaatttttagaattcattagcaaatctaaagtttatgtgtttttattaaaatgaaagttaatatagaattttacataatcaaatttgtagaattgattatagctaaactaaaaaattctaataaaataggtagaatttctaaatgaatttcatattagtaagtcaatatatttcataacactaaaatatctctctcatgtcttttctctcaaataaaataaagtctttaatgaatttcaaccaaacacaatattaaagtaattgcttcataggtgaatcttgaacttcatttatgggtagttgagaaaatgtttaggcctaaatctggagtaaaaactccgattttattactgtaaatggactgctaaagatatttctgctagaggaatatctattagaaccatgattatccgatcaggtgcagattaaaactcataaatgagtaataagatattgtttatgagaaacacagtgctgtgtaagaaggtaactaggcaagtgaatcttcaacattcattacttacacaggaagtacatagtaactttgcaggtggctattaaagaaaaagtgattcagatacttctggagacatttgtctattgccggacacagcaattgcaaaattaactatatctgatctaacttttgactttaatgacattctgagcaccattattaagtgttatttaattgcatatttacagtaagcaatgaattctgtatgatatctcctctttgcaccttattaaaactccaggattttctcttttgtttcttttgtgtctttaatcttcttagacatcgatttcctattttgatgcacaattcatgttacaacggaaacatttatggcttttcttttcttatctattatttaaactctggatgaagatatggaatgaaatctttcttgctatttctgctttgcacagggttcctactgtgggaggaaaggctcttgatcttc

SEQ ID NO: 6454 - DNA, 5786 bp, Ricinus communis
  Intron number 2 from transcript 30206.m000755 (locus 30206 .t000003) derived from phytozome v7.0 (chr-ID 30206; pos 2 6708 to 32493 reverse strand)
tcaaatttagagagaaattaacaatctcaaacaaggtaatatttctgtgtctctctgctataccaaactgaaaaaataataggatgaaataagtagtatggtgcttatacctcaccgtgattatactggatgcaactgtgatgttatgaaacaaataaatgttatgataaacaggagtagagtgatgcaattcctcataggacttaatgatacttttgaacatgttcgaggtaatttatttttgctagatccattacctagtgttaataagatccattctatggtcttaagggatgaaaggcggaaagttgtttataatagcgctcctaacaatacagaagttgtcgctgcaatggttgcaaggggtgctaatttgaaatatgaaaatacagagaacataattaaaaaggatgctaataagtactgtacttattgcaagaagaatggccatttaagagaagaatgttttaaactaattggctgtcctgactggatgaaagaaaaatttaatcagcaaaagaataagaagggcaattggaatagaactcaaaatagatttgctgctcagattagtgtgccagaagctgacaatccttttgaggaagaaagtaccaattctatttccaacaatactgaattcagtaatatgatatgtaatttggtgcaataagaaatacaaaagatgctgaagggcaagaataccattgaagcaagttttgctggtaccactaattatacaggtaatattttatctcaagctttttcaacacaatgtggtagtgatgttgataaatggattattgattctggagccactaatcatatgtcaccatatgtttctcaattccatgatctaactaaaatacttgtcaatttgcctattcatttaccaaatggtcaaacgtcttctgttagtaacacatgatcagtttccttgcattctaaaatgcatctaaaacaagttcttcatgttcctgattttaaatataatttgatgtctatcagtaaacttactaaattagcaaacatcaaaataactttctatcctaatggttgtattttccaagactagaatgagaacattcttgccatacggagagagagcaaggggttttatcttctggaacgtagtagttttatttttagtaaagcagaattaaatcattttattagtttttgttcttatagtaggaatcttcaagaagttttggctgtaaataagaaacttgcagtttgtatagctagcaaacatattatcagctttgctatttggcattctagacttggacatgcttcttattctaaacttgttcatatttcagaactcaatgttcaagtaaatgattctgatcaaatatgtcatatctgtcctttagttaaacattatagattgcctttctctgcttgtgagatcaaaactgaaaaatcttttgaattaattcatatggatctttggggaccttacaaacaaacatctcttacagggcctcattacttcttgactattgttgataattatactagggcaacttggaattttctttcaaaagacaaaacacaggtgtttaacacttttgaaacctttttgaacattgtgaaaactcaattcactcaacctgtcaaaatggttcgtactgacaatgggactgaatttgtcaatttgaattttatatctctattgtaaaaacatgtataattcatcaaaaaactgcttcttattctccacagcaaaatggggtagttgagagaaagcataaacatatcttacaagttgctagagccatcaagttttaagcttctttaccaatagatttttggggtgagtgtgtgttaacaacaacttatttgattaatttgttgccttctgctatcttaaactggtcaacaccttatgaactactattccgaaaacctcctccgtattctagattaagaatttttggttgtctatgctatgttgtaagtacagaacctcataagtcaaatttgttgctagatcaatcaaatattttttttaggatatccacctggacagaaagcttataaattgcttaatctacaaaacaaaaggataatcataaataaagatgttatcttccatgaaatttgtttcccttacgaaacaagtcccccttttgtttctcattcactatgtttgtccttcaatatagatgaaaatcataatgagccgttagaatttgatattagtaattctatatattcatttcctattgagtcttctcttgatgttgctccttttgagtcttccccatcttccattgaaatagcttcacctactcattcttttgttcctgaaaatatttatcctgctgaccacatttccagtcctcaagtcacaacaaaaagtggtagagtgagtaaacctccaagctggctccaagactttgtcattcctgcaaaaccaaatctcaaatcggttaacactgctttataggctcagcttttacacaacccattttctcatctgcttacttatcctttctggctcaaattcacactgactatgaaccaacacactactaccaagcttgtaaggatgaaagatggttgcaggctatgaatgaggagcttcatgccttggagaggaatgatacgtgggttcttactactttacttccaggtaagaaagctattggtacaaaatggatttacaagatcaaaagaaaaagtgatggcagcattgacaaattcaaggccagacttgtagcagaagggtatagtcaattggaaggcatagacttccatgacagtttttcaccagtggcaaagttggttactgtcaggttgttcttaatcattgttgtgcattttaattggccttttacaccaaattgatataaataatgtttttttacatggtttgtggatgaagaaaaatgtttttgcagccgccacttggttattcaaaagctaaatcttatgaagtctgcgagttaaataggtccttatatgggcttaaacaggcttcgagacaataggacattgaattcaccactactttcttggagcttggttttaagcaatcatctaataattactgtctatttataaggcacactgatgaacattttacagcagcaatagtgtatgttgatgatgttttactcaccggcaattcagaggatgccagtcaatttgtcaaaacttttcttcattcaaagttcactatcaaggatcttggttatgctaagtattttcttggattagagatagcaaggggatccacaggtgcttttattaaccagagaaaatatatcatggacatcttacaagatgcaggcttatcaaatgctaaggaggctaatactcctttgccttcaggtgttaaatttagtaattcagattctgctcaaatggcatctcttgatggctttcaaaggttgattggcaggttactatatctcaatttatataggcctaatatctcattttctgttcaataattaagtcagttcatgcaagtactaacagaaaatcagtggaatgcaacccttcatcttcttagatatctgaaagggacattctctcgtttatttctccctgctggcaattctgatgttgactaggcagcttgttcagacactcgcaggtccatcataagtttttgcatctttcttgggaactctcgcctttcttggaaggcaaagaagcaaagtaccatatcaaaatcttctgcagaagttgagtaccgtagtatgtctaatactgtctgtgagcttcaatagatcagttacttactacaagattttggtctcaagctcaatcttcccatttctctgttctgtgataataaagttgtcatttatatagctttgaatcttgttttccatgaacgaaccaagcatttggatattgattgccatcttgttcagaatcaactgaaggctggttttcttgttcccactcatgttccttctaaacaaaaaatggcagacatcctggctaagtgtttacctcaagcacagcacccactatctttgatctaagttgggattagtccctttaccaaaccaatctccaacttgacccgagggggggggggggggggagagggttgggtaaagaaagctaagccagctatatgggatagctaagccaactttatgtgatagtttgttagtttgttacgtatttgttatttttttctttttcctttctgtttttttgttcctatctttagataatttttttgctattattccttttgttcctttttgtaatttggaactacaaataagagaaaagcatccgctataggtgttttttttatgccattaatcaattttcttcttctattctttgtttctcttcaaagttaatcattatgggtcacttgtgagacgagtggactgaacatgagttaaaaaaatagtgaatcacatgaatgatttacttaagtcactgaatcattattaagttataatggtgtaactaatcctcagacttgaggtgacaaagttgtctcatgaatatgtaattggaatttgcttatgctttgggtatctgttcatatctagaatggatacttgcagatagtggctctagttgtgtatgcatggaggcaggtgttcatctacaaagaatccattgccttgaataaatagaagaatatcctatgcgattcgataacatcttgaataagaaattattggccgaagtaattatgattaataaaaaagggatttttacattaatcatatttagttgagatgtatcctgaatttggtaatagaataaagttagtagatttgattgttccatgatcctcacttgattaggatattgttcaatggaaggatttaattatacagtaattataaataaatggttcatagatgatcaatgcctttattatcaattgggtaattataatatgttgttagacgtcacttataatatataggaacgattgagggacaattatttaattattccattagttgattaaagtgtttatattaatattaaagggtttaatattaaattcctattatcaattaatgatgaacttagaaagtcacacacattaagatcaacttaagcatgacgatggacttgacttatacctcgagcaggaacactagcatcttccaaagttaaagtctataaatatctaactaatgataatgtataatatataagtgttatatattgaaggagcttgacacatgttattacaaaagagtttgtaatgacatgtatttgtatagcagcttgacatgtgtcatcacaaaagggttttatgatgacacgtgtcatgaaagtagattgagacgtgtcatcataaaagggtttatgatgatatgtgtagagaaagcatctggacacgtgtcatcaccaaaatattttttgatatctgttaagaaagcagattgacacgtggtgtcaatatagcttgacatgtgtcatcacaaaagagttttatgatgacatctatcaatactgcttgacacatgtcatcacaaatgagttttataatgacatgtgtttgtacaactgtgttaaagattatgaatttttaacactatataagagagagtttcttactcctattatcataagagtgacaattcgacatacttactataataacaaagttatcatagtagaaaacttgaaagaggagaaagagttttttatctttaagtattgaatagctttacttgacttgagattggtatattactacaactattagataagtttttacagtttattggctatgacattagttaaggaaaaattattttattttgactatagtt

SEQ ID NO: 6455 - DNA, 2224 bp, Ricinus communis
  Intron number 18 from transcript 30063.m001439 (locus 3006 3.t000043) derived from phytozome v7.0 (chr-ID 30063; pos 521311 to 523534 reverse strand)
cgtcgaaggacttggatcacttagcccgacaagaggtaccttgaacagcttttcttattctttataaagtacagaatgcatttatatagttttgaaatgaaagtgtgaattaaactaatgcatgtcaaagggttgccaacccatgaacaaagatagatggggccattgcctagcgcaatggctaaagccctagacataaaagtatagaactaaaaattaatcactttatgaaaaaaattgctaaaggctaaacctacttcaagtaaccattattgggaaatggcctctttatttttttaggtatttccatagaatattacaaccttttttcaactgtaaagtctatgaatatgctagatatgcaagagatatgtagtggaaagataatatcttttacttgtgtttttgtaaagcttgatcaaagcttgcacttctagaacctctctctaccgtttgcttgcttttgccttttcttgatggaattatttaatttactagtgagttgtcattgtaacctctttgtttgtgaatagcttttcattttgttgggaatgtctttaataaataggtttgggtagaactcatcctaaaagctagctcaaggaagagggtggtcaatctatatataagaccataacaacctagtaatttagcaatatgggacaaatacaacttctaatagcctccctcacgcttagcgtgttatgcaaatggtccaaacccaatgttgcaaacaaaagtctgggcttagatactagaataaatgggcttatgtagaacttgttcctaaaatctagcttaaagaaagagcacatatatacactataactgcctagtaacttagcgatgcaggacaaatacgacttctaatgtcttcaataacccgttgctggttgtttagctttgtcttaacatatagacttattatcctttattaaatctgtaagacaagttttcggatttattatatcagcaattactctccaaggcctcttctttttcgcagtaggtaaaattagcaaaagcatatgaatcttcgcacatccatgacgcctttagtgtcctccttatgccactgatttggaaaagatcactactctcactagcaatttttgtagattcctctttaaaatgcagtgcaagatttttagagtcctcgtcttgttagtcattcatctatgttgaattgatgaaaacattttgaagtaatattctcttttatgatccatgataactcgtaaaggtgaggctgttcttgggttgtttgtagtcaccttgcagattctccattcgggtttccgcaggttcctgattctgtaaggcttgtatagcccgagtcaagtcctccttcacttttcacaatttggccaactctatttgttggggctgtttgtctctacctcggccaatcgttgattgaatcaaaaaagacctagtaaaattaaggatatttttcgctctgataccacttgacataacagaagattagactacgatgattaaggtgggaatatagaaaataattagggtttaaatacaacctctgaattgatcttaaaattgaaatcacagaatacaataaaaattgtcactagcaccttatttatactagttaggatgaatcctaactctaccctaaaatttaattctaaccaattaaataagggacttccttaacaagaatcctaaataaagatagaaaaggaacctaaccaaactaaataggaaatctgataaatttccaactaaatgaaataaggaactccaactacaggtaacaacggatcctgatttgaacaggatgctcctactacttcaagaaatcatcaaattactcttgacagttaacattagaattacctaagagtaaaacataataaagagacttgacttttactagagaaatctatcaacattaaataaggggtttcttatgggctattacaactgcttttggcaaagcattgacttggatgctttaactggaagtatgcaaattgccaaggttatggcaaaaacattgaaaatgcagaattttgttcttttgaattgaataattcaaggggttgattttatgtactaaattatgtattttaaaaatgttcatcatttgtttttcttaagagatattctgtacattatgtgagtgcttttagtcatgacttccataaaagttattgttgatatggttttgcagtggcttgctaaaaatattagtaagaaa

SEQ ID NO: 6456 - DNA, 5027 bp, Ricinus communis
  Intron number 13 from transcript 27516.m000169 (locus 2751 6.t000002) derived from phytozome v7.0 (chr-ID 27516; pos 20635 to 25661)
acggggcatacctagtaggtttatacatgcatcgtcgccttacctcttaaagcatgctataccatccattgattacttaaattactctttgtgaactaaccttagatattcaatgtgaaaaataattttctttatatattcatcaacgattgttacacttatatatacaagttatatctctaatataggaatttaaatcaaatactaactcttaagtaaattcctaattattctcctattatgtatagatgtaaactcctaattaatatgaaatagttgtaacactccctctcaagcttgagcatagatattgatcatgtccagcttgttgcagagataatcaaccctaaccccattcagggcctttgcaaagatatctcccaattgttctcttgttttcacataacttgtagaaaccaatccctgttgaatcttttcacgaacaaaatgacaatcaatctcaatatgcttagttcgttcatggaagactggattagatgcaatatgaagtgcagcttggttgtcacacataacttagctggtactgagatcttaagacccacttcagttaggagttgatatatccatattatctcacacacagacttggccatggctctatactctgattctgcattcgaacgtgagacaacgttttacttcttgcttttccacgaaaccaaatttcctccaacaaacacataatagcctgaagtagatcttcgatcttctttgcaccctgcccagtcagcatttgaaaaacattcaatcctagcatgatcatggttgctatacaggattcctcgcctaggtgctccttttaagtaatacaaaatttgttctgcagctttctagtgattgacggttggagaagacatatgctgacttaccacgctgacagaataagcaatatcatgacgagttacagtaagatagtttaacttcccaactaatcttctgtatctctcaagatctttaaacaatagccatcttttataagctgcaaattaggaaccattagagtactacatggcttagcccccaattttccctgtctcgaataataagtcaaatacatacttcctttaagataaaaaatccctttcttactcctcgttacttcaacacctaaaaactactttagagcccttaaatcttttgtatgaaattgaccatgaagaaaaaatttgagtgatgaaatcccactggtatcacttccaataatgacaatgtcatcaacataaacaaccaataagatgatactatttgcagactacttatagaaaaaaaaaaatgatccgacttgcttttcattatgccaaacttctcaatagcttgactaaactttccaaaccaagcctggagactttgtttcaatccatacaaagatttatggagacggcaaactttcctatattccccctgagcaacaaagccaggtggttgctccatataaacttcctcctaaaggtcaccatgaagaaatgcatttttaatgtctaactgatgaaggggccaattatatgtggctgctagagaaataagtaacctgacagaagtaagtttagcaacaggagaaaaatgtcagaataatcaactccttatgtttgagcatatagcttagcaacaagttgggcctttaacctagcaacagtcccagctggatcaactttaacttcaattactcatttacatccaatagcctttttacctgcaagcaaatttaccagggtccaagtaccattttcatctaaagaattcatctcttcaatcatagtattacgccatccagggtgagatagagtttcatgaatagtgttaataatagaaacaaaatcaagagaaacaataaaagaacaagtggatggtgacaaataattatatgacacaaaataggataccggataagtgcattgacatttacctttacgtagggcaataggaagatcatcactagaattggaagtcggatttgatgatgaaggaactggcgtaggacatggagcaggaggacttagaacaggagtaggaacaggatccatagcaagatgaggaggttgttgacgacgagaataaacttgtgttataggaggcttaattggagcagagaggaagatcagtaacagtataaattagtaaatcatcatcctccccctaatggaaagaacctgaagatgaggtaaatggtgtttgttctagaaaggtaacatcagctgacacaagagtacccaagaaagatacctttgagagattagggatcaaattttgtaacgtgagaacatcccgaacaaaacaagtacaactaaatattctaagttcaataggaaataatgacttcttgggaaagagaacatgaagaggagtcttacccgaaagaacagatgaggacatacgattaatcaaaaaacaggctgtagaaactgcatcagcccaaaaatgtttagggatctgcatttgaaataacaaagctctaacagtttcaagaagatgtctattttttctttcagcaatcccattctgagatggtgtatctacacaaaacgtttgatgaataatgccatgttgaatcatataattttggaaacattctgataagtattctttagcattatcactttgcaaaatttgaaaagacatttaattgtgttttgatttcagtacaaaaggcaataaagagaggacaattctgagcgatttttcatcaaatataaccatgtcattcgagaatagtcattaacaaaggtaaaaaaatacttaaacccagttttagacaactagacaaggtcctcaaacatccgaatggactaactcaaaaggagcactagctcatttattgactctagtactaaaactctaacgatggtgtttagcaaattggcaagactcacaatctaatgaagacagagtagaaaactgagggcaaagtatctttaatatatgtaatgagggatgaccccaaccgacaatgtgcttcaaatggggtcacgactccagaacacgctatagactttagtacttgtatctcaagaatgtaaaggcctcccgattcatgtcctttaccaataatcttcttcgtcataagaaatcaagaaagaatgagacaacagttaagagaacgagtgagtttactaacagagactaaattaaaagacaaatcaggtaaacttaaaatagattgcaaaagaattgaaggtgttggtataattgtgccagactctagaacacgatatgtacgcccatctgctaaagtaactgtagtgctaggagtatgtgatttaaaggaagaaaatagactagagttacttgtcatgtgatctgtggcaccagaatcaatgacccatttagaagatgaggaaacaagacatgtgttcattttacctgaatcaacaatagcagtaatagaagtagatgaagaccttagagatttctggtattgtgaaaacttggcatactcatctgtagatactataatagactcgggagcatcattagtagatgcatcatgtgctgactggtttgactagtttggctgattcttgcgctgcaaccttctataatccttcttaacattcatggcttatgacaatagtaacagacaacaattcctgaatcctatcctcgagtactacgattatcagagtctctcccttttttatatggttgtttcccagattaagaggtacggctgacaagagcactattagattgaacaagtgctaaattttatgtgcgaagtaccctactgaaagcttcttcccacgaagatatttcagggctagacaggatttgagatttggcaccctcaaactcggaagaaagaccagccaagaagctcataattgccatcttttctctctgagcttgctgaactcttacatcactgctaaatggaagtaacatattaagtttctcatgagttttcttaaaatccataaagtagtcaatgagagttctattacctttttctgtacgataaaaggcttgacatacctcataagtgcatttgatatttcccttgtcagaatatacaaactccaaataattcatcaatttttttacaaattcataatgattaattagcccaaccacctcactatcaatagaattacatatttgcagaaataaatgagcatcatctcgcaaccataaggcttttgaatcatcattaggtgagtcatcaattaaatgatcatccatagaaatacttcgcaaataaagctgaacagatttactccaatctaaataattagatctcttaagtttatgttctgtgattttagacatcacgggaacgaaatcagacacaataactgactttttctccttcatattagaaaatcaacctaataatagaatataaaaaaccataacacagccgcaatttgttttgagaaatcaaacctatcccaaactagatcccacactgaatagatgctgatccaaataggtaaaggaatgtgttgtggaagttgaggctagcaaatggacgcaaaaatgaccaaattatagtgatagacgcgctttcacgcgccggtagcatggagaagacctagtaacttgtggcagcgcgtatggctcacgcgcttggactcaagtgcttggaatctccagaaacgtgattagaaggtggcgctcctcttggtgcaggcagtgaaacaaactgacctttgttagacaagaccaaaaaagcaaacaccctactgctaaaccaagaaaaatccctaaattcacaaattgatttctagggttaatttgtgtgctctgataccatgtgaactaactttagatattcaatgtgaaaagtgattctctctgtatattcattaacgattattacatctatatatacaagttatatctaatataggaattcaaatcaaatactaactcctaaataaattcctaattactctcatattatgtatagctatacactcctaattaatatgaaatagttgtaacacttctcttaaatgtatgcttgccattcaggtcaaacttttaaataaactagcttcagctagagc

SEQ ID NO: 6457 - DNA, 3056 bp, Ricinus communis
  Intron number 5 from transcript 29867.m000423 (locus 29867 .t000004) derived from phytozome v7.0 (chr-ID 29867; pos 1 56432 to 159487)
tgctagcatacttttgctttctggagcaattactggtatgtatatttttctaattttaaaaataaagataggcttctaaaaggggagcatcttctttatatactttgcaacaatgaatgtaagaaccacctaatgaactagataagacctgaaaagtaaattaccaaggcacttgggtgataattgagtccattttttgaatcttatacactttattgaaggtgctattactagtcacattatgctgaggagagtttggtttttagggaatctccacaccttttttgattacacaacatttggttgttagaaagcaaatattatgccgatgaaggatttgtggacaagtgacttgagaatgtgagattatacaattacattatcacgttctgtaatctgaggcaataatatggaaatgagattagtaagttttagaagttttatttatcccatatcgcctagttactgggctgttatgttgtatatatgtggattgggtatctcttcctttgagctagcttttgggaatgaattctatccaaacccatttgtcatggtatcatagccggcctttttatctgcggtgatgggtttggacccagtccatttgcatgtcacgctaagtgtgaggaagggtgttagaaattgtatttatctcacatcgcctagttacttggctgttatattgtatgtatatggattgggcacatattcctttgagctagttttgggaataagttctatccaagtccatttatcagtaagttaagtagtttaccattgtattcttaatctaattcaagttgatttagaaaacctatttatttacccaaattgaaaatctaaatgtaaaattctttcaatccacataaatagctttgaaactttttcttatgcatgttgtcttacattttataaataggacaatttattataaaattaactaagtaaactataatataaatggatgttgtgaaattttttatttttattattgttgtttacgagtaaaagtaatttgatattttgtagttatgagttaaaatttgtagatatactgtgcattctttgaatataatagtataatatattattagatttgagtgtatttatatctattcaaatgggttcaaacaaagagctattagcaggtattcagtaccttttagtttgtgtttgcatttggaaggatagcagtgccgagttggagaaacattgtcagaatactcatattctcgcccatgaagatgacagttacaattccatgtacaaggaaacttgatggtggaattgatagaattctcgggaatgtaacattcttctgtacactaatcagaagcttgttgcatttgtaagtcacttttctgtgtaattctggcaactaagcataccactagagagcaatatttgtaggcctctactatctgtagcatgccacccttcccttaaaggcgtacactgaaatcttatcatatcgtatgaatgatcttgtctaatgctttcaagttgctaaactaggctaaccattatcaacattataatttacgcgtcttagtgcacgcttaaacctgcagtgacttatctctaaacatcttgctcattgaattgcaacttgaaagagcaaaatgattcaaattttattttatttcaatatctgtcaataaggttatatttctaggttttagtataattatgctagctttgtgacacgatgatatataataatctatatctatctataaacaataagatcgtagaagttatatttgttccacatcgataagttactaggctattatagtgtatatatgtagattgggcactctcttcctatgagctagtttttgggaatgaattctatccaagccgatttgatatggtattagagccaacctttcgtctgtgatgatgggtttgaacccagcctatttgtatgacacgctaagcgtgagagagggtgttagaagttgtatttaccccatatcggtaagttactaggctgttatagtgtatatatgtggattgggtaccctcctcctatgagctagcttttgggaataatttctacccaagcccatttgacaaagataatcattttttttgtttttataaatcttcattccattctttgaagagtaagaagcagatagtgcaaaagcccactctttgcgtatgctcttccccaagtgtgcaaattgcatgtagagatccgtaggggctttagttagttgcttgaaatctattgcttatgatagtgatgttgtaagtttgagcccgactaagcctaccaccccttctctttactgataaaaggcagtcgatgtcctagccaccctgcagcacacatctcaatcgtgacagcatttggaagcacactgctgctgctgccatcggccgtgcctcctatgcctaccactcacccatgctcttgtcccttcgggcaatatggctttcgtaatacatgaagcagctgagcatcttcaatcgctatattctagctttaacaatgaagttacagctttaggcaaaaagtgaaagtgaaaccctgaaatcttattattttgtttttgaacaacgatcattcattacggtcgaccgaccaaagacttcaaaccgcccgagcaagcctgataactaaaattgctatgactataatcttacaattacaaataggctagatctttgtcaattgacacataggaattgccttctgatttctacaaaatcttgtaaaacaaacttgttttcttttacaaattgaacttttgcaacttcgctgaaattcagtggccactgatgaagtaattcctcttagggcatatgatatggtattatagtttacaaattatcaaatttactcctgaattatatcatgacatataaaccatcctccatgaatacattggacctcttcttgatgaaatcaacaagttacaattgcaagtctatgtgatgcatgttgcttttttttttttttctatttattttgcggcacttgttgatgatttgacctgtttctaggtctctgagttggggcctcgtgctcttgctatttc

SEQ ID NO: 6458 - DNA, 6418 bp, Ricinus communis
  Intron number 8 from transcript 29634.m002087 (locus 29634 .t000033) derived from phytozome v7.0 (chr-ID 29634; pos 2 12605 to 219022)
gagcttgctcaatttgtgccctcggcaggacaaaagtatgcaaatatgcttattttggtactatattcttatgcttcaatagcatggaccatcatattgtattggccgagttgcttcttcttttagtgctttgaattttgagcctaagaattggttgttctcagtgaaactgaaattgagatttaggaattcacaataataattataaagctagagaaacgggatattaggatgtgagaagcaaagaatgggacagtctgaggatttagggaaagaaaaactattgtaaagtcacataacaatctcaaataaattttgtaatgggatgagacgtgtgtgccaaacatttaggctaatgttcaatgatataaatgttaaatttttttcaaattatattgattgttttgcatttttaagaataagaaattacacttttggctattatgtaggtttgtgacactgttagatttctcaaggttgttcctatgtgaatttctaattatggtggtttaaagatgcatttaggaattgaataaaaaacttggtgattgtctgaacatgaattcttaaacagtaaaacactgtcgttatttatggattatttatgtgctttatgctggtacaacccgatactttatttttgagaagagtggatgaatgtgctgattttgaatttgtactttgataggagttacccaaaaaacatagattgtctttggttttctgggatttctttagcaaggataatttaggtctcctatgaattgagaatataaaacccatggaatttattaaagaaccatttcatccaaaagtttaagttgttaggtaaggcttcaataatgggtttacctctaacacatccttgtatgtgaatgcccattgggcttgaagtgtaaacaaatataagctcactttattatgttttgaaatatttaattaataatatgaggtggataaggatcaaactctggacttccgatcatagaggctctgataccatatcaaagaaccactccactcgaaaggttaagctgctaggtgaagtcccaatctctaacaaaattaaaagaaataaataacaattgactgaaaaaacactcttatgtttattccatatatctcaaggtatttatacaagatacctagacctatttaaggtaagtcaactatataggaataattacaggaaataaatacaggaatattatagctacaattcctaaataagtatacaactatatatgctaagtctccccctcaagttggtgcatagatatcacacatgcccaacttggataatgatgcataaaatgagccactagtaacagcatgagtcatcatgtcggccagctgatctgcactcttaatgtaaggaacctctatcgtaccagaatccaggttattcttgatatagttcctgttaagttcaatgtgcttacttcgatcatgttgaacccgaatgttagctatctcaatagttgcagtattatcacaatagagtatcataggtttatttggaccaaacccgagttcttttaagagaatttttaaccaaacaagctctgtggctgcatgatgaagagcccggtactcagcttctgcactagacgatgacaccacattttgtttcttactcttccaagtcaccagattacctccaacgaatgacacatagcctgaagtagactttgtatccaatttagagccagtaaagtcagagtctgtgtaacccataatatccaagtgcccatgtttggagaacataatacctttaactggagaggactttagataagccaaaatacgattcattgcattcatgtgtcggtcacttggattgtgcataaactgactgacaacactaattgcatatgataaatcaggcctagtgtgggttagataaatcaacttgtccactagtctctgatatctctccttgttagtcggaacctgatcaggatagatagatagaccatgatttacctcaatgggagtatttacaggttcacaggcaaaattaccagtttcatttaagagatctaaaatatacttctgttgggagagaaaaaatccttgcttggaccaagatacttcaacacctaagaagtattttagaacccctaagtccttcatctcaaactctttggccaagtagcttcgaagtttctctatctcactagcattactacctgtaacaatcatgtcatcgacataaacaataagcaaggtaatatcatcatgctccttcttataaaacagagtatgatctgccaaagcttgcttaaaaccatactccttcattgagtagctcaacttgccaaaccatgcccttagcgattatttcaacccatacaatgcgtttttcagcttgcacaccttacctcctcctagtgtaaattttggaggaggatctatatacacctcctttatcaaatcaccatggagaagcattttttacatcaaactggcgcaatggccagtctagatcgactgcaagagatagaatgactcaaatggtgttcatcttagccacaggagcaaaagtctctttgatagtcaatcccataggtttgactgtaacctttggccaccagtctagccttgtacctttcaactgtcccatttgacctgtatttcactgtaaacacccatttgcatcctactgtcttcttttcctgtggcaactcaaccatctcccaagtagaatttttttggagagccttcatttcctcttccatagcaaccttccacttaggatctccaagggcttcctgaaaatgactaggaatagacacagaagacaactgaaaagcaaaagctagatgagccttagacagacgatgataagagataaatcagaaataggataagtgacattaaaagatgacttggaaaaacctaacctatcaggttctctacgttcacgagggggatatctcctaccatgatcgtgatccataacttgtggattcaaaatagcattttctaatgttacaggactagaatctttctctaaagttgaagttgtaggagagggaacacatacctcagggttaatagtagaagagtcatccactggcatggtagtatcatcaagaggggcactagagtcaggaaaaaggcataacagtggcattctgttttcttcttgtataaccgttttgaaataacctagctggtctttcatcatttttctcctttaattcagactcaaaactcaacagaacaagtattatctaaagattccttattctccataatagctgaattcctccccttactcgacatccacaacttctcttctaaccataaccgttcctcttccttactactaatctccccctaaagaggaatcatagatacatccctagaaaaataagatacttattcacaaaattgaacatccatggaaacataatatttacctgttggaggatgaaaatatttatagcctttttgagaattagagtaaccaagaaaacacatttaagagcacgtggatcaagcttatccctatatatagagtgtacatgaacataacatacacaacaataaaaccgtaggacaaatatttagagcagaaagaatagagtgaaattgtgataacatccttaaaggggtttgaaaattaatgatactagcaggcattcgattaataagaaagacaacagtcatgacagcctcaacctaaaaccgtttaggaacatgcatagtaaagcttaaagcccgagcaacctcaaggatatgacgattcttacgctctgctacaccatttagttatggtgtgtaggcacaagttgtttggtgtaggatgccatgttttaggaagaaattggtaagagactaatttacaaactcacgaccattgttagaatgaaaaacttggacctgagtatgaaactgtgtgacaatcattttgtaaaattgaggaattacctgtataacatcacttttagatttcatcaaatatatccagctcactctagtgcagtcatcaataaaagacacaaagtatttatggcctgaggcagatggagtagaaaaaggaccccacatatcagtataaacacatgaaaaaggaatagaactcttattgaaactggctttgaaaggaacacgatggtttttagcataaatgcattgttcacatcttagactagagatagcaacattgtgaaacaatttaggaaataaacgctctaaataaggaaaagatggatgccccaaacgacaatgccataaaagaatcttctctctatcaaacgactctctctctacttgaaaaccatggctaggttcagatttaaattccgtagccccctctaagtaataaagaactcttctttccttaccaatgtgaatcgtcctcttcgtacgtttgtcctgaaagacacaatgagtagaatcaaatattgcagaacaattaggacttttggtaatcttactaatggaaagaagactattagaaagatcaggggcaagtaagacagatgacattaagaatgtaggagaaattgagacattcccaactcctgtaattggcatagaagtcccattagcaacctgtacagacttaacaggtaaaaacattcgagaggcaagtatagaagaattactagtcatatggtcagtagcccttgaatcaataacccaagtgttagaagcagtagaaacatatgtcagactagaattaccttgttgaggagacacttgagagacatgagaagcagaaggtggagaagtgtcagtaacaacaatctgagcagatttcttatttttcttctcaacttgtttaagtttataccactccggatagccatgcttcttccaacaaatatctactgtatgcctggtagtattgcaatgagtgcaaaagcgagaagtggaagcagtagaattcacaggaacagaaggagtcatctgagaggtgctcttttagatcattagagttgaagcctcagaatgattttctgtccccatggtgacttgtctctgcacttcacgacgaactaaagagtaagcttcttccaagcttggtaaaggggaggtagccaaaacacgactactaacttgatccaaactgagatcaagacctgcaagaaacatatacatgcgatcctctgcaatacgcttcctttgtttctcaatatcagcagcacatgtcatgtcattgggcctacgataatcaagctccatgaaaattgaatttaactcattgtaatattctggaagaggtcgaacaccctggcgcaattgaaacgaccttttcatcagttcatatacttgggaagagtcagaaacatcaagatagttccttttagccgcatcccaaacttcttcagatgtcctacattgaacaaagtgtgacatcagattatcagtcatggaattaataagccaagacttgacaagggcatctttagcttctcattcatcatagcccggatcatcttctgtaggtgcaacctttcttccagtaatataacccttcttcttcctgccaacaatatgcatttctaaaatctttgaccaaacacgataattagaaccatccaatttaatatggattggagaagaggtctcatgaatagtcaccgtcgagagtttcttgttatcaggaatctctttgttgttagttttagtagacattgcagctagatgacagctagtgtttgaacaaaaagaaggcagcgaaaaaaagactgcagctagatgacggctagggtttgaagaaaagaaggcagcagaaatatttttcttttgctctaataccaaaataacaattgactgaaaaaacactcttatgtttattccatatatctcaaggtatttatacaagatacctagacctttttaaggtaagtcaactatataggaataattacaggaaataaatacatgaatattatagctacaattcctaaataagtatacaactatatatgctaagtgaaatcaagtctttttttttcttaagaaatatcaattccttgagtattgtttggtttgtaatacactggaaaaaattatagtattgaaaggtttttttggaattaaaggaaaatccataattccttattcattcaaatgagaatttgcaaaattgcacctcctaagtggctttttgtaattccccatattgagaaatttcagtggatcaatgattttgaggaatcaataaattttatcttaattgttacttaaccaaatgatggtttacatccagatccatggattctttagaacccttcgtccaaattattctaattaatcttaccttaatttaactgtgccaaggatttgataagacaatactgaaacaaattgcatttactctaaagatcttgaagttttgcatgcttgcgatattttcctttccatgtaaatctctatgcccaatttcagattggaagat

SEQ ID NO: 6459 - DNA, 1760 bp, Ricinus communis
  Intron number 1 from transcript 30136.m001028 (locus 30136 .t000024) derived from phytozome v7.0 (chr-ID 30136; pos 6 16128 to 617887 reverse strand)
acctggcgtttccacttataacacggctacagttggtaagttttttttttttacttttagaagaatctttctattaccgttcttttatttttgcggtttttggtgttaagtgcatagccacccatttgttttttcttgttttgccttattttctatttattgacggaaagtttagctttgggattcaacagatggaattggtgttctgattgataatttaagtttttttattcctttttaatgttaaacataacgtaattaggctgtaattgagttgataatcaagatttgtggaggcggtggtgatgtcttataaagtttccaataatctgttgcttaataattgagttgcttgctgctgctgccgcctctttcctttgactttgtaaggagttggggtagatccatccagatcttctgtgtatatattatctccgttctcattatccaccgccgccactcactaccatgacaaaagctgcaaaagggaatcccaaatccaaatgcataatctatatcatcattgttattctcctgttgctcaccctaatagctgccatactaatatcgacccttcgtcataagattaatgaccattcgcataattctgtaccttcaaccaccaaagtacccgcagctgagattcaattagcttgccaagctacgcgacaccctgaaacatgtcagtcctcgctccttcaatccaatcttgtacctgcaaatccaaccccacctcaaattatccaatctgcgctgctcatttcctctcaaaacatcaaatcttcagaatccaagattaagtccctcctggagagtgcaggagacaatataaacatcaccaacgtcgcaaaaagctgttcgaatttgatgagttattctcagtatcgcatttcgttgtctaatgaaagtctgccacttggtaagaccaagcatgctcgtgcttggatgagtgctgctttagcttaccagtacgattgttatggagggctcagctaccatggcggcaacacgcaggcggttaacgatacaatcttggttattaactcttcaattgcccttaccagcaatgccttaaacatggttgtttcttacgatttgtttggtaacgaaacaaagtcttggagaccacctaagactgagcgggacgaattctgggagggcccggcattgggcagtcaaactgggttcacgggtgagtctccgtcaaagttgaaggccgatgtaacggtgtccaaggatgggagcggtggaagttacaaaacggtgcaagaggctgttaatgcagctccaagtaatgcggtggaccgtaggtttgtgatacatataaaggagggagtttatgaggagatcgttagggttccattcgaaaagaaaaatgtggtgtttctaggtgatggtatgggtaaaacggtcattacagggtcagtatctgtcggtcaggtcggtgttaccacatatgagtctgctacagttggtaagttaagccattgcttgagtggaggttgaggtgtatttatttgtgtagttattttattttatcacatggtttgcgtcccataaggttacattgcttttacaattagaaggacctgagcagcaatgtacgaatttgaaggctaaagtcaagtgcatagatgttattttccttatttaattgattgagaatgttctgtcacgttcttctgttttaattgtcctgtttcctatgataattaatttttttctaatgttttgtgattctgttgcaggagttcttggtg

SEQ ID NO: 6460 - DNA, 1009 bp, Ricinus communis
  Intron number 2 from transcript 30108.m000235 (locus 30108 .t000002) derived from phytozome v7.0 (chr-ID 30108; pos 1 1206 to 12214)
tgttgatattgagaatcagtattacaattccaaaggttttttcttaatttatttattaacagattttgataaatttcttctttattttagatatatattttgtatataaataagtgttgtttagttacttaaaattgtttgattgtagttactttttactttcttttatacatgttaggttgatattgcagatttttaatttatactagtagagtaatcaaagttatgggcattttcctcttttttttttttatttaatttataaacttattcttttcatttgcatttcatcaaatcatttattttctgtggggaaagatttagggggtaagataccccttgcttagtaagtaaactgtaacatctactactggatcaaacaaaattttatattatataacatatactatttgaaacaattcatcgagacttgttataaaaataattcaatcaaatttaaagtttaaacaaagttttctgctacgatcactattgttttcttttttgaatgttgttaaggatttaggtctaatggaatgagattatttcttatgtgactttcctaggaatttattttgaggcaaaatattattaaattattttggtgattaaaagcatctcttaggacaaagacgtatcttgttgtgactttctttttaatatgtttttcaatttatgatctgtttttttgctgtaccacttttctatgtaatcgtattatttcagctggactacttccatataatctttattttcattaagtcgctttattgagttaatctatgttctgcaatttggatcttatgattatgtataattagttaactaccaactagttataataaattttaactaaagttttgttgaaaatgtctgctgtcagatttatgatgggaactttgcatttttttgtcttcacttcattctttatttatttgctaacttgtaattcctttttttttttctttaaaaaggtttggtcgaaacagacccagaagcagcacttgca

SEQ ID NO: 6461 - DNA, 1494 bp, Ricinus communis
  Intron number 3 from transcript 30089.m001007 (locus 30089 .t000021) derived from phytozome v7.0 (chr-ID 30089; pos 1 068785 to 1070278)
aaagcttcttggcaagttcgttcgagaatttcctagtcagtattgttctctagtgtctttgaataattcaattcaattatatttagtcaattcttgctttttatgtatgggaggcttaatgggctcggactatacaatagggataatcatccatttgtacttggatataaggttaaaattcacctaatgtaaaggagacaacttgaactcgagaactctggccttcgatgttatatttagtcaatttccatgtttggaaatcttatagttgctagaaacttaaaaatataattaaaaaagaaggcattctgaaagaaaaaaaaatcatgcaaaaagtagtatgactctgcaacacttgaattcaattgaactctcgcaaattatttattatgacaagaccaacattttggattgcctcaagtttaagttaccaagtaatggaaattgcaattaaatttgatttgttttgaaatttgatccaaagaacttctaacactctttaatataatggggtaaactgcaccgggcggtccttcactttaagtgtgttttccgttcaatctctgaatttagatttatatcacaaaactaattgtactttaattttagtaacactaaaatcctttttgcctgttttctggaaaaattcttgtatggatatgatggaacatcataaattgatattgatttaatattctatgagtttgaaaagtttatattagtatgatatcatttcatattttaattttatttttctcataatcaagcaaagtgttactaaaattaaaatagggagttttccaataaaaagaattttagagatgacaatggaaaacatgcttaagatcaggatctacagatgaaatttactgttgatataagtaatgaaagttttatattggtttaaatcaaagtagctgctattcgatatgcaagtggttttatagttacacttgcacattggtaatggaaaaaatgagttcttgtaagtttgagttttgtagttagctagatgttcatacaatgaattgtagttagctagatgttcatataatgaattgcatacttatttgaactttcaaatcctctttttgattgatgggcaatgacatgatcttcatgtccaaaggtaatgagaatcctaaatcagactcagatgctcttatgattgctggttataaatatgcaccatctgtaaataggatgcacgagtcgatttatgtgtttatctcaaagtcggtatagtgttgtaccttatctactataaattggaaatggttggccacatcattaagatggccaacgctgctgatagtttaatgaagaacctccctgaagttgcaaacagaatgtggacaacaatatggctattttatatactgccaaactgcaaaaatattctgagatagaggactcctcatattgttttctatgacaaactttgaagtgcttaggtttatttgttccttgttttcttaggaaagcagacacgag

SEQ ID NO: 6462 - DNA, 1080 bp, Ricinus communis
  Intron number 2 from transcript 30128.m008649 (locus 30128 .t000110) derived from phytozome v7.0 (chr-ID 30128; pos 3 14950 to 316029)
agcttgctgctgaggccttgtctaggcaatactgggtgagtgttatcgaagttgaattctgaggaattgaatttcctaccacgtggattctttttatagtaatcagctgtaattagggtttaatctcaagtaattttggtttctcattctggatttctgttgattagggtttaataattgaatattgtataattcactgctgagttttgttggggaaacagagtagattgaactgttcttgagttcatctttgagctttttgatggactgtgattaggcctatggagaattgttgtaccatagtacatttgactatgattaatgttgattaggtcataattgtttggcatttacctaaactgttagagataggattcaggtcaagtaatttcagttgtgcatgaagggaactgttgggaataagccagaatttggctttttttatttttggtagttgatgctgaacatagctccatccaattgggtactttaatcaggattttatatttccaggtcaaatgcttggtttatacttactttattgttatgtctgggaaaatctggtcaattaaactgtatttgagtcatggctgctcctatgtggtgtattgagcttggttattgggttctattggggtttgtggtgtgtttaacgcatgcttgtaccatatagttttggatgaatgctggttcagttcagtcaaaagttaaaacacttatttgattcacttttcactgaccactagaaatgccatttctatatgcctgtgtagacctgtgttgctaacatatgatgccactagttaatgtcaccttacttctatttgcctcaacttgtatggattagttcaacatgaatttaatgtgctttgctatgaggagaaagtaactgatggttttctgtgcgtatgggtaatcccagaaatgagtggcacacctgtgtttacctcgattttgtttaaggtgattctagatgccaacaatacaggaatttgtgtttctcgcgtatgttgctatcatatgttgctatctcacttttatttgcttcgacttgttttgcattgactctccaggaataca

SEQ ID NO: 6463 - DNA, 3144 bp, Ricinus communis
  Intron number 3 from transcript 30155.m001642 (locus 30155 .t000048) derived from phytozome v7.0 (chr-ID 30155; pos 1 262817 to 1265960 reverse strand)
tttgtcaacactgaattcactactctactaaagtacgttgaaaattttaccttgtttttagttaagatgtatacaatttatataaaatttatctataaatataaaatttctatatttttattaaaattaaaattaatttaaaattctatataattaaatttataaagttaattacataattaaatttataaaattaattataaactaaattaaattttttaaaaattttaaattagtaagtcaatatattttatagcactaaaatattttatttaagtttattatttatatttcatttcttcttttatatctttttttaaataaaataaatttttatacggaattaatgcaaatattatcttaatttctctacccaacttccacctaaggttctaagccaaccaccattcatcactttcactagagctaaattttttaccggctgagtcgcgtacaagtgggagagggaatttgttaaaattagctggctaaatatatatttaaacacttcaacttgaaccatttgattatttttcaatttgtattttctgtgatatttaaatatttttaacatatagcttcattcaatacgtctatgtgccttatatataggtgttttaaaattatcataaaataaagtctatatgtttattagattaaattgaaaattaaaaatgtttcatggactataaaaatatagtttaggtatttattatattaaattaaaaattaaggtgttaaaatgactaaatgatcaaaactaaaaactcagatgtctaattatgtattgtgctaaattagttagcagtcttctatcaatggaatgaattaattattatattttattagttaagaacaattttaattagaattaagaaatcttagctaaaagtccaactttactgggatcgttgaaattaaaatgtgattcttttagttggcttgcaacggaagagcaatcaatggtttagtgagttgaaacagactatccattgtacatagttgccttgcaacggaagagccatggtttagtgagatgaaacagactattcaattggcatgtctaaaacttgtgattgtcttagtgttcataatgtacatcaagaagaaaatattatacagggtgaacctaaaatttgtaattaagaggacagatataaattattttttcttaattattatactataaagtaaattttctgcagaataacaagggaatttgctaatttaaagaagtaaatataaaattacttttagcttaaagtaagtttttacataaaggggcaatcgccccttgtgtggcttaccttggcaatatttttagaattggatggttgaaccagttaattaagctgccattggattggttggatcatgagttttatcagtctgataagaattgattctattcattttttatattataaaataataaatttaataaattaataataatattgaattcaaaaaatttaaaataaaactaataactaataaaataatatatctaaatattaaatcgaaaaaaaacataacaactttaagtacatacataattaataagttcataatatttattttgcttataaaaaataaaataaatgaattagagaaaaataaattataatggataaatataaaattattcaactttatattttatttatttatttttatctttttaataatttattttttaaatataaaaagtttggccgataaattaaaacaaactggtcaaattggtttttctaatttaacaagttcaatttagtgcaactcgaattaactatgttgtagatatctgaaccagattgatgtcaaagtccccataaattttaactaaaatagcatgggccttgagttgactataatttaaataaatttacatatttatttttaaaattttatatatttatatatttatattttttattattgatataagtgaaaagcatcaataataatttaaatttctgaaaagtaactcttttttctttcctttccatcctttccaaacataagagggaaaaaggcattcattcattttatattcatcttctttttctttttcttttccctttcttttcttttccccatcctacttttttttttctcaaacataggatagaaaagtacttacccgaagatccccatatgatgaatttagaagggaaaaagggtataaaccgcaaattagaaatggtaatgaatcgtgtactcatcattaaatgtatacaatctaaatttaaatttaactaaaaacataattaaatattttaattatctcaaattcatttaaaagtttgacttcactatatgcatttattccaaatccaattaatactgcttgtatactatccgaactcagaagattttaatggttatggttatatgatacccattattaaaacttatataaatattactaaataataaatattagtacatattatgcatgcttatggtgaattattgaagtttgaaactattaaattaccataaatagagtagacgaactaccaaactaattagaacagtctaattttttatgtaattgttaaaagagtttgcatctattaatggataaatattatagcaaccatttaaactataccaatgttagatacttaatctagaaaattgaacagctatagttgtcatgatatcagattatttttgtagtagtaatttttgattttatttttcgtttatttataataagctataagggtaattgaatattttgattatggaagtaaaagaattatatgccaatagatggatatatatctaattatctggtggttatagaaaaaagctgcagttaatttagcagaaaagtagttttttttctctctcctgtctaattagttttaaaaataaatatgaatggttagatggatttaaatgaagaaaaatatagggaaagtagactcagaggggagccacgtccgtagatgaaagaaatgtcattatacttgcgaaaatccattaggatgtagtgattaattactcgttaatataagggaggaactatctaaacttggttttctaggttcaatacaatggttacagctacataaaatagaagagccacacacaacatacagaaaaaactgataaatctgatgatttcaggtc

SEQ ID NO: 6464 - DNA, 4185 bp, Ricinus communis
  Intron number 2 from transcript 29620.m000538 (locus 29620 .t000008) derived from phytozome v7.0 (chr-ID 29620; pos 6 9576 to 73760 reverse strand)
atagtgcacttcttgctgctcaggttgtttttttggttttcttttctctttgtactttaattgattttttttttctttttccccattgactaaataggaaaataagaatttgacacttttttccaatttttattcacaagtatgagtagcatgtctagtttgattgaaatgctacatatacaatttaaatggcttcaaatgataagttagctatagaactcttactaaagcttagaatttgaggttaattatgaaggaggagttgggttcctttatatgtcagaaaaacattggacactgaagtttattaggaggttagtttatgatacctgtgactgtttaaagcatggctgggtgtaaaagaactatgggatagcagtctagacttagagagtgctcaatttcgaattgatttctgtttaagtgcatcatagacaatttttcctaattaaggtatttgtcaatttaccctcaccagaaaactaatgaggttgttaggccctcatttttactaagattcatgctaaattggaaaaagtaatcccaatttgatgtgcttatgaggctcacatgtcccttgagaaacaattgatttctatactgagcaatttgtcttagtgatgtgcacttatgcatgatattatagcttaacaatgtggagatgtagattttaaaccagtaccaacaatctctacagtgtgggaaacagttgaatacacttgactaggaaacatcttcctttatgcacttgaatttagaagaattagagaaactaaggttcaaagcagttaaaacagaaattatagaaatgaaactaacaaaatgtaggtgattttgtgatgcggataaggaaaacaagaatcaaaagattcggaattttggtctaataatttacaatccaatacctaaagggtattctataatttccagcttttctagaatggtagttaaaatttattatagaagtctttattttattttattttaatgtgattaggaataagttatcctaacatctttcgagatctttaagtttattaattattgttaagtcttattctaaattctgttggattaaaataaagtgtttatgtagagaatcctttaaggattaggagtctaaagtttttaggattagttactcctattaatatctaggcttgaaatattttttcttttcagatttaataaacaaagatttcctgcaaattgctgctttagaattgtatgttttagttctctttaggtgtgactcctaaacctgaagttttcttaatttttttcctattcttctatttaatatctgaattccgtgaaaaaaacctgaaattcaattttaaaacctttattttccgcgaaaatcaacatagaacatgttatctaaatttgtcctacatcaattttggtatcagaactttaagatccttatagtttgatgttttgatcttcatcaacaatgggaatatatgatttatgttttgaaggaggtaatcctacaaaattttgtgattggattgattctctcgaaacttactttgatcgctacaactatggggaactgtgtagatcagatatgcaaagtgtaatttgataggatctgcaaaattatggtggtatagtattatatgatatataaatagggaggccaccgcaaaataatacatggcaagagatgaaaacaaagcttcaaaaaatttttttgccaccatattatctgcaaagaatgcatgagaaggtatgtaattcaacatatagctgcatgccaatggctaattacttgaagcaacttgaaaagtagaattcttttcatcaagagtgtgaatcgaattttgataaattgaatgataagattagtttgatcgtttgaaagctatgatggatgagttgttcaaaaagattcccttcagaatgtctaaaaccactagtagccaagtctttctacaaaaactagctctaagtctacaggttgcatctaagatcattggggaacaatgtccacaagttgattgaagcctacaaactgtaccaaaaccaaacctaggacttaatctgcaagctaaactgttggtgcaagagcaagaaatctattagcaagagagccaaaagtgcagaaccaacaactaaaaagttttgcaaaattcacaatttgacgaggcaaaacctcaaaatgtgcaactggaagttttaggttagatttacatgcaagaatttcaagacagcaaatggtaaagcctatgaaacaactagagacactttctcaacaggggtggaacaataattgcagctattaaaagagcgcattcaactctgatcaacatggaaaagggatagaaaatcaagtcatgcaaccacaaaacctcaaaccatgaaacctgctctaaaatttgcatgcctgtgacattaaacatgaagcaattgaaatagaaatacatcaagaagtacagcctatgcaagatgattatcaacaaatggtacagagacagggggtcaaatttattgttcaagttacgaaagatgctcaagatggtcaatttgtgttgtatattgcttgtgttcaagagatgaatttcattattcttaacaagttcatagatgattctaaaggaggtttcaagtattacatttgctaccaattgtgaagaatcttgaattcaagtccaatgcattattgtttttaattcttaggcatttcagaacttaaggttgagttttctccaactaagggagaatgatgcggataaggaaaacgtcaagaaaaacgaatttcaaagaatcaagagatttaggattagtttggtatcattttttgtttttttgttttttatttataaaaaactaaaaaaatgtttaatgctttttagttgctattttctttaaatagtttttttatttaattttacataagaatgtaatgagagaaaaaggaaaaaaaagagataagttgtggggagtgaagtggagaaaaaataggaaagaaaaatgtgaagagaaaaaatagaaaacaaaaattataaaaacaacatttagtggtttattgaaaatatattttattttttaaacactatataacaagttttgaaaagagaaaacaaaaacaattttaacaaacaaattttatttttttatttgaaaaaataaatgaaaaacatgaaacaaaaacaataacaaacacccatttagaattttggtttaatatgtacaattctaatagtaaaggatatttatataatttctagctttgttggaatagtagttaaaatttattttagaagtctttattttatgttaagtgtgatatgtgaataagttatcctataagtttattaattattgttcagccttattctaaatccttgttggatcaggaggaaatgtttatctagacaatccttcaaggaataggagtctaaaagtctttaaggtttaggattagttactcctataaatatctaggcttgtaataattattattcagtttctttttcagattcaacaaacaaagattttttgcaaattgctgctttagaattgtgtgtttcaattctctttaagtataactcctaaaccttcgatgtgttgactcttggaagttttcttatattttctttgctattcttctacttcatatttgaatttctgtcaaaacagacctgaggtccaactttagaacttttattttctgcaaaagtcgtagaataggttatctaaatctgtcctacatcgttttgcagtctttctagctttagtcttaaaggtcaagaatttttacccaaaaatcaacactaatagttatattgtaatcgcagaagggttgcggtgttggtatctatgaagtctggtaagttgttcaggtgtattgatttatatctcaactatggcctacattttgcttcgactgccaaaaactcatttagaaattatggcaacatttaggtcaagagagattcttacttgaaaagaggacaaaattgttggggagatttgattctgaaatctttaattcagaatgaaagggttcactttgattgatttggaaaagttttatgcaaaactctatttactaattttattagtaaagctagtaatctgtcttattttcttcatggagattgtatttcctgatggattcttgatcctgtgattttgtcagattcgtcagttggcacaagagattaaggagttaac

SEQ ID NO: 6465 - DNA, 2310 bp, Ricinus communis
  Intron number 10 from transcript 29682.m000600 (locus 2968 2.t000033) derived from phytozome v7.0 (chr-ID 29682; pos 247735 to 250044)
gcacagattttcagagaaatgtacgcctctcatactttatgtgacagagaactgtatttatgaatatgtttttttctggcatcgcataaatcggagtttttcatttatatatatatatatgaaattgtttcagtcatattttgcttattgtttttgtagttttgaatttgtagagaatactttttctccctgcatgctttatgtacactgccattttggttattctgtgtgatgatgttaagttgtgcttgatatggtattcgattgtatgcacatgagttctcaaatgaggtagcataagtacatgattttgtttgaccaggtggatgctgcggcctgagctatctgctctgatgggcctccattcttttgttgagaatagatgcaatcttttattaagaatagatgcaaatattttcgggtagaccccatcgaagacaattatgggtattggatattctggtgagaccatggttaattatgggacatagaaaataatatggcttatcataataaatgatttgagtatcataacttgtgttatattttggttcaaatgcgagatgccctatgatgcaactgatctttatcctgcaatctagcatatggagagagagagagagagacttctactaaaagtatcgatgatgtggattttgtattattaatgatgatagccaattatgcatgcttcttgaaggaatctgatctataccgagctaatacccaatatatcattagtcattaaggatataaatgccctagagaagcatgcatgctatattgtcgaaaagactttatgcaggagcaaaactggaattggaagcgtgcctgtggtccttcaattcttcttcgggagcacttaagaagtgttgcaatttagtgccaaagaaagaatgcatgggtgttaagcatgggtcgtgaattcattgtcctgatattaaaaattggaatatttttggtacttgtagacacttaatatccttgtggtaatattcctgcttatttgttaatgtttgctttatatttttatactgtgagactcatgggcatctgattttacattctacataaaaaatatggaaaattctttctgcatggttctgaaaccattggctttgccataaatttcaagacctttgtatgggagtaatagggaaagggttttgtctgtacttcgggggtattttgttgcataggattgaaggggcaagggtcttgagggccatgttttggagtatttggttggactgaaaagatttccttcatcattatttgctgacctaattactctgggatgaagtcactcaagaaagtagcttgggaatgtaatttctatggtttggcttgttaagattgaagcattggaagaattcctgaatctatgggttctcctactttccatattcagcttaagtactttcccatgcaaaaggttgggaaagctactctcccttgtgaatgtaagctaaaaagtggaaattggctataataacgtttaaatgatataactggaaaataaaatcttaccccttttggatttttttgatattctttattatcatagttttatgcttaaaacaatattttgttgaatatttttattgaataacaatatctatatagcaccattatatgcctctcatgttaactttcgatacatcaatacctatataatgataatataataaatttacataaatttataatttttagttgttttatgataaagcatattttatcgtattaaggatattatggtattcttttactttatttgaacatattgatttcacattctagagaaattataatgtttaaccaaatgggatgttcaattcctagaatcacttgtctggaattcaactttcctggaaaagtgattctggttgaattctgagaattgaatgcaccctattttcttttgcttctttctattttaacattttcagggagagaaagagagagtgagagggggagatacttggaagagagagagagggagaggtggaaatatttagtaaatctggttaatttgcaatattggtctgtgccagatacttggaagagagagaaagagggagaccaggaaacttggaagagagagagagagagagactactgcttttttaattcgctattagttctaggtggacatatttagtaaatctggttaattttcaatataggtctgtgctagatacttagaagttattatgttgtgattaacctgtatttaattgtcttactagctttctggtttgagttaattacgttttgtacggttccaggtttcaaatctcgatcttg

SEQ ID NO: 6466 - DNA, 2599 bp, Ricinus communis
  Intron number 1 from transcript 29618.m000100 (locus 29618 .t000003) derived from phytozome v7.0 (chr-ID 29618; pos 4 0938 to 43536)
tgcactctgcttgcatagagtggggtttcttccaggtaattatgggacttgtaaatcttggttcctgcttcctgctgggtaaattgccccaataggactaaatttttgctatttatatcgcattggtaccaaacctttaatttatttcttttttgatatcacatctattatttttgttataattgacataccaatttaggatgtggtaacattttacatatatggcaggcgatagtctatataaggttaaaaaaaaagacacatcacttgcttacatgtataactaatcctactcacttactgtcattcttttctctcgcttgattgtttacacaatattgaacacttgaaattcttatacaattcaatcttgagagatagaaaacttctaggacttgcttggaaaagatagagcttgatttcgttaaagataaagctaaaatgtctgcattgttactgttgattgctaaaaaagggttattcaaccttaatggctacaatcacggaggaagaggtaacatagaaacaaagaaagttgcagttgctttgcaagcagcacaagctgcaattcaggttcatcagctaacaactcacaatcctagacctgaatcaacacaactaaagtggagaaatccagttctcaatgaatcaattcaaatgaaattatagtagcggcaacaaaaataccttcaggaacgacaaatcaattagtttcaaggcgtattttgccgtaatcttgctacaattgggaatttactaactcaagttggctttagccgtccaattccaatcaattacgaggcactaagatgctaagtataacctcctaagaaaaggaaaaaagccaaaagaaaaatcaaatctttttgagatgttatcagcgggagaatctttgtttcattctcaacaaaacccaccaaatcatatgttcctttcactaaaaaaattacagaatcgcatttgaattacctttgcaaaaatggtcgtttaaatgaggtcgtatctgctcttgaattgatagctcaatatggctctaaggtattacctaaaaccttcatcgatttactccaatcctgcatcaactgtaattttgttactatctgtcgcaaggtccatgctcgttttcacttggtccaggaagaaaactcgtttcttgagaataagctagttatccagtacgcgaatatgtgggtctttaagtgatgcacgtaaattatttactgaaatgcatgagacgaacttgtacaccgagtctgcaatgattagtgctttttctaaagagcataggttgaaggaagtagtggaattgaaaacatgtagaacccaattgagtgagtaagataagttttacatgtaagcaagtgatatgtcctttttctttaagcttatgtggattgtcagctgccacctgtgcaaaaatgtcacaaaatcctcaattggtaccgccaattgtaacaaaaataataggtgcggtactggtttggtacaaatccgatataaatggcaaaggtttagaaccattggagcaaattatccgtttcctcatactacttgagctaagacgggcattaatttgttagcatccaagtatgtaacattgcacttttaggttaattcgtgttgacagatttataacaagaattctctactttttattttttcttgaaaaaaatgtagtttagttttttcttatagtattaattctttatttatttttcgttttatagttaatttacgtgcatttcatggtgaaatttttaagtaacaacttatttgaacaaaagggaggctaaatttatgagctttttcctttttttcttttttatttaacagatattaaatacttgtactactctttttaaagggaagaagtgtaaaaatctttgacaccatttaaatgagttgatattcttaggtagatactgtcagtttagaattcaaaatagaaattttctttgaaaagaaaaaagatttgatgaaagaagtgaaaactcaatcatttcttgcatgtaagaacttttatctttttctttttcataaatctgcagtacttttaagtttctcattaatcctgtatgacataatatgttaattcacagtcactcaaaatatttttcttatactcatacttgtagtttagttcctgaaatagaaaacgtgtaatgtatatccatgaaagaaaaaagaaaaacaaaagcaatgaacatctaaaatacattacttaggatttcttaattacctcttaatgaatacttaaggatgatattaactgcgtgagagttaagtgtttattgttgtattgaatagctatttctactttcttcatattaatagtgtttaatgggagtttattatatcagtagttgatgaatacaaaagatctttctttggtatgaagataaaaaaatactatggtgtctaatattcaaaatgaataaaggatgaaagaaaatgctctacaaaatgcccatggttacattttatgatttcagcagaaaatctaacctcattcgtctagaataagaaactctaatttcatttatgaagccaataatacttttatcaattaattaaattctgatgaagcaggttgtaaagc

SEQ ID NO: 6467 - DNA, 1269 bp, Ricinus communis
  Intron number 3 from transcript 29647.m002062 (locus 29647 .t000070) derived from phytozome v7.0 (chr-ID 29647; pos 4 46638 to 447906 reverse strand)
gtagtccatccttctgcggaaataattgccaagaggtattatgagctataatcaacatgttgaaacctggcaaaataatgttgactgggttctataatgcaaatttaattgtgaacaaaagtaaatgaacctgtttgcgatatgtgagcatcattataaaagaatattaataagagcatgctagttttagtagtttttaatattacaacgttagttttgatatacaaatttgtattgctgagacaaattgtttgtcataattctttaaagtaattaaattagtaaattgctgagtgtatttttatagttagataactgttaaatgttattatagtggatatggtttatgtaaatggtattaagaaggatagttcaatagctgaaaaatctatactatgtttctgcttttctattttagtagtattttcagtcatctaattttcatagctgcaatagttgcagcatatacagagccacttggttactggttgattttgttgatgggttctattaataggattgaaattagtaatactctctagaatccatatactgatgatttgatgataaagaccttgcgcatcagagagtcttagttattgttactctaggatgtaaatccgaggaccaaatgattgtattttatgtctccataagaagtaaaattagttttaagctgcagttccaaatttctgtgctttatatcaattcctaattttacgtttgaatattttaccttggaacagcatcaccctccccacccaccttctcctatatctatatattaagaaataaatacacaaataaaatagtatgtcttgctatctcactcttcctcgtcaaattcctgttggggagcaacacctacatgatcttttaatatataaattatatttgttaattttcgtacttataagtctgaactcaaggtttgaattgtattttccacatccgcaacttagtgctgatccattcgatagtctggtctaggtacaataaaaatggaagtatagctatgaaatcaaatatgcaatcaatacttgtgctttgttggttcatttctttgcactggattagctgctttctggcatcatcatgctagggtggcaaaacaatctgccaaaaagcctctcagaactatgtctgcgtttaagttaaaattcctatgtattattggcagcagtaattcatatacttcgctgaatgttttgaattctgtgtttctgcatgctggaaatttgtctcagttttcttcattttgtcagttgt

SEQ ID NO: 6468 - DNA, 851 bp, Ricinus communis
  Intron number 7 from transcript 29726.m004015 (locus 29726 .t000127) derived from phytozome v7.0 (chr-ID 29726; pos 7 52873 to 753723)
aaggaagagaagcaaaaaagttctatttggagaaggtatgttcactatttgatcagatacaagcatccatctatccttctcttctagtttcatttcagcaaatatgaataattttctcctcgggcaaaactacttgaactcttcttagtcttgcagaatgtcttattagcaaattggcttttattcaacatttcccaataacatgctagttgatacatttttattgcatttacatggaagttgatgaattttgttccttttgatttggttacttcattagcatattatttgtattgttcattaagttagattttaaggaaatgatggttctcataaattttagttcatgtatttctcttctagaagctgtttgagattaatccatgaaaaagtttcttctttatgagtaatatgtcaagttgtcaagcagtaaaaaattgttgcaatgatcagaccagagaaagatggaacctgtcagttctatgattctctgtccttccaaatttggaaatattaatttaatctactaagacgctaacattatcaatcccaggaaattcagactgaatgtagcaagcttggagtgaatttacgtagcctgctatgtgaatttaagttatatacaagtaaatagaataaaacaacaggaaagccatttataagggttcgatgaaggaaatcttaggtggctgccagatcacattgttcctttggcttcagtcagatccaccgacttctttcctgatctttgtttaacttatgtcagtttcgaattacttttattgatcattcatctgaagcatgctatctcctattacctcgcttctattctctttgtacaggtgaagcag

SEQ ID NO: 6469 - DNA, 1458 bp, Ricinus communis
  Intron number 8 from transcript 30005.m001256 (locus 30005 .t000022) derived from phytozome v7.0 (chr-ID 30005; pos 1 15836 to 117293 reverse strand)
gtgtatcttgcaaatttcttgcacttcttcattcggtgagtatatgactctgctactgttggttataaactttattttctttttattaattatacagtttgtgaacattatccattcctagttgcagcaatttttcctggagtctgaaacatgcaaataagtctatttttagccacattatgtgctctatgttctcctctttgttggtttctttgaataaaagactgacttgttaaatttaagcggtcattgtttaattaaagcaaacttggtatctttttttccttaaaacattacttctccaagtgatatgtgtttcctcaattgctattctttggtatatgcattgaggttactcattggactagaatgataaatgtttcttccatttctttttgagctcgtttcttttggaaaattcaattatgacaaattgtcgtcctgagcgataatgtctcttgtggtttaggatggtactttccgagtgtaaaactgatacaactagctgcaaaagattttgatatggttcctattctgtatgctgtcagtgaaaaatgtgacttttttttggtagttttgcaaaattactttctggctgcagcaagttatatatttgtttctatctattgacctgcaagtgcaagtatgcataaaaatcagccaagatttttgaatttgggctttttgcacagagctgactgtgggaccagttaatgataattgaaggaaaattttgcaagattttgttagttctacaagtcattctaatgttaacaagtatcagttgacattcaaaaccatcaatatgcatatggatgaggatttattctgtgtttgagattgtgctccattgtacaatagggatgcatttgaaggtttagggattttgagggtagtactagtagatatataaggtactctgaagggaattgttaaataagcatgggaattttagaattgacatatcccgaatgtctagggcttcttcggaaatatggggatctgaatctcacatcttacaagttaggaatctttgaacatgtacacatgataaagttgaaatagacaagttgatgtgtctattttacgtcttcctatgtgttgaatagtggatttttatgatgttcaatacagttaaaaaacttgcttttgactaaaattccaaaaatcccttcttgtggtcctttgcagacccttcctttgtaatatgtgatcacatcatgaatatggtgaagaagaaaaattaagaaggttcatatacttggtacacaaggcatttgatttcctattgcttttgttcctgccaaacaactatttaaattatttttctggtcctgggtgaggttggtgggagttgcaaaaggcaattgccatatttattgtcactataataagaaaccattacatgtttatataattatatccttactttggcaggttgaagatcaagaatttctc

SEQ ID NO: 6470 - DNA, 2235 bp, Ricinus communis
  Intron number 8 from transcript 28320.m001127 (locus 28320 .t000054) derived from phytozome v7.0 (chr-ID 28320; pos 3 07558 to 309792)
ttcttcgcactgcagcttatcaggtctgttagtagaacgctttccatttgtcccttcctattcttccaaatcgtggtccactggagaatgtaatcattgtaaccaaacaattcatttgagcagaatatttacttgcagctactcttggttttggaagcacatctgaaaaaataaaaaactgtttcttgttaggaacttatgattggtttgtttcgttttttacatttctgctttttaatggatgcttgaagcagggtctcaattatttcagtaggtcttttcatgttagaaatggaaattatgaagaatgtattgatccttattatttcttttcaaatttattcgttttaattcttcatgtttatcaagtgctttttcagatgatctgtttgtgttgtgccactcagtcctgtagatagataattgttgaaagttgtgccaatgtttcattttcctttctctttctttctttctttcttttctttttataaaaaaaaaaagtaataacaagttgctctgattgcccatcattcaattaaagttggttatggctagttatgctttcttcgataaaatctgatgcaaagctgattgattttatattgcgattgaagttttgtatcaatttaatctgcagaatgatgatgaggatatgatctacatgtacaatgcttatttacacaagctgatcacttgcttcctatcgcatccacttgctagacacaaggtcagttgaagtatttcaaattttcttaagtttaaaagggggataaattaggggtccattttacaagtgtagtatgatgaaattcagtataatgtacagtttcacatctgccttttttaattattagtttgtagaggtgacttcagtgttccacttgatattctgcttgtttgtgcaagagcctatgcccctgtgtgcatgagtttgccacttcttgcacatctgcattgcctgtgtactcattgcttgtttgaaatttgggcctaaggtgttttggacataagatgcatggccatttaaatgggtgcttgttatgattttgtagttttagcttcatctgatgtgaatgattggttcatcttgtaacatggtcttttttctcgctgcttgttctctaatgggtgcaactgcaatttaacctacatgatttacccatgcgtgcatgcatcaaaacggctaatattatgcctagacagccccatgtcttctatggttgattttgttataaattttttttttatgctcaatgattttgtgcaagcagagagagggacttcaaagccgacttgctcttaaactatatattattatgcataagtgaatagtaaacaaataaataggagatataaataagaaatatgggtatcaatctgtgcaacctgttctacttcggatatatactcaatttcattattcttgccaagtcgaatttaagaaagataggcaaaagtatgtggagttccaccgagttagtgaaaatgacgacaatcgtatcttagtctgctatttggagtaaggagttgtggatattatttgaagattttgtcttttccattcagaataaatatgactgttggagtattgatgtgaaacattatcttatgtaataatatttgattttagttttgaacagtaagtgttatattttaatcatagcaacacctgataccatcagcgctgtcacctgatttttcatagctaattatccttgtcttcttgtccggtatgacacttcctatttgtctctattgcattgtcaaaattatgcagacatattcgtggaaccataaatgtttgtattgattgcacgagtctaatgcatttagtaaaagttgtcagtgtttaatatcatcctatcattgccttgtcatattgtattgtttggggaaatattattgaatatttggtggtggagggcttaaatgtttgtatggattgcgtgagcaatcaacaagcaattgacaagtatcagatgcattgttcgaaccttctcaagtcatcctatctctatttcttgcaatctagttagaacactaggtttttttgtgagaaaagaattgccaccttgtgcgaatttctagatttttgtgttgttgcttttttcttatgatgaatagcaccttgtgatacacatacacatgctatattttcttggtctgtttctcgttatcaccatttgagaagcttatgataggattttttcttaaaggtaaaagattcaaaggaga

SEQ ID NO: 6471 - DNA, 1166 bp, Ricinus communis
  Intron number 3 from transcript 29933.m001390 (locus 29933 .t000012) derived from phytozome v7.0 (chr-ID 29933; pos 8 1608 to 82773 reverse strand)
ccaggtatgcatttcttttgttttagaaatgattatttctttggtgtttctgatcgaaggtggtatggattcatgacaaggacacacaagttctttgtaattctggctctgtttttagtatgtatctggattcacaattttacaaactttggatcggggacaagaaataaatagtggcaaatgaagtctgtagttagtaataagaagtttgtggtgagtagtaatcttttaaaaaaccataagatcatcttacatgcttagcatcttgtctcttgagttctgaacttctgatagatttgtacatatatttttactcatgctcacttcatttgtctaaagaacgtgttgaagtttgtaggtttatcagttattgtttctttcctgtgtccaatcaaaataatgcagtgaagtaggtgtatagttttctgctaattattaatatctatccaacatgatgtatttcacgtagaaagggggcattcttgccaacaactttactattattgaaagacggcagtatacagaacaattcgatcagtggtggatagttgatattcttcgtaggtgacaatacatttttgtggcttactacatatggttgttagcagcctatggttataaagctttatctttgtggaactatttctgcatgtttgcatgtgataaataattggatttgttacccaaatcaaattcagagaaagcttgacgtcaaactaatataggaaaggtgagagtttaggtaagtctgagaataagtttatctaacaggtccaatagtgagaaatgctaaaaagactgttctacttgcttgccaattttatgtgagaaaatgatcaatccaaattgaattgatctccttttcctttccccttcagtagtggtccttgtacctatgaattccattggacggggagacacattgaatgattgattccatggtatggattctattagcaacacaaagatggtcaaaagaaaatatctctatctgactaggtttcttcctatacctatgaattccattggatggggagacggattgaatgattgattgctgatatttgaaggtttaccaaggttagtacttctgaaagagctcctaatatatttctgctcctatcttgccaggaaggaggaaggggtttcagtccatcccactttca

SEQ ID NO: 6472 - DNA, 2562 bp, Ricinus communis
  Intron number 2 from transcript 29908.m006216 (locus 29908 .t000267) derived from phytozome v7.0 (chr-ID 29908; pos 6 33063 to 635624 reverse strand)
attgattactctccatacgaagaaggcgagtggaggttagcaatttcatctatttctcgatttgcttattctgtttttgctttattgattttttttgaactgtgctttagatttaatgtgttttataagagctaatagctaaaagattattaattaattaattccttcggtctacgtgttgaatgcaatgtgatttactggagtagacagttatgtttaatgaagatcacgagggagcaatctgtaatttgtcttttttattaatttgtactattcttaaggtttgagtatttgttatatgtttgtgactttgttctttaattttgaagatgttttgtccggagcaaataatatttcatcctattcattgcagcttcttattggttagttttgataaatacagggagttatttgtctatctctatttagcatcttctttatgaacacggttacagccaagtgatatttactgtttttcagctggaaattatttacttcaactaagtactaccactataaaataattgtctctgaaaagcatagtataggaaaaggctggattttatgaagcatacaagaaagagaaggagagttttgcatattttgcaagtgccgcgcatgcaggctgttgctagtcaatccatatatcttggagagtctcgatttataacattaaggataatttgaaatgctttaatgtaaagcagaatggtcggcagaattgactcctacaatgaagttgaactatatctcatttgagagaatcaattctatacaagggagagttacagaaaggcattatataaatttatttgcagactctttatattagactttaagggtttgtagttatcacaagacttggtgatttatgatctagggtatgctttgaatcagttttacgtttgatctttttctgtaattagggaacttttcagcatctgatgggcattgctaatttagttctcttggaagatgggcattggtatacttggatgatgtgctctcccattacaattgagaatatcatagtttctgtctctgagtagaggggggttttgctaaactaaattgaagaaagttattttatgttgtttcggaaagcaatggaggaaaaaatcactggaaagcttgcatgatgacgagtacagaccccaaaagaaaatgaaaaacctttgttcaataggtgcaagtatgagatctgggatttaaaggaaggctatgagcagtggatgctacatatcacagcattatagataggggtactaaggtatgagaagttgttgtactaccgccttgtgatttacatcatgtcgcaaataggaacagcagcaaagtggactgttctgtacccagctttactattagaatatttagaactttatatatacgcctacctgttttccaaactcaaaaccagaataaggcaaatccaggaaaacttgttcattgtgcgtcaaatgagctgctccatcaggcttcatgctactggtgccaagatattgaaaacatttataagtggctcatattattgattttatagaataattatgattttcattataaaagttgtttttgagatgaccacatgccatcatagaagttttggtgtcacctgtaatggagatggtgggtgcattagaatggattgaagatccaatcccttggattcgtatttaagtcttccagttctcctatgatagcattgtatactaacatttcttttcaatgaggatagctggataggtttaatctacacactcaactatgttaaagattctatgtaaaacccaggtgcaatgtactcagttacaaaatcagcaagccaatcattgttgtgctggatgttatttcttagcctcctttgtcaattgcttgtaatgatttctcattttaaattctgctcacgtgcaatgtgagctgcaagtttccttctgattgagttttgacacaagtgggaaagagagcgttcgtaacattaatagctttcttttgagtttatcatctatcacacttttggtgtttcagtgtattatttatttcatcttctagttccgttttacattcatatgatacagtatgagtcccaatcaataggcatcaattgttcatgtttgttgtataactggttaagtatgcaaagtatttgtccttgtttcctaataaatggaaattatcaagtgcaaatggacaatgaaaggagaatttatcttaagggttgatgcaattctctttggggcatcactttcgagaactctcatctactctagtgaaagaggtgatacagttttcactcaagttgactctggcaattttagcattgacatgaaaactttaatgttattgcttgatagaatgtttttcttgttatgttagttataatgtgtgaacattgtatatatctgcatgcttctgaatgatgaaaatgcgttaattgtccatctctagttcaaactgatttgcaagaatgggatgctttattttctgttttcctgctcaatgttatggtatctaattcctctcttcatgatgacagattgaagctttggcttttctttgctt

SEQ ID NO: 6473 - DNA, 1992 bp, Ricinus communis
  Intron number 2 from transcript 28226.m000883 (locus 28226 .t000053) derived from phytozome v7.0 (chr-ID 28226; pos 2 67608 to 269599 reverse strand)
ttgtgggtatgaactcttatggtcagattggcctttagctcacatgtttaatcgtttctcctatccgttgagtacgtaccagagtatatgatgcttctattgactaatacacaaaagtttgctttagtgcttacatttgcttctaattaggtcagtcaacatgttatgatacgatgccaagataatgttactttggtaccaaattattctattagaaaatgaacccattattctgttagaagatgaagttactctaactggggaatttttgttccacagaattccatttaagttagaaaaacaagctctagcacattgcaatacagcctgctatgatgtaaggtagtgaatgctaggaaatgaaggggcaatatgtctctaagatgggtgttttgggaatgagaaactgagaatgctaagatagatgtgtgggtatataagaaagaatagaatctgaatgagtgtattagggaaaagacagggatggttcccattgagaaggtgagagttgagaggatgtcaattgagatgtgtcggggcatgtgagctgcaaaattgttaaagcttctgttagaaaggtcaaacatagtaagcttggtagagtgaaacaaggaacaagtagatccaaaccaacatagaaaaagtggtagaagaagacctagtggtatctttttgaaaatgtagcccaacattgtttgaagcgaagaaaaagagtttcatatagccgatccctattaacttgtaattaaagcttagttgagttgagttgagagtttcatgttgatattataacactaagttttcagggtttctcctccacgttgcagaaaaacaaggacacattttttttaagtggtaaatgtttggcggtaaatttatacaacaaagaggtaaaaataaatacacatactcttgaagtgatcttcaagtctgaaaaatcagttgtaacttatggatgtagaacgactgaggaactataacaaactgatgtagaatcactaaggaactacaacaaacacacgaataaactaaagtacacagctaaagagaggcacaaagcttaatatttttactcattgaaaccataaaataacctcataatagctattttacatgggtttagagagaacccagaaataatcctcagtattaggattgaaaattctagtctaggaaacctctaaaccttaaattactaaccaaatactaaataagatgattgcttctaatgagaatggaattcttaaacaatactaaatcctaaacttcctaaattgacaagtacaagaaaaacatgaatttcataacaaataattaaatcaaaataattcctaaatttgtaattctctaacagcatcacctacatatctctgccattttattatggcagtttggtctttttttttcatttttgaaagtactgtggatttatatatgtattaattttcagcatcagatgaacctttagtataggttgcctaagtcagattgatgggctgctggccatggtcatgtaatttttgtttgctgctgcagaatatctcattattgtgctgaataccatttaatttgttcgatttagtagtttgtatctcacacatgaatggtcatcaatttaatgaacctttctgatgggatgcctgagttagattgatgtatttcttccatggtcatataactagtgcatttactgctttataagatctcattgtaatgctgcataccatttattgttcaatccagcagtttatatactgcaccttactgccttttcattttattgtgatgcgtataaattgaatttattgcgaatactttatgatttgagacaatttgtgattcattcttatgcctgacccctttattttctcgcctcttgagtgtttaatcaagttagatctgcttgcctgtggtcaattttttagccattggtttgcttggaaagcacttttaccacattggttattattgtttttcaggaaaaattagttc

SEQ ID NO: 6474 - DNA, 2912 bp, Ricinus communis
  Intron number 16 from transcript 29756.m000486 (locus 2975 6.t000001) derived from phytozome v7.0 (chr-ID 29756; pos 18083 to 20994)
actttgagaatcctttaacaatttcaggtatatttagtatatgtttctttctcttcatcccaatatgattatcttttagtcatatacacatcatattcagtggtattggtatatatatacaagcatatttgtatgttatatagttgtttcatatttaaaacctgactgctgtaattactgcctaaattaggtggatcatccaagacgccctataaaactgagattttattaaggcttaattgttaaagaatcatgtaccttgcacttgttttcagatctagtacgtaattttcaattttcaattttgtagcaacatacttagacattaattttaattttatcgtctagtggaattatcagccaaaatttgttaacatggctatattccagtaataataatataaaaggactaatcaacattaggattgttggcttatccataaccaaaactagcatcgtttaagtaaattaagatcatctaaaaacagatattctttctaatatttactcatctttattaggattcagaaaaagatctaacaatctaacctcttatctatctctaactcctctttgtcaattgttgcaatggttgaaagcgttttaagccttagatttctaggtttttaagcagaaatggtaagagaaaatttctctagagtgtctagcaactagttaataactctaatgccaacttggtttctggtttttttttttttctgtcatcgaaattgcagccatatcaacaaattttgactgataatttcatcggaggctaaaattgaaatcaatttcaagatacaatactgatattgaaaatataaaaactacatgctagatttgaaaacaattgtgaaatacagaatttacttggcaatttagcctttttattaaatatatttatgagataaaatgttgtattagaagtcatacactaattcataactgataaatatgaaatttggcatctatcatcttcatagttaaagctatataatctgacagtttgttaaaatatgaatcaatagtaaattactggaccatgtaagatattgtgtaacttacacatgtaatgtaagttggtactgactcataaaaatgtttctatccattcatctatatgttttcctatctttcttcttttcactacttctatatatatggaggagtttatcgtgtttatgagtaaatattattggttggatgttcatagtttgtggattatgccttgcattatgattagagtttaggcgcgtacttaaaccacccaaattggtctaaaatatgtcaaaacaaacaatggatccaagttttgaacaagttatgtttcagtttgaaaattttgaaaatccaaatggctggtctagtttatggttacctttagaaccgccaaatcaaactgaaaccagctggctatactatatatacataaaaagtaagtgattctgatgttaatatttcagtttgtatgaatttttggttttaccatgctacgattggttaaatttacaagattttattgtttgatgtagaatttagattgtagacttttattaaaattataatggcatttgttggattttgttatatggatcccaaatagatttacgattaaagtttataatatgtttaaggattttagctttatatgattttattattatttcagaagctcaatggttgaatttgattctaactcaagtctaaatttaaaatggaacaaaaaaagaattagatttttaggttcaataaaagagtttaaactgccaaaaactgtgtgaatgacatgactactttggtggtttggtttggttttgattattttcaacccaacactgtaggttcagtttgagtatccctctgaactttaccaaaccaagtaccaaaccaaaccacatatacccctaagaattatgtaaattactctagtgctatatgccctactttcttgcatgattgcaaaatgttggagtgatttcaaataaatggatatttgagtgcttttgtcagtagttgatatttgtaggtatataaatggatgcaatcactaattgtttttgaccttttcttattcagtgtaattcttgcttcagaacttgcttttccaataataaaaatttgtgcccgagtagtatgttgatctttcggtgggatgcaacaccttcaagattttaagcataagagtagtggaaataaataaatggatatgtttatgaacgagaggagatgaatatttttttagaaatttgtgtgatggaactcattgatattgcatgtacctagttgatagcaagataattacgtaaacacaaatgtgagctggaacatgtagaaccataatccaccaactaataggtaagattcttcgttttcatcctatataagaagataagttttttctttgcttgggctgatgactgtcaatctcttaagttcataaataacttctttttatatattcaattataaatcaaggcatctgtgccaacaagccactgcattgttctcgacataaatcttctacttgttgtagctattgtcactgaggaaggtgcaataataattgggagttaatattattgtccccctctctctctgtaagcagttgtgttcttgaggattgttatcaccattaaaatttgtggcttgtcattactcgtctgatttttggccttgttttttcttatgcatgatttgcttttgttaacttggtttgcatatggtgctattgtttgacgtcttataatgtgagtgctagtttagtagcatcctctgtaattttacttgctatttttaaatttatatggttctcacttgtagcttatatcaaagttattcatatttaattttaatatatcgctttcttttttctgacttcaatattgtaattccttacagtgctggagtttacc

SEQ ID NO: 6475 - DNA, 3013 bp, Ricinus communis
  Intron number 1 from transcript 29593.m000174 (locus 29593 .t000003) derived from phytozome v7.0 (chr-ID 29593; pos 2 45987 to 248999 reverse strand)
ccacctccttgctggcctcaaacgctcttctgaaggttattttgctaataatttttttctttttatatttatcagggtcatgagttattaattttgattttcaactactggcaccatgtgctattgctgcattataacaatgttacgatacattctttgtagtttagttagaatagttactagtttagtaatagatttgaggcattactctcagtacagagctactaagctagactcgtgatgtggttcatattgattttccactactgggttatggtatgtacttgcttattcagtatgcaccatgttctagtgttacattataaaaatgttatggtgcattctttgtagtctagttagattagtcatccactatttaattgaatagtgacattggttaatatagtacgccaagtagaaggccactttcaaggacctttacatttgaataatcattctattcatatgatagaaaagcttggaagcttgattaatcgaagatgtatttatcagtttgagggttttttctttggacttaggtataagttagtcgaggtggtttacaggttaaattttctcatttggagtcatcaagaatgtactttggcaagtagttgatgttaactcccaatttagatcctaacaattctttaaagatgcagctcacttttaagttttccgagatggaaaggttagttcagtttatatctatttctttggtattattctagaaaacttccagtattttcatcttctttttagaggtctgttgaagtatctgaactcctttgatacgctttcaacccttatcttactttttctgtatgaacttcttggttcatattatttatggcatctaataaaagttgtcaattctattgagtaatactcttttcgtatggtaacataccattttggacattcttggggaaggctcaatgacctctttgaccaagttattagttttgatgacaaaaggggaagtcaacatctcaaccatcacgatagaaaactgagaggagaatttttactgactgaagacaacaaaggggcaaattcttcaagtagatgctttaagggtttgcacatgtcaaaacattgcaagaaatcaatggaacgcaatgaaataaatgcaaaagaatattaaagtggaaactttgtatgtgaggatgttgacgagtttgttgaatgattcacaaacttgaatgatgaaaaaactgatgtgtgtgatggtcaactttatatatcaattacttgctcaagaatgtcaaggatgaggcaaaaccctattgaagttcaaatgcagagagatgccaccgcacttttgatttttactaggtttaatagcatttttgaagtatgatctctcacgatcaaggatcctctctcaaagaagatcataagatgttgctttattccctgcattatggattagcattaatgaatgtggagattttgctaatgtggcacttcaaagttcaggagactttttctatatggggcagaatgctgcagtcacaatgacctctctgagttatatataactgtttaatttctaatgcaacaaagcccagaatcatgattaatagtgctagctctattggttggtgataaagttctttgtgatacaagtgtatcagtaagtcaataaatatagctgtgagtctcatgaaatttgtcagagatacccaatattcaaacatagtttttctttcgagcttttgattgtggtataaagcatcagcatgagaatctataagagtctttggaatatgtcagggattggatacttttgttctggtattaagtatcggtttatgttagttgcaagttctgtatttattaattttaatcattaaagatgtaagtgtacatttctcttgtaggcttttagaaggcgtaatggctactttactttgtgttactgtgtgtgtttatgtgtttttttttttttcctgtaattacttcagaacaagagcagatttcgaggattacatcttttaatgtctgtacttggaggtggattcctcctttattcgatcttgaattttcagccatttatcttacatttttatcccataactgtgattgtcataagaagatatctttatgtgggacccatttttgcgcagcagtaagtataagcatgcatatatttctaccttagctagcttaaaagcatggtttgaattggaaatatgtgatggttctacacttctacctgtgctaatgcattgtggtatactacaagtaacattcaactcatccgtccacttcgcataaatattggtggattctttgttgtcaaaaataagttatatccattttttgtgtagcctatttaattagattgcctttaaagttgatccaacaaatgtttacattcagttgtctagaaaattatttaaattattgattttataatattttactgcatttattttgataaaggtggtgtagactatagggtcagttcaaattactcatatgcaagttagacagtttctatacgaacacaaaatgttatttatgatccttatcttacaatttgaccaatagaattactgctctgctcgtgtagattatgcctgtcatatttcaagtttatcagataggataagtgttttgtttgtgatacaatgatatggcttataattatattttataaagtttcagccttaaaacagcaatatcctataataaacatttaatatccaattgacttgaaatttaacatagatcatctgcatgaattaagtggtaaatccaatggttggtttgtgaaaacatgtattataagaaacatcatagaacagggtaaaaacctatgtgacatgcacacatgtaaattgatcccgattctagtatattataaatattattttgttaatttttgttctttctcaaaaattaccttgtttaagcatacttataaaataacaatatttttcttatgttctgtttttgtatatacttctctattatgtatatagtgctctatcatccgactgtt

SEQ ID NO: 6476 - DNA, 875 bp, Ricinus communis
  Intron number 3 from transcript 30174.m008613 (locus 30174 .t000010) derived from phytozome v7.0 (chr-ID 30174; pos 1 740139 to 1741013 reverse strand)
agaggaaagaactaaaagagagacaaaaactaaaggtgaaacatgacatcttgttaaatttttgttttttagtttccaactgtattctttgaaatacatgttattcaatgcattgttatcctaggtgcttgccttgtaggggctcctttagtcgagttttaggaactcgaacttttctctgaacttctacttgccttcttgataaaacataatctattaaatattacttaggaaactagttggtaactaccaactaacacaataactacccctacaaaatcgacaaccacccacacaataaggtgactgaacctcgcacttagcaatacttgaaaggaaatataactactaaaaattgaacataaactgccagtaatgaacataactgctgactctttagttgttatacatggcttgagagcatccccagcactactctctatatgcctccttataaaattataaataactaactttttattttaactcaccttgaaatttgtgtatattctaaaaatactctctattttactccataattaattttttattaataaagtaagaagagagagaagtcagtaaggaagtgactcttagaagaaaaagtaagggagataaataataaaatatagttaagagccattgtctgcctccttaaatttaaggagagagaagtcattttagggaaggagaatgaattagagaatctcttggaagcctaatttttgcatgtactccctataataaaggagcattatttaagagcttgttggggatgctgtaagaatggttgagctaattggcattccaactaaatttcataacttattttcacgtctacaatgattgtaactagacctctcttgtgttttaga

SEQ ID NO: 6477 - DNA, 3438 bp, Ricinus communis
  Intron number 2 from transcript 28966.m000537 (locus 28966 .t000016) derived from phytozome v7.0 (chr-ID 28966; pos 1 43316 to 146753 reverse strand)
gcagtggatcaacagctgttactttgataaagcaggtaatttgttatggtcatatgtttgcaccttttcttttatgcctttgtattttgaagaccataatttgctgtcagaatttcttcatatctatttcaatattgagctgaattggtattgcttgaatggcatactgtatgcattaggaccggtagttcgtattatgtcatctcatgacacgtgtataatacaaaaattgctaacccgaacctgacccatttaatcgatcgtgtcaaaacatcaaagtcaaacacggacatgtttattaactaggttatacaggttaacccgtataactcgtttaataaattaaactttaaaagatttgtagttttgaataaaaatcttagtttcttttcatgccataaatagattgacccgtctatgacctaaacctatttatcccaaaccaaccccatttaactacgaattatatcatgttgtttcatcagatcatgtcaaagattgccagctctaggatgcatgccacgttgaggctgcatgcttgtttgtagcctaccatagttaggagtgcatttatagctcacaatagcttaccataggtgatgcattctaattatcatatggtctaacttatttcacctgcaatagcttgcttgcgactttctagattaaaaatggtgacaaaattgagattctttttgggtgtagaatagaactagattctgcaatgatgttaattagtcaattggttagagagacaactatatgaggaaaggatggagtcatttgctacttgcttatgaaaattttgtttgcctatcaagtctaggaagggatcctgatggcagtccatcttgccaaatggtctctgtttacttagaagttgatcaaattagtttgagcagtatagatagagataatagatgagctgattacttcaattacatctggaagtgttggaagatattaagtcattagatttgtagataagagccaagtacataatattttgtggttgattgggctatactggatttaaagtcaagcccctttaaatgctggataggggtgattatatgtcgagagcactacttaaattgccaatattagaatatagatttaacaagttactatatgatggatacattagcacataattctaaggcttctgtttggaacaggttctttacctctttgaatgtaaaatgaaaaatattggattaatcaaatagaagatacattgaactggaatgaaaaataaaaggctgagggttctcttccacctgttccccaaagatcaattacgctaagcaaaaactggaggcatgcagtttgcaatgcctcgttataatcctggaaatttggtttatctgaactagcaaatatttatagcgcaaatgaccggaatccctctttatcacgctaatcagagaaaaggtagaaacttccatgagctaagtcagggttcccaatccagacttagctacttcaaatcatgtgaggcatccagggcagtgaccattgtgccttaccccccaattttcacatgcgataacagtcttgcattcaaatctttttttctagattgtgtggctaatcttttgtgtcagaacattataacttgtttggatggatgggataagcaggagaaatgggaaagggaaggaaggatattcttagttaccctgctgtaggaggaggggaaggggattggaggtttcttaattatgccccttctttcctctagattaaaagttcatttacttcaaaccagagggttctggagggtaaaggaattccatttttcatgttcttcaaacatgttattctcttagcaattttgttccttatctgccctccgttttattccccttctaaccaaagagaaggttctttacctccttctcctgtcattatgtgttttttttctttttctaacattagaaaatgaggatgatgccttctccttcctttctaatctcctaaatatattctaagaaaataatcctggaacaaacaagcagcctttagagcaaaataaacttgatatttcttgtaagagttcgtcattccagtttgcacttcattcctggaccatgaatggtttccaaaataaagatcagtgccaccattatatcactgcacatgctgctgtcatcttcattttctcttactaacttcacagtcagaagctgcatatatcagtaaaatggccgtttgaaaagagattttgcttgcttgattgagcaacttgagaacttttcaactctaccagctgtagagtcttttccagcattagatctagtaaaaaaggatgccacaccatcatttcaaataagttgaaacctatctacgttgatgccttgccaaggctgttagaagtgcacctaaaatgtgattcaggctgtcaggcacgaggtgtgcaccaagaatggggtgggctttactctcagggctagggcaaggcatactgaggcactctcgaggtgctgcccttgacatatgcctagccttggagctatagatgccaaaagctgtcctattgtgtcagcaatagatttttgtgatgttcattacatgtatttagttctatgatggtgcatttcacttgatggtttcatcatgttctaataaaatgtgaaatatagaacaaagagaagctaaagaccaccaacaggggagaacaataacatagaacaaacttgcttgtcatatgatgaaacttcattcttgtaattgtgaagtcattggttatattctgctagtatgaaaagataaaagtactgtttttagtttacctgatttgataatgattttacataattgctttgcgtgctcttggacagatattttaaacaatttaagtttttgtgcaatagcttgtaggctatactttaacattagaatttgtttagcactttgcttatcatgtgttataaatcatgccatatggattatcatacctctgatttcaaagatatgcaccttacatgtgcttgcgtgcttcctactatgcgactagccactaggctttgaggtttttgacacttaagtgtgccgaatgcttttgatgatgctgccttgcagctccttacttttgaatcttgctttaccaggctgtaacagctttcaagtgccttgctgtacccctcgagtaaagcctatggcatgttgcatttcttgctaatgccatgtcattactgcaatcccgatatttctgaagcttgggtttactaaatgttcattgaactcttataactactaaaacttatcactaaatcatttaatggattatgctttttgttgcacaggttattttcttactattatttcctgaaatgaatttttacaggttgacccttgacctcccaattaaaaattaaaaaatgtggtttttcagggccaggatcttataattggaaatcttggcgattccagagc

SEQ ID NO: 6478 - DNA, 3206 bp, Ricinus communis
  Intron number 7 from transcript 29662.m000452 (locus 29662 .t000006) derived from phytozome v7.0 (chr-ID 29662; pos 4 9911 to 53116 reverse strand)
tggaatctagagcagccttacttgcagcaaagcaggtgacaatatcattttagatttttattttttaagaattctccataatgttttcaaactatttgattaattttaacatggtatggattcttcgaaaacctattttctcattgtaataattaaggataagtttatttcatacaaaatatttttccaaaaacatttttcacttatttcaatgtttaggcaacaaaaaaattgttttaattgaagggagaacctgctcattttcaatgcaagacttttttgctcttgaaatgggaaatcttttatggaattgtcacaatatcgtaaaaaagaaaaatcatagaacctacaagggaaatgcataacttcatgctcattagtctagtctaccaatcaccattgatcaatcctaattttttggttccgcttccagttttactctttcttatgcattttttctctcatatgaactataaatatttgaatcgtccattatgatatattaaaactgatcattttgaaaattctataagaaatgaataatgatcaattaatgtattaatgtcaatataaataataaattttgtaaaataataaatattttattaaattttaaatatattaagtaattatataattaaatacaattaaaataaaatgttacaataatatttaaaattaagtttagaagtttgtaaagaaaattgatttttttatacaatttgtgaaaagaaaaaagaataaattagtgaaagattaatgtataaaataaatataagagataagaagagatgtgactggttcttatatatcttataccgtctcccccaaagaagtaacaccaatgtcgttggtaatgccattagttaatcatttataaaaaataatgaattggttaaatttatttttatatacctccaatgaaagatatttcataaaaaacataagtaatctcgatcgaaggactaattacatatgacatttatgattttatcacaaaaaattctctagaacttttttcagcgagcgaattaaagaaatttaaatttcttaatgatgaagaaaaaggcttatatgaagatactataaatattatgaaaagctatatcgactgaaaaaattacatttgttacaaattcatatcaattagggttgagcacgggtttttctagttctgttattcgaaaatcattagtatcgtaccaaatctcggttcttttaaaatttaaggtattagaaccgtaccaaatataaatgacaccgtaccaaattgtaacaaatatttgggttcaatacaagtatgctcggtaccattttcgattttaatattaaaagaaaataattttgactcatgaattttatttcatcatttagagtaatcacaaatttaaatattattaatcttgagtcctgaattgccaaagaaaacatatgaaagtagctgattaacaatgcacaagttagtaaaagttaaacctttaaattgaaaaatagatggagagtatgcagcttgactttaaggttttagttcgtagcttcaaataaactcaataaaacccataaaagaagaggaagtatttgatcgaaaattctaattgcattatccaatgaatgaaattgtttaattgatgaaagaaattgattttgtgaggtgtgtttgagtgaattatggttgtggtactagtagttagaaaagaaaattagggctagatagtaatagtagtatatatatatatatatatatggatttgaattttgatggaaaaggtttaaagacggagttaatagttttgacaatatatccaccttcattccttcttgattgaaaggaaaccctatgggtctagtaaacgaagtaaataatagtaggcaacataaaaatagatgaaaatattccatctctatttgcctttttaagaggtggagtttctctctctctctctattttgtcttttttggattggatttgtcctttcagtttattttgtttagtatctcaaaacacacactatctaaaatttttctataatctattgatgaaaatttaatttttagtcacaaattccaaaattaaggaaaatttgttactattaactattgaatgtgaattcataaacagtttttggatttgaatttaaaattataattttctaatcctaatgatataagaaaatcaaaattgatgcataatcaatccttattaattcttttcagtgaaaaagaaaaattctttacaaaaccttatttttagttataacaacaattatatatgtaacccctggaacatatattttatgtggacttctatcttatttgtctatgattcctataggaaaatttatgttcaatgaaaatggaatacaaattctgatagagcaaaatagaattgcagtaaatgagaggcctatgtacaaatagctagaataatgagatagctagaaacaattctactacattggtgaaatttaatggaaaaatctttcatattcatagagatagggacttaatacacatggatatagcaagtctcgactgaattgctttaatagtagtcattatatattcccttccacttgtaatatggaaaagtgtactttagggatattacttgttgagttgagaaatcaaactctatcagttgttttatagattgttttgtaaagatcaaagatttttgaatttatcattaataattgatttgaattatttgattcaatttctaatttcttccaagtttagaaattgaattaagaatatcttcatttcaaattatattggattcaagcggagtaatgtattctatgaataatatatgaatggtactcttttaatcataaccaaacacatattttaatgatcgttgtgttcatatttcaagaggaaaagaataagttctcgatataatttaaaagttcgtatatacgtcaaaagctaaaattataatttacaattagtttctagtactgcaaccaaaaaaaaaagtcatttcaaaaaacatattttccacagatgttatttttcactaaaacaatggactaaactaattttagcaatttcattcgtggtttaacagcacaatgaatatatatatactcaacatatgttattaccatgtgacaatataatattgatgtcctattttattatttctgaatctcttagtatttacagggtttagctggtgctgcatcaagatatctgggttt

SEQ ID NO: 6479 - DNA, 1716 bp, Ricinus communis
  Intron number 1 from transcript 29844.m003196 (locus 29844 .t000042) derived from phytozome v7.0 (chr-ID 29844; pos 2 84049 to 285764)
ttgaagagcttgtttacaagaacatccgattcgaggtctctcttttttttttcttaattaaattcattacttttttgatttaattgaatttggattttggcgtgtttgatgtttgggggtgttctactattactgtatttacagttttttggatatatagctgaaaagatttgtcttggtgtttagattgatttaagagctacttgttatgtcagagttattgcattactgtaggtaaatgtgtttgactcaatattatatatatacataggaattagtttcggaatctagcatctttggctctttatttgtgtcaggtaatcgccatcttaaaccgatgccatagggctttgtagtatagggtttgctgttatggatctttcttgtgttgatttgacagtctgtatagttgtagagaaaatatatgccgaaacggattaagaaaaatatcccctgcttaggctgagtttttatagaagagtttttgttatgtatctttcttaagtgttcttgacagtttgtatagttgcagagaaaatatgctgaatagtatcatttgcttagaaaatattcaatcactgagatttctcaagagaaattcttggttacccctcttcgagatagtttctagtcatttattttgattcggggaaagggctcttggggtttcaaccttttaccttttgaatttaattaataatcatgaaatacagctctcctctaatcacctagtgattctaatttttagtttgcttacttttctgcatattgttatttaatatctgtcaggctgttggcccttgttggatttagggcaactgtgaggctgatatatgtaagaacattgcatgaccaactaaaatgcatatttgctaattgaataaaaggttttgagaaagggggatttgctaataaatctatcatccaagatgattttgactggaagaggggtttggcgatcttctgtgttccatctttattctctgcttttgactgttgcttgctggaattcagtaaatgtggaatgtagatgtatgcattgatgctaggaatgcttagatttgattgcaaactaggagaagctaggaaatgcaggtgttctcattggtttcaaagagtatgaaattgggttttgtagtatattggttagctagggaactcattctcctccagtatgattgtgtagtagtattcgggaacttgaattcaataaggatatagatataaggcttcaggcatggaaaaccatacatttagattctgattttcggccgtctgttgtagttattgtaatgtgtggcatacatgtagttacctgtgttctcctcaaaattacagttttggttgtcatgtgaatatattgcaaactaaatatgtcaaaccatcattcattatagttgttaataatatttcaataatttatctataccttggtaaacatgaaaatggaagtgtgtgtgaaatgaatatctgggaatcattcatacaaatgctaactttagcttgatggtgctttggggccagttttgatagagtcatgcagatagcaattaaggtataaaaaggtttcttttccaattaacagcacttcttttttcttctctttgatgttatctgttgatgaagctgttctttttgtgaggtcttagttgatgaagttacatttgtgaagttttaaggtcgtattaacaagtttgtctgtccctctcatcaggt

SEQ ID NO: 6480 - DNA, 5447 bp, Ricinus communis
  Intron number 3 from transcript 30074.m001421 (locus 30074 .t000088) derived from phytozome v7.0 (chr-ID 30074; pos 6 38044 to 643490 reverse strand)
gataaggtaacataaccatcattgtaaattctattaattattaagttaaagattacttgtgataagagttcttctttattgagaaattttcaataagaaaacaaaagcattactgcctttattattaggtctttgaggatcttttaggaattcaattagcatccttgtagggtgagtcagataactagtagagatatgtgttatcaaaaggttgcatattgcagattttacttctagaactcatgtgagtacagcaatttcactattcatgtttaaattcttgtgatttgttttatatatcattttatgtgagaattcagaaccatggtataaagttttcatactagactgttgtactgctatctggaatccactttctagtaattcatgcctactaatgtaaatttcaccaatggttgttgaacttcacaataattctactcgtaattgctcatcgaatttaattctgttgcaaatagcttaattgcagtgataactctcccaaaattgatgtggctttacctgaaagattctttttttttttttaaataaaagtatagacacaatttgttctaccctttgtggtatccattgttcaacatgtcactcctttctcaggtacatgtcaaatttttggtagagttatcacctgaattaaggtaattgcaaatttaaagtttgatgaagaaagaataactagttaactttgtctcagtaaagttaataccagcgcaagttaatttatcaactgctagtgcaagttatccatgcctagtgtttagggtgaaaatcaatgttgtagaagtatgtgtgtactgtggttaagctgtcagaccaaaataaactgaaaaaactctaatacattctcaaaatatgtgaccttaattaacatgattctcagatacttaggagacggcgatactaatagacacagttctctcttctaaattgatattattttcaaggaacttgttttatatgccaataaaaggagaaggaaaaatactaataaacaaatatatattaatgtcacagtgctaaacattgaagtcaaaagaatgttccaacatgctattaggagattttgccaatctgtcctctcaactgctccttaattcagagtcattaaacttaatgctgaatttcactgcactaactcacttcaatttgcagaaaattgaaatgttactagaacttagtttgtgttttaatcagttcactttagttgaatggttgtggaaattttaattagatattcttcatgtcaaccaagtccatatcctacatacttgcacttgactaaaactctgccaagtcctaatgattaattcttattgaagtacatatagcaagctcatgactgtttttctttttcttttttataatgtaaaaatgacaatcttaagattaactagataaaataattaaaattaaaccttaattttcatgactattaaacttgtcatattttattttccttgaagaacatggtatgcaaacaatcatgaagcaaatttgatgcttttgttaggattgaccattctttctcctttaaaattttccaagaacgtatgcttcattaaaggagcaagaaatgaagattaaagtttttttacaattgataatcttttataaaagctacctagggataaatttagcaaaaaaaggagagattttgctcacttccctatagattctcccaggaagaggttgacaaacttcccaaagttttgttgttcaaaacaagatgtgtttgagtgtgcttgcattcataattgaattaaaccaaatatgataacatttttaattctcccaaaatgataaggtattcttgaatattgcacaagaacttttgagtggtaaaataatgtattttgaaaccatatatgctctacgtgttttgttatttggttatgacgtggtgcttcttttattcaatcatcaattctttattatagttaagcttgagtaatggttatatttcgctttattacattctaaagctccattttcttttgatcctatctttgctgcattcaaaaaacctggtcaacagaaaacattttcctgggtgatgggacaagtaagccatttccaaagaaaattccccttctgagttatgaaaagggaagtcattttcggatgagttatgaagttaaagaacttatataaaagctaactaaatgtatgttgaataatttataaaatactaagtactaacaatcatcaaattgtgccagtcattgaacaattgctaaaagagattttggacttgctattttagtgtaattttcttttatataattataaattgaaaatataaatgagtttaaatattttagtaatctcctttttaaagaaagtagtaattgtcagaacatgccaaacaccaaaaaaacaatttccttacgaaatttgatgtgcaaccaaaaaatagaaaatgagttgttttcctagaaaactttcttaaaggaaaacatttccatgatggtgagggatgcgtacgagggagacttgaaggttgcattttgaaccgatggttaaatgtgtaataacaagggaaattatatttgaagcaaaagtgctttatgttcctttcttgtctaggccctaggataaaggatgaacatctctagagaaattttaagaaagtaagtttaggaatcacctgagaatgaaggtattgtattgatgcagtgacattagaatagagagatagcttcttttttttttcggtttctttttatcattttctttagtagattgaaaatgagcttgtatatagtaaaaaataaaataaatctgttggaaatgttaaaacataatggtagaatagtaatgttatcaattgagcagtaaatgatgtgcacaggatatgcacgttcttttctgatacctaaatttcacattaattattgtatatttgtattccttgagcaagtccctacctagtagtaggaactaggaatcataactttaatggggtcgggggataaaaaaagacatcgcgcgtgttagtttttctgctttttgttgaattccagcagttcctgagaataatatgtcaatctcctctcttaactacagttataaagaatcatggatgttcatcaattctattatgtgtattagttttgattttcaaccattttatcataggagtgtagagtaaacttcaaaaagaaatgtataaaagtagcaacgaattattataggaaaatagagattttgaattctggaaaaatcaataatttcttaataaaatatttggtaatttaagtaactgacaaacatacggttttgtacaaatgctgactatcgcttagcacaaatttcattcaacagtagagatctaagatctatcctttccacctattcaaatgatcttacgataagtatagcttttccatctcctttttcattcgtctgtacgattgcagtaaaggatatattgacccttcccaaattgatcaagttgttcttctttctatacataattttagttctataagacatttggattttagcaatcatttcaaatcaatttgttttatgcaaggtacaaactctctcaatcccaacgtgacaatgacttcttctgataggagtgagcaacaaaataaatttcatgcaagtaattttccacgtaatcattatgttgggaataactgtttgcacagttttgaactaagtcatgtgaacaagttgatgaggattcttatgaaggtaaggtatgaacttgtaactagttttatctatttcttagattagattccattaacaaagaacatataaactgttgcacatctctcaataatttgagctctaatttgagtggtatgtgtggatgagagagcgagaaagaaagagataagagaaaaatatcttacattttctacaaggtttgaagtacattaatgataatatgtaaacttattggatttttattgtattgtactcgcattgatattgggagtcttagttgtaattttaatattgcactatgtcactatcgttgcttatttgtctagaaattctacgcgacgataaaaagttatgtggtggagtagcaactcaccaatgagcattaaattcagtgttatcatgatctaggtcagtggcatatctacgccctttgactttaaccatcaaataccaagatttacccacatgtagacgcgatgttcctatggaaggtaggtgtaagtgtaacctagttggctttgaggattctaaaagttctacctaaataatgcttgctgctctagtttaagctccatttatgctacttggaagaaattttcctgaacaaatgctactcaggtcaaccaaaataaattgattaatgatagttcatattaggacaaaatgtttaagaaaaaggagacgccacttgtgttgtgaatggcattatgtctattgacagaacaccttcaacatgtccgtttaacacagaaggatatcattgccaacttcttttaaaagctaaggatattgtaacataaaactcttcatgccctagactaaaactaggagcaaaaataggagaactgcttaccttctcaaaacctttcatgaaatattggtcattcatcaatatcctcaactctgtaacatcttatgctaatccccctatctgtagtactataactcttaatgacaccaaatcatgaatcaatagtttaagattattgctcaggacgttctcattggtgtcttcctacttgttttagttgcctggtactttaaatttgtcattcctgttttgtattctttactagcttctccattcctttgccttgtgaaaattttaatgtggcacgtgttcgttgggaggttgtgctttgaggaaagactagcattagtgcgaagaagtgctctaaactcgacttaattaggttcatcacccgaatattaacagtcaaatgtctaaatgttttagttttatgagtagtctgtattaccaacagcattacaatcatgaaacacaaaatgagaactacattgcatggttttgtatcacatttaaaaggggcagcctagtgcatgaggcttttttttggcacaggtcaaggaaggttgtctattgtatgaaccttccttctctctctctctctctgtagggagacaatttcttcttctgttaacaaaggagcaacctcaaaagtggcaataataataacctgaaaataagcattcttgatcttattacaaaatcacgaccacttattgcacacatatttggctcaagacatactggttttggttcttgaataactgatacagcagtgttaatgtccatcttaaatcttaggggtttgattaaattcccgatctttcatctattcttgttttatctgaacctgaatcatttcatgaagctatttattagtagtatgatttgggaatatcttgtttgttacttgcagcagacaaacactgcagat

SEQ ID NO: 6481 - DNA, 2693 bp, Ricinus communis
  Intron number 2 from transcript 30170.m014079 (locus 30170 .t000491) derived from phytozome v7.0 (chr-ID 30170; pos 2 674622 to 2677314 reverse strand)
ttcactcttcttccagtcttcactggctttcacaggttggtcccacttaagagccatagttcctttaaattctataaattgcacgtaaactggaggcaaatcttgataactttcttctgatttattattaaacgaatctgtactattaataaaaagaaaacctgatagggcatttgtgcctttcagttgactgataattaagaactatttaatgcaatcaatttattataatacacaatgaaacgagagaaggtttcttcttcttttttttttccttaaataagaaacaacagttctcatttatttgtgtttgataagtacagaatatatcttaatggattataaaatgaagaataataattttgatcctgcaaacactagccactacttaaaagacatgcatgcaaatgtaccataagtggggtttggataacccaattcaccatttaagattaaaattttcatcactttttaattttaaaatggtagtgcggttccaacttaaaattatataaaatagtaaattaaattttttattgaatattctgaccattgaatttttgagaatttttattgaggcgaattttatgcctctatgatattcttaagttggcttctgtttatattaaataaagattgttgatactcattttatcaatttttgtaatgctcatttaaagattaacatgacaaaagacttgttataaatattattctcattatatttattgtttctaaatttcttatttatgatttttatccttcaagtaattttaaaaattagtattacatattaaatatatatttaatcaataaatttaattcattttaataattttaagtatcaaacaaatttactccgtgcttaagaacttaaaaggatttatatttcatacttaaaatttaatacggatttttaaatttaccgaatacccctttaaaaagttagtattacaaattgagtatatatttaatcaataaaatttaaccaatcttaataattgtaagtattaaataaatttattcggtatttaaaagtttaaaaattattatatatatacttaaagtttactacaaatttttaaatttatcaaataccatatgagaatcgataaggtaagaatcggagtgattaaataaaggataataacataaaattgtattctaaacaataaaagaaatatattattttgttagtggtgatcatttacagccaaactaccattgcagcctctatcatctttttattcttaacaaaaagacaaaaatagtttttgtggtgcacgtattaataacatgggttgttttaaaatgaatctcccatcgccctaagaaatcgcatacattataattggggattagattatttatatcagcaaagctgtcccatctattgttatatatctagatttagtctaaatacggtgatctttggttcaaaaattgatgctaaatagttatattaaattttttggtaaagacggctactaataactgatttagtttcaattaactgctgattatatcaattatattttagagttttttcttatcagttgataattgatttaatttttatttatttatttagacaatattattcttattaaaatttattaatagttatttacttaaattaatctcatatatattttaaaataaatgataattattttaaaattataatatttaaaattaaaaatttttattagtagaatataaatataaatttaaattcttaaaataatttttataaatatttttaataataaatacaattgagttacaataaattaactataatatttttaattattataagttatttttattaatttgtatcattaaaaataatgtaataaaataaaaaatatatttaacaataaattatatattcaatggtcatttaacatactaacaacaactgctaataaaattctaccaaacagtttaattattagccatcagctatcagccactagctactagctaaatttatcagctgaactaaatatgccctataactaataagaaagtaatatatatatgtataagtgttttatattttgatattagataatttatacatgtttaatcatttaaaactaataaatacatgtcaattacttatcaatttaatatataaatagagacatagaccctaagtaaaaaaaattcaacagcgcagacaagtttcaactaaataattattaactctttgaaaatgccaaaaataaaggagcaaaggaaatatgaatggagccaagttgttgaaaatgggtttccttattttctgacacctttcaaataagtagccttcttaagctaaccaaaagactatcattcatgtactttcaaatggatttatgatgttaacactcatgccatatttttaaattatgcaaatcataaaaaataatttcgtaataaaatatgaatcaagtataacttaattagtacaaagagtcatcttatgactataaattttcaattttgaatcctaatcgacattaaataatttgaaaaactattattcaaaatattttacttgacaaaaaaaaaaatcatacttttctttaatgttattttagagaattaatatctcactgttaatgtctgttgcaagcctgacaagaagtgtccaatatgaacatacaggttccaactggtttagaaagatacgtaagcaaccc

SEQ ID NO: 6482 - DNA, 1398 bp, Ricinus communis
  Intron number 1 from transcript 29983.m003194 (locus 29983 .t000093) derived from phytozome v7.0 (chr-ID 29983; pos 5 50324 to 551721 reverse strand)
attcggatcctgtaattgtgtctaattccactaaggtattgagctttttttggttgaaagttgtaatcttttttgtagcttaactgttttttttaatttttattctggggattctttttttttgttttctttttttcttttttggctattaattcttgatagtaatcctctggctcactttaaagaagtgaaataaaaacgaacatttctttttggtgagatttgtttgtgttttagctgatttgacttttttcgaattataatagttcaagatttctctttgattttggaagatgagattaattaggttttgggtttgttgttattgggttctgggtatatttcatttattgatgcttcattaagagaagcaatccctttcttgactacttaaagttataaaattgattagacaaagaaaatttgaaatactctcgagagttttgttagttaaattttttgtagacatggacatagacttgaactcagaacatgcagttgtttagtcatgtactcgaattttcttgtttgggaatttttttttcaattgtatgatagtgttaatgtgttatatgccatgatgtaaatttgagtttgaattgtcgtgatacgagtggagagattaattgtatggttggatctattggtaaaactgcaaggactgttttacgcttcccccaggagtggtcctgtggaaagatttaatgcactgtttttgtgtgcttggattcaacatatgttcccttgttttcgtttggaatgttgtcaaattctcatatttgcagttacttgtgcacccaataattattcgaaaagaattggtgattaagattgacatttcttttgatggtttaatggtgcccaaaatatcattaaatgtattgtttaatcacactctttaagtgtgctgtccttcctttacattcttccttctttgtatgtatctcttagctccatttgtctttatttgaacataagtgacaaactagatcttaaaagtccggagaagtccaccggcatggaagatagatagcttcaactaaatatttcagatgtcaatatagaattcttcttcctgcaaatttaaatgtttcaatgcctatattggtgaagccttataaaatgtttcactgcagaagatttatgttatgctcttctttagtgaagcatccttgtgacttctccagtatttaaattttgagaggtctattaaatctggggatttgaatctgaattggcattgctattttgatttgttacagaattttggattgtacttcgaatgcctgatgtagtatagttttaagcactagtcctctgaagaatgtcttttcggttctcagattcactaaataggggctctttctttactctaagcaggattatcataaaagtaga

SEQ ID NO: 6483 - DNA, 4284 bp, Ricinus communis
  Intron number 1 from transcript 29901.m000415 (locus 29901 .t000011) derived from phytozome v7.0 (chr-ID 29901; pos 1 61581 to 165864 reverse strand)
gtaaggtatgaatcctcactcaaactaacgaccctcttgtcttaattgttcattacttttcttttcatgataccttttcattgctgtttcctttaattttctgcatacgttcaacattcagtcgctcgtctcgaggacttgtcagattgacatgtaagtaaataattgagccatttttcaaatgggtaaaaaatataaatcttttagttgcattaaaaaaactaataaattattaatggctggaatcatatgaattaaatatatatgtgagagaaacatgtaagatctgtttaagtatatatcaaatctcactaatggttgagtttttattttcttagaagaataaaatcagaaatttggattttgacaattgtcagatgagtttgagatattaaaaagaaacattgatataattaagctacacgtcgttttcgaacatattaatattctttagcatataagggagacgtagcccattagatactttttctattggtatttttccaatttttgatttgtaactttatactacacaggttttgtagatgagatttaaaatgttttttctttttaaattaactaatgattttattcgaaatattagttatgtagctgattaaaatttttgagataataatagtaaggatattatctaacccactatagattagttagaataattatggacattagataaaaaaaatatttatcacctaattttgattaaaattttataaaatatgatataacaaaggcaattttactgctttttttacatattaattctttaataattttttttgaatttgatataagtataaaattaaagcgcttgagattgcttgaatgtgaaaaaattaaactagaatttgatataatattatattatattttaatttcttatgaactgtcttttctttttggttagatttgctttatacaaatgcatccgtttatttattcttttaaaaattttaaaacttaaaaaaatataacatactaataaaaattaaaattagaaaaacacttttccaacctgaatctcaatcactcctttaaacactattggaatttacaaacaatattggaatacatatttaagcattgctaaaagtattactatatatacaacacaatgaaataaataggacagtaatatatatataaaattattttatattttaactttaaatgattaacacataattattaaaattaataaatatattattattttttattgtttagtgtataagcaatgaaacaaaagcaaaagacataaatgacctcttaagttttcttctattaaaatattaattaataactcaaaatttagcgcactttttccgtaaatctgtaaaagttccttttatttttgtttcctgaatgcgcttttaaatgataaagataatttttttttgggtcggacgaaaaattaaaagatgttagtaataatattatattgaatggtatgaaaatgttggagaacatgtgaaaatttcacttccatttttatgtctctagcaagtggggtccacacaaccttccagcaaggttggactgattcgctcatctttgattgtccatgggcccgctttctttttctttaagaattagtttctacatttgaaagataaaagaaatatttttatgtttaagaagagccatatattttatttccataacattttttttaatttatattatattcttacttttatataatctgtatatatttcattattattaaattaatgatttaataattattgtagatttcattgataaaatctattttaaaaaattacttataaatttaattaaaattaaaaaatatatattttaataattttctttaatcgcaagatgtttagtcttgtattaaattatttaaaaatagtaattttactaaaaatttatagtttctttttcttctcaaaaagagagaatgatcatatcagtattttatattataaaaaatgaaaaagaaatattgtgtgcctgagaaatcctaaaagaataaaaaatatgttatacaaaaatatttttatcttttaagtataaaaaaaaaaaaattgcgaagtacttatcaaattttactcatcttaatacgtcttcaatccctataattgaagtttagaattaatcgtttacttgtatatttgcacgactgttattattattttgattataaaatcaaattgataaatataatttaataaattttttaatataaatattattataatattttaaaaataatagcaaactaattatttttaaatgtttttaactttttaaaattctattaatataaaattatcttagaaatatttataattaatttttatattatataaattaatactatttaaataattaatattactattttttaaatctattatttattgtacaactaaaaaaattcttttatgactaaatataaagtaaatgttattttctaaaattagaattgttatctaattaaaaaattaattaattaattaatatattataataattaatatattattttttagaattagaaatagtatttaattaaaaatgtaattcattaattaataaattaatagaaaaaatcataaaaaatatataattttaaattttatgtattaaaatatataaacatattaaaataaataaatataatattaaataaaaaatttatatgttaaaattaaatatatatatatatatagacacagctttgcagttgctaccggaaacgacagactatgatatttatgtagaaggggtaaagtttcctgtttagggtcccattttaattattaaattccctgagcacataaaaatcaaacacaaattaaaaagaaaaattcaaaaatagatatgaaaagaaaggaagttgagttcggaacctttatcaaaatcaatacttcacataagtcaaaatctttaggtttctcttttctttttcttttactgatttaagttctaattagcttatagtttttccaaatgattaactagacctaactttaaatatattaattatgtttaattattataaaattataaaataatattttaataaattagtatttgacataataataaatagtaaatacttttactaataaatattattataataataataaacacataaattaatatatcaataaaataaaaattaaaagtatcatatcttttttcttacaaattcttatcttcaatttttataaaaactcttattgaattatttgaactctatcataaatatatatattattaattcatcaatttcttatagaaataagaatatttatggaaatattatagaattaaaaaatatatacgtgaataaaataaattattaaaaaaatttaaaaatttcatatcttttttctttttatttcctatctttaatttttgtgaaaacttataatctatcatatatatatttatatattgtgcgacgtattcatcaattttttaaaattagaaacacatgaaactgtgataggattagaattagattatattaatcaataactaattctattaaaattaaaaaaattaaaaattaattatatatataattagaatataataaaattaataattattgattaattataagaatatttagccggtttaaaaatttctctatttatatatatatatatatatatatattatattattattattaattgatatatctcttttggtaattgtattttaaattttatagaattattatatccgcgtgtctatattaaataactgagactgctttataactacaaacccttgtaatgttttcttcatctacagataaaatatagatatatagtttttagaactatttttatttacctcatattaaaacgtattaaaattgatgcaattgtggaaaagaaacttatacaatgtaagatttaatattttgttatttatttttagtaatttaaagttgttctatcgaataccccaaatactaccagaatttggatgataagaaagaatttaagagctattcacacagtcgagttctatttcttctttttacatacaattaaaattgtgcatgcatgtagtcatttgcattgatcatatgaaggaaatacttttacgtaaaaaacataaaatgaaattccaaatctctttctgctatccatgaagaaaagaaaaaaagacccaccttgaaatgagagacatttttgctttatatatgtatagtgtagaaaaatatgaacctccctaaatatcaacatataggtgaaaaactttgcc

SEQ ID NO: 6484 - DNA, 4869 bp, Ricinus communis
  Intron number 11 from transcript 30077.m000187 (locus 3007 7.t000002) derived from phytozome v7.0 (chr-ID 30077; pos 161324 to 166192 reverse strand)
gagaatcactggatcctttgcaagttttagaggtaccaaaccaaccattcctctgtgtgtttctcttaaacatacataatatcatgtgtacaaacatccaagattgacaaggggatgtttgcttgagctgttggagctaattgatagctgtttggcttgcaatagctaaccatgttcgtttgttaaattaaaatttcagagcttttagctgatagaatacttaatagttgctgattctatcggctctattttgaagcttttttcctatcagccgatagctgatttgaatttccttttcttttgggctatattatccttattaaaaatacttaatagcaaaatgactttaaattaatcttttttacaatcagtttttttttcttaaactaatagcaacaactagcatatcagctgctactaacaattaaaccaaatacatcctttagactaattcagccctccccactcccgcctctccaaaaagaaaaagaaaaaaagaaaaaagaagaaagaaaaagagaaaaataaggataaagaaaaaggatctaacttgttagtaatggtattgatgcctcaatgttaaggccttttttggattcggggatttatgattaatggatttaatcaaaacccataaatattaaatctatggataataaaatcaatgaattttaaagatttcactattcgattgaacttaaaatcgatgaattaacaggcatcatcttgaaataaaaggaatatgataataatccattattcatgaaaaatggacttggaatttcccactggttaggtgggaagtcttaattataaaatcttgactctcttttggcttgttaaacgatagatttagtttaaatctagacttataaaatcctttaatccaaacagttctaaatgtacctattgtgataggtatgtattagtacttgttcaaagattgaattttgatcatatttaggactaatttgttgctattaaacccctgctcaatagaaactcaaaagcttgtatagttcagaggcttcttatcactaattgaagcagtaaactgcttttcatagtgaagaaacttagttttacaagtttgatgcctgccaatttggactgacagctccagttgagtattacaagggctggatattgttatggtcttgcatttgggatcgggttatgggcctatgattcaccacaggatcaaaagaaggtgaagagtatttgctggaacttctaccttttcgacctatgttgaattacacttaagagctcattatatgtctatgattcaccacatgatcaaaagaaggcgaagattgtgtgctggaatttctaccttttcgacctatcttgaattacacttaatggcttagagagaaccttgcgatctctgaactttaggagttcacaaccttgaagaaatttcttattgtttaaatatttacaagagagggtaggctagcctctaacttttaagacctactttccataattaggaataaataactcagggaagatcctaagaattacctataataactaaataggaaattaactagcaaattattaagaaagacaattaaggaaaacttaatgatcctaagaatcacctacaatagctaaataggaaattaattagtaaaacattggaatactgtaatatatacttaatttgctttgtgtttaattgcttccttttgagtcgaagaattttgggtcctctaaaacttctctgcctctcagcatatcatggcttgcttaatcatcattgattcttcttgataattacttgatggcaaactcttatttccagagaagatagagcatgataagatgtttttgttttttgtgcacatgtatgcagtttattttctcttgcaaccctgaatattagattcttattatgcaaaacttgtacgagaggataaagatgattatttagttgtttcagttaagaaatactttagagataagtatgaaaaggtaccttgtggttttactgttttacagttcttaatttgtgttatttttttagacaaagaaatgtatgtggttacaagttgtgacaaaataaggtatctcaccattaaaaaatttcaatctgtaaggatttaattatctccacttcgataagctatcattatcatattgcccgtgcctgataacataattttagagcttaataacttataattttgttgtttgaatatcaagtcgcagtttaaaatttactaatccgatgagatcgattggacggtcaaacaacaatgttttaggttgttaaactctaaactcatattattaaatacaaacattatgataataatgactgatcggaatgaagatggctgaattcttacgaatcagtattttttaatggtgagatacttctttttgttatgatttttaatgacgtacctctttttgtcttaaaaaaaaatatatactgaaaattgtcaaatcgtgaaaccacatgatactttttatacttgtcccaataggtttattctattaaaaagtgttctagggtaaaactttaattttgttgtctattttttttctttttctaaattgttcaaaaattctctattttgcaaatgatagtatgtgggtttttgataatccttaatactaaaatccttagcacttatacttctaaaatggtttgatatataatatggacctaatgcaagtctttattaaattaaaaaccactttctataataagtccgaataattaacttaaaatttctatttaaaatgctaagttatcaattttttctattatttttagtagagtaacttttatgcttttaatacatctttaaattatcgctaacaaaccaaaaattctttatttgacttttatgctgttagcatacccttaaatttttattaactttattctcttgattttatatgtttatgagaaaaatcattttcattatatgatcgttacttctaaacttttctttttttaagtaatttcaaagatatatttgatgactaaattataaaaatcaacatgtcaaatcaaatgtccaattaatgatttgcagttacaattatcattcagattgattagattcagtacttgaaaattatatatatatatatatatatatatatatatatatatatcttttttatatttgacacttaagatttagcacttattttcttagttctaccaaatgctagctaaatcagtcttgccttttctttttcttactcttttcttcctctctttggttggtagatttgacttaggtagcgggtctaatttacaattagaaatgcttcttatacactttgtttgtcattccttatcctttactaattcttttctcccatcagttttcaagaactttaaggaaaatgaaggaaatgtacagaaaagcatcatgtaatttgatgcttttgcacttaaatagttgtggtttttttttttggataaagtatcctgtgatttattattattattatttttttttgtattttgatatcatgatttaacattaatgtgatactaattttcaaaaataaaatcatttattcaatgatttagcatacaaataaattaatatatttattttctaatcttactacgaataaaagaaatatatttaaaattaattataatacttttagagtatcctgctaattggtcaaatagtaaatcatatacaaaatgattctgttattgaaagttcatttttgtatattccatcataaagttgtaatgataatagctgataggttatttaattgcaagaaaaaatgaaaccacaggaatgatctcaagttcatgtcttgaaacggatgattcatgatcctcattgcaatgcagaaataattcttataactttgtccatcatccccttatccttcactctctgttctttcttcatttcttaagaactttcaagattttaaatgatctgcagtgcatgtcttgaaatagatgattcgtgatgcttcatgtacaatgcagaaagacatatctgttggcataaatgtttcctccaatccatctttttcttaaaaaatttctcctatcctctttaggtctttagtttttgttctgctggttgtctttgtttggaatgattaaaaatggcagaaggagaggatgatcatgtttgggcaaacagtaaggcacattactcatcatagtcttcaatgcataaaagattttaaccaaatcgtgaccttatttcaggagtagaattgttgtttatatagtgcttctgggactgaagaaaaactgatgaggaatttttttggttaacctaaagcaaattatgaaattttctcactggttaatgtagaaattttcctgtctgaaacatatttatatacaataatgtgttactgctagtgcaactctgaattttttgttttactgttgaaattgctgtgttcagattgtgtcaaagcatcttccttgcttgcaaacctgtctttcactggccaatcccagtctcaggtccatctgtgtttgaacaaacacatcaggctaagcgacatcttagcttgtcaaatggccactactcatgatatttgatatatgtcgagggaaatgcatctgcctacatatttgcgtactataaatcttgcaatttatcattggtggagttgtaattattcccctgaaggtggtcaacattatagtcttagcatcattcttttcaatttccttaaagttcaaatggatagatttccccttcttatatgactctgcagagacactttgctagaacaatcagataatgttttatcatttttttgttattgtgtttcttccatttttcccccagatttcttcttgagaaataagcttttaaattgcagacattgtctccagaa

SEQ ID NO: 6485 - DNA, 7211 bp, Ricinus communis
  Intron number 9 from transcript 28448.m000357 (locus 28448 .t000006) derived from phytozome v7.0 (chr-ID 28448; pos 1 05694 to 112904 reverse strand)
gtggaaatttaggaatagatcttcctccagaaaaggttagtaactttttccataattgcagaaaatcttgtcagcatttctgctttattttcattggcataatcttccactgtgaattcttttgtttagtgagtaatgatagcattggttatgacttaatggacgaagatgagagttgtactgaaagaattgaaaaagaaaactggattctaatgatgattactcaggatgttccaagaaccgacatctactttcttaacaacttagactgtgaatggattgagaataatgtaaaaagaagaaaaggaaatattaggagaattagttctaatcgtgtttggctaataaaatttcttaagaggagaagagtttgggatgtaaacagttgaaattaattatactttagggtgtaagaagtttcacctcacaaaaagaaactaaaatctaattaattatcatttttatatctattattgtaataaaaaataataattcctcattccttttaatgattgtatttatgtaaccaaacacaataggataattattttttcttctctttccttcaactcctttcctttcctttaaattactttccctttcccttctctcttcattactatgcacactgttaatacgggataataacataaatgatgactaaattttatatttagtttcattttagttataaaattttaacttgtttcatttcaatcattcaattttgattttggttgcaatttagtcaccttaccaataaaaaattgacaggtcatattttttttttcttaattatttttactacatgttgattttttatttgcaaagtgactaaattgaaacaagattaaagttggatgactgaaatgaaacaaattaaagttttgtgcctaaaatgaaactaaatgcaaagttcagtgaccatttatattattatcccgcattaatacagattaagcttttattaactagatcatttcaagatgataagagagaataaaaatttctgatgttatttttaccacatgtttgatcttttgtttgcgaagtgactaaattgaaacaagattaaagttggatgactgaaatgaaataaattaaaattttgtgattaaaatgaaactaaatgcaaagttcagtaaccatttatattattatcccgcattaatacagattaagcttttattaactagatcatttcaagataataaagaaagaataaatttttttgatgttttattgatgcgaaattacacctataatatatatatataagttggcacagtctagattagaaagaatctaagttaggaagaaaattaagaatcctaattaagtatatataatccctataattaaggaattatttacttctattctattatgtaactctcctcctcaagcttatgcataaatatcaatgatgcctagcttgttacaaatgtagttgacacgtgctccattgagagctttcataaagatatcttctagttgttctctagctttcatgtgccctgtagagatcatattttggtgcatctctttacaaatgaaaaggcggtcaatctaaatatgcttaacgttcatgaaacacaagattcgaagtgatacgaagagcaacttaattatcacaccacaattttgctggaattgaatcttgaatccaattttagtcaacagttgatatatccatgggtgtcaaacttagcccagcccagccggttgaaccgagaactggcactatgtccgagctgaacaacctatataacccattttaaataaacctgccgacccaattgagtagaccgatgacccgacgacctagtcatgggtcacacgagtttggtgaatctgatttaaaaaaaaaattaattaacacaatatacttttattaatcaaatagtgtcgttttgacaagacatataaacactaaaaaaaacctaattatatcttgtattagctttttctttattcaatttctaaattttgcatttcaaaaaaatttattatcttctcttcaatcaattaatgtattgagaaatattgactaaatttttaagtcgaaaagattaaaaatttagccaaagctagtaatattaatatacaatttatgcaaagattaaaattataagtaaaatgagtttgtgatcacttacttgagtatcttttaataattaagtttgtgattgaaatttttctatgggaaatggatattaatatttgttaaatattatattttattagatttaattattaggtaatattaaaaattatattgtctaaagtgtctttaaacaatacatacctttatgcagcatcatatataaatatttatacatatatttttagttatcggctcaaccctagttggacctctgacccttgaccttttgcattatttgggtcaatgtccaagccaggtctaaatgatatatctatattatctcacccacggattgcgctataattctatattttgattttatactagatatggacacgacattctacttctactcttctaagaaatcaaatttcctcttataaatatgcaatggccagtagttgatctccaattaatcttagaacatgcccactttgcgtacgaaaaatattaaatattagtgtttccaggatttttatgcagtattcctcgtctaagagcatcctttaagtaacataagatttgttccaaagctgtctaatgactaactgtggagtagacatgaaatggcttacaacactaataaagtaagcaatatttaggcgagttacaatcaaatagttcaatttgccaaccaatctcctatatttctcaggatcttcaaataagtcttcatttgttgtaagttgaagattaggaagcatcgactcacttcgtgtttggcccttaactttccattcttagttaacaagtctagcacacacttcctctgagacaggaaaatgcacttattgcttcttattaccttaattcccaaaaagtacttcaccacccctaaatcttttgtttgaaactaacggtaaacaaatgattttaaagataagattatcattgtatcactaatagtaattacaacatcatctatgtacacaaacaagaagaataatggcaatgcagattgtctatagaaaactgagtgatcatacttgctcttatgcatgccaaattgttcaactagctaattaaattttctaaaccaggcctgaggggtctgtttcaatccatataaggatctatgaagatgaaaaatcttcccacaaccccctgagcaacaaacccaagtggtcgctctatatacacctctttcacaaaatcaccctataagaaaagcattcttgatatctaactggtgcaaagaccaatcatgagtagcttccatagaaatgaataaacaaactgagatttggcaacaagggtgaaagtatctaagtagtccacatcataagtgtgagcataacctttaacaataagatgagtttttagacgtgctactaatctatcaaaattgaactttactgcaaatacccatttacatccaacatccttttatcttgcaggaaagctcactaaatttgaagtaccattagcatataaagcattcatctcttgtattatagataaatgccatctagtatgagataattaggcttcagtaacaatcttaagagtacagacagaattaagagatgcaatgaaaggacaagaaaaagaaggcaagtgatcatacgaaacaaaagaggaaatatgataattgcaattataagcacctttatgaagggcaattagtaaatcaagatcagtgatctctagatttgatgaatgaaaccaatgttggacatggatcagatgaatctcgtcgtctggaatagtcctggtgaagaggtggttttggcaagggtggtggtggggagcgaggttggaggttatggtggtgtaggagtcgtattagtgtattgacatgtgatctcataaactagtaggtcatcgtgctcccctttagtaataagtgcaaaagtaggaaagaaggggagatgttctaaaaaagaatatcagctgacaaaagataccttttaagactagaacaaaacaccgatacctttttcgcaaacaaaaataatccagaaaaacgtattttaaagacttaagatctaatttagttacccgaggacgaacatcatagacaaagcatgtattgcaaagaattctaagttcaatgagcacattatcaggggtctcaccacgtggaatataagatggcatgcaattaatataaaaaacatgtagagaccatatcagtccaaaatggttttgggacatgcatttagaataggagagttctaactattttaaaaagatgtctattttttctttttagctacactattttgagatagtgtatcaacacgaggattagttaaggatgtcattctgaagcataaatatttggaaagaaatggaaaattatttgtagcattatcacttttcagtacatgtacaaaaatattaaactttgatttaatttcagcataaaatgcattaaaatatgaaaaatttaaaaaataatttttcattaaataaaatcaagttattctagaaaaatcattcacaaaagtcataaaatatttaaaacaagtattaaaaaaaaaagatacgaaatccaaaaatctgaatgaattatctcaaatggaaagctaattcatttatagtttcgagaaactaataaaaaacgacaatattttgcaaactgacatgactaataatctaaagaggatgcattgtaaaattgagggcacaactccttcaaaagagacaaagatgggacattatgaatatctcaactgacaatgtgcttcaaaatgctacaagacactggagcaagcaacaaacttgggtaccttgctatcaagacagtaaagaccacttaattcatatcctctacccataatttactttgtcataagatcctcaaatacatagtaataaaagaataatgagatacaacaattgaggatacgagtaaatttgccacggatatcaaattgaaagaaattataataaatttagtaaagtagataacaaaactaatggagttaggtgaacaatgccagaaccaagaactgaagcggcagagccatcagctagaataacagtacaaggaaaagtgtgtgattaaaaagcggagaagatactagaattacttgtatgtgttccatggcatcataatcaatcactcattgggaggagaaaaaaaggagacacgtgtttgatttatctgaattggcgatagccgtaatagactaggttgagttcttcaatgcttcttgggactgagtaaacttagcaactctactgcagaaactgtaatagtctgttcagaggttgggttaggagaagttgcaacatgagcagaggaagaagtcctagatttatttagcagcttacggcacgtgcgtttagtgtgacccttctcatgacagtaataacattcgacttttcttacatcctgatttcggcaacctatccctgcatcttaattcctactctctcgattgcctgtacctcttcctctgttattatttctagaatttgactttccattctcaggcccactggtatgactaacaaaagcactggagggaacaagggcactagtatgtgtgtgaagaactatggtaaaggcttcatgcagagaggaaacctcagcccttgaaagaatataggatttggcaacctcatactgggaattaagaactgctaaaaaattcataactgccatctgctcacgttgagtctgttgcaccttaacatcagtactgaagggtaacaagtcatttaatccttcataggcccttatgcagtgattgctctttttgttcagcacgacaaaattccttacaaacctgataaatatatgagagatttcgtttcccagaatacacaaattctaaatactccatcaattctttgacatatttataatgattgatcaaactaattatttctgtttcaatagaattcttgatacttgggaacaggcgggcatcatttctaagccactcgttacgagtgttatctgtcggtggattctctaccaagtgattatctttagaaatactgcgtaaataaattctaatagtcttgtaccaatctaggaaattagaaccggttaatttatggtcggtaatcttgaacgttacaggaatgacatccgtaacaagtaggttcttttgctcttcagtcatagtaacagacccataaaattccaaatatcaatttggaactcccaaatccaaatatgtgctgcaatatctactggaatttcagtgacagagaccaaaaaaaatgggacacaagaacctggttaataaggcgtgtagaacaccggaggattggatgagaaggggcgacgctggagagcttgaccggagaagaagctggagtcccacgcgaagacagaaaactgaatcggtgcgtgaggctcacgcgtcggtcgtctggtggccggacttcaggggatcgcctgtcggcaggtggtactgctcttggtgccggctttgatgccagatgatcacgttcaagggtgatctgaggaagcacagcagccactcactaggcagccgagaaagaaggccactgggtagcaaagaagaagatgaaaaagaattctgaggagttatgctctgataccatgtaacagttcggagaggaaaagaatttctgactaggaagaaaaataagaatcctaattaagtatatacaatccccataattaaggaataatttacttctatcctattctgtaacaatgattagtcagaatgttcccttcctagaaccaacatctattttcttaacaacttaatgcagattaagcttttattaactggaccatgaattcaagatgacaaaatctcttttctaagaactcagtttctaaagcttctttattttggcctaattgtatattgcagtcgaaatcattatatgattgaagagacctacttaactggctttcttgagaaggattaggaggatatcttgttctacaaactgcacttctctactttctttatgtcttatgttttctctattatctgaaagtcaagtaaatgtcaaaaccatgagaagatttttttatccgagtaatttttgtgatctctctacttcaggtttttttgttccagaaatctgctgtgtacaagtg

SEQ ID NO: 6486 - DNA, 2143 bp, Ricinus communis
  Intron number 16 from transcript 29745.m000372 (locus 2974 5.t000019) derived from phytozome v7.0 (chr-ID 29745; pos 139637 to 141779 reverse strand)
tgcagtaaaagtgattgccaatcttgctgctgaaggtatgctatttttgcttattaaacaccatatgagtgtgcgcaggtcaactttcatattctccatgacaatcaactcttcggtttggttcattttattattattttttcacaaagtattgcacaacttttgttgttaaatcttttttctcctcttcttgcatttttattattcagctgttacttctttacttgcctttgtttgccatggttatattctttttatcattgcgttgcacagtataaggacttatgtatactactttatgcaattccttaaatacatgaggagactcatcattctaatcactttgtgtaaaagcaaataatatgcttggatttttatcaaaaaacaaggggcaaagaaaggaggcaaagctaacttatggtcattattgattttgtttatctaattgttctacttctaagttacatagagatttgtgtttaagacaatcaaccaagattgttggcttggaagtccaactcagtctacaatttggttatcttccatcagtaaccattaccttgttatttgctatgggttatattggatgtctttatttagcaattatcagattgctaattgtagatgcatctaaaatttaatgttaagactaccctaaacaagaaagtaaagatcctgaactaaggagctagttgcattgttcatgaattaatcaccaagtcattgggatgatcagaattaaatagcttttgtcttaaaggacataggttgtggcttattaaggggaaatattctgggcttttgttaatagacttgatgcaatgcatcctatttattgttgtagagatttggaccctactgccttgaagtatagaattctctaattcaagatcatagctttgctgcatgtgacatgtcaccgatggctcttatgtaagcacattcttctaaaattattattattatttttttaaaaaaatttacttgtaggagtcttagaagttcttttagcaaacaaacacaaaatttgttaaaagttagaaacacaatagaagattataagaactagataatggaatggtttctatcacaaaggatcctaaataatgctaatacaattcttataaccaaaatgtgaacaaggataaggcacaaacaaagatgtaaccatgaaaagatctctgtataggagataacaagaatgctaaaatttggcaacacagactaaaatccacctcaaaacctcaataaggttacaaactaatggaagcggatttttttttccgggtaggctgggccaatgcttaaattgcatctgcaatctagtggccgcaaagttttggtccttaggccaggccaagaatgtataatatctttatagtaaacccattcttcaagcagcaaaattccacttaaaggggactatatcttgtagagaagtatacttcttgacgagcatgacccctttcatcaccatctcatctaacaagctaaagcctctccataaaaggaaactccaaaatggattgtagaaactaatagatctagagataaagccagatttattttaacctcatttgcctataaactgctatttccattcaattatccatctctactttccaactctgtgtacctttgtcactcactcattccatatcccttccatgtgaaaaagacccattaattttatttctccatcctttccttgtttcatccttgctttttctagaatcatattgtatattgctagtatttctttccttcgctcaaagaacccacagctctacttattttatgaaggaatttaggaagctaatctaaaatactaaccatatttgttatattcttaggattttctattttgttaagctatcattggttggattagcaaaatattttagataatcaacatctctctctgtatatttgatttctattcacttgatctatatcatttagaactattggtttaagatgctttatttgtatcaagtaaaactcttagtaaatctttttctgcaaagttgcttgcatgcacgttgaagcattaaaaacttaaggttactaaatgcatattaatttagtatttttatatctattttcagaaattaaccaagagaagattgtagaggaaggaggc

SEQ ID NO: 6487 - DNA, 2394 bp, Ricinus communis
  Intron number 12 from transcript 29670.m000148 (locus 2967 0.t000005) derived from phytozome v7.0 (chr-ID 29670; pos 37283 to 39676 reverse strand)
gataaggcaaaagatcttctgtacaattcaacaaggtttgtcttttcttatcctatgaaaattaatcgaggaagaaagtattttcttgcatattgcattcatcaatcttctacatatatatatacaagtatcaatcctatactagaaatgagttctattctaaagaggaagatagaatcctaatcaattcctattttatttacattcctattattctgtaacacttgcaaaacaaactcgtaagtagaggaatacgagttttcttaattgtccttttatgtcttttgaaattcttttcctttacctttcttaccattactttgtgggtttcctttggtaattctatgtttaatgtggttgtctttggtttaaatgcaatagaaaatactattgttgaggacgatatatattcatatacttgtttattgcagagaaaatgaagcaaaggaaagtggtatgtcacagagaaagtgtgtatctgaggggtatctaggtattagaatcatttgatttgggacctttatggagtaaacattttttatcaagaagagaatgaaattggttggtggttgactgaggacaatcatattatattaattttatgctacttctattaatttattcaaaagagaactgtttgttgtttgctggctttacctgtgcaaaaaatgggaatctgttgagtgttctcaacttctttgtcaggatccaagacaatgaatagtaaaattgacagaaattaccaattactacagtagtccaggatctatggaagttttagaagctgtcatttggaagtttgatgaggtggaatgagtctaaaaagaggcttcaagtatttcgtttgctaccaatagtacagaaggctttctccaaccaagggagaatgatgcagataaggaaaacatcaagaaaaacaaaattcaaagaatcaagagattctgaattttggtctaatatatgcaatttcaaaaaccaaagagtacttctgtaatttccagtttgctggaacaattattaaaatttatttaggagcctttgttttattttaagtctgatttagtagttttagttgctttagtattttctagttagtattagtttgtaatttttctagtttaggatttctaatctaagttgtgttaggattagtttagcctatatatacctaggcttgtaatagttgagttttcaaatttcagtttaattaaaattgcagctattttgctatttaaaaaattgtgtggttcaattcttccctaaatgtgattccgtaggaaccttttcctgggtgtgattctcttaaaccttctaagtattgactcctagaagttttcttgtctttttcttcctatttctctgtttcagatatgaattttctgtcaaatcagacatgacattcaatcttaaccctttattttttctgcaaaatcaacgtagaacaggttttctaaatctgtcctacatcattttagggttgtaatagctgagtttttagaattcagtttaataaaaattatagctatgttgctattttcaattgtgtgattcaattcttccctaggtgtgattccaaaggaaccttttcttgggtgtgattctcctaaaccttataagtattgactcttaggagtttttcttgtctttttcttttctatttctctgtttcagatctggatatctgtcaaatcaaacctgaaattcaatcttaaacttttatttttctgcaaaatcaacataggacaggttttctaaatctgtccttcatcaccactctactgccgtacccctggcatttgaattttgtatctcagtaaaattaacatttttcaaacatcaacaacaacaatttaattccatcagaatcaatcatatagatactatcgtatcatttatatgaggtttctcgatgatgccttagcggagttaatgaaatgatggcccatttgtgaggatagtctaaaggaataaggttttcattagaagaacagtccccctttttaggtagagaattgtggaacccaaagtaggatgccttcagattattgtttcattcatcgcgtatccttattctttcattttcttgttgtatctttttcaattagagatatctagaatcttaaagaaccagttttcctttagcaaattcttgatttcatgtgaacatttttatgatatatttgagtgcttgtctcatataattggaaaaaaaaggtacattactttgctttctgcaatatctgtcattaattcattgcttgatgtttaatcctttcaactttaatgttgattttatatttcataccttaaaggaaaaaaattcaaggtaggagttaatatagttctctttgcatgataggatagcgaggcaagttttaaaaaaattgagaaacc

SEQ ID NO: 6488 - DNA, 795 bp, Ricinus communis
  Intron number 12 from transcript 29863.m001059 (locus 2986 3.t000019) derived from phytozome v7.0 (chr-ID 29863; pos 144687 to 145481)
tttctttttcgtttattgcagttgcatatccacaggttagaactttatcttctatctgtaatttcaggatttatctgctgactgttatcacaatttttaccttttatttttctgatcaatatgagttatacatatacaattgtctaaatgatgtaaaatattgaactctgttgccagctttattgatttgctttaggatcagcaatcaaactcatctgattactgagatgaggtttcgaattgctaaacttaaacataaatgtgatgggtgcagtgaaaatggatttgaggaaactaaaactgaactagaatatctttattttgatgttatgtggacatcgtagatatccatattctctgtcatatttcctccaaatatttcgtaatgtgcctggttctgctggtagaagcatcagattccctaagtttatgaacattttagacttccagattctgtaatttgtaagtggaaaaatatttgttattccctcagaatggggaagaagggaaataacagggcatgggatgataccttggagttttatgtggcttgattttcttttttttgggtgtatttctgggaagtctacacatgcatagacatggcttatatcacttctgctattaggtatatgagattgctaggaagtttcatgtgatagccttgtcatttttgtttggccctctttaagatgattgttccagcttctttagttgaaaaaggtgtcttaaatgcaaaagttatttagattaggattgtggtaccatttgattgatcatcttttgatatattag

SEQ ID NO: 6489 - DNA, 1695 bp, Ricinus communis
  Intron number 3 from transcript 29848.m004617 (locus 29848 .t000173) derived from phytozome v7.0 (chr-ID 29848; pos 9 86210 to 987904)
gagggtgaaatcatcatcaagtaattagttaatgtctgtcttcccttttataattgtaaaagaagttgtatggaatttgcttaaataagtagttgtagggtgaaagctgtgaagaaatgcattaattagagtgaaatatatattgttaaattaagatctttttgtgatatagaatgtaatgtaatataagtagcttaatttctttattgcctttgtttataatcctccttttgtcaattgaatagaagggggaaagttgacatgaaatccctaccttctattatatgtacaatcactccatttccatcattaccattttctctataattggaaaatttgacatattttaaattattatatattatattatttgaatcaaacattcgaatcttaaaatatttaattttttttaacttttatatttactttttctttattgacatttgaagaatataataacaataataatagtgtcatttatttcaattagtgtagttataaaacaaattttgccaatgggagttgggaatctaactttgataccaaataatttttaaaatttaataattacatttatttattttgatactggttgaactcgaattttaatttatttattaaacattaacttttagtcattcaatttaatattataatatttgatgagtcgctttgaaatctaaagcaacaattaatattatcattcagaaaaaggtgtatctacaaaagtgaaaaagccttagactaattttactaggttttctgtttttagcttttctgagttgtgtatatatataatcaatcttttgtatcaaatacaaagaaaacaactcatttctgcactatatttttcttcatctaatgatgattatttaaaatattaagatataagatttcatatttaaccacaattagattagtgaaccagtaataggttacaagatggtaagaatacttctccctattatcccactttcatcgaaacataattcagataaaatgtttattctatatattcaaatattaacatcttaagattttctttaatggcgatgaaagtttttcaagagttttataataaagtttattaaaaaaaatattaaaagtagaaactttgcaattttctcaattcactaaaattaaaatttacctcaataattctattaagataaaaaaagaagatttaatatcaataagcagggtaattgatagtgaggagtagctttagaacgatgcttagtttcttgtttagagtagccaagccctgattttgtgcagacatattagaattagataaggaaagacaaaagagaagggacaacaagtgtcttttctactaatacaagaccataagcaaatagactaaccattcattaaaagaaaagaaagtagcagaattgtatgattaacttattgtgcacacgagagagaagaataagtccaagcaagttctgtttgttcagacttcactttcatgcacacgttactttaaatttcagagtcaagatgacactcctaagtcaattccatactcgagattttaagtttttttatttatttcgtggcttcattttgttgctcgcatttgcatcagatacgaatcttggatgatttatttattctctacttggggtttgtctttgtctccataaatttgtagcttgcctcgtccatcactgtgtaaatttccttgct

SEQ ID NO: 6490 - DNA, 3423 bp, Ricinus communis
  Intron number 3 from transcript 29757.m000710 (locus 29757 .t000005) derived from phytozome v7.0 (chr-ID 29757; pos 5 0620 to 54042 reverse strand)
aagctttaagactttttagtctgaaagtgctgaagaaagaagaaaagaaattgaggtctcattggctgcacaagctaggttgcttgtgcagacctatcatcacagacctcagggtaaaaaagagcatcctttcctgcaaagcaggaaatgtcacttcaacccataccctattcagaaagagtcgttaggcaaccattaggatagaacacaaataagcaaatcatgtatatatatcattcatctcactataaaagaacttagaatccttaattttaattcaaccttcttcattgttcttttcatatggtatcagagcctcgtttccaccagtaatcattatttacccatttttttcagccaagtctcaaaatgaaaaattgatcaatatcattcttaaaggcaactcaaactatttcgaatggtccaaaactgtgtatattgccctcagtggcagaaaaaggttgggatttatcactgggataaagcaacggccaaaaccagagaggccggaagctcccacctaagaagaaattgacagaatagaggaatggcaggcatctgaccatttggtcatgtcttagctcacaaatattatggagccccaaatttcccatttctgcatcctaatggaatcatcaaaatcaatttggaaaaaaagcctttacggccaccaacataattttgcatatatattcagactcaaacaagagttagctcaaaccactaagggaacaaaaagtttctcgcaatatgcaacagaaatactcacacggtgggaagagttgcagaactatattccgctatcaatcgacccactagaaattcaaaaaggaacgaacaagatcttgtgtacacttaccttggaggactagactcaagctatgaaagcctaagatcacagatcctcctcacgtctgagcttcctcgaatagacgaagtaatcgcaagcgttcagcgcgaagaaacgtggaggaacaccatgagcgcctcctctcccccgcaactcacggaaaatcacgcctacaacgctcgacgcaaaggcgctcgacagcgcggagggccaagcatcgcgcggtgtgactactgccaaaggcagggtcacttacgcaaggtctgctggcacatacacccgcacttgaggccatcgtgggggtgggacggagctgtaacagtaaggagaggaggaagaggagaaaggaaagggggcggcggcatgagagaaggtttttggacaaagggaaatgtgggagaaagaggagaagtagggttaggaatgggtgtgtatgccggggcgggtgtctttaatcaaacccgacccaaacccggcctaccactcaacccgacctgacaacccttcctcacttggacttggcccatccaggcttcggcccagtaagtccttcagcccaacagtctctatgggctcctcaagtccaccaaaatcagcccgcccactcgtcaatccagacctcctgtaaaatttagagactatgtgtctcatacggtaacatatccaattcataagttcatttcttataatgtcttatctaacaaatatcgtaactgcctttgtcagatctcaaaccacattgaacccacaaatttctacgaagccaacactgactctaaatggtgtaaggctatggaagaagaacttcgtgccttagagaaaaatgatacatggagtattgttcctcttccacaaaataaaaaactcgtgggatgcaaatggatatacaagatcaagtacaatagtaatggaactattgagagatacaaggccagacttgtagcccgaggcttcattcaaacttatagagttgactatcaagagacatttgctccagtggccaaaatgaatacgtcaaaattcttctctcaacagcaatcaatcagggctggaatctattttaaatggatgttaagaacgccttcctacaaggtaatttagaagagaagtttacatgagactacctcctggttacaagcaacctcagacacttccatggtatgtaaactaaagaaggctatctatggcctaaaacaatccccgagagcatggtatgccaaactcagccgttttttattaaatattaatttcagtaaatgtgaatctgactcatctatgttcgttaaaaatactcttaatcacactattgttatcttagtgtatgttgatgatattataataatagggaatgatgatctaggaatagagaatgtcaaacaaagtctaaaacgagagttcgacatcaaagatcttggtcaactgtcatatttcctaggcatagaaatggcaaaatccaactagggcttatttatatctcaaaggaaatataccctcaacctcttgaaagaaactgaaaaaataggtgccaaacctaccatcacccctatggaaaccaaagttaaacttaacttagaagatggagaacccttaaccaacataaggcactatcagcgcttggtagggaaattgatttatcttactgttactagacctgacatttcatttgcagttagtgtgctaagccagtttatgcatgctcctcgcaccagtcacctagaagctatagatcgaatcctcaaatatctcaagagaactcccggataaggaatctggatgaagaagaacaatactactaacattgttggtttttctgatgcagattgggctggaagttgtgacaggaagtcaaccaccggttactgtgtctttgtagaaggaaacttggtgacttggaaaagtaaaaaacaaagtgtagtggccagatcaagcgctgaagctgaatatcgtgcaatggcttccactgcaagtgaactcatttggatcaaataagtcctcaaagatatgaaaggtgaaagtatagaaccaatgcaaatgcattacgataatcaagctgctcgacacatcgcatcaaatccagtgtttcacgaacgaaccaaacacattgaagttgattgtcacttcatcagattgagaccccctacatcagaagtcaagaccaactggcagacatattcacaaaggcccttgataggcagaatcatcattcgatcctcagcaagatgggttccataaacttacttaaacccaccttgagggggagtattgaagaaagaagaaaagaaactgaggtctcagaggctgcacaagctaggttgcttgtggagacctatcattccagaccttagggtaaaaagaagcatcatttcctgcaaagcaagaaaggtcacttcaacccataccctattcagaaagagtcgttaagcaaccattaggatagaacacaaataagcaaatcatgtatatatgtcatttatctcactataaaagaactcagaatccttaattttaattcaaccttcttcattgttcttttcacagaaagcctttaaaagtgtccatcctgaggaagattt

SEQ ID NO: 6491 - DNA, 1836 bp, Ricinus communis
  Intron number 1 from transcript 30068.m002602 (locus 30068 .t000092) derived from phytozome v7.0 (chr-ID 30068; pos 5 92636 to 594471 reverse strand)
gctagcttcttcttgggtgttcttgttgtcaacaggtaatgtttcttaccttcacatctttctccccattgtgaaatgctcaagatcttgccttgggagtgatcatcttgtcagatttgcacttcctgttagtaaagatttaaaagctttaacttttattttagtactctttgctgctattgttccctgtatgggatggataattttggatgctctctcacaaaatcatttgcagaatattaagtaaaaagattttggttttagctcatggatttaagctctttttcttggaagccatgtggaaaattgtgagtttcacctttatgtgtgtagaattaagttattgatgggctgttggggctacacctgtgatcttgttaccaggatgaatggattgatttgcatgctgttagaatctattactagaattagagaaatgatgagtttattgatctattagctctttactagcaaatttggtagattaatttttggtctggacaggaatgatattcgcaggtctcactggttgcattcctcaacatgaagaatttgtttaatttatatttagaaggcgaagttatacgttgttacaaagtttataggcttcccggggcttttcaaggggtcttgtaaactctaggctcgtggtttccgaaaagaaggtcacttagtagtgaattgagtaatgcagtagctggaaaggttcgtttggagattaatggtggagaaatcttagaaaacacctcctgcatctctaatgcctttgatatattttaatcaattaacacctgtagaaaattgggttccaactgcgtcttgcatgattagtgctaatagatttttataaattgttcatagaagccactatcacttgcaaggacgagttctacatttaaatggtttaggacttcaccaggtcttctggtaataattattaggtaagtccacttcttagagaaatcgacctgatattacgcagggcttatatattggccacatctcagttccgcaagtattggttgttaaatttctcaaattctcttgacgttaagctccttctgagtgttgaagatcataaattgccttctgaaatcaagttggtatcaaatgacagtaacctttttctctttgttgctcgtgtgacattggacacatggtctatttttaatcaacatggaaaaataatgattcttatcaccttagaaaatattatttcaaccatcaaaattatttgtggctaatcataatattataatggttgttattgatggtaatgggcattatcagcattatacatctaaatagctttgctgtttctcagagtatatatcgattgcatggatgaggagcagtggttaagctttaaaagtgtatccatctttttagtgaaaggacgtaaaagtttattcttcctgggataaaatgagcaaaatgattgtgcttccaatgaactgatgaaaactgttgtttatttctggctcttcttcaacatataatatttgggagcacacacatatatgaaggaaaaataaaacacgaggaagcagcaacttgtagctttgattggtgttttgcatcgcttgcacatttccttgcttgtgaactggtgctgtttttccctgaccaaaagacaacctccttctgaatgctgatctcaacctttcttttggaactgataaactcaaccagcctaatttctttgttaacccagtttcacatttcattgaactactttgctcatctttgttcgtattgtactacactagtgggctgaatgtctaatgtgtattatatctgttaggttttggaccattccagatccagccaaagtag

SEQ ID NO: 6492 - DNA, 2665 bp, Ricinus communis
  Intron number 1 from transcript 30190.m011245 (locus 30190 .t000481) derived from phytozome v7.0 (chr-ID 30190; pos 2 774317 to 2776981 reverse strand)
aggttaattcaggctgcgaaaggtctctcttgcaggtacatctcatccattgtgttacgttcacgttttttctcatcttcacttctcgaactctttcatggacagttctcttatgcctaactagaagttctaattcgggagttgccaacagtaataaaatgtggctttattatgttgcgtttatgatttccttctttatgtagtaacttatggaatacagaatgcaaatagattcttaactggtaaacaaacattacaagcatttctcatatttcaaagaaagaaataaatcaacattaactgattttatttacctttgtttttcccgttccacacactcctttaagtgatttgttttgttgtgtaggtcaataaatacttgcattttaaattatagataaaaaacaaagacatgagaaagtaaataaaatattttaaacctaatgaacgccttttagttcagaatactttaaatgttagacactattaattttgttagatttgtatcttttgtagaaactatatattattatagtaaaagggggagcataagcatggagtatctaaaggactagatttagaagacatatacactaatgcttcaaaaattttgggaggacccttgcctctgtccggatatggctcaaccactgactatatctctacgctttatatctgcctgaggttcttgcattttgtgtggggtactaacctactactaaatgccatttccataggttagttgtcatgattcgcaccattttgttctctattggttagatttgttggcaaaggctcactgtcgtcgtttacttctttagaatgatgtgggagctaggtaagatagtaaagcctgctttcttttccctatgggaagggtgaaaagcaccagttgagttattcttatttaggcttctcatcttcgttatttaaatcaacatccggcagaaatctcgttatctttttcaattgtgactattttttgctatacctataattggaaacctatattagtattactaggtcttaataatagatcatgcatcatattagaatctcagatcaactgatttgaagggttatattgtgttgtgctgtgtgaaagtaattgccactcctttatgatctcaacaggtatatgacttaacatatcaaagtttacagtgtgttatgcccttggtcttttttatagccgtttgttacgatactgcttaatttctagaagaacattggttgagatatggctaccaatggagatgtgaacaagctgtttcaattttgtattttaggagattgaatcaaattgaccatgaaattggtttttatttaaatttagttttgaatatattgaacacttctttttttcatatgatgtaaggcaaaaatattgcaattcttttatttccttttggtataaatttatagtttttattttattttatttatattaaatgtgtttcttgcaacaatcaaattaatatggttggctttgtttggtttgtcgagttgtgctaacatcaaactcgattctgctcaatttagttttagtccttacgtagtctggttcatctgtggtaattttcctttgttttattcagtttagggttaattccaaataaaagtcttaatgcttttaaaatcatttttcactatttttccacccttatcatctcgatctaattcgccttctttttctggtagctttaatatgtttgaccttctactgaatttgtttgtctacttttcagttgctcacagcttattttcatcagcgcagtttccaccttgttacaaatgcattcatttcctatcaatgtacacctacacatctacagcatcctcatctttgtgcactagttttatgggcatgttgtttcatgaccacctaaaacttgctgctgtgccatttataattgcagtagaacctccttggcaacttcctgccaggtttctcagtttcatccctcctgttttagtcctatggttgacatcattctcattcttactttcacttcgtatagtatagtatagcctagttataataaatgtgcgctttacaagatattttgcatcgtctatattaactccacttgcttaaatcccctgactcctctatgactccagcgttcatgctaaatcaagcttatcaacaagcaactgcatcagggaatctctttgttatgctttttgatggttcacaactaaagcaaaagatacaggcttaaggctgatccatagcgtaaacctataaccatagaaaattctttgtatccttcaattgcatgcaaactattaaggggttgtttggcatttctaacttaaatttttatcttattttattttattagttttgaaaattgcttttgccaaaggcaggtaaatgatgtttttactaaaagcaggtttgagaaaaacagtttataaaaaaaaaaaaaaatattgaatcaaaaaattctaaacctgctcttcaacactcaataataatcccaaacacaatctaacaactgctttgtgcatatttcttaaaacgtctatgcatgtgagaactagatgagtaaattttagttagtgaaaagaaatccatacagaagttattgtcacaatacttgttctcttatgaaaccatttaaacttgctacagaaccatcaaaagatccatccgtcc

SEQ ID NO: 6493 - DNA, 594 bp, Ricinus communis
  Intron number 6 from transcript 28829.m000073 (locus 28829 .t000005) derived from phytozome v7.0 (chr-ID 28829; pos 2 3121 to 23714 reverse strand)
gacttggtgcccaggtagaaactgtatcatcttcttaataatatataatatctcatcaattctgtggattatatctgcagtgtactatctagtccgagcctcatatgccttttgttgtttcagccatgcaacttaaagagttgcacttatatgactaaaagtggaatcattccttatctagataactcactcctacttcaatgtaatagcaatttgattaataatttttatacagcttatattattgcactagattaggttatcttcattggtagtttggtcaatttacatgtaaattttacgtagaagacaaggcattccagccagctaggaacatgttctttgtggatcttgtgttttgttctttggagtttggattgaacatctatgattaggacagtaatgtcttatgcaaccatgcataagatgttttgttcttgttatgaatgcttgtggtgttcttacacattctcgtcttccttcaatttttcagtacagcatgcatatcgtttttcgtgtttgcagtctaaactgaggcagctaaacgtgtgacctaatcttttgcagatactacgagatctgggtgtccatact

SEQ ID NO: 6494 - DNA, 2044 bp, Ricinus communis
  Intron number 9 from transcript 29638.m000503 (locus 29638 .t000002) derived from phytozome v7.0 (chr-ID 29638; pos 2 0256 to 22299 reverse strand)
cagcaaccatactgcaggcatttcagatatccctggttagaagctttttctttttccttgtgctgtttgatctttgttatctaatgataaatctttcgcattacaatcactttgatgtttcattaagaactaaaacttgtacagaaatcgaccaaaatgcgaaggaatgcatggattttgttggctgctttattgattttgcttttctttacctgctttcattggactaatttgttatttcgtggtcaatttaatgacttatccactaaataaaataggatattaagatttttccttactttggtgacttggtgaaaatactaaccgcatgttggtttatggaggtttgttttctatatgtagtcattctaagcaaatataaagacatagggattccaaattttagaggtgggctcgtagcattctgtcctcctatgaggacaactataaacatcagaagtaaaaccacagtatgtgacaatctaaaaaggagaaaatgaaaggaatccaaattttagaggtgggctatagcattctgtgcccctttgaggacagctataaacctcagaagtaaaatcacagtttataggaatgtgaaaaggagaaaacaaaaggaacaaaagaatgacagccacagaatcagaactttagaagccataggagatatatctttaaatggaacggaggtcaattgccccttgcattattgatcaatgtccaaaattgatccagtattttaaatttggaccaattgaatcaagttttttatttttcagccattaagcccaattcctgacggcaattatataggagatttctgtgcccttgagatcaagtaaatcagaaatacaaaattaagtacacaaaattgattggaaaaaggatagtgaaggtgataatattgcatccattacacctacattagtcactgaataatacccacaattcatcatcttcagcaaagaagtttggagattttctcaagtaggcaaataccctcctttaggcccatccctaattttctcctccttgttcgagcgaaaaaattgtaagtcaatagcataagggttaacttcaccctttttttcttcttaaattttcaaaatttaatctaccaagtatcacacttctataaatgcaccttttagcattgctatgaatggaaaacttcgatattattcagtggaggctgaacatgacttatgaaaggtggttgttaatttatttatagtagtattataccatggagttggttttccttttacttttgtgattgaatttactacacttggtgttacgagaaaagggctaaatcacctaagaatccttaatttattccagattgctagatgatttacaaatatagccaattacaggcagatgttaattgtgaggtacatttcacaccttctcagcagccattcggtctcaattgcaactattaatttatgatcaggctactctgatctatttctgaatccaagtatatgagtataaaatctgacaaaaacttttttagtgattaattttttcttagtatttcctatattctggtatatctctatttttagttaagaatagaaaagggaaatcatcagtgctcatggatcaactttgtatcatctatttcattaggaaaggaggaaaatagttgatcaattgatttttacttgtggaaaacaggcataagagaactgaaactacacatgcatacaggtgaagattaaattagacaacctaataacacgatgtgttgatggtggagagaatcaacctctctattgctcttcttttcttccttttctttttctagaaacaaggttttaaaagaatcagctgctatccctttaagttgtttgtgcatccatggcatgtctatgcttataagtactgaacatctctgcttttgacctcacttggattttgggcttgtgggtgcatgaacctcagatggtttttgtttaataatcctaacaatgtaatcaactactttgctgtttgaatttcagtgctggactgcagcttctttgctaaagcacaaaat

SEQ ID NO: 6495 - DNA, 3524 bp, Ricinus communis
  Intron number 9 from transcript 28515.m000319 (locus 28515 .t000013) derived from phytozome v7.0 (chr-ID 28515; pos 1 65548 to 169071)
attcaataatagttgacgtttgccaagtgagtatcacgttgatactttaaactttgtcttcaaaacttgacttttctaacgaattggaatttggaagtcgcaaaatacagtgatcatccatgatgagttgctgtgttttggcttctcagcgttgtgtgaaaattgttcacctctatctctccctattctttggtcagacgtttagtatatttgatttcatagaagttgagtaggaacctttttataattgagtgacattgatgacattattagaatttactttacagctacaaacaacattattagaatttaccttatagctacaggcatacttcactgaattcttttggtgttttcagtcaagaaggtattacatagtttgcaacttagcctaatttaattagagaatcagtatggtctctaaacatgtcatatcctttgctgttaaagattaatatgaggtcactttaaaagctaaaagttaaggcatattgattcttttatgtggatcatagatccgagttttgatgctactgtgtaatatgctttcgcttgttagaattcagaagtttgggataaagacaactttgcctgttgcctggtccagtgatggagcattggaacaaggcaaatgtttattccatataataagaagttagtggcatctaaaggggagagcactttgtcacaaggttgaattcagcagcagtgcacctaacttctaatacatgtgagctcttttaaaccaagttgttagtcaagtaattcagttctcacatcaacaacctgagtgactgtaatgaaggaggaacttctagcaacaccagaaaaagtgcattataattgcatcattatcatgtgatggatatttattggctacatgacttgcaacctttgcaccatttttaccacgagctagaaattattttgttcgtgtttgatggtggagccttatttcttttgggagggcatttggtgtgatcaagatcttccttgtgctttccatcattatagaatttcaactttgaaccaagctcctatcttttaggtttttgttccatggaaataatacattctcctaggacttccgttttgttgaaaactcccattggaagagaaatgcagaactatttttgctgtttattctccaggactcttttgttggcgcctagcacataggaggagtctttggattactcttgttcaattttcatgcattacatttcttctttcatatgccctcgtgatctgtactctttcatagttaatgaaattttgggaaagctaggatgctacatcaggtaaaaggttttcttgtccttcataaggtaattattaaatgattgtcccaattcacgagacatattgtgatttatgtgttcaaatatagtgaaacttgttctccccacattctgcattatgagaaccctggggactttcaaaattgtctctttgtaggagagttgagcatgcctagattcccttgaggctttttgtttgtttgattagaaatggagggtttggtggtaggttgaagctaaggcttgctggacttgtgctttgtttgtagagtcgatgattattttgataaggatgcatgcatctttagctactaattagttattttgttgtgggatgaattgctaatttggattctttgttagcttatctttcaagagctttcaaattggagcattcaacaataattcatggcattactcttctattttatgtcttttcatgctttgtttttgtttttcattattatctcatatttaacatctcacaacatccttgtccctttttgcttttactgtgtggagtatttttttcatcttcactaaaatccagttttcttgataaaatttctttatattcataaaaatggtttcttcgtggagcttgcggctgaaaacagttggagtgtgtttactaatagaaaactatgttagttttctagaaaatttcaagtgaaaacagaaaatagaaatttgtgttgtgctatttttctaaaatgaaaataaaaaacagtttttcatgttttcaaaatcataactacactttggaaaacaagcttaacatgttttatgtgtttttctttatatgagaagtcatttgttttcaaatgaaaccaatgagttttcactttatttttttccaagtttatagttagggcatgtttacttatagataatttttctcattttcattttctaatttttaaggaaaatcatttcatagagaatttgtaatatttaggaaaaagaactttttattttctatttaggtaatattttaagtataaagggtatgcttggaataaataaagtgaaaacttcttatttttatttgaaaacaagtaacttcttatatgaagaaaaacatagaaaacatgttaaacttgtttttaaaagtttagttataatttgaaaagataaagaattgttttctattttcatttgaaattttttctagaaaactaacatagttttttataagtaaataggcccttaaaattttacccaaatagaaaataaaaagtttttatatagtagcaagtaaacatgtttacaaattttctatgaaaatgagaagttttcattttccttaaaaattggaaaatgaaaatagaaaaagttctctacaagtaaacaagccctcagtttcttacaaatttcagctgattctttctttcgttctttatatgtggttcttcatttcaatccaagaattttggggactattttatcttcttttctatgacgcatgatgccctttaaaaatttgggcatatcacaaaacaccctcttggtataagagtccttgattgttaaagtgagttgaacggttcttgtctgaagtgtatataattttaacaaaaggataaaagtgctgaggaccattgaacccaacttcagaaaagtgagaatccaagtgtatgcctatccaaaggtcaagagcacttttgtattacccaaatcaagcatacctgaaatgttttaaataaaaatgtcttgtataatgaacttcaataattaattgttttgtattttatgtgctctctttgtcaaagctttaaatttttgctactctatgaggagtccacatttatgtccactgaaactgctcttgaattaactataatagacggatcaccaatagattgacagtttctgggtttttaagaaggcttttaataagcatagtcaggtacaagtggcaagtattttcattttgttttatttcactcttctttggtgaagggttctctgatggactcccgacccttgtctccaacaagattcttaaaatttggtgaatttgttttaacccaaacagtttgcccttgttaatttggtatgcatttccatagccatggagaatatcataagtggtttatatatatctgtatctcaattatttgcctgcataccagcatctgcatgatttctgaaccatttccataaccttctctttgctctttgacagggtcaatacaagtcaactttggtttgcccagtgtg

SEQ ID NO: 6496 - DNA, 1688 bp, Ricinus communis
  Intron number 3 from transcript 29877.m000477 (locus 29877 .t000015) derived from phytozome v7.0 (chr-ID 29877; pos 1 38428 to 140115 reverse strand)
ttacacttggcaatactccaccaagacaaacaaaggtaggatgcttctatgaatttgtactcttttttttaagtccctttatgcagattaaggttttgttttcattatttatgtgtttggaaaataagttttcgatactgataggaaaacatgacaacctttaatcaataaaatgatctgcaatagagcctattataggttgtttttcaccatcttgcaagataattacactttgaaacttgctgaataatgcttccaggagtaaatgagttctggagtgcttctttgttgtcagttgagaatcaggaaacaaactctttaatctcagtataaagattgagatggtcgagagcctagaaatgtgtatcttagaccagcagagtagttgaataggatttagtagctagtctacaactttccagaaatgcagtactatagtgggtagaatggaggaaaaggtcccatttcagagtcagcatcatgcacagccataattccgtcacctgtgtttcatattttctaattgctagatcatttagtgcttcttgctccatgaagaatgaaatttgatggaaaatgcaaaaatcatagaaattagtacatggcagataagagtttaagaaatctttatatgatccaacagggattggcctgccgcctgaagtatcaataatttaacatatgttacctatcagttcacttttgctgatgtttggaggtagggctgtacaataaaacccacaaactgcccaaaccgtaccattccaactcaaaattatggtttgaaaatatttttagttggtttcagtttcaaatatttgaaaactgacttctgagtgggtgtgccatttgagagtattaataaccaaaccaaatcaaaccaacctgagattaatatgtgcaaatgtatatacataataaatttaaactaattggcctaacatcttacatatataaattataaaatttatttcttttattaggctcttgatttctttaatatgtttactctgcttgatttaattataaaatgattatagtggaaaatagctttagattttactattcacaatagtcttttgaataaatgtcaaataagaataaaagtgattaaaaaactacaccatttatcttttggatgcttaagattctagttaaattaaggttctagaatgaatgtttatttaggatcaataatttcttagaatcaaacaaattgttaatatatggtctaatgaattttataattgaggtatacaagtaaacaaaatttaaatattaatttaatttcacaaactgaaaagtttggtttggttaacatatcgccctgaaccacccaaaccaactcatgtttttgcaggtggttgggcttcagacccccagcctcaagtttcgagtcaaatgatgatgcattgacaatagcttcttttcttttcttttattttctttctacctttcagatattgcggatggtatctaaagaattagtcttcacttaattttctattgagctgatgatgaataaaatattgcagttgtataaacatcattgaattgccttgctcttccatttcaaccatatcaatatagtgaaacctagtttttttttctttccttagaattcacaatttttgcctctcacaaatgacctatatttgtcaggttgtatcaactggacctaatccaga

SEQ ID NO: 6497 - DNA, 5746 bp, Ricinus communis
  Intron number 8 from transcript 29854.m001095 (locus 29854 .t000006) derived from phytozome v7.0 (chr-ID 29854; pos 1 87844 to 193589 reverse strand)
aaatccatacctgtgagtatctttcagtacatatcttcatatttttcagcaacttaacttcttcattgacactttatgcaagattcacaagggcgtaattttgtaaaacaaccctctaaagacctgtataagagcatcaaataggaaactgtgcttgcccttttcgatattaggatgagagctagagaaacataagaaaaatacaaagaaaaagacccaggaactctcaccagctgtcactacgttttcgttaacagaaaactgcattttatagcagcacattacaaagtagtcctaaccaaatactgttggaaatagtaactcaactggaagtctagttctattctaaggctgcaaatctaatctaaatttttggaatttgctagctgtaaattagcttagattatggaattagtcaatatataaagaacagaaaaataactgtaattatgcctttgtttgtatgtttgatttattttctttactgacccttctattacgtatttatataggtattatatattagtaatatttagtagtgaatattttctctagtttttatggtattagagctggtatgattcataagacacacttaattgtttttaccctccttcaatatgtcagaaatttcatctgattccacttcttttactgtgctactaaaaaattttacaactaatacattcaactttgattttcactctatccaaatcacaaatattcaattgaatagaaataattttttgcgtaagtcttaatctgtccagatatatatttggggacgtggaaaaaattagttatttgacaagagaatagactaccccaggaggattcctcatatgatgtttgggatgctgaaactccatggtcataacatggcttgtaaatttcatggaggaagacatcagctcaacctatatgtgttattccacagctaaagagctttgggataatattaatcagatgtaaactgatatggaaaatgagtcccaaatatatgaattaacaattaaacctagtgaatttcgtcaaggagaggacaatgttaccaagcacttcaattcattaaagcggttatggctagatctagatttactcaatgattaagggtggaactagaagactgcaaccacaacaaaaaaatggtagaagaccatcagatctataaatttcttgcaagattaaagtttgagtttgatgaagtaaggggcagaattattggtcaacaacctcttcccttattggtgaggtctttgctaaggttaaaagggaagaaagtcatagaaatgttatgcttgaaaaaaaaaaaaagaaactaccatatttatcgagaattctttgattccagttagtaagagggattttgaactaagaaatagattctagaagctaaaaaagggtatctaagaaactactaaatcgggaaggatgattggcagatagaataattaacggtctctactactttgatgaagatttatttaggaataaactagttcaagccttgagtagtattagttcaacctgtgttaatgaacagattatgctttagcatcaaagattaggacatcctagttttccatatcttaaatatttatttccaaatttgtttaaaaacttaaattgcttcttatttcagtttgaaagttgtcatttgtctaaaagtcatcatactacttatttatcaaaactataccgtgtattaaaacctttttatcttattcatagtgatgtttgggggccttcgaaagtcaccatcatgtctggaaaaaaatgatttgtcacttttatagatgatcacattcggttgtgttggatttatttgatgactgaacaatctgaagtgagaagtttatttcaagatttttacatgactaagaactaatttcaaacaaaaattagtattcttcgctcaaacaatggaattgaatatttcaataaatatttgagaaatttcttgaaagaaaatggtattttacaccaatctacttgtcgtgataccccttaataaaatgggattgcagaaagaaaaaaaataaacatctccttgaagtggcttgtacgataatgtcttctatgcacattccaaaatacttatggggagatgcgattttgacatcatcttatttgattaatagaatacctacccgtattttgaaatatgtcatacctctagattatttcaaagatatatttcctgaatgtataatttattctgacttatcattaaaagtttttggatgcactattttcgattgaaacttgatcctagagcagaaaagtgtgtttttataggttatgccccaactaagaaggaatacaagtgttataatccccatacaaaaaagatctttgtcagtatagatgtcatttttcttgaaaatcaacctttttttgacaaaaattatcttcaggggggagaaaaataaagaacaaaagttttgggaaatttcttacttgttaccaaatcctattatctttgatctttttgctattgaaaactaaactcaggaactcaatattcaaacttttgaaaacaaggatgatcttcaaaatgcaccacaattagatgggtcataacaagtggagaaatactacagaaagagaaagtaaatcctgaacatgagctaatggtttattcttgaaaaaagattcagcaaaaaggcaaagacctgccaattattatggctgaaaaccaatcaaaatcttagaatgaaggtccttcaaatgattcaggttattttgatcataatttcatttcttgttcacctcttttagatcttgatattcctatagccattaggaaaggaacttgaacctgcacctaacatcttattgccaagtatttatcttaccatagactttccaacaattatagagcacctatttctaatgtgtctaacttgtttgttccaagaaccattaaggaagctattagtgacccaaattggaagtttgcgattatggaagagataaatactttaagaaggaatggtactggagagatagtcaacttactaagagataaaaagattgttgggtacaaatgagtctttatagtaaaaagcaatgctgatgatagtatagaaagatataaggttagacttattgcagaaaggtttacacaaaactttagaattgaatatcaaaaaatctttgctcttatggccaaactaaactcagttcgagttttattatccttggcaatgaactataactgatacaacaattagatgtaaaaaatgcattcctaaataggacttggaagaggaagtttacatgagttcacctccaggtttcgagaaagagattggtgaaaataaagtctataggttgtagaaatcctgtacgatcttaaacaatctctaagagcttggtttgagcattttaggaaggctcttaaaagccatagttattgacaaagtcaagcagatcatactatattctataggcattccaagcaagggaaaatagctatcttaattgtttatgtggatgatataattttaacaggtgatgactatatcgagttagaaagattgaagaagggacttgctaaggactttgaagttaaagacttggaaacattgaaatactttattggcatggagtttgcaaagtctaaggaaggtatttttattactcaacccaagtacatacttgacttacttaatgctactgaaactctagtagaactctatctgaacttgcagcatgctaaagctaaagatgtgattaatgtagaaaaatttcaaaggcttgttggaagactaatttatcatactcgtcctgatatagtagttgctataaattgagttagttaattcatgtattcaccaggacaagagcattctgaagtagtatataggatcctaagatatcttaaaggttcacatgttaaaggtctattttttagaaaacataggcattttttttttaagtttgtactaatgcagactaggcgggagtgcaattggccaaaaatctaaatcaggttattgtactttccttggagggaatttagttacatggcgaagtaagaaacaaaacatggttgctagaagtagtgctgaaagtgagtttagagtagttgcccacggaatttgtgaagttttgtggattaaatggctactagaagacttaaaaatttaatgcgatctactaatgaagttgtattatgacaacaaggctgccattgcaatttgctcacaatcttgttctccatgatcgaacgaaacatgtggaggttgacaaacattttatcaagaaaaataaaaaaaggacatatatgtatgctactaaccactcagcccatagcagagcacctacaaaagggatgcacaaacgtcaatttgatcacttaactagcaagctggctatagaagatattacaagccagcttgagggagagtactggaaatagtaactcaattggaaatctagttctattctaaggctggaaatctgatcaaaaccttagagatttgctagctgtaaattagcttagattatgaaattagtcaatatatatagaataggaaaatagttgtaattatgctttagtttgtatatttgatttattttctttactgatacttgtattatctatttatataggtgttatatatcagtaatatttagccgtgagaaaacattatttttcaatattctctctagttttcaaatacgcaaacatgtgatttacagaaagtaactttccgccattttcactaaacactctcttgaagctaaatccatcactacaacaagaaagatgtcattacatcaaaactcaaaacacctaaactcaaagtctgactacatcgacagttacctactgtcttaaaataatcatcttaaaaatgctttaaagcattctgaagataaatccactgactagctggcttgctactaagatatgcttttattcgagcaactatagatggtgaactgaagttgcatggtctttattgtttttaccccaattattttcttattactagcaataaatagcgtatgacacttgctttgatacactttcttctttttggttttctacatgtattcagacctttgttgggaggattatcctagcttcgttatattcaactgtgtgatctagaccaagagcaagcttagttgagtttgtgaaaatattagtatttagtttttataatcccatttctcttttctgagattctgcgtgcaacaactttgacaaggaatcttctttctgtaccaacttctctgttttcatgatgactgtggatgtaattaccgagacatatatttactaattatatctactggagcataggctgaacacatcagttcttagcactagcacttagtgctgataggtttgccatctttatatctattcgaatttaaaatattacttcattgttatagttgttgaacagaattgggatgcttatagatttttgtacaaattaagcttgacgtatgcaaatgataagaaaggacattaaatatgattgatgtttgctattagatcatataataggccatgggagatgtcaaggttgtttactcctgatgtaagataaacattgtaagcagaacggaaacatgaatctattggttaatccgtggacttgtgatgcatcttattattgatttgtcctttctgcattatctaatgagtatgtaccagttctgcctatgtttattcttgttgcaagtacttataaagggatgttgtgttttaggttgctacagc

SEQ ID NO: 6498 - DNA, 1288 bp, Ricinus communis
  Intron number 1 from transcript 29900.m001597 (locus 29900 .t000059) derived from phytozome v7.0 (chr-ID 29900; pos 3 68432 to 369719 reverse strand)
tattgttatctctttaatttgcacagctgtccagcttcataaacaatgaatctctttatcttctttctttctttttccctccatttatattttgctatccatattattataaaaaaaagcatcaactacctatacaaattaaggtttaaatataatttatgtctgaaatttattttaatatatgagctgattatatatttttattatattactctttttaatgttaattgaatgattaaatttattgttaagtattatagtcgtttaaaattaattttattatcaaattaaaatagaatgttatttttaatacaagtcaattttagtgtttaattaaaacaataaatttaatatttttttactttaatttttatttttaatacaatttaattcaagtaaatataaatattttaaaattatttatattaaattattatataaaataaaaatctctagttaaaaaatattaatttattattatttttactatatattataattaaaataatcatactttaatctatttagacaccaatttagcattatgaaagaagaaaattatgataatcttgtattaaaaataaaatttcttattaactagtcaaataagtctaatacgagcaaaattttgattctcaatataatttggttttactgtctaataaaaataataacctctaattatttattttatttaaaaattaaaattaaactatatatattaaacaaaaataagtgttttcaacatgtttaaatttttagaattaaattatcctaaaaactagaaaataaataaataaaaaatattaaatttattattttaattagatattaaaattaattttattctaagttatcaattctcgacgaatttgatgtttgataataaatttaaaaattaaattataatattaaattattaatttaatcctttaactgacaaaaaaagtaataattaaatttatcttaaatttaaaaagattttaatattaataaaaatatataagaactaactcatgtattagaacagatttcaggtctaactaaaacaaaatcgaatatcctacccttccaatttattactgttgaatttcggaagaaaaagacaaaaacatcaaagaatatgaatacaaacaacaatttcttttttcctttttcttcatcacatttatttccttacatattactttttcacatttcctttacatttctctttccgttccacactctttccaccgtacatgagcacaacacaaacatgtatttacacatgttttagaccctatcg

SEQ ID NO: 6499 - DNA, 1805 bp, Ricinus communis
  Intron number 3 from transcript 29648.m001937 (locus 29648 .t000024) derived from phytozome v7.0 (chr-ID 29648; pos 1 67195 to 168999 reverse strand)
gaggtatatttaaatggttacatctttcagatctgcacattcataaacatatacatattatatataaagtataaacgtatacatattcataaacacatactaagttcttagtgaatagcttttctcgttttcgatcttcatacgtgcaacttttaacgttacggacatcatcagtacttaaaagagctgtgcatacttgccaacttctgagtaaatgaccaattcaacacattcagtaagaactcttccttgccagaccttctgagcagaaaccaactcagccatacttgccaatttatgagcaacagtattttcttccctcctgacatgcgacaacagaaccaaaatacccaatttaaccatctaacttatctacttattttatctatcctccttcatttaatgtgtgagtatcctcttaacagttagtggtgcaggaacagaatttcaaattttcgcataccctattcgtttttaaaattttgatgtaccaaaataataggagtaacccatgtttggccccgtacttttatattttttagattttgtccttgcaccttcattcggtgacattaaatctttgtagttttatttttataaaatttaagtctttttctaacggtagttaggagtgcttattacacgctctgttaatacatgtagaaataatttttagattttctgtgctagatttttatattttaattttgtaaaattgaatttctatatttttatttgtatagcattaaactcttgtacttttattttgttgacattagcccattgagaaatattaattaaatttttatgttataagaataataaggatttattgtgatttggatttaaattatatttttattttaatgataagaattggaatgatactacctagttttgatttatttaaatttaaattcttatttattagattaaatcaattatattaattaagacatgatgttttaattaataaaaataagagatgaactaatagaaagaaaaacataagttgtttataaacagtttaatataaaaaataattttaatttttttacaaataattaaaaaaaactaagaaaaattcttatacatttagtataaaataaatttttataatttttcacatatgtcatggagtttgaatatttattaaaataaattgtaaaatattttcattattatataactcaaaaaggaaattttattttttatttttagataaagtacataatttagtcaaattcttaaattactaaactgacttttaaattaattttaaaaaattaaggacttaattagttaaaaattaaaatataaggatttgataggtaagattaaaaaatacaaaaaccaaataacatattttgcacattgagttaacgccgtttatacattttttagaaaaagacttaaattttataaaaataaaaatataagaatttaatatcactgtatgaaaggataaggatgaaatccgaaaaataaaaataaaaatacaaaatccaaatatggttatttcaaaataataaattataacctaatctatacaaaagcacccaacaaatttactaaaatatgatttgttcatattccaataaaatgctgagcttgttctaatatacgagtaaattacgtaaattaaagttgttgaattaatatatatctcaattgcctattgctttttctttcttgtttgttttattttgagatccacctcaagaagataaaattcatttttctttatgtcaaaatagaataaggaaaatttaactcattcttcttgttacgacagattcttacaa

SEQ ID NO: 6500 - DNA, 713 bp, Ricinus communis
  Intron number 11 from transcript 30078.m002280 (locus 3007 8.t000073) derived from phytozome v7.0 (chr-ID 30078; pos 436423 to 437135 reverse strand)
aggtaatttggttatcttatttcttattttgctctttgtagagagaaagagtagactgactaggtcattttggatttttgttgtgaagaggacaacatacataagtgttgaagaacaataactctggttcctttacctattctgggtataatatactaatggaatgggtatcacatgcttcaagaactttgataaaattgcttgaggtgtatatcttgagaacaaaatacaaggatgggtttttgagatttatgtaccttctcttcaactttgtccgagccatcagattaggttatttagttgtatatcagtttgatatttattcccatagtgaggttgttaatgctctttctcattcatgttttgcatttcccagatatgctctaaatatggaaccccataggcccatcttctgtgcacaatttaatctcattctaagccgaaagtatttgaaaagaatggaattctcttattcattaaacagaatcattacagccctatttatagtattaggagggcataacagctttacacacacaaaaaaagaaaaatatatacattaggaaacatctatgactaaaaaggaaatatattttgttgaaatctgttcttaaaagcagagattgaatcctagaatatttacctgattggttctcaggatttcaggattcacttgtggaatctaacacagccttagctttcctcatctacag

SEQ ID NO: 6501 - DNA, 832 bp, Ricinus communis
  Intron number 1 from transcript 30061.m000285 (locus 30061 .t000004) derived from phytozome v7.0 (chr-ID 30061; pos 7 9066 to 79897 reverse strand)
acagtttttaaactcaggcagaaaggttagtttttgaaaaaccaaggacaaaagtgtttttgagggtaaacctaattggtctataaggattctcagaatttgaacttcaacaaattcataactattcacaggaatatttcaaggtttcagggtaggttggatcaaccgtgtcaaatttggttaggataactaaggatgtcagttgtgttaatgttgtccttgtacaagatcaaacaagcaagaaatgaatgaatataggtgaagatgtgactgttaattagttaggtaaactgctattactttatgcggattgattctgaaactgataataagaacatgtacatagcaatagcttccaattttagtcttttaaatggagatctatatttcaacattgttttgagtgttatctgattaatggacatgtgtaagatagaaaattagcaattgcttgctgctatccaactaatagataaatcaaatgaatattgtattctaggcagaatgatctgcttcattattattgttttggaagaatttataggtgagaagttgaactaccaaaccacaagcttaatttcccaccaaatcccccttgaaacttccccatttctccactccccatatctataaaagctgaatacaagtggaaatgtaaccagaaacatactactcatttctcaacagctcagatattttttctccttattatggcttattttcgctttcgatcatccttttttctgctcttgttcatcgctttatcaatccatgtagatgcccgacaacttcttgagacaaaattgccagaagtccaaaacgagaatttcct

SEQ ID NO: 6502 - DNA, 932 bp, Ricinus communis
  Intron number 1 from transcript 29631.m001008 (locus 29631 .t000015) derived from phytozome v7.0 (chr-ID 29631; pos 9 2331 to 93262)
agcaacggcgaagaaagtctcgacagccagacacggtttttttttttcttcaatttttgaagttttgctttttactatttttgtcttggtcatgtgcgcagtttaggcctttgtgttttcatggtgtaggaagagaagtttgaacctagggttactggatataatatatgtgatttagtgctcattgagtgtgtttgggaagtctaaatatccaaaaatttgtattcagtttaattctatttaattaaatcctatgtttggaaagctcatagatgctaggatcatttcttctcgacttaagaaaaaaacgaggcattttaaaagaattaagtcttgtgcaagaatttaattaattgagctcttggatgttttcaaaccaggccatttagatttcaagtgttggaagtcaaaattgcttcaattgcttcgctaagtttatagcacctcattttgtggtaaatacttgagtttttattgcacttacagcgtgtaaagaaaagtacaggtaaaaattttgaaagcagaattctagttagaaagtctgaggaagctttcaatgtttgtgttcaatctccttatgttgaatttcataatggcagccttcaaatttgctagatgaaacaagggagaagaaagcctcagtcaaccatgaaaattctttttctttagtgtttaacatgttctgcgtggtagtttggagagctcattttgtatggaatggaaaaagaatgttgttcatgtactgaactaggatgaatcaggttgagtatctctataatcacgcaaggcttttggttgggtatttgattattgttaagggttcttatttataaatattcatgtagagtcattagcagacgcaagctttatttgatgatctgatagagtagatgaatccatggcatgattcttctactttttctgtggacagg

SEQ ID NO: 6503 - DNA, 8602 bp, Ricinus communis
  Intron number 17 from transcript 29852.m002018 (locus 2985 2.t000037) derived from phytozome v7.0 (chr-ID 29852; pos 1264982 to 1273583 reverse strand)
cagtaagtataataaaccaagaaccaaaccgaacgtttacttgctttggccttctatttggactctgcatgtggatttagaaagcttgaattttgacagaggctttagacatgcttgcattttatgtatttgctccaacttggatatgatgctggattcaaataacacagacattaatatgttattgttgcacatctaaatttatattaaaacaaaattgaatttaatctggttaagaataagatcttatgtatgtatgtgtgtgtggcaataaaagcatatttctatcatctggtttttatggaagaggatattggtcagtcagtatattttcatcttcttacttttccacttgactcttttaatcctgtaaacatctgagcatgaagatttacttttgttctcacttttctcaaatataacaaaatggctcgaattgtcccctcttcttgagaaggtctttgattatacaggcaagactgccatctatacaaggaaactagagctgtacatgttaattacatagagtgatcctagggagctatgtatagtaatctaaatatcctcctttatttataagaatatttacagcctaaattaatggcttaattacaaaagtaatttagccgttgaccccatttatggctttccattgacatcccccctctcaaattgatgcgggttgtctacacacatcaatttgttggcaagaaagttatgtctatgccgtgtgagagtcttagtgaaaatatctgtgacttgaagattgctagacacatggggaagagaaatagtctgagccttaaaggcctcacggatgaagtggcaatcaacctcgatatgtttagtgcacttatggaagatgggattggcagaaatgtgaattgcactagtagtatctgcatgaagaggagtaggactatgttgagtaaaaccaagctcagccaatagaacgcgaagccactgtatgtcagcacaaatttgggacatagctctatattcggactcagtagaagacttagaaacacattcttggttcttgcttttccaggaaataagggctgggccaagaaacatacaccacccatagtagaacgcctagtgtcactacacccggcataatcagcattgttatatgccataagatcaagtgacatagcagcaggatagaaaaggccttgggaatttgtgccatggacatcgcgaattattcttcgaactgcagccatatgtaggtgcctagaagaagccatgaactgactaacctgttgtaccacataagagatatcagatctagtgatggtaagaccaagctgccaactagagtacgataggctgcaggtctgataacaagtcacgctcatctttgcgcagcttgagattaactttcataggagtatcaagaggagtagagtcttggagactagcagccatcaccaagtcctgagcatgcacaaaaaaaataccatgcaaccatcaatagtttctatactaagaaaatatgtgagagaacccaagtccatgaagaaatagtcctgtaaatgttgctttagttgagagattagaattgaatcagtaaccgtgatgattatgtcgtcaatataaagtaagagaatgataatgccaagctcggttcacaaagaaacaaagatgcatcatacttgcttttggcaaaatcaaacttcagctgcagaagtagagttagaaattaaatatgccagaggacatatataaacatcttccttgagatctccatgaagaaaggcgttttccacatccatttggtgtaaattccaagtttgtgatgcaacaatagttaaaattgtgtgaatagtagtcatttttgctaccggagcaaaagtctccttgtaattaacactatattcttgattattgccaagagctactaatcgggccttgtacctgtccaaactccaataagatttgaccttagtcgaatagacccatttacatccacgtggagtcacaccagtaggacaatcaaccactttccaagtcttattagcttcaagagcacatgcttcttcctgcatggcctgctgctagcatttctctttgactgcctgtgagtaaccagtaggaatagtaaatagaagatagtggcagagagggtagaagtagaggtacccgtcttagatgatggaaatccatatcggtcaagtggatcagtgactctagatgagcgacgtaagggagcaaatggcatgacaggtgcagaagggggcaacactggaggtctgcgctgttatatcatacttggcttgaacatttcaacttgagtactaggagcactttcaacttgagtactaggagcactagaagggtcataaaaaaaaggcaattaaagaaaggctttggtgatggagacataggaaagaaccattgagtttcaaaaagtaacacatttcttgagacatgaacatgattggagttcggatcataaaataaataacctttttgtgtgacactataccctaagaaggcacaatggacagattgggcagatagcttatttattttcattagaggaagatgcataaaacagtcacccaaaagtataaagatttgtataagtaggatggtgatgatgaagtctgaaatatggggactcaaaacccaaaacttaggaagggagtttatttataagaaaggttgtggtggtgagtgattctacccaaaacttagatggaacggatgattcaattagcaaagttctaacaacatttaaaagatgacaattctttcatttacctacttcgttttgttgccgagtatatggtataaattggattgaaacctttgcatatgccactacaaacctaatggttatattcaaccaaaaggaatgaagatgaagaatcctaaaacccatggcaattctttgaattgtaggatttatcaatcaggattttgaattttaaagaaataaagacttaaaacattttagctataggagagctaaagaatttaagtatatgaactataatcttttcagctatagagagctagagagctatagtgtaaggtgtttggattgaacgccacaaactaaaagtttgataagttcctaagtaccaaacaaaaactctaaagaataattctcacttaagagaaaagaagacttttatattcaactcaatgatgtctttacaaatgcaaataccttgcctatttatgggaagaggccaagggtagtttagtaaaaataaaataaaataaaaagaaaaggaaaatatagaaataaaaaataatttgtaaccaccaatgtttaatgttactttcataagcataacctgtcttgttaatagtttgaaaagtcataacaccttgattgaatgcaatattatcatgtatgtaaccttctacttataatgaatataatattcttcttcatcgtaagccttcaaaaggatgcataaaatcatgctccttttcttctcttatattcttcaatttaaacctaaaaactgcacaaataataagcattattagtacttaattaaatacttgaacttttagcccattaagtatacttaattgcatcttactacaagcccaactttatcatactcatagactagttattataattttaacttaagcccaataacattaataataaactaaattaagaaaatccaacgcataatataaggcccataattaagaaaaactctaaataaagatataaataaagttctaataaaattaaatctaaatgtgttagataaaatggctgaatactccccttaaatcaagttcctctcttgacatgtgatggcttgaaccaagttaaccaaggttggactatcatgagctttgagttcttttccatgaactatctttgagctaatattttggatgaagcttgacaaagcttctttaacacttttagccttagctcgagtcaaaggtccttcaaacttggtcaatggacccatttggctagctagaccaccctgttgttcattagtataagggcaagaacattgaaaaataattcctttactttgcagaaaaattggaactcatgagacatatatccctcactcgagtcagaccgaagaatttttatagtatctgaaaattgattttgtactagagctaaaaacagtttgaacatggaatacacttttgatttatgccgcaggaaataaacctatgtatatttgctgtagtcgtcgataaaggcacaaaatatttgtattgggcatgagagatggtaggactaataccccaaacatcactatgaattatctcaaagctttgtgttcctctattttcttcagatggaaagggtaaaaatcttatttttgccaagtttacaagttgcacaatcaagaaacatattggaagaagaatgcacttgattattcaacagaccatatttcaacaaataagatagagtcctagagttaggatggccaaaacgcttatgccagacttcatttgacactttagagctattataaagtaaagctagtataggggaagaagaaaagttgcgcaaaataggtagtttcaaagaaaacagacatcaatgcttaggctccttcactatcaactgtgctaacatttgatcttgcacgacacaatcgtcatgagtaaaatggacatcataatcttggtccacaagctaagtaacagatactcaatttacggagagattaggtgatacaaaaacatctttaaaggaaggatacattgccaactgccacaatgggtggattactaccattagctgtttgaatatgtgaggagccataatattttctgatattacttaactcatgagaagaattagtcatatgattagaggcacttgagtctacgattcaataagaagataaagaaccagtaccttgaagtccaagtattgaaaatgcatgcccaatcatttcttgtattatcttcacgaactaaaaatgccgaaggttgtaatgcaatggcaggagttgctgtagcaacagaagaaacagtaggctgcaaagcaccagaagtaacggtagcatgataagccttgttggagtgtggaggacaagtagggcactctttaatgatgtgccctgaccatttgcagtagttacaaaatttctcaggacagttaggagcaatatggccatattttttacacctatagcattgggtggtactcatgtcacgaccctttcccttaccatgggcagcataggcaattgagaagtattagaagctacaggagcttgctccataatattctgagtattgatacgttgttcctcacgcaagggttctccaaaacaaatctccaaagatggaacaagatctctattcactagaggcacggacatattcaaaattaggccgcaacttcattaaaaactgatcttttgactggttttgtgtccttgttgctgccaatccttctgtagagactttagttgtaacaagatctgaataatcattccacaaagtcagaaaaccatagtattcttgaattaatagatgcccttgagaatagttagcgatggctaactcaagctggaaatgtctagcattgttatcttggttgtagacttgcttgagataatctcagatggcctttgtagacctatgcggatgcaaagaaagaatcagatatggctccatagaaacaataatccaggtcatgatttgattacctttggcagctcaagctgccttgtctgctacagtagatccttctttggtgctgccatctatatggccccataactccttacctttgagaaatgtctccaattacaactcccacgtagcataatttttccctgtgaacttgacatagacatgatatgatttctccataatcacttaggctacgactgagaaagctaagatttcttaggtgtaggctttgataccataacaaaatagttcgaattgtcctctcttcttgaggtctttcattatataggcaagactgccatatatacaaggaaactagagctatacatgttaattacatagagtgatcctagggagtatggtaagctaaatctcctccctcatttataagaatatttacagcctaaattaatggcataattacaaaagtaatttagctgttgaccccatttatggctttccattgacaatgtcatggtttaaatattagcctttccattctaattcaatcgaatgtccaaaaagaacttagtaatagatctgggaagcatgagaaaagattagcaattggtctctttccacataaatttgacggtagagttaaagacttaatattctcttcttattattaccgacccaacgaagaatacaagttagaatcaagaccatggtgtgggtgcagagaattaattttgcaagtcaagtttctctgctggaggtaaaagttagttgttcaacctcttaatgacctacaagtaggataattccattaacttttatttcctttgatttagagaatattgtgacattagtacgtgagcatcatgtttataagtagacggctggcatttggggctgattggaacactggagtggataattaagggctttggtagatattatttatttccttttgttcttctctccatttatctttgttctctgtagttctgtttctttctttagcttttccttttctctccttcctttcgtttccttcttggtaagaaaataaaaaaggacttctttttaattgatatttgaaactgatacaacctactgccctttaaaaccaggagttaagcgatcctacattattatgatttacaaaactcaagaaaacaaatttttaagctgactacactctttctgtgcaaaagattttactttttgtttctactctctagatactatatgtagttaaacagaatgcaactttcctaattgcactatgcagattttttccacttgttcttttgctcatccagcaaacctcccttggccacaacatcacagctctgttcatcttgcatgtttcataaccttcagccacacttcttttaaagaagcatatccagaaaataagtgagcaactgccccaatgtgattgtcacataaaatacagtcagtattgtggttactccccatttggcaacttgtccttaatcagaagcctcttttttaatggcccaccagattataaaactatgtctagggatatggcagctaacccaaacaagcttatacaagttcactttgatctcaggcctttcagttctttccaggctgaggaggtacgaaattttttttctgcggcagcaggtttccgtttaatattatcttgatcactatcaataatcttgagatcttgtttgctgaattcccaggcactgtcggtaagatcatcaatagcatctgggaatatcccttgttttgtttttatgcaaatcccttagttttacttcttttggcaaaccagaacattttatatccatacttgggaatttatcaagaagagaccatgaactctgcaatacatcaatataacagaattcatcatcaatagtcttcatgttttctatctgcttgctttagaatgtatcaagttgtttgtattgcctcgttagtcttaaaagaaaggcgagtagggagattttggtacttactttcatctattgatattccagatagattattatacttgaaggatggaagctaagggctatcaagagtctgttatagcatttgacagttggagtattttttttttcttaattgcaaacaagggtctgggggagcatgtactgagcagtcagtgaatcacattatctctgtcttttcctttcctcgcagcttttccatcattttgtatggttcaattcatatactattatcttttcataaatacatgaaaccatagttcaaaagtttcctttacagttttacttaagcacatgtaagagagaatgcaggagactgatgtatgctaatgcttatacaaatagaaatggggtggataattacatcttgtctctagatttaaaaaaaaaaattatatggatatctatttgcattaatgtagaccatttggaaggagaggtttgagatagatgttatatctctgttatgttagataatttggttaaagttcttgacttttgatattggaagattttgttcgattcagctgttttagatctctttaatatcttgtaaacaatattatgggggaagagggccaaacatgtaaaagactgaacctgagcatttctaagattttatcttagcattgtgaaaaaaataaaaataaataaaatgggctttctacgtgatgcattttactcaattttgcttactcatcaagagcataattaagaatttctttttgagcaatgttcttggtcagtaaatgatttatatttggttgttcactgagcagttcctgaatagtgaaaagcataattagagataaatgagatactctggccaatgctatatagtgatatgttctcacataatcatccatccatcgataaatgtacatgtatgtcttttctgtgtggttatccagtttcttttgctctgttgattaactttcatgtcctgtataataatttagttcgataatgactgattctgcttcagaattctgtga

SEQ ID NO: 6504 - DNA, 1187 bp, Ricinus communis
  Intron number 19 from transcript 30190.m011154 (locus 3019 0.t000390) derived from phytozome v7.0 (chr-ID 30190; pos 2223396 to 2224582)
gactggtgctatcaacaaaatttgtgcattcactggtaagtttattaacttcttttgaacgtctgacagctacttgtgaattacagctttttcctttaaagatgatccctattgggctatatgtaattttctgtttttaagtatattaaaatgtgaaactgtttgttaatttaatagtcttggtcctgattgaaattctggtttaaacataatttatataaatataaaaattatacataataaaaaatgcctattatttttctctttctgatcagctacataaagtagtactataatccaagtgatttgatgtattccttattcactggactagtacatggtcctgttaatcaacagtgacagctctgctgatagtagtcgacttctatttgtccatctaatcttaatttccttcatgcattccttgtcatattttatttgacatgagagcagaacacttgacaggcatactgattcttggtatgttttgataaagcagaaactaaatattactccaaaaaacttctgtggttcttatcaagtatacatcaataaatatacattcatagctaattgatattagcattaccaaaagatttggctcagttaatgcacgaaaaagttcttcaaccttgacagaacctgcatctgcacgcgatatattggagtagtatgctttaaacatttttaaggcgcatatttttttgaaggattcggttatgatctcctcatcatagtctttcatttcactggtcttacttccctctatcctgattaatgttcttgtttagcatcatgtctgactaatcattttcttttgattcttcaagttacaaattctatgagatcatattatagatgaagcctctcttatcctgttttcctggcaatactcatggtttatcatatttttcttttgataaggaataaataaataaagctttctagtggtaattttgttatcaagtaaccagaattttccaacaaaatatattttccttgctatatccactccttcaatttactaggcatttgacgctgacagaaaggttgccttaattattttttgtgaatcttgtacatccactttttcaatttacttggcatttgacactgactgggaagtttatttttgtgaaacgtaacttctaggagcaagagttgtgttctgggatctgagagacaaa

SEQ ID NO: 6505 - DNA, 1260 bp, Ricinus communis
  Intron number 20 from transcript 30093.m000357 (locus 3009 3.t000008) derived from phytozome v7.0 (chr-ID 30093; pos 106718 to 107977 reverse strand)
ccgcgaagttcctaaactttttcagaaggtcacacttctgctgctttcctttggcacaatttagtctcgctattctttattttcatttttggtgcctttatataaatcatatattttaaattctggtggcaacttttattggtttaacatctttccctgctatttcttttcttattacttttaatttttttctcttctacaatatccacaatttcaaattctttgtaatggcctgttgacgacttcacacatgcctgaacatttaatgtgaactgagtttttgtgtaggctcactgttatttgctattcactccatagcttgatttctgataggtattctaagaacactctatgtggaactccaatgaagttagtaagaaacctgcatcaactctaattgaaattcttttccttggactggtagtttatgtcaacaatattatgtcctcaagcactggccaatagatcaaatagcatgatgtgagaaggttacagatcatcttcttaaaaggattggttcgtaatcataatggttttcccaggtcacagaccctgaatcaaatcttagaatcttgaagaatgctaaaagcgtcgaccaaactaaccaaacagaatctgatagatgaataaatatcatcaatgcagcccgatgtttgatataatgaacaagagtatatttgactgtaggacctactggaatctattatgcatctttgctatttaaaattctggaggattcaaagtttctgccgttatttatacaaataaagatgctaaaaaactccataagaatatgaaattaggagagatgagactttacattaaagtcttgcagctttgtagaaaattttgttaatttttagcctattcctaaactctcaaaagttcaacttgataaatatctattttcaaatataataagaataacaaaattcttattttagaagtgtgaatgtaagttcttaaacaataaagaataatgcactttaaattctcaaggaaataaaagcttaagatttatgaggatctagactagtaattctttggagttcaaggtctcaaaaagtagatctaattgcttataaatttgatcatatgtgattgtggattttgaattttgaatttaattttatcttttgccattgcttatacctttgaattgcttgcttttccttctatattgtttgaaaatgattgataaatattcctttaaattgattaacaggtttccagattgctttctggtatttttactctttc

SEQ ID NO: 6506 - DNA, 524 bp, Ricinus communis
  Intron number 1 from transcript 30170.m013841 (locus 30170 .t000253) derived from phytozome v7.0 (chr-ID 30170; pos 1 275954 to 1276477 reverse strand)
gttctgtttatcttggtaaattttctcatcttcttattaatttagttcacagttttagaataacaataacatccgctgatgaaaaataaatcaattaattcttgatgagttattgtagttgtcaaaatgtagcatgtacgtttgcttctgtgcagtagcagcactaagaaaagttgacaatccactaatgaataattctttaacctaatttatctagttaaagattaatgtgaagtggtccactaatggattagccattaattacatgaaatggagaagaattgtttctttaagctaaaacaatcgaccgtatcttgcttcactgttttgggagtaggtatcaagcattagttgaccagataaatgatgtggattgggttcaatgaaacagaatcatgcaacaactagcaggctaagattttagcagttcaatggaattgtttttgctaccacatgacatactttcttttttccttaaacatgtttcaggtattaaacttgtgtttgaatctgaaaaaggagac

SEQ ID NO: 6507 - DNA, 949 bp, Ricinus communis
  Intron number 1 from transcript 29983.m003185 (locus 29983 .t000084) derived from phytozome v7.0 (chr-ID 29983; pos 4 77559 to 478507)
agggggtctttcaggtaagatagacaagtgcatatcgttatacttgtttcttaatttttctgttgttaattaccagcttgtttgagtagaaagttaacctacaaaagtttttggtttggtttggttctaagaacttaatttcagcagtaagtcctgattttgtatgtttgatgttctcattttcgtatctatttttatgaattgcttaatttgtttattcttttttttctttatttaagatgcctttcgtacttaagaattggcactagtgaattttacttttctgttaaaaaaataaataaggtcacctctgtacaaaggtcacaaatggatacagaagcatagcactaaaatgaatgtattcatagcaaatgactatgagtacatatttagtgcttgcacatttgtttgcaactaattatatgtcctttaagcctttctaatcgaatgttatatggctgttttgagttgttaatgagcaaatcacaataaaaagcagataaagaagcattctgagtattttaatgatgcaaactaatattttctactatttccttgtttttatatgtattgaagcagaacaaacttaaattttatatactgactattttcatttagtaacttttctccatattgcatgccttaacattcaatgtgatgactgtacagtgtatttgcagtaagaggttgtgcacctcaacgtttcaatgacatgatttttgctgagacaaagctttattcttttatactagaaccttcctctattaagtatttatatcgagggccattgatagttcgagctgtcttcattactaccttattgaaatggtccaaatagtggaattctcgttagtagttgcactttttcctctatcataagaatcataatggcatttttcccatttgcattctatatattaatgactcgaattgtggcaggccttggatt

SEQ ID NO: 6508 - DNA, 14973 bp, Ricinus communis
  Intron number 5 from transcript 29841.m002899 (locus 29841 .t000163) derived from phytozome v7.0 (chr-ID 29841; pos 1 009506 to 1024478)
agtatgaaagatgtcactagacaactacatttgatcaagaatgcttttcttgacggaagcagatcaagcacagaggaaccatgataggtaattctaaattataaccctttgttcttttattattattattattgaaaaatttactatgtgtatatcaatctcatatcaaatttggatcaaagcttgtctgaagctgtttatactgccatcaaggaatagtctacttggtattcttataactgaaaattggggaagctctaagctttcttgaattatgttaagacaatgtggattaacattctcggggaacaaagtaactgatgtttcttttttttttttttttttaggggacagtaactgatgttaaactttttacattagcttcgggggatatttaaattcttactattctaacattaattcctaggaactgtagtatatttaacattctcttgtcttaaatcttgcaggagcacatagccatgtaccatattgctgaagcagtcaaatcccactgctacctattttctggtgtcaaatgcattcttgagatttccgttgtaatataatttactactttcatgttattaacaatcaaattattaagaaaaatgtttgatgtaatttaatttgttacttcaagccttgactggttggcggttggaatttgtatctcacatgaatttctgcatgcataatttaaaagtctagttcatggcccaaagcttgagcacagtggattaaatagggagggagggattacgttggactagcaaacatgatctggctgaacaagcatctgaaccaactagtagaactgaattacgaataacgaacagccggcaacggcggagagtttggccatttttgaagaagccggccttgatatttatgggagatggggttaatttattggtaatatttatacttcagagactggcattttccctccaagttttatcttttatgttgcatgttcacactgtatagttttcgtgattaaagctccgtttgtttttcgaccaaattcagaatgaaatattttctgcattttttttgctgtttgtatacttggaaaattcagttaataatttttgaattaaatgaagaattatgtagtttcagagaaaaataacttcctatttttattaaaaagatattattttcttgcacttaaagcaagctaatttataacggttatatagaatctatttaaatatatgtagcatatccactatctgacgattgcttgtcaggaattccggccacagatatagaaacttttggatttaattttttttcttaattttatatctataatcaaattagaaaaaagattaatgaattttaaataattttcaaagtcacagttctcgaaccacttcaaacatcataaaataatataaaaatattttaaaaatttaataaagaatcatatgagtattttttatattttttcaaaattttttagcttttagaacattttaatagtattggttcaaaaatattttaatataaaaaataaaaatttaaattcaataaattttttatagtttactcttgttttacttttatttctataaatattaataattttaatttctttttaaactttaggtaatagaagaaatagagttaaaaaatattagttaataaaatgtataattaaaaaaagaacttgtactatatttactattctgtcaattttcatactaattttctttttttaaaaaaataaaaaattaattattttttatttttacatatatctaatataacttttttctttttctgttgtacttttcgtagaatgattatcctgcaggtctatgtacacccccttagagtagagggatggtttgaggtaggcatgccatagataaagaaagaaggctggatcacgttcagttcagcgcagggctacctctcatatattatatgtttgaaaactgtctgtctttagggcattttgtgattcatcttgcgttaaccttatttatataaaacgataagagggacttatagcctcggaaaacaatgtcttatttacatatcaacgagacaatgactattttcttttgaattctttatgaatcctgtcctgtaattctattaacttgtggggatgatttcactatgttttgcaagaaacctgcatctgaaatttcactaaaatggcagagactaatcacaaggaaaagaccattaacaactcattctcatgccttaaaagccatatattttaggaatggcagtagattgggtgtgataaggtattatacccatacttgaatgcacccattcaagtaaaaattatattaaatacatccctgtatttttaagttttcaggtaacttgtagatggtctattattcaaatagttattaggatgtttttaaaatacttatataaattaaaacatcaagtatgaatatatctaacaaaagttatatttacattcaaaatgattatattcaaaaattaaaaagaaaaactactatagtactaaaagagttaaatagttattaataaatttgtcccatatctaaataaaacatattagatacactggttaagaaattcaattacacaactcctagtattatgtaagctatttggtggtttgatctgtatagatgaaaaaggtttaaaagaggtgaatgagcttaagcttttacgtataagagttcatgttcaactgaataaatctttaccaaaagggtttcatttaaaagaacgtcctttagatcattggtgtcaattttgatatgagcaactttcaacggtatgttactactgtggtatagtggggcatatagtgaaagcccgccctagtcgcgaagaaaacatagaagcagttgcaaacagcaaacaatcagtgtcctcctttccacctccatggaaaagagatcattttaaacatatcaaaattcatcagttactaagaatattggcgtggagatcatccaaactgggagcacaggaaatgagctcgggtttgcatgctacagtgtcacaagtaggtttagaaatgggacaatcttctggtgcagcttctaaggcatcgaaaacagatatgccagccacacaggtaatgagaggctatggttccttccaaacctcttctaatgatgtcatgagaaatgataaggaggcaccgtcaaactagaagagtaaggaatcagaccagaaatgttactgttacatgcaccttggggaagaaaggaatagtgggccaggctataatttctacataggggatgggctctaagtcactagattggggagtccaaacctcggtggatatgagtaatgggcctccgactatgatttatctatccaagctaagtgttccttcgggttttaaataagaataggttagttttttagagcggagggaaaatgggccatttccaggaatgaaaaacaagagaatgggttttaaagctcatttgcaacctattatccccacgtcgtatttcttagatatgctgagctcctctattcgaagcaaatatgctggtttgggacgtcatgacattttggctatagaagactaggtcgtagtggcaatagacatactgcggcatcattctaattaaaaaattgagagacataagttgatagcttcatcttcaggcctttctaacagccccatgaagatagttcaagccacaaatgccgttagaatttcaacaaaggcttgggcagatgagatggatgaggttgctagcctaccttcccaagacatattttatgataattcacttcaggagatggaaccaactcgacaagtgaaaaaatggaaggtaagggcaagacaagaagtggtgataactgaaatctctaagactacttcatcaactactccatgtaaacgtggttttgaaaaaattgaatcaacacacacagggaaaatgaagattagaaagttttctacacatagttctgaaaaggtgaggcaggccagccttgagtggccctaattttcgccataaaaatcctcagttggaactgtcaaggtattggaagaaacttgacagttagatgcgtaaaagaatatgttcttcatcatcttccagatgttgttggacaggaagtgatgtgggacagacaactacctcaacaggattgatcaaagcaaattttgatgcggcgacgaggaaacaaataaataaaggaagcatagatagtatagcccaaaatagtaataatcaaattatacagtctttttctaaggtatacataggcatttcggaacctttagtgcttaagagtttggctctgagagaacgtatggaataggcagccggatttcgacagccaaaagtaatgtttggaggtgatgctttgcaagttatccaaatagctaatgggacaacgataacttctgcttcagtgtgttatatattttgcagatatatatgatcttaggaagtccttcaagatcttgtaatattttagcacatcataaagccaaagcagctttttattaataataattatctgttattggttaaaaacaaataaattcttttagatgatttttaaaaaatatgcctgatatttgtatttaagaattgtatgctatatgacctaatgttatcgctgattttttcctttttctttccagaaaactatcactgaattagccctcatatagtcttatatatgccctaagcaaaaggatattaaatttgtgattttacttttattttaaatattataatcactttttttttccattaaaacctttgtaaaatattaaacaagataagtttaatgattattatcatcttattgcaaaatatctcaatcaaacccgaattgcaactacaaatataaaaagaaattttcaagtaattttattattctagtgagacatgttaagtgagctaaaaaaataacattcttaaatctatttataaaataatttaaaattttctttgagtttgaaattaacaaatctaaaactaatatatatcaaaatctaaaaaatcttacatcatctccgacgactaaaaaatatcaaaacatgtaaatatatctaataattccaacctttaaatatgcatttttctattttataacgggctaattacaatttattcattaatttttatcatatatattaattcgttataacaaataagaaataccttaatattctttataattttatcatatcatactaaaatgctctttctttagattcattaattttaatttatagcaacaaatttattcttgaactctgataaatattcatctcttctttattcactcaactctggccaccatccctcatctcttttctaaaagctttttctaaaagattgttctcttgttaacatcacaagacatctttatgccttttatgatgataaaataagaatataactaaatctctgtcggtttaatatatataaaaattataatattatatgtaaaaatattgttttttaaaaatgttcaattgggtatttagatttataaggttttttttggccaagagcttattttatagttaataacaacaaggataactattgttaatgttagaattataaaaaggaggaaatagttaaaagagaacataatttgaaaattagtagtgattaaacaaagaagaagatgaagatgcagagacggagtgtggactgcaaaatgtgtagcagtagtcacatttacaataatgtcaagaaaacagtgcctcctgccaacgcatttttacattaaatacccccaaaaaggacgaatcctagccgttgctttgtcagacaaaggcgccgcttgcttcctgcatgttactgttcacattaatgaagatctcgccatgctgcacctgcacctgcaccaccagctgctctgcttttcccacacagtccatcaccaccaccaccaccacctacctcttacctcaatcccacaatttagatagatttacccagtccatgtccagtcagtctgcaagtactatgtacttctctatctcaacacgcgcctcctctgctcgtttcaatccaatattacccataattgaatggctctttttattatttacccaaaaggaaatgacattcgcttttagatcactttagaaacaactctctctgtctctctctcttctctttttcttaaagattaaattgcagtttttattatgcatttatctaaattcttgctagaatcaaacaatttgatttgaatggttaaagttactacttcaaagtttagtatatttatttatggattttaagaaattaaagttgcagtaataatataattagttgagagttcagatttgattcctacctctgaacattaaattaaattcttgaatttgcatatgccaaaattaaagtacgcatttaaatttgctcagatattatagaggaaattacaaacactttcgtaaaattcatgtaattttacactgttgcttattcattatatatatatactttgatggaaatagccgtttatgaaatattagtggattctgaataatgcaaattttttggttccctaaagcaatttaaaataaatttagcctgtgacagcagcactgtgagtaataaactaacaaaacactgataaaagaacaattctaatgaacaaaatacaaaataaaggaagaacaaaggtgcatattcggaaaaatgaaaataaacaaagtagagtaaatctcaatggtatttgtaattatcctaaaattaaatggtcaaattgcaagaacacaatatttgctgtcaacttaataaaaaagaaacatattttgtttaaagaacagaaaattattgaaacaaactatccacagggtcagacccgtcaagcacacacaatattttgcttggccaatgaaacaactcaattaataagatgatttaacatttccagcaaagaaacataaaatttgctttagaaaaagattagaatatgaaattaatcagatttaacccatatcaaaattagcctcatctactagattagtactttaaaaaaaatgcctattaattcaataacaagaattacaatcattaacattagcttgatgatcctcctcatctttaacctctctaggggaacacaaggggaacaaaggcaacaattcaggaggctcagctcctctaggagtacttaaaggacttggatgcaaataaaaccctttttcagcaatagctctctcttcgtcgcattcagtttctcttggactcccacgagcgcagaattcttcacaaggtgatctaggactcacgcgagaagaagaaacagcaaagaaatccaaagtcgacacgggcgacaccaagaaacctcgctgttgctgccttaactggaaaagctgctgatgaggatgatgatcatgaagttcgaagttattgatgttgtcggggtagttgctgaggttgatttgaagattcttggcgctttgcctcctttcttgaagcttgaatgcaggtcttttaggacctggaatggcgtttggtcggtttgggtgggtcagtgggagcttttgcgtggatgggtcgtcgggtgctcctgtgagtttctgaactatggtgcggaatgttgatgggtctgcttggacaaaggtagtgttaggtgaggttggatcagatccataggtggctgagctatggtgcgtggtgccggtgttgttagaagtggaagccatgagagaaacagtggtcgagcatgaaagttttctggtttggagcgtatctattatataaggcgttgttgtcgttcttgctttgagtttgtgtaatgagaagaggagaaaaggggtttttaaagggtttgtcttttgaatttttgtgtttatagattttatggggtaaatgtcaacaatgtgtggggttgaattgtcagaaggagatcgatcatatataccaaatactaacactttttgttttggaaatgagaaatgctttgttatgtttccactatatatggttttgctatttgtagagttgttttatggagagggtgattcacatataatatgtgttttattatatatatggataccaattctgatttcttgttccattttaagttttctgttatagtattttgagtacacgttttgcttagatatggagtggtcccattacctaaattatataaactaaaatcctaattcttcaatcattatatcttattaaaaccttactgatttgtaaaagaaataatttggtagattctgtttagtaggttatttatacacacattcaacaaatatgagttatatcactttaaatatttgattttatatgataatatttataatcaattaactttagatgatataatgttgtttatttttaacgaatgtgttttgaaatgacgctatctaataaattctgaaattattatataaaattgaataaatactaagatgttatcaaattagtagtctataaattgcttatgtaactggcaatgtatagaaattaatttaaattttaatagtttattattgttaaaacttccaaaacccattcctcatttttcttaaaaacattataataaattaacatattaaaatatgagtcttttagttagaaatatagtgaaaaaaaaaaagagggcataattatatgatgaagtaaggtccgtctaaattgaaaatgaagggcaaaccgtgtgattaaaagacccttttggaagtccaagcataccactaatcaaagcaatatctagatgacaagaagataaacagatcagagttgactatatgatgcagcaataataataatagtataacgacccacccagacaaaagcaactcatgattcattagagcatctgcccaaaaaaaccttgaaaaaggaaacaacagaaattataataatgaattgggtgtggaaggaaggagtaagtaatactaacagtatagcaagtaataattgcatgaagaaaaagaatttgaaaatttgaagaagttttgatatatatatatatgtatgtatgcataaatggagaatgagctggcaatggcattgaatgatgagtcatgcggggtcagcgggttgtggcattgaaacaagagcagtttacagcagctagcagccaccatatttctgactctctctctctctctctctctctgcgccctgccttgtgaatctgcgtttttattttctttttcttgttttgtatagtaaagtatagctgtttgttcattgttatgtgtcgatggttaaattttctaacccttttcttgctctgcctgtctctgtctttcttcgtttgcgtgaaggactccactttgacattagagggaagaaaaagttatctaatgccctggtttcattctgttcaggtccttttttttttttttctttaaattttggttagcttggcttggctgtgtgccttctttgtagtttctttgctttactcttctccttttgatattgcttagctgggatggttggtttgctcatcttttccttcccttctatcctttccctcttcagtattgcgcttgcatgacataaacatgaaagtatttccatctatgttaatttaggggtgcttctcggaaattaaaaataatatataatacgtctaaattatttttggaaaaaaatgctgtcaagtaagctaaccgattaaattaaaaaaaatctttaaaaataaaaatataatattaaaccgacttgctttaatctggcgggttagttcggactggttttctctgtcacccttatgcaagtctttttaaccaaccgagcaatttctaaaacttagccaataataataaagcttataatttgttgacgtttttatccagtcttaaggtcattgtacctgattcaaacccaaggacttgacttcagttccttttattatctcactcggacggcatctacgtgtcctataaatacacaaagaaaaacagttgatgtgatcatacacttgttttgtttgtaacgcatcattcctaaaaggaaaaattaataaaagaaaatagaaaatattccttgttttttttatcagccattggcatttattctcatttttaaacaacaaaatataatattacaataaatgcatatgatggtagggatgatatttcaaatttatgtaattattaataattttattttttttgaattcattccattgttaataaggaagagaaaatttatgttatgtgttcatttaattataaagaggaggggaaaaagttaaagaagtatcatgatatataagggaaatggtcccccatatgtttatttatttgtcaatttcttttaatttattgcaatagcaaccgttgttattattacagggtgaaaattgtgagttcctgcgcctgctgaatgtaaatccaaaaaccattcaaaagttcaaccaacttcacaaatttctggtaatttatttgagggtctttcagacattctttctttaaatatgcattcctttcgctaaaagcaaatgccctattaaagttcatgcaaatgagggattgttgagttgagattaatggagattagcaataatattatatagaaatcaaaagaagaagtcatcttatcttgccttgtgtgtcagtttagtgttcttttcttttacgtattattaataaactatttttacatcaatgattggatgtaagatattacaaatttaaactctaatagactaatacactacaaattcagtctatcactttttttttttactcaaattaataatgcaaatgataacaaacacaaaactatttgctctcactatgaattaatttggcttggttcagtcaattgaatctgcatgtacaaactttatgcaagtcgttccgaaaaacaaatcatacaagcttgcacatcatagatggtatccaaagatataattgtgagaaaataaaaggtgggaagtgtcaaataaaaatgataagtgaaaggttgataatattgaacttccaaagaatacaatttggcatggccttaattgtggcaattaggccactcattatttattcgcacataagtatatacacttaaatttgacagcgcaccgcaggaataaggagaaaaaggtgtaagaaaatcacaaagtaacaaggaaaagtcatatgtgtggcaattagaggggattgactttcgcctagtcttagaaagatggaaaaattataaaaatatatctatattttttttttattaaatttataggttattttttatttttaccgtgttaaaatattaaaaatttcaaaaatataattttaattatttttaataaaacaactgaaaaataatcctattcgaaattaattagtaagttttagtagagaaagtaatattgcaaaaatggctattgaaataagtagtctattagtggtattccgcagctaagaccgacagtcaagctagctatgcctactattaaccaccgaccaaaattccaaattcatggccgtcctgtccctcaagaattgggcggttaagatctaacattggcagaacagagagggtaaagaacaacccacatatatatttgcaagtcaaaagaaagtagggagatgtaagatgcaagttggattccttgaatgcacgaaagttgccaagggaacactcaatcatacgagtcatgtgtggaggacagtatgatagcattttggactaggcaattctgaataactgcctatgattctcaatttaatacgttaatcttccctaacaacccacctaattaaaatcttgattactgatgaacatgcacgccacaatttataattttcttctgttttgttgcttgtattataaattttcacaacaacaggacaatttattaacttccaagagggtaaatgtaaatctaattttttctaattggagtactaaaatataatttctctttaattagttttatatgcttcttgttctctaatatatgacttttcgccttcagaggaagtgtaaactatttgatccctttaatcttttaatagacttgcaatggaatcaacaacgactgacccttttactaggatgataaatcaagaaaaacgtttgttgttttgttgatcttccattctaaaatggcagctaatgcataagtgatgttctttttatgcatttcttcttccttcaatttttgaggtcgaaattacacatgaaatgctctcagtggtttttcttttgctatactggggtctaatttggattatttaggatgtcatttaaggttgattatttctctcaagttccttgctgttatttgtttggtaaacacgttaaaaccttttttttctttaaagaaaaaaatataaacagatacattctaatttcttatattacacgataaatattcagaataattggtctgttggtcagaattatgacaatatattttgttttgaaggtaacgctccttcctcaatttgtgagatggaaggactatttgtgtttttccaacaacaattcctcgggggagtttgtcttgcaatttgtaccagtttagatactctggcaggaattagatttgtcagtttaatcccttcagaatgtaattctatcaataaatttatctagcaatcacttgtcaggatctatgcatattagtttttcaaatttaaagaaactagagagcctggatcttcagaacaacagttttaaccggtgaaatcgttgcgcagaactttctaggaacttttgaaagtagttgcaaaggtaaccctggactctgcagagatccgattcataggagctgcattactgaggcaacaccaccaccaccacctgatgtagagaaagaagatgaaggttcctattaacgtggtttggttccatcggagtttctgtgcatccctcgtcacaaccttattggggaattatgttcatcaaccggcattggcgcatcttgtggtttcaggatattgctacatgtgtttattcaacttctattcagctttttggtactctagtttctgtcggtctatgttctcttggagagtatcaaattttctttaatatactacaaacaagaaacgaacagcctttaattggtgggttcattaattacttagattcttaacccaagcagttttatattctttagttgctagacaacttcgactcatgttttaatttctgaactataaattttatttatttacacaatttatacctatccacttctaattattttcaaagaaatatttatgatgaactaaaatagttttatcgaaagatttgcgatattaatcaataaatcaactatcttcaatgaaaacactagaataatttatatattaacaattcaattttcatttctctcgtaaagaaaaaagaaaataattatctttttagttgaaactttgaatggttcgtgaaatttaatttatataaaactgactaaacatttatgtatttattgatttatgatatatttttgactttttattaaatttaataaattttatttattttatctattttaatcgtatattataaaattattctaaatttaattctttattgacaatattttaatctaaaactataaaaatggtgacttggcgttataaataaataaaaattaatgtgttcttttataagattgtctaatctaatcaataattttgttattacttttaattttgttattcatctccaccatcaactcagcaatttataatagtagattgagatattggtaattgaaattaaatttcaaataaaacatataaacaaataatatattaaattgattttgatctcctttaaatttctttttattaacggttcaattaaattctcttcatcaaacatggccatcaagagcaattagaaaaatcaaattgcaataataatgctttctaagcttaaattttattttgatgtttaagaaaataaatgcaagattacaattttctttgaattaatctttttacaagcaatcatgaagacacataaacagttttgtttcttggaatttttaatattagagattattttcgttccctggagtgaaaatggagaagccaaaatcaagagcaataataacagtcaaagtgaggcaaatactctcaaattcttatgataattttctcgaacatcttaagttcaaacccctagtaagtttacttgttatcgagtcttaatagattagagatcttctctttaactgtcagagtttgatccatagtcgaaatcttgaagtcccaattttcattaattgcagttcaactgcttaggcgaccaacaattcaaagtcttccactcgtttactctcaaattttggtgttagcttgacttggtcgtttactttttctaaatatttgcatatatagtttagtttgtttgctagagctggaactcaaagagtgtgaaattttagtaattgatttggtctttggaatggagaggcttttgcttaagtattcattatgggttcttatagtttcagttgaaataaaagcttacagagcttgctttgcaaaggagaggacaggcctgctggagatcaaagcaagtatcctaacatcgaattgtgagattcaagacaatcttgactcatgggttgatgacggagtgagcaactgttgtgattgggatcgaattacctgcgatgccacatcaaagcgtgtgattgcaatttctctcaattacacaacaggatatccacttaattttacaggaatagtttgtagtttcaatctatctttgcttcattcttttggtgaactgcttcaccttgatttgtctcataatcgctttaatggctggactaaccatggaggtatatatctcttatcagtttgttgttcttaattagtacgtattttatatatatatatatatatatatatatataaactcgaggacgttgcattctcaagtcgttttcctacaagattcatgctaccaaccatactggtattccctgtagcttgttattgatgcattagatcttaattcgtcagataataaaccttgcagcaccacgagcataatagat

SEQ ID NO: 6509 - DNA, 1465 bp, Ricinus communis
  Intron number 2 from transcript 29628.m000787 (locus 29628 .t000041) derived from phytozome v7.0 (chr-ID 29628; pos 2 28825 to 230289)
ccatattcgtatgtgactttttttttttttttttcctaaagatggactatatgtgactatttatttggtgctagtgtttatttttgaagatcgaattcaacgtgaagtttcagtagttgatttgtgtccaagatgaatatagtggtttaatcaattttgcagaaagaagagggtaactttcaccgacttactgacgttttcaggaccgttcattgggtttcatatggcaaaagtaccttttggatgatttggccataagtagctaaaaatgctttaaggagacttgttctctgtcctaggaatctcagaagcattttatagctccttttggtcaaaaatcttaagaggtagttttaccaaagcatctgtaactagaattgcaaaccacccttttgctcgaaagtattggctatagggtttgaagatttctagattctattgcattaaaatttctgtgaattatctggagggtttcatttatcatgtgagcggatctgttaggtgtttttcttgatcataataaaactaaattgactcctcaattactggacggtgtttagttgaacccaaaacttcaattcagcttacttagaaatcggtggtcaaatttaccaccaatattagtcttaggttaggatttatgaaatctgagaattaataatcacgaatattgttgttttgtctttctagaaagttgaatatgcataccttcttgctaactgatgaacatggtaatatgtgatgggagcagggatgaactaattagtgaagacggtattttatgatgataatggtagtattggtacttgtgatgctgtcattattgtggctgccatgtttagtgttaataaccatgactgtgctggtggtgcttatcctagttctggctgtgatggtgaagataactttggatgctaatggtgacttcattagtgataatgtcatgatagcaaaagaggtggtggtgatggtgatagattctctatttgtaagcaaacacaggggttaaaaattgtagcaataatgagagttatagactcgcagtatttaagtatactttacatatgcaaaaaaatccagctggaagttgggacgtacggtccctttttctcggaagaattttaagtttatgagaattaaaagcaattagaaatttgatatattttgcaccagggatttcagcaggtcctgccactgctgataactggacttcttctatggttaattatgtttaacctgatgaatttgaactgcgatgatatgagtcggtagttctgtttactgaggtgtcacagatttaggtatacgtcccttggatgattctatttggcaatatccttgtctgcatactattctttatatttgaagtatgaaacttctgttcgaagattcacactgaatgtgcacttattgatatagttcttattatatgtctcctattttgtaagtgcagttttgaaagcaa

SEQ ID NO: 6510 - DNA, 3899 bp, Ricinus communis
  Intron number 1 from transcript 30055.m001619 (locus 30055 .t000089) derived from phytozome v7.0 (chr-ID 30055; pos 4 43578 to 447476 reverse strand)
ctcaagttgaagccatcgttgttaaacctcctcctgtgagtcttcctctttctttttttttttttttttggagatctacttgctttctgcatttttatcacttctctttttgtttatttcctttgtctttaatgttcgcttttcgtctttccctcagaatttattttttattttatttcttttcttttttcagtttgattttatgttcttggagggaaagggattttcttttttccttttttttcttataaaatagatttcttaatttgttgtctactttacactgcttaattgctatatttcaccttaattaagagtatcagctttatgaaattttttgcttaagcatgtaagtttagctgttttgtctgcttcattagcgaatcagttctacttattaaaaggtaaacggagggttggacaagacaaaacgttttctttcagaaaactatgtacacttgctgccgatttctttctcttgttgaattgtcacctctcaatattggtaataaagtcttactgatgtgtaaagttaaaacaccggcattcaactgcttcattatgcaacagcactagtattctttttatttgttgccaacaattctgagtttgagttctgttataaccgaaaattctctcatgattaagggaaagcataaaacttgtcaatccagtgttattaagcaaatgcatattgttgtttgatggagttatccagggtgtcttgcattagttcttttggttatttctattttcttctttttcttttatcctcttcaattcttgagctccatttctaccgctatccagctcaatgttttttcccacttaaatgctcctctcgtttgttccatggaagttacttcaatgttcatgacatcacagggtatgatagaataacaaagagtgaatgatgaaggaactttgatgtccttgtttggatgtgggtggaatatctgatttcctgttaacttgttttgtgttatgagtccataagtctttttatttcttaaatgagatagtcattgctaatgggtgtgggtttgggtgtgtgtgtgagagagagagagagagagagagaatacttaatattgtgttctctacttagatcataaagaggcagcaatgctgatctttgttgataccttctcttgtatttcctttctatttcttttatatggaatctccagaagactgatcttagttggttctggcataacatgccattgatatgtccattgtcctttcctatctttgctatagcatccctagccaaaggtaaatgcagtagaatgttttaagcatcctctttgtctctcaactaggctagatatagctgtcgtttataatgtcctgccattgtcagagtttattatagttttgccactacataaaccaggaataaggtatgtgatccctctgttgtcttgcaaaatctatgaatgaagggtgctggtttaaatggaagacttaaaaggtctaaattggacaacttgagtaataataccattgaacctgctatgtagcatggaggggaatattctggtaattttagttctggtactcgtattaatttcacggcatgtctacttcttagtacatataataggaaaatttcaagaatctcaataactagaaatggaattgctattttagctctgtggataaaccgtgaccaattacatgatacaaaatggttcatattaattaaggttatgttctattttgaggatccacgagaaccttgggtttattaagaaagaaaccttccaatgagctgtacacacatacatataagtatggtgtagtttgatttgagtaaattaatgatttctgattcctttttaagttaaagaattaattttttccccttttgtattacagctgctacttttctttcttttcacttttgcaagttatcatatttggatgaaatctaagaggtgaagtttcaatacattgtattttgaatgcgccttattccattaaagactacattgctatgcttttactttctttttgccatcacttgaatacccatcattttcttaaatgtttgctaatgctgtcatgtattgaattaaggccatggtttttgttattatgtttattttagcttgcaagcatattgtctacaacaaattgagatgatgactctgattaagtaaaaagtgctgcattttgcttgttctttcaggatctactaaatctataatgatttatttcttaatattcacgctaaggtgatgggttggtttctagcttagccttcgtggctgaattctctttcatcttggtctgctcattcaattacgggcttgcattaataacgccgtggaattttatatttattattgtgacggattgtgtagcatcatttgcattatctagattttctttctatatgttgatactggatgagaaaaggcttataatggtgtatgctttttttcctgaatcttctgatttcttttaattggttctcattatttagtcaagcatccatttccctacctcttccttctgacctccataatccaagttccttttgtgctcttcacttccccattttcattttgacgaggttatatgatgtggcattcgttttctttttttcttttttcttccctagttttgcttgtttattgaggaaatattggccagcagggtcagctctcaaaagtcacacaagagatactccgcatattcctcagaaaggcaaactgtcagaagttcatctgttcagaagttgttggtcgggctgacctctatttataatatcattcaaggggttattacaaactggcaggtgctgtactgtaccaaaacagtttttagggggtaaaacattggatttctggtgacagattgcttggacttcttatttaccatactcaggaatgattgtagatctcttgaaattattatgattagaatttcattttcagcaagaatgttctgaggttaaagcaatcatttatgctcagaaagatatgggatactgcaatgagtagagatattattatgtaaatttaaatgccatttccaggttttcctgttgtttaatactggtatcgtgatgctttgagttcaattgcatctattttcgtctaaatttgtgaggattcttttaggtgcattagagctggctgtcagctgcaaaggagagtttttatgtaatgacatttgggttgtacatgttatttcattaatctcttggaggcaatattcacaaaaagatttaagatgttatttatcaagaagaggttgatatatctgtctggttattttcctttatgggtttgaagaactgcatcaaaatttttatactgccttgacgacattaatgtgctttgaagttagcttgtctgttttttcatggattagttctgaaaatgtattaaccaattagcaccagctaagagagagtagtttatgactactagtttagctgcttccacacacagatgacaaagagagagagtgagtgagagagagagagagagagagagagagagagagaatatttagtgccttgaaattaaaataccttatttttgtaacacagatgacaaacagaagattaaatgcatttagttttttaaagttttcatttaataagttgaatttaattccagttcttctgtttggttgcatgggttccattgtttgtattaggctggttgtctaacatatatccagtgcacttgcatgcactcaaatttatagtcagtgtgcatgtatgttgattatgattctttaacctttgctggggtaccagctcttaacttctgtggttacttctttattcgtaacatgtgattatttaggatgtacatattactaattatggtctaaaacaaccaatggtgtttatcagccactgaagcggaagagtg

SEQ ID NO: 6511 - DNA, 291 bp, Ricinus communis
  Intron number 17 from transcript 29900.m001564 (locus 2990 0.t000026) derived from phytozome v7.0 (chr-ID 29900; pos 168894 to 169184)
atttagaattagtaagtattgatagtgaggggcactacaagttggctcaagtcttcatgggacagacatgataaagtttagtaaaattgaacctttggttgttcacagaaaataagaaaaatcaccatgaagcatatttgcacaaatagcagtgtgctgataaatggttataaacaataccttctattcttagtagatgattctcacattatttatgtgctcatctcttttgtttttcccctttccttatcaagtgtgaaaattttaattggcttgtcctggtgcaggaac

SEQ ID NO: 6512 - DNA, 1734 bp, Ricinus communis
  Intron number 2 from transcript 29728.m000799 (locus 29728 .t000005) derived from phytozome v7.0 (chr-ID 29728; pos 4 0426 to 42159)
gttgatcgcagagtaaatggtccttatgatctcggttaaccgagctctctccatctctctttctcttcgtgcattaaagtgatatggacaagtttcattaaatttagtgaatcatttatctagaactttgatgagtattctgtggttactttgctgcatgagtttgatctgagtgccctgaaacaaagtgacttgatttattttgggattagtggagaagattttgattgattttttatagcataacagttaataggccaggtattcatgcttaatgaaatattttctcttccgagtgattaattctgttttagtcatgtctcatcagagacaaatgcagtaataataatcaaattggttatatggtggactatatatccttgtttcagaacatagatacgagattttttagttacttgataacctcctgccaaagtttcatgcagaaaagcaattaattattaaacagcagagaaggtgctcttgtttatgtgttttcatatagtttttggagttaatgtaatcttctatttttacgtgacttgaatagttcccaaagttttaactgagacaattgagaaatttaccttttacttgagtaaaatgatatgctattggacataacacagtcttgtgagtttcttgagaatattcaagcctcatgaaggtttatatagtaagctatattgttgagcatgtagggcacctagattctgggcaactttttaagctatcttcaaaaagaatgtgacgtaaaaattgttccctcctttttttttttggattcgtttgtaattaactgtatcttataggtattagagatatagtaatcttttaaatgaggaagaacccggtttcatgggtgtgcaagatactaattaatgattttcttctttagggacctttagcatccaaattgttacactgaccaaagttattattgctctcagtatgtggtatgatgcctaaactacggtggcctgattcagacttttagattcatgcagttttgcttgaaaacatgtgcgaacatcttcaaattctcataaattaagaagcaatatgctgaggaatccattaagaagcaattccttgcttcctttttcttttgacttagtgccatatctcatcctcttttcttttgtcttgatccaccatagaattttcttcatctacaaaacattctagtggagttctcagtaggttgtgtttgaatattcagtatttggttgtttatattaagcccagccaaactaatggagataggctatgaagtttaaatcaatgccatcttctgttgatatttcacatggattaagaaaatttaagcttcatttttcacattaaagaatgactcttttcttctcatgttcattgattgattaaaactctatgtaatccatttgattcctgttatttagatgcataataatattttccttataacatttatgtatatttccattttctagtcagcacatcatcttaactgcatagaagatgcacaaaaaatttgaattttttttggaaaatatcagttgccttgcaagttgttctgttaagtaatttatatgctgtggatgtatgaccctttccattgtctgtcgccatcactttttaagttttttagttattttatatatattgggagtttgtaatgagtcatctcatttctttctagattttgattagtttttctttgttctaaaagtgcaattgttttgcagggaatat

SEQ ID NO: 6513 - DNA, 1636 bp, Ricinus communis
  Intron number 1 from transcript 30128.m008724 (locus 30128 .t000185) derived from phytozome v7.0 (chr-ID 30128; pos 6 85995 to 687630)
gtgccctgaagagtttgcctggttcttaccattaggttagctttttacctctctgaaaatggtaatgttttgtgtctgtttcgatacctcaaatcgtgttgttcatttgatcaggctttagtagattttagcatataagcaattaagcagtcagtagaactttccatttttggcatttcctatttctttatatcaagaaatagttatgttggttagtcagcatatgtggataccaattattagattgtaatctcttcgaactccatgatcgcgtgaagtagagttgtacacattgatgttgtgtttcctttagtttatttccccaaatgatgagattctctgaagcagagtttccttttgtgaaattagtctaattctttaatatgtttggtattgtacactgatattatttgcagcactatgtctcctaactggatccacaagttgttgtgactctcatttggttataagttattcataattctcatattagttttataagaatggattttgtgcttttggcaacgaaacaaggtttatttggctatgaatgccataccagttcagaatccagcttgttaagcagattttgcagtaagacattacaaaaatgattaggatcaagttactctaattttacatcttgagcttatggatttattgtgtaagcattatatgaccaattagcaattgaagagcaacacccgaacttctttattgaacagggtttatttagactactagtgggtttgcattagttgatagctgggtattcctgtaatttggaaactgaaccttgctgactagtttcataaatttggtttctgatcataaggtggaaaggaaaactatttctattctaaaatcaataactgtccagaaaatcagaaaatgacgcaataggtgtactattgtccctttaccatcaattctatagcatttctaggattgcagcaagaatcttagcttctatcaagttcatgtgccgaataatgatttagtctcccgaatgctttctcactgtggttgctgcttgctgatgatgtgataatagaggcaacattaaacacagattgctggattgcaatgcagttcaaggcattcgtctgtaaaatggaaaagcagatgacattttaggacagaatttgacctctgcctatacaatgtgaaattattgcagggatagttaatatcatatatgttgagagattttactaatgctcctcttgagcttcattttctgttctgtgctccttctgttgttactacacatttcgttgtcattattttatccttccttaaagacattacttctttcctctaatttttctctgatgcctaatattctgcaggatttatcaacacctcattcacaggtcagttctgacttctgtgtgtattatgctagtttctgcttcaaaacatcctaacatagaatcacatgaggaacttgtgaatcaactgaaggtcttcactcaaaactgacatataaagaccttgtggaaacgagtttgttttgtcacaggacttgcatatatatgtatatatatatatatatatatatagattacttctaatcctcatgactaattgtcttccttgttataattttctctgtgtgcagactgcggcaatc

SEQ ID NO: 6514 - DNA, 2613 bp, Ricinus communis
  Intron number 3 from transcript 30131.m007123 (locus 30131 .t000274) derived from phytozome v7.0 (chr-ID 30131; pos 1 692133 to 1694745 reverse strand)
tttcaaagtttaagtctgaagtacagagttctcaggtatttctttaattcttttattaggttatgtctgtctatgatcattacatatctaatgtttgattatagtgatattctactttagtgtagacttaaatcatctttcaatattctgaagatgggtggttatgtcttggtaactttgtttgaacagttgatctcttgaaatgtattgatagtctggggactaatttagcctttttctaagtcaaagagtcatctctatagaaaatctagaatatagaatgactatgactactgttgtaagttctttcagaagcataaatcttggctgtgaaaaagttagtacatggaggattagatataggagatgcaggcgatttatgtgacatataggaaggaattttggcatttaaatttcagtaagttgtaccttagaagtaactcgtccgtagcatttaaggtggacacattgaagagggagagaatattggtccctactgcttgaccttagctggctttgttttgatttcatatatctggcataagagtcttgtctggtactcttgcatcagcctcatccaccactggattgatttggctttggcctatcgttgtattagtggtagactggaaagttgaagccactttgccatgctttctagattggattgttagtatagtttgacaacacttggagctgggttggggattgacaatttttgagtggcgagccacatcttaggctaggagctttttatctttttgttgcccgttgcttgtgagtttaaatataaaacaaggcctaaatttttgtaagtgaaggagctgctcgaagatgtccaaagtccacttatgtggagctgtactgagttggttgatcaccttctaatgttaaatggtggttttgactgaacttatctgggtaactttcaaattgaaaggaggactcagagttcagcctaaattgataggaaacaatctatgaggcattgaatcccttctattactttagggccactccgagcattcatgatcattagctactgtttttccatgtggactgggaacggttataatcattaaattaatatttcctctgaaaaaattttcactctacttctggtctacaggatcttttgtttaattttctggaatttgttattaagattttacatgcatggtattcattaattcattatctgaaactaacatgcattttatcagagaattgatttattgatttgaggtcttaatatattgaaaaaattgtggctctctcatgattctgtcatttactttttaacaccttaagcccattgtccaaaagtactatctggagttgcttgtatagaagttggatataacaaatatattaagcatctctttgttgcagtcttctatttaagatcataatctcaaaagaagaggcttacttagaagagaaatgtttatcacttgttattaatttaataaaatcgaatgagaaccatacgataccatctttagttggctctgatgccatttctagtgtcatgggtccattgcctcacacctagtagacattccatggaatacctcgctgcatctgagatgtgagatgtggattttgacaactacatgaaactggtcctataggctgttttgggtcagggattcaccaagcttgcttggtttgttctcataaatttgtaggagtcatgggatcttatctaccattcaatctacttaatttagatgatactggtagaataccctttcacatatatgatcgtgactaattaaccagacagaatttgctactttctctgtgaagcttagctgaaggaaacataatatcaaagtagaaaactcatgtgctgaatcaagaacaagattgagtacgacacctttctagaagcacccatctttgagtttctggtttcttccttggtctgtaactttcccaaaagtgatcccattccttgaaatgttagagttgatctctgtctttccctcactggcaaacagcacctccctctccctttctctctctcaagtcactgcacacatgtgagactgtagggtaattcttatgcaagatttgctaaaaagtttgaggttagcttgttgctagaaattaaatcaatattgtatcaattgttgagtagaaacttatttggttacaatgttaaagaggttcctatagcagcatatatttgggcaatttttttgaaatttttctgattatgcctttcttgattatgtggtccttaattatttgaattatgagacagattctagaataaataacatcctgaagttgtagtaacgttacattctggattttatgctgttgcatttgaggctgaggtagtccagtgtgcgcataattctgttcattttcatttatattttctcatgcatatccattttagaaaaaagagtgtacaacttcatcactgttttaaattgtttctgctcccagagtaagtaattttaaaagcttcaaatttgtatcttatgtatgtgttcttaaaattcttgatagtggataagtagttgattttataggggtatttactcgtgtaaatcttcctgaaaaatccttcataatgcacaggagcatcatttttcc

SEQ ID NO: 6515 - DNA, 2040 bp, Ricinus communis
  Intron number 1 from transcript 30169.m006483 (locus 30169 .t000260) derived from phytozome v7.0 (chr-ID 30169; pos 1 455666 to 1457705 reverse strand)
ttgctcacttttgttgaccatttgcctactgggtaatctatctgttcttttctgggttctaactttcattgttttgcttattggtgggagataaaaatggtactcattcattcttccaatggggtttttttgtttcattgttgattgattgtgatatggccttggaaggagaatcattgaaaggtcttctttttagtctcctggttatagttgtgcgcctacttttggttatcggggatgcgggagggggtgtgtgttcaatttgattctttgataataaggtgtttccattgtgttttttttttcttccttttactcatcatatttgctatttggttactgttttattttctaaaccttttttctgtcctgtatcaatttcatttcagtgttgttctcttgttggtaattgttcatttccccctttttggatttattcgctctttcgcttctttctatcttcttaaactgataaaactgataacatctatttgctggtttttcttttgtcagcaaattgtgattttggtgatgaatttctgttattacgttacagcacctttcttgctgtttatatatcttgtttatgcaaattcaaatgttttctcttttatgttctgcggttttgtttatgtatttatttgttcactgggttcactattttggatgagactgatattcacttttgaatgatgaactctatcatgtcatctgttacttcgacattcgtcatcctggtaaatcaatcttttcaatatttgagttgggaatatcttttgcttcaacactttacagacaatgtttaagaatcttaaatgttctctttctattctcttcttttttcatttaagtgtgttggaactgtttgaggaatactgtgtgtttaggttcctcaagtggaatatgttggttttcacttacatggatggcatctttcatccatcagaatcaatgaacagaatctgcattatatttttatagcttaaaattcgcaatcttatttggttatcagtgatgtcataatcgttcttctcctcatgatgctatcatatatctttaattctacggttgatatgtgggctcataattatacataaatggaaaatatctcatacttgaactaatcaaattatagctttcaacttgtacattattgatgcaagcatgctaggtggccaggctatctttgtgaggattgccacattaatgtgggttgtagggagtagctttagcttcattgaaatatcggctagttatttgtgtatgtgtttatgaatgaaaagttcaaaggtgcgagagttattttcagttgtgctacatatctttgtgaaaattttctcactgaagttctttttgagaatatactcctaaagttgagagtgtgacatgatatatttatgatacaaggactgataaggatgttaaatcaatttaaattttcggcatcttggttcagatatctgcccacatacttaaatgtgaatttgtgtggtggtgcctaccctagcatttagtgcaaaattgattcttttctatttacacttgtgcatttacgttaggagctgtctcccagttcccttctgttgatatgacgtttctttcttttctttgtttaaagtaaatggatctggtttttaattccagaagtttttcttagaaactgtattctatcagctctctatttgcaaattatgtttttgggttgtgctgtaacaatattgagcttccttgtattgatgtattctcatttagtagttcgataattaaatccatatgaataaacaagcttatgttcggtgtatttactaattggccgcattgaagcctcttctctttcgaggaaaggatgtgacagctgagaacttttgagactaaagtgaccactgtcccatatgagtaggcaaacatttgtttccgggttttatttttgcatttgatgtcatgatttgcagttgctatatatttgtcaaaattgcatcttattcttcttatgtttgcttaggttgtattggtaaattgatttccatgctgttgtcagga

SEQ ID NO: 6516 - DNA, 1677 bp, Ricinus communis
  Intron number 10 from transcript 29842.m003508 (locus 2984 2.t000005) derived from phytozome v7.0 (chr-ID 29842; pos 52664 to 54340)
gattgccaggtaagctgtaacaaagtttgaagtgttgagaaactaagctgttttggtatttggctatgtggttttaatgtcgttggataagttgtcagcttctgttttaaatttatgatcccaaagaatgaattccatgattaattcaggtattagtggacctagaatcttttaaaatacattaatgagggaatggttatctggaaccaagtaagcattttttgtaagtcaccacttgatacttgctcaggaaacaagttgggtgggtttggtcaagttctggattcttattcaccaaaattgaagctgataaactgagatacaaagcaatttttttcaagtttgtcagtatatcttagttttggtttagaaaggatcaactcgaatataaaagttcaaatccataagctttctcgaaaacaaagttggttatccagattctaacaaagccaagaatttttacaaaagcccatattatatatataaaataagttggaaatcaacactggaaacaatagataaaggaacctgtagttattaattcctggattaaaatcaattatgcagtatgaagccaacaagaaatgagctagacggaattccttctttcctatccatgcaagctgaaatttcaagccttaaattgcagccaaattaaccagataatgaatcctcctttcctttcacatgacatggtagggaagctcagattgagaggaggaatgagaaaggtagataagttcttttgggtatgaatagttttgggagaaatttgatgtctgcattgctatggtaaggtgatggagaaggaaacaagagatgggcttcataagtatatgaagtgatacaagtgatctaaagggtgctctgaaaattttaaagttctttcatcctggtcagattggttctcataattcgtaaacagaaccatctaccaagaaaataattaaagaacccttatttactgaactaaatcgaactataataaataacttcgcttccaaaatcaaaaaaaaattagggaccagataaagatagtatatgaaaaatatcaaaatctttcagcacgaactgtactctgcttagttggattttttttttccaaatttagaaaaagaaaaaaatagaacacaatacaaaaacaaaaagaataataaccaacacactcaatagatatattaatttttttcaaattaaatcatttacatagcgatcatatatttactgttgttattcagtgttattcagatgtgctattcagagccactgttcaaaggatggtaatatcccatcttaattgatattcaatgtttcatagtgtgcttgtaaagctgtgttacataaagcattgatcttttgatggctttactgctatattgtccattggtctctgtaaaggactactctcttccattattgatgcctgttctctataattctgccgttcctgatacataacattacattcttctcagatattttttggtaagtggggattgttagaaatctcctccctaatgcttcccgctcgagttggagtgcacttgaattcaaggctttttattcattgcttaaatcatgtgaattagcagatagatcttcgtggtcaatcttgctctaatttaaattgctacctttcatgttttttgttctgattgatatgttcatttactatag

SEQ ID NO: 6517 - DNA, 1167 bp, Ricinus communis
  Intron number 1 from transcript 29637.m000744 (locus 29637 .t000022) derived from phytozome v7.0 (chr-ID 29637; pos 1 67011 to 168177 reverse strand)
gagtacccaccattaatccagcatcaggtaaagttaaagacaaatacatatctctcttttgcaccatcttttcatattatattccatacaataatatatcagattctgcagtatagctatttatttatttatttatttcttcatcctaggaagctagaagatcatctttttctgtctgggtgcagccctctgaatttgatgaaaaatatgtattaagtatttgtcattttatagctatatatataacattaaggaattagatgtatgaatgggacaggggatatatctgactgctaacatggtcaaagttagtgtctttactgttattagttcagggttttctctgttttgttgtttttagcaattaaaaaaataaatcaaactcacccaattatcataagaacttgaagcaagttttgaattaaacttttgagtttaaatttcatatcaccaacattaatttaaagttgcagtaattgtcggaaagcaagaatcatatatggtccattcttttatatttaatatttaataaattagtaatttttattagttaataaatttttaaaaattaactttattatcctttagataaatttttttattcataaaaggtccaatagactgtggactatacaattgtagatagttatccccttatactagccgtaaagacaatttcaactaacacagaagtaggacttgagctcaagacctccatctcccaagagcaatcgctgttgccttttaaactagatcttaagtgtatttttctttaaataattaaacttaataaattaataattttgatttttaatttttaatttttaattttttatccattaaatatattaactctctatatataattttatgggatattttcaacaccttaaaatacactctcattgggaatttctctcttttaattttttctaccgaaaccaaataaataaaagattaactgtattggaaggggctcaataattacataataattcatgtaccagtcagttacatcaaaaaaatttcttatatattattacaatccttctcctattctattctatttacttgtggttgtaaaataatgtgatagttcttaatggtgtaatataagatgtggtttttgtagaggtggcagggtcaaaggaccacactcaaaggaca

SEQ ID NO: 6518 - DNA, 7344 bp, Ricinus communis
  Intron number 2 from transcript 30054.m000814 (locus 30054 .t000029) derived from phytozome v7.0 (chr-ID 30054; pos 1 80864 to 188207)
tgataatggtaaattactcttcttcttattcttgtttaataatttataatttccctttagcatttactttacagtgtgttcaaaagctttaaaggctcttttcttcttcttctccttctcttcttctgctttatccattcttttctataagacagtaaaatgtatttatccattctgattagtaatgcatgctgtcatctatcatgccattctttcttgacagcaaagctagatgctgtgtataagacatgtttaatagtaatttataggcttgttttcaaacaattttaatacatcctgaatgggcctgtctccaacacattatttgcctgctttgattaacaacttaatcatatctggataatgccattcaatttttcaaattttgtttagatccaaattgtattctatgtttcagggaaaagaatgtattctacggaagtatgtaatcatatttccttgtggccatagtaatcaatatgctgtagttattgaagttccaaacttttactgtaagatgtgagttacatgtatatttatttttacctgacactatttttctgctgaaagaacgtgtatgttttatcctcttttcttttaagtcgtttcatttgttattgctgagtttcttcatagaatctagaaaagctattggctgctgaccttttaagcaactatgggacttaaaatgattccaaaatctgcattgttcattatgataaaaaattaatagccgtgtcaagtttcttacttcaaatgtgatagagaaaagacagtggtagctgtagtggggattcttttgacattggaatgggggagaggtaggtagtgttgtgtgtgggtgatagcaagaagaaagggatgagtcagagagatgcatgagaggagtgggcaattctaaatagctcatttgcatgtgacagttgatatatgcatggaaagtaattggaatctctcactaataggcattggagagtaaggtttctgatcgttaatttagattcagctaataattagagatagaaggttagattgagaggatcttaagaggtagatgcggaagggaatttcttatggagattatatgatgttaggagagaagcagcaatagcaccttaaggttttataacatttttagaccattagaagcttaattgcttctttgaattatattttacttcttaatggcaaattaacacaatacttatatgcacaggcgcatgtgcatatatataagctcattagcaatgtactgtctattattcttactcagtgaagtttcttccagcttggattgtattgtgcaccattccttgtctggttaagttctctttacttgtgtatgctttgcaaacctcaacatggctataatcttaaataaatggaacgtagatatttaaatactctttgctaattttactttcagatctcatgtcaaccattgaattgcttgaaggtgtattgttgttgatattatcttaaaagcgttaattcatgttttcttttttatatttcaatattgacaatattggacgatccgttaaattttgtgattttcttttcaatatcctaatagtgacaatttgtttttgcttttagtgtaagcaacctagaagatgcttatttcaaaagccactaatcaacactgccaaatactcttattttcttccttaatttttatttacttcttcagtaagggtttttgagtggttagtctctgttcgattagaatattactggatgcctttaaatttttacataattgcttcttgtaagtagttttgagtggttgattgttacctgtcttagccaaggatcttgtcactggacaatttaccgagaaatctgattctaagggctgcttcttccctttaatgtgattcttttctcgacctatgatgaattatttcaaactcattaaagggagtttgacaacttagacctcgttagagagagctccaatctcaataattgtgattaaaatttggcttagccttttattcaatttcagagtccttttaagtaggactagttttcttattaacataggaactataatttaggtgcctgtaaatcaaggatactcctaactaagagataacgataaaataaaaataacaaaacaaatctaggccatctaattctaactcttgccacgtctttgataagaatgagccacaaaggagtccataacatcaccctccttctgaagaaaaaaccttgtcctcaagctcaaagtctgaataagcatcttggaacttcacccggctctcctaggtggcatcagcagcatcaatactagcccaatgtactagaaattcccaagtaccttgattaagtctagctcgagttactgaagcgggagttggaataacacaaccattttccatatgtggcagaggtggaagtgaggctggtggtgtccctttataaggcatgagaagtgaaacatggaagacgttatgaagtttagactcggctggtaattgaagcttacaggcaataggttcgatatgctgcacaatgggaaatgggccatagaatcttggggacaacttatggcgaggttcaatagagacagatttttgtcagtatggttggaggtggagccaaactaaatcccctgcaacatattgcacatcacaatgccctttgtcatagaactccttcatatgatgttgtgctttctgtaatttagtccttatagcagccaaagcttgatcacgagtaagcaaggcttggtccatctcctcaactctagaggaccctgatacataggaaaggagacgtggtggatcacgtccatgcacaactctagaggacctttgtagggcagtatgaaatgatgtattgtggcaatattcaacccacggaagccaatcaacccagctcttgggattttcccctacgaagcagcaaagatacatttcaattatactgttcaccacctcggtctgactgtccgtttgtagatggtactctgaagagaaggcaagctttccctctagaaattgctggtgaaaatcatatcgcgatcacaagtaattgtctcaggaattccatggaaacggacaatgtgctccaaaataatgttggcaactctagtggcaacatacaggtgagccataggtataaaatgtgcgtatttggaaaatttgtccatcacaacaaaaggaactgtttttccctaaaccttggcaacctatcgataaaatccattgcaatgtttgcccatatttgagtaggaagagtcaaggactagagtaacctggctggactcaagtgtttagatttctagcgttggcaaattgggcaggaggacacatactcagcaatagttgctttcatctctttccagtggaaatctcctttactgtgatgtagagccttttggataccctcatgtgtactgtcatgataactagacaaaattgaagcaatcaatagggaagaaggcatcaagtagatgtgatttttaaagaatcagtcgttcatgtattgcccaattagaatctttttctccctttgtaacctgcagatataactcttgcaacgaaggatcattagtgccttcctcacggaaagcatcaagaagcaaaaaagagggtgactgattgcaaggaaggatcattagtgacttccttacggataacatcaagaagcaaaaaacgagggtgactgattgcattggccgccttttcctctctgtagcgcctggataaagcattggaagcccagtttaaatagctagcctagtattccattacaaaaacaaaccccaaaagcttgcttatccaatgttgctggagagaagttgtgattcgctggtctaataaaaatttcaagctgtagtgatcagctcttatccaaaaagtgtgcccctgtaaatatggcctccagtgttgcaccgcctttgccaaccaaatcagttttcgctcatatgctgcaagtttgtggtgtaatgcaaccaattggcgactgaaaaatgcaatccggtggttgttttgttggagaatagtccctataccccctccggatgcatcacattcaactatgaacaattgctcaaaatccagcaattgcaaaactggagcagcagctagtgcctatttcaatggattaaaagagagctcagatgcctcattccaataaaaggaatttcttcttaaaatattgatcagtggtgccgctaactcttcatttgctttaatgaatttgcggtagtaacctgccagccccaagaaacctcgcaaagtagttatagattgaggttttggccattctatgatggcttgaatttttgttggatccactgttatccctgtaccagaaataagatggccaaggtatgccactttggtctccctaaaggcacatttagacttcttcaattgtagatcgtaagcacacaacaattcaaaagtaatgcgcaagtgtatcaaatggttttcccatgctttgctgtaaattagaatatcgtcaaagaaaaccaatataaatctgcacaaatgagcataaaatacctcgttcataagtgcttgaaatgtgtgacggagcattgttcaatccgaaaggcataaccaagaattcaaaatgcccttcatgtgttcgaaaggctgtcttctcaacatctgatgcatgcaaacttacttgatggtatctagattttagatccaatttagtgaagtacttggagccatgcaattcatcaagtaactcgtctaccatccgaatcgggaatttatccttgactgttatggcatttagctcatggtagtctatgcaaaaccaccatgtcccatcttgctttcgtaccagcagaaccggagaagagaagggagatttactaggtctaatgatcccttgttgaagcatctcgtcgcattgtttttcgatatcatccttttgcaagtgaggatgtcgataaggtttgactatcaccggtcctgaccctggctgcaaacaaattcgatggtcacaatgtcagagaagaggtaggttgaatgggtcttggaacaaatcagcaaattccgttaggagctattgtaatccctccctatgtaaatggagttcgttaagcaggtggagctgtgttacagtagggctgcagtcttgtaatacaagtttcttcctaagtgatgtgaactctatagtcaataaggcaaaatcccaaaggatgggggccaagagtttacaaccatttgactcctaataccaggtcaaaaccagccagaggaaattcaaaaagttactccattacatattccttcaatgtggacattctctccattagctattaatacacttgcatctgttttaggctgaacattgatttcgagtcttttggcaactgttaaactgatgaaattatgagtacttcttgaatccaccaaacccataaagactgattgcatataacaaccttcacttgcatagtacgcgccccttttttacccgtgattgtgtttaatgaaatccccagttcaccatctaccactgttgttgattccatttcatcagaatctgccaattgaagccagaaaagctttttacattggtgaccagccctgtaagcctcattacagttgtaacagaggcctttcaatcttcgttcagccatctctacccttgataattttttgatgaatggtgtgtctacagtcttggcttccttcaatcctccagcagtggtagtacttttggggagtgccttgaatggatggttttactgcttgggcatagtcctttctttacctacgcttcctttagaacacaaagcttggacttaaatgctcttgctaaattcattgtgtgagccaaatcaggtgggacatgaagctccacatctagtcgaattgaatccgcaagacctgcagtaaatagactcacatgttgatcaactcgaatgaatttgtttgcctaccaatttctcttgaaattgcttttgataatcttctaccgacccgatttgtttcaagtttattagttcccctaatgggtttcttctggtccaaaatgcaaagaacagtaatcgatccagctgattgtgggttgctccaattccaactaatggtaccataactgtgcttcaccgagcatgtggcaagcagccaattccaccttatccccttcctgcgtatgttggttgacaaaaaacttctcgcatggatatataaccagattaaaggatctttagagccatcaaaaagttgggaagtccaacttggtgcagcggggaacaacttcataacctggttgtggcgccgaactctgctgctggttccccgcgtgaattcttgaagaattctgcgctcgtggggtgcagcttgctgttccatctgccgcagtttgcatgccacgattaaacccgtacaatagctccttatattgtgatgataactcctgcagctgactacccaatcgctattcaatctctactgcacgtgcttcctttgcaacttggccttcctgtaataacaatcgcagatcttcttttgtcggagagtcgcccattgtgttaggctctgataccaatttgttacctctcttagccaaggatcttgtcactgcacgatttactgagaaatctgattctaaaggctgcttctttcctttactgtgattctttcctcaagctatggtgatttattttaccttggaccttgttagagagagctccaatctcaataattgtgattaaaatttggcttagccttttattcaatttcagagtcctttaaataaggctagtcttttattaacatagaaacctataatttaagtgcctgtaaatcaaggacactcctaactttaagagataatgataaaaaaaaataacaaaacaaatctaaggcatctaattctaactacttgccacgtctttgataagaatgacccacaaaggagtccataacattgatggagtaaaaaaaacaaagagaaaactcaagattactcaaatagaaaaatccaagaatgctgttgctgtttctccattttattgttgtctgaactgcatctgattgattgtaaagtcttgaggtatgctttaattgattgatatctaggcacaagttgagctactctgtgtctgttgaacaatttcccaattgtaccctgctagataatggtttcaagaattgttcaatttgtcagaatatgagacagcagattcttagcaagttttgttatattctctcggcttcattgcttaattccagattgattttaattcaaatttcaaagttgttattgttgctttttcccctttaccatcgtttcctcattattttaggatagagcaatgcaaagtcataaattaatacatgttattttcggcacagg

SEQ ID NO: 6519 - DNA, 729 bp, Ricinus communis
  Intron number 11 from transcript 29872.m000541 (locus 2987 2.t000019) derived from phytozome v7.0 (chr-ID 29872; pos 139768 to 140496 reverse strand)
tgatctttatccacaagtgagtgtactttttttcaggcctcatttcataattttatttattgttacatatgccttttccactcctagaaatctttctggcaatggtggctaatccgtggtcgttaatataaatgtgcatgcatttgtatctcaatggtttttaaggtaaactatttgcttaagtggccttactttagaagagttgatgtttgctatatttaagccaattctcctgttatagagctttggattagatacttctatttggcttttgtttccatggaagaaacagtagtgaagcaactatgttatataaaacacacgatacaggattatgaatctgcatttataagttccttgaatacatttcgtgttcctcagttattggttaaactattctgtgcaagtaaacttgttgtttagaagagagcatatcaagactcaagaactagagatagaaacttagatgtagagataaggaaagaggtgcgatgtggatagacattgtgtgaaaagggtacaaataaaatgaagatactaatgttggattaactcgtgtttttattgatttgcgaaggtatatagaaaagtttatagaataataactctttagcatccactgaattttttacctatataagttttaatttatctgagagcttccatccactatttgtagatgacttatgtttcttctatttttctgccagagtttaaagcacaatccca

SEQ ID NO: 6520 - DNA, 2055 bp, Ricinus communis
  Intron number 1 from transcript 29706.m001331 (locus 29706 .t000061) derived from phytozome v7.0 (chr-ID 29706; pos 5 45196 to 547250)
aatcttcattctatcaatctctctctcactagcaggtttttttctctctccacttatccctctgtttctattttattttggtgtatatatgtgtgtgaagttggttgcttttttgttcttttaattattgttattggtgctatggagagagatccatttatgggtgcttgattttttaaaaaggttaaatctttatggtcatgtctttatgaatatctatctgggtagttctcgtttgtgaaatcctatcctttcttttaaatttttttatttttatgggtgatttggtgcggatttgatatgctggttatcggtttatcgtggttgtcttgtttgggatctggtattgatctgtttgcttttctttttttactatgtagaaaaagttgtgatcttttagtgttttttcttttttaatgatgtgccaacttgcttatgaggtatagttagatgttaaggcttggagatttagtgggttgatggctaagttttctcatgattggacagcattagagacctagtatgttgcaggattagatttatttacagtttctgtagttcggtttaggtataaggcaagatgatggggatatttcttgatgttgatgttaagttgtttgatagacttgttggttatcagagagctactttgctttttctgtatgtctattgatctaattgcaatattagatttgccttgtatttattttttatctggcatggtttctagtctatcgttccactactcttgtgtcacacaaaagtttgattgtaattaagaccccatgtcagctttggatgcagcactcttgtttaggtctagtttttttcaatatgtcagctgtgtaattttaaggtggagcaggtcccttaaaaatttgttcaatttctgctaatcgatggtgacattttcttaatttctctctgttgttttctcatccattaagactacttgattctcaatttggtaaattggaggagtgggcaaagccgtatctggtggtgaatggtttaatctcaaatatcagatacctggttaccccttgcaatgcttctccatatagtgaaacagaagtttaatgcttgtagtcctctttatgtttggtttgcaagtttggctcttttgtgacatttgttccttttgatttctgccatattctacggaatggaaaacatgggaaatcttttagagttacagagatcaaaatttcatacgggcttgttagtgtttagacagctaaactgttactgatctatttggaatattggattcgcctgtttctttgtatattacttactactgttgtagcatgtatacaaagggaatatcttttgcagcttttgattatacactcgtacatttgattatacactaacactccatatcagtaggttttagttttctaaatttgtgtagtagtgtaatttcaaacaagtatttggtattctaaaaattttgtttattttgctaatcaatggtgttatgatctcattttctctgttgaaatgtttttccagtgctttagtgtactttttttttccatttaataaaatggaggagtgggcaaaacagcgtctggtggtgaatgatttgtatctaagatatcagatatctggctaccccttgcatgtcttctccatatagtgaaacagaggtttaatgcttgtactcccctttatgtttggtttgcaagtttggctcttctgtgacattttctttcttttgattttctgccatgtcttaatgagtggacaagttggagaattttgtatgttcttgctgatgttttttgttcgtgttaattcattggaagaacatttctagtacgcatattagagctcaaacacatttactattattattttaattggtgaatcctttcaggctttggtaaaaactattcttgctttttccctcttatttggtgcaattgatgtgggaaagaggattgttatacatgctttacttgttcattttttaaaccatatttggccacacctctcttatcttctattaagcttgaatataaactcttggtttttttttgtgcagtc

SEQ ID NO: 6521 - DNA, 3386 bp, Ricinus communis
  Intron number 1 from transcript 28094.m000178 (locus 28094 .t000010) derived from phytozome v7.0 (chr-ID 28094; pos 7 2430 to 75815)
cgttggattgattttgctgttacttctctttacaggtactgttcctacctatatagaaatcgtttctgcatgtatatatgtattcttcaatgtcttttttctttatcaaattaaaggggaagattatacaaatatgactgatagaatatatataaataatattcaaattatatattgatttcaatcaagaaatgtgatacagaatatgcacttcagaatgcataaattaatacataagatctaaactgaaatacattattatgagagagttgttatataatatggtggtccaacctttatctttttatttttgtgtgaccctcaataaataattttggtttttgttcaatagtgcattttaacttatttatttatattttatggagtaggttagacatgctaaatttatgtgttttattgtgcattatcatatgagtttgagcacaagaacctcaatccaaagaaataagttagatatcaatcaaatatacttggaaagctattaaaggagttagttaaagcattacccatatgtgctctctccaccatgattaagtaggaataattacactaatagtcacctaattatgtacttagttttcatttaatcactaacttcaatttattttatgaaggtcacatgatcttaaattgagttatttaattatcacatctccgaaaagatgttttgtacatgtagttcaattgtagtatgacacgtattaatttttctgtcttagtcaatatgattctaattttcttagtcgggccaatattagagcatctaccatagtttacactctttaaaatgtaatccacatgccatgttatcacttcattattccattttcattacactattctttactatagaggctgactaagaaagatggaatcatgttaattaggtcagaaaaattaatacgtgtaatgctacaattagactacatatacacggaatttttttatttactgtcactgacacctaatgacagataaaataatttttaaataaatccagtctaccatgttatttatagatcaaaccaattatacagtaacatatgtggcattgtttattaagtattatatttgttttgattggttttcaatcatggatggccaataataataataaaccaactagtataatatataatacataattccacaggttactgtgcaattgatttggtctataaatgacgttgcagacttagtctatttaaaaatttgtctgacagatgcgacaactatataacccaaattaaattttggtgactttaagaaacaaaataaattttagtaaagaaactggtgctaattgcataattaaattaacgtcagtatatttactcccggttaagtttatacctccaagcatcctttccatcacaaaatttggattttgtgttttttaagttgtggacaaactctacatgatgttcttttttggactaattgctaaaaataattataacttttagcattctttttatgaatttaacatgaatttctaatttcgataattttaaatatgaattttatatttggcaatttaaatattaaaaaaaatctaatataattttactgacgtgccgtcagaattggttaaactacttcgctcagacgcaaccttaaacatctcacttttacttaattgcaaataaaataacaaactttgattgatgttggttgtcttcttggatatctttaatcatactaacaatatcactgaaaaaagaaaacgatatcattgataaaagccattgcaataatgaaaatttctttcctagtgctaaaaaattttaaaatgatattagtcctcatatctaagacattatataaataaatactgataatatagactaaattctttagtttctttttcaacctttttagtagattgaccaatcttctctctttggtggccttagagatcaatattatattaatgtttttgtgatagaaatcactcttataattgttgagcttttcaataaatttatagaaagattttttatatataatatttttcttttttcttcttaaatactataattagtttaaaaaaaatctatagaatattatgtaattgaaaaatgaaaatattagaaattgaaaacattaatgttttattatgagtgaaagccttagtccagaattgtattataacaatttaaatgcaagaattttactgatttctttaacttttattttgaattattaagtaagcacttaatataattgatgaaataattagttatatgttccatacattataaattaagaacaccaatgtagttttcaagggaaggagaaaaaaaagtttgttctgtttttctaagcactgcccttgaatagatttcgtttctcaaatttaaggttatcaatattatttttgtggatgttttggatttctcactgaattagtatattttgatacagatatgttttaacatttcctttttggttaatatataatatgaaattaaattactaacttaagtatataatatcttagtagttattttaagaattaatattttttaaataaattaataaaatcagtactaatttacatgttttagttatttatgttaatttaaataattcaatcacattatgaaatttgttatatttaactaagtattgtatttagtagtgtaaacgaagagtaaattggtaagatgtcatttaacggttcaatttggtttgacagatcgagtcgtcgattagactaatttaataaaattgactatcttttatttattatactttaaaataataattccaataaattaatagtaaatcatccacatttaataatatataataaagtccaaatattaaaatttaaatagatgcttattatagaaacttattttatgattaaataacaaaaataagatatttaaattgtaaagaaataaattataaacattaaatttaaaaaaaaaaattatttttctaaatacaagttctgataattttaaacaaattaaattttaatcaaaatatagtagtataacctatatttttttatttttaatatatataatggttgaatcggttttgttcgatttaatcgatttaaaataatttaactgcaaatttaattattaagactaattgaatcagactgactattgattttaattaattcagtcagtttcgatctgatttttaaaatattgttagtgagaaatatatattgtatttgtggaaaacatttaattctatgtatattttcttaaggattttcttacgtgtttactattagcatcagaaatcaaatcgtagcttgcagcaattttaaataagaattgagtatgacaatgtgatgaacagagacgggtgtgagggcccacacgtggatcaatatc

SEQ ID NO: 6522 - DNA, 1856 bp, Ricinus communis
  Intron number 2 from transcript 29828.m000384 (locus 29828 .t000009) derived from phytozome v7.0 (chr-ID 29828; pos 2 28416 to 230271)
gtatagaggatatatcaagctttcttgataggtagtccttttatttatatttttttcggtcatttaaattgcttgttttattgagtttaaagtcaggctacctaaatgggcgtggaatgaaaagtacattaagttagtgcaagagagactatctggaaagaatctactctttgaattttattactctgccgaggtttatgtttgaatgtttcttatactctttcaaatactgaaaaaattcccaaatattatcttgtgtgctggcgcagggatgaattgcatatacagtatctcttttaaaagtgtttacttggtgggctaggtattgcatgtttttgcttatttgtttcaacctgaaaaggatttaattattggattttggtctagtatctttctatagtgagaattgtgtcaattttagcctaaagtttttaggtgcagtgggaatagtattgaaagctcattctagcaactactgtgaaacaagcgctgtgctattattatttatttcatcaatcaggaaatgggtaggatccaatgaattataaaatttatagacatttgtgaaactcatcattagttttcgttggtagtttctctggtctttgactctgatgctgtatcttttagtcattttctaatcccacctgtatttatccttatggactttttacatccaaatgtttgtctatggatgataaagattttgcttccttttaccatcagtaaagttgttgtttgtcctgtcttttctttaaaataggaatattatatccttaaaattggtcagtttatttacctagatcaatcattgtagaaatcttgtaatcagacttaattctgaaggaatgttagcatgcctgaaaatagaatgatgctgcattggatcagaaatgcatcatgattcctttctggatgcatcaggggtggaggagatttgaactggcaacctcataggtataacaaccaagctttccccaatggatgaatgataataagtcttgaataattgtgagttattttcaaataggaacttcatgaatacttcagtcggatatgaatcaaagaagataaagttattatgatttggagttaaagagagctgtgaggaaacaaaatcttcattgggtaactataaagataaggttttcacactgtttagttttttatgacaaggtcaataagtaaagtcatctggtcttcataaattttctgaatatagttcgcacatggcaacaccccactattttcttaagaaaagaaaagaaaatatttaatatgcacttactttggtttaagacaaaatactttgtaatgattgaatgatagcatgttttgcaattacataggacctaggcatttcatgtcctctttatttttgttagatttattgcatttctacagttttgattttgttatatacacgccatcatgcacacacccacaatttatatgcacgtacagattgtcatactgtatcatttgtattttaactggcagtaactattttagcaaaaatattgttccttaagtcttcgtgcaaaaaataaagaggaactctgcttgtattggaaagaaattggatacaaatactgatagaagcttctagtagtttattgccacaagttgttcatattatatcatttcgaagttgaaaagatttcttctaagtggaggcaatgaaaacttgcaattactttatcaataaaataaactctttacaggtgcttccatgcaacagataagtctgtagaaagctaatttttaactgtatactcaatataaaagaatctgatagaacaaataagtctgtagaaagctataagagctcattagttcagttgctacatccaggt

SEQ ID NO: 6523 - DNA, 1646 bp, Ricinus communis
  Intron number 1 from transcript 29577.m000445 (locus 29577 .t000002) derived from phytozome v7.0 (chr-ID 29577; pos 1 8305 to 19950)
tatcgacgttattgacatttccgttatcgctaaaggtaattttaaattttgtctacgttattatttttatttttgtttcaagtcttgtttggcttctataattttgaataagtacttagtaagacgaatgttaaaactgcaaccaagaattaggagagagaaaaagaatgagttttgtatattttggtgatttttaacattttgatttctttttattctttggatttattgtcatatacattctagactagatatagataatgaagaatatgatagccttgtttggaaagtaaatatgtaagaattcaattctatttaagtcctagaattcagttctttctacttaaacaaagagcattttgagagaaatgaaatcataatacaagtgacatgatttttgttttttacgtttggtcaaagtgaaatgtcaaactgcactggtgtcttgtatcctttattaattaaaacatagaaaataaagtacatgaaatgaacttcttaagcttttatcatgcgatgcttttatttttgcaatgtaaaaactaggcaaagtatctacataaggcctccattgagtagaattctgttttcagcagctaattttatgcatgaaagaaaatgtggttaaaggaactatacgtggagcaattaggcataaattgataccaatccctcaaactttggtaacttcaactccattaacaaccacttatgaatctcttttcggattacgcccgttatctcaagttctggatcgaactaatccattgacacaaatagttcatgggagaaaaccaagttctttgggtcctggaggattaacagggtgaactgctagtttccggatacgagatatccaccctagtcactatgggcggattgacaaagatccagaagagttattttgtgggttttttgggggaaactgcttccttggttagaggctctttatcacaaaaaaggtcatttcatgaactggcagtcattacaaaattgacatactatcatcattcatcatgtttcttgctccttattggatttgtaggttggtctgtttttagttacttatagagtgaacaggatcactgaacttctgcatgcataattgtcttagcaagtaatcaaatgcagagattctatggaaagtgtggttatattatatagttttggagaattaataggtttgagttacacttcttatttaaacatttagttgcttcctaagtttgtgaagacatttagtgtggaaatcagaagaccttaccagttttctgttttgctacttattaaccttgaagtccctatataagtttatagcactagtaataaccttgctgcattttatatattcattgttagccttttcacatgctgcaactttttgaaatgattcattttgggtcgcgttgtcttaaagcatcagaattggttacttcttgaaggtctaaatatttcttttccctgaaacaaacttttatctgtttgtatttaggatttgaattttggctagttagttgctgactttagtcatggtaatatgaaattaactaccattggtaaaagagatgtgaatcaataaggtgtgatattaacagtttattgtatatgcctttgcagctattgaaggttcatctgttgtgttttat

SEQ ID NO: 6524 - DNA, 1460 bp, Ricinus communis
  Intron number 4 from transcript 28717.m000068 (locus 28717 .t000002) derived from phytozome v7.0 (chr-ID 28717; pos 1 4321 to 15780)
tgacatcctaacactaactgctgctgccgctacatgtataatttcttcactcgtttttctattaccataataataataatactaataataataattattatcataatgatattttggctatttttatttgatttaataattaaaggataccatcttccaaaacaaataataaaaggaaagccaatcagttcaaatatatgaacatatgatctttaaactcttctgtcgcttaaagttgggcattatatatgttgtttttatgttgtttttcttgcaaaacaaattattgagttaattagcctatatccttagtacttacatatataattgcttccttcttgaatttaactcaacgcaagtaagagattaaattgataagtaacttctatcaataaaaataaatttaaacctttaacaaaaaatttactttaaaaatttaagaatattaattaatattcttttacttgttctaattttttttttcaccataattactcttaagtaaatatcaatacttccaaaaaaaaaacctcataaacaatattattgattaactatataatttaattttaaattattcaataaaataaatatcttaatcaaactatattactaatgtctttgttaccgaaattaggattaaacagtattaacagtaaatatttttagtttaaaaaaattaattttagataaatttgatatttaattaatttagtattaaataataattttatgctaatttagtttttgttgcattaattttaatcaaagaaattggtagttagttctataaaagttcaagaaaaatttaatataataaataaacaattcacataatgtttagtataacagtccagtcagaatcataataataaatggtagcagataaaatatttgttcaataaataaataaaaaattttaaaaatatgttgaaataaataaaaaatattattttcgctgtgtaattttttataaaaatactatttttatatttttttaaatttacggtgcgtttattttttagttattttttggttatttatccattattttatcgttcttaaattatttttgagttgttttatccaaaaacaaccaaagaaaaattaaaaaacaatcaaaacggtaattttaaaaataagaattaaaaaatatattttctatattttaacactgttaaaaaaatcataaattagattaaacaattaagaaataagtatctttgacatttctcctaaataaatacccgaatccgaactttactttgtgaaggtgtgaaaagagatgatggacttgcttctgggccaggtcagaactaggctcagaaagttctatatatgtcaacttataggcatttatattttgttaaagcccataaaaatatgtgaccattaatctgcatctttggttcaacttggattcagcattaagaggtgcagcaaccctcaaagcaagaaca

SEQ ID NO: 6525 - DNA, 1434 bp, Ricinus communis
  Intron number 5 from transcript 28152.m000892 (locus 28152 .t000021) derived from phytozome v7.0 (chr-ID 28152; pos 1 15798 to 117231)
agtcaaagggtacgtgtgaagcatcttcctcagttcttgaatgttttgttatccaacactctctgacttctgaatgcatgtattttttgattttattctatactgatatcctaaaatatctttctggctaagaaaaatgttctggttagctcttatgagtattaagatatactttgactgtctgctaatcactaagtagtattagtaagagaacttacattaagaggtatagatccatctcatagtcataaagaaattatcttgccaaggaataaatataatggtgctttcctttatttctatcttgtatatcgtattttccagttgaagcggaaaactagtatggtagaagtgcactgactgatggccgtggatagtttgatcaaggaaataatatggtagaagcctgggatcccgaacgtgttatgggaccaagggaaggatcgaacccttcatttctgggaaggactgggttcttccctttgttcttcttaaatctacctattttgataataacatagacttacaaataaagaaaaaagaaagctcaattagtgagagagcaaacaatctcaaagccaagcttaggataaaatatttcttgcctcttctttcaataatctttccgtaaatacacagccaatagaattctaaaagataaaactgacaacattaaaagataagtaactgaaggaaataaataagaaagtaactgaagaaaaatacatggaattaaaacataaagatagtggttactgccactaattaaccattaacttctttggaaaacgtcttctgtaagtgtcggcaaaagaaattagttttccacttgtccgctgagctggtgtattaaactgccgactcataacataatagcatgaatgccttttctggtttccttgtagtatgcctggttacaagaaattaaaaaatgattgtttgaggctcctgaccaaatgtaatccatttctttggatattgcaaaacattgtccatgagcattgacagtttgtagtttattggtagttcagtatcttaagcagactgctcttatgcggcatagttttctctccatgtcgttttattgtttcacttgttcaatgtaatgtccaaactcacataaagctgtttctattgttctgaattacttaccagcacttgtattctacagattgcttatagatgctatttgagcatgatatacagatggcagccaaaattatttgtccagcaagtgaaatgagagatttagaatctcagatattgctgttcttccattttattatttattattctatgaaaatgatcttccgacttcgtctgcagtccccctaaccatattttctaaagaatcagattccagctgttttgcttaaaaattatggttttgattatctacgatgcaggttgcttctttcctgttgtatttgtctg

SEQ ID NO: 6526 - DNA, 5028 bp, Ricinus communis
  Intron number 19 from transcript 30190.m011218 (locus 3019 0.t000454) derived from phytozome v7.0 (chr-ID 30190; pos 2579408 to 2584435)
ctgctccgtcttttgaggtcaggaatttcacatttttttataaccttttattataaccttggttttccttttacattttatgatctgatttgtacgatacatgtccttttatttctatggaaccaattctttttcaatgcaaggttataaaatttggcaagttgcaattaatttggtttatttatgatttattgctgttgcatggagcaattttgaatttattgcttgttggcaaggaaaatttgtagattctaacacattaaattgtgtattattgttgatctatgccatgcccatcttggtccctcacaagatgccttgcttttggtttctcttactctggtccttttcttattttacttttttaaccctggaattaattgagctaaccatttttagatttatttaaagaaaaattgcaaatcttaacttatttttttcatcatgttcttaggcacttagtttcttcctggttggctcatgtgctttaggtttctatctcctgttactgtaggatgttgagaagttgatggatgcttcagacaatctttctgttacacatgtatcttatcctctgtggagctctttgatggatggggtcaaatggctcaggaaagccttgggggcaatttctgtgcaaagtaattttgaaaggtggaagttgagcgaggctgaggagcttcttgagaaagctcaggtacttttgttttagccctttgtttcaccttgtcgtgtcctttatagcttttacttatgttcattcttatgccaggttataaatatctcctttccagtagtggtggaccaactagtaaatagtatacataaacacaagtgagtcttctcatactttaattttagagtgctttcttccgtgaaatggaatgtgaattctgagaatttgttatatagaaaacacgttcacgtcttttagatgtgttgaatttctacaaatgtaattcaagacactgatgtgtctttaatacatctgctatgaatcacaaggctgcgaacaacttgaatggcagctacaatggaatttttatacatgagactttgcttataaatgaagcgccttctcatctgaatgaaggtgctctataaaatcatgcttatagagatcattgtgggttttctactcttggttacatttacgtttgacgatagataagctatgtctatattcgtctcatccaggcttattagccgtggtcctctgcaagaatctgtcttcctttagtcatatcagttttggcaatgtggcatcttttcttagtttcaatgagaagcatcatgcatgtatgcttcattgttggttgggaagtatacgtgctttcattatggttcataattatatatttgaagcagtcatgtacgtgttgcagaataaaaaacgcataaacatagatatagaaggagagccattgtaatacttctttttatttggtttttataggaggcattgtggtacatttttctttttgggttacatgggaggcattctgcttcttttaaattgtatgagtattctctctccccctctccgtttgtaccaaaagtgaccaaactctaatacattttaatttttccttattatttctcttccttttatttctattttgtatggtttttattattgaattggaaataagttaattttatgtgaatttgcttcattctggtctgtggtttagaatttctaaaatcagggcgaatggcattggatggtatgtggatttgtaatacctgccaaacatgcttcaggtctctgtatgcaatgtgttgctttttctcacccattgccttgattaaaaacctggcagcagtaaccttacctatcaaaagaaatagacaaatttaatgcttatctgccatagttgaggcagcacagtacttattagtctgctggttcaagtttgcttggtagttgaatgttttctatttgctctattcttgcgtttgttttggttgatttgatgtgctgattctgcttaattgtctcacacattatggctgtatatataggttgtggcaaggacaagtggatcaatattttagtctcaagtttgaagagcgttcttggtctcaaatactagaacttaaggtatggtcaatttccttgcacttgtatttttcacaacttcaatagaattgtttttttcagtcaatttcctaatcttatagctccaacatcactaatgttgaggctttctttaaactgtgtttaaaagctgctttacttcttgttacatacagatctatgagaattttaattgggatactgcattttttaaaatatatatcgactgacacttaggcaacacaatatgttaatatagcacagacttggcattgaactcagcattgtgtctgtcattgctctgcttgagattctcttgtcagataagcagcccaacatactaggtttttaacttctctgtttgttttgcattgagcttttaaaaattatcttgttcttgttctcttccttcttcctttcagttacctaatatgttatcttcatgaagctaaagtgatttttatcactttcaggaacttgggaaggatgttgcatttagttgttcacaactagatatggttttatatgaagttgaaaaagttgaaaagtggaagcaacaaggtgttaaggttgcacagatctttgtgggtgatgggaatcttttgctggatgctttagaaaaggtttcaaacaagttttcatgttgatttttgttgttgatgtaggattatcgggcctataattaatggggataatttaaatctcttaccattttgttcagattaaacattctctcgatatatctttatacatttatggcaagtcccagagcttcagagcaagaactatattcatgtgctgcactgattataacaaagatcaggaggttttgacttgttcagtatgcaaagactggtaaggtatttttggctatgttgaagagcttttgccatttctttcatatattttgaagatccagataattcatatatattcccagttgtttggttcacagttaatattccaaatcaacctatggccttgattcaatatggctggtttggaatagtctaaagcaataaaaaaaattaaaaaaatcagtatttctcttaacatgcaacaggcttttgataatgcttctgttgggcttttctccttgcatggggaataattgaaatttcattttatttgtattgcatataatttggttacctgcttgttatttgcttattatcatgttgcatgtctgcgtttacttgtatatctcctctctagttacatgtgttatcacctgggcagctaccatttgcggtgtctaatgccagcattactacatggtaaaaacgtggaactctatgtttgcgcttactgccagtttctggaggatctatcaataattaacaatcaagtttctcctctggtatgcattcaattatttatttgtccttttattcttgggagtgcccttacaagaagctttaatatgcatcaacatctcaactgtttcttcttttctcagagatttagagagaagcaatgcgagttaagcatgctgatcaaacttctatctgatgcagaaaatttctctctacggtagtaagctgagattctatgcttttttatttgaatttttcttgatgagtaatatcttctgtctccatcttcctgcaagtgaaaactctcttgtgattgaaaccataattcgggaagaggaaggaaggggaaggatagataccatttctatatctgcttgagctggaattactaagctgctaatatattgcaaagtggttgccgtaaaaagtttttggtcaacttataattgttcttgttacttgttagtcctgtcacctgctcggttactgttctgaaacaaacagttccagttctggaactggataatcccagttcggggtcagtttacttttaagaaattgtaagatttctacaagtaaattttttgaaaattgggtttaggaaattaatctgaatcatgtaggtgattaagttaagtggttagttttaacaaataaaactttatggaaatatgtgttaacaactaaatattttaaattattaaaatgttaacgatactatgtatagaaatacattaaagggctttaaggtgtaaaaagaactaaagaaaataaagggcttgaactacaaatattacgcagaaattcaagttcttaacaactacaaattcaagtgattatattaattttaagaatactatgtatggaatggattcaaaaaattgtaaggtgtaaaaagaaattaacttaataaaggtcattattattgtatgtatttcttagtttttttggttgcaactagagccagattggcagaaagggggaattgggactggccggtttttctacagtttggaaccggaattggatttccagttccacaccagtttttgactgggccgggtcatggtcaagctacttgtatttcttatgcttctaaagatgttatttgttcttaactgaagattttggtatatcctgactattgtattgtatttaaattaatgtatttaagtgctgctggttttcacaggatagaagaaagagagatattgcaacaagttgtggatcaagctctggaatgcaaaacatgcttgagagaaatattggattttgaattatcttatttggataaagatcttagcatgatctctaagaagttaataattgctttgaaggttcttattttctagttcatctttttcttttattatttcctgaggatgcatttaatcggttgtttttccctcaattgtttctacaaagcatgcaacccataaattaatctcctagatatgttgttagcaagttgaaaatgcaataagtctacctattagtagtatcttgccaattaaaagtactttctcgtgcaggcagtgcaagtggctggtacgtatgatcgtcaaggtaactttgaccttgaattggcgttagcaaaaaattcatggagagtgaaggctaagagactaatag

SEQ ID NO: 6527 - DNA, 2560 bp, Ricinus communis
  Intron number 1 from transcript 29662.m000460 (locus 29662 .t000014) derived from phytozome v7.0 (chr-ID 29662; pos 1 54306 to 156865)
aggacagtttcaagctacacaacactcttaatcctgtatgtatctatattttctctctgcaaaacttttatttttatttggtttgcaaaatcttgttctctttttctttcccattaccataatttatatttagatttttcttttattctatcttttttttcttcttctgtttgcgttcggttgcttgctagggtttcattccactcttgagttaataagttgtgcaagttaccatatgaattgataatctgaaattgttatctggttccttttatgtttcctttgttatgggaagatttgagtgcaaatctatcgatgtttctctctctctctctctctctctctatatatatatatatatatgaaagtaagctttctttattttttaaagtatttctcttaatttatatgaataattcttttaaattatttcttttcttcttaagttcattctttcttttcttaaaatgaggtacttaagaaactctatttcacttgaattttttagctttttttcttttattgatcttctatctaaattctttaactttttattttttattttttttcatagcactttactcatgtcattggatgattgtcttatttattttatatattatataatttaatttataattatattaatataaacataaactttcattttattttataatacttatatatatatatatatatatatatatatatatatattagtattttataaaaatcataatacattcttatgaaatttttttatttttgcattttaaggtaaataaatatgaaaaatatatatacttatcaattttaactctttatctattttactgcactaataagttctcatatattattatatacttatttttaataaataagattgttataaattttactatttatttattattattattttgatatcacatatatatagattaaattatttatttattatcttggactaataaattctttaatatgccacaaatttcttttaactatttttatattcaaatgtaaatttctattcttttactattttattaattttttggatatatatatatatatataaatacatatcaatataagcatatatttaattagaaagataataaaatttattatcaatatggagtacctttactattattatatttagtataatcattttaaaaatataataatcttatatttaaataaattaaaaatattatattcattattagcattatttaagatcatgttatttataagttaatatttttataaatatatcatgttatcttctcattaaaaataattaagattatttaatattattttaataatattttaatccgcccgtctagttacaataataataataatggttataagaaaataaaataagaacaacaacaacatcaaattataagatattaaaaataaatcacataattatttctataggatagtttatccatagatacatatttcaattagagtgacgtttattttctttattgataattaaaaaagaaaaaaaaagtaacacatttgtggagaaaaatttaaaattttttattttctaattgtatattataaataataatatatatttaaattaataaaaaaaaattaatagaatttttaatattttaagaaaagataataatttaaaataatttatattgtcttaataaaatttataaattcttttagaatttcattaatacaaaaatttaagagttatattaatcaatattaatatatagatatgtatatatataattatatatataatacaataatacatatataattaatataatacttttaaaattagaagtataatttagaaactaagttagtagttaatataataataaatatataaataaaatactatctttttaagattagctagtaatttattaattaataaactaattatacaatacatataattgttacacatcacgatgttgttattattttaattataaaattaaatttatagataaaaataatactctttaaatttaatatttatttataatattttaaaataacagtaaattaaatatttttaaattgtctttcttaattcttttaatattttaaaattttatgagtacaataatataaaagttattttaaaaatatttactaactgactttagtttatataaattaacactagagcaattgtacattcctactttttagaattatgaattattatataattaaaatgattatctaattaaaaaactagtttattaattaatataacattaaaatataataatatattatatttttagaatagaattaggataattatctaatagaaaataaataaagttagtgataggaatagggtgttagtattgttcaataattgtgatctttaaacaataattaaggagaaagaaactgtttgtagttggctatagtttattagggtggtgacaagtattattaatttctttttattgattttatttaagttcatgtgcttcatgagtaatagctggtggaacattaatgcaggtccagaaac

SEQ ID NO: 6528 - DNA, 1056 bp, Ricinus communis
  Intron number 4 from transcript 28694.m000680 (locus 28694 .t000023) derived from phytozome v7.0 (chr-ID 28694; pos 2 21534 to 222589)
tttcagattgccctgctgccttgcaacaattaacggtatgtatgtttaccattgatctctttcttgttaattaaatacgtgcccttaagccactcaattaataataatacgattaattaatagtccatatttctatgcagtggactgggttcatctaattttttttttataataatgtatgtcatatcatatttgttctgttaattaatcacccttaattaacactaagaatggagagtgggcttgagaaggccatctttgaccaatccaactcatagatgtgtcattttcagtgttcttatctcaagcttctacagtcgaacattttcctcataggttaatggttgtgttgttgtcataggcctcataggcacaagtggaatactgaaataagccgtatttaattactagggttttgcccacactactaattgtacatttgtactcaaggcagcatcttcctacttatagcaacctgcatattttcattcatttaccaactttatgcattatggaaatgtataatcaaaataaaacaaaattttattttgtaccaattgtattttcttgtaatcattcacgagagtctattattaattattgtacgtgtctatatatgacgtgataaacaaagtttattaaaagaaatattctattgcatctaactgttaaattaatagtgcgcactttttaaaaatattttataatttaataataaaaaaacgatatatcttttaaatcatatatctattctatataatataatatgtgtcagttggatgtactcataatagttaaaaagaatcaaataaaaaaaaaaaaagagatctttaatttttggaatcgtgtaagaattggattccagttcaagtatttctttctggaccatatagttggagtcaatttcatcaattaggtgacatatcaatggctatattccttgatccacgtgtgactcttaatttcgtcaggacttttctttttcttgtttaatttccttttacatcattaaggttgttgttatcagaattgacgttttgattaattattctcagg

SEQ ID NO: 6529 - DNA, 6127 bp, Ricinus communis
  Intron number 6 from transcript 30189.m001675 (locus 30189 .t000043) derived from phytozome v7.0 (chr-ID 30189; pos 9 67306 to 973432)
ctggaggtataaatttctttttatgcaatttacttattttttctagacgtttatcttctttaacattggttagtttttacttggttttgtttactttaaaacactgtttttaccaagaaattgttactcatgtgcatcaatgcttatctgggagttaaatcaatcatagtttagtgaggtgtataggttattgcaattggtgatattgcataaacagaatccccttcattcctttccatcctttgttggtggctttttgttaaatttaaatactgaattaaaatagtgatccagactgtaatgttttttctttttaaatacccatagactgttactttactttgagaaaattgcgttgtgacatggatttctgaagatcataatattgttgctagtccaaaattgagtctggtcagttatccttggaaacagttacctgaaaatttatatgcatggtttcaaaaagtctattatatacttataggcatgcatattgctgccagtccattttgctaagggcgttcaacttatgtcagtttttgccctacctatttcagttggctatgctatatctttttcctccgttttgcttggtttgagattcattttcagtgaggtgcaatgattctaatccttcttgtacaattcacctgtttatgatccttggtatacctttccacttttgtaatttggacgtacttaatgatccagatgacaagaaactcaagtaaatcaaagcttaaggaatgaagaaacttaaaattatggtctagatgtcatctagggtttatgtagaattctgtagaatattctagattttagccttatttttaaataactgagcagctggtccaattatttacgatgtcaaaatttaggggttattctgagatttttagctttgctaaaaagaagctcagatgtctttagtatacttataaaaattcttgttttcttgttggttttggattgtttaattcttggagtattgagaattaggactagcattgggttccattccctttaaggtgtaggattatgctgggttgtacttagtattgatcccatcattgtaatgcttttagtatagttttcagtgaatcatgctgttacagatttgatgatgcaaaatactggatagatttattgtcattttgaatatatttattctccaagttataatatttctttaaccaattttattaaacatgaactatgtatcacataatcatccacatttaaatacatgtcaaccaaagttgataacacaaaggttaggaccctttttttaaaaaaatcttttttctaaatgttaagatctgatggcatgcaattaactactaattttatcctcccaaatcctctcttctcccttgcaaattcaaccattaaattcataggtttatttttgtaaaatgtcaacttatttcctactttaaattccaatctaagtaccatctttagctgtcctatatcacttaaatcttccatgctgctttctggcgtagactgtatatggctaattatctcaattactttatctcatcgtcagtgggtgccacttttaccttgctctaaattcattaataccttctacagttatttatagtctgtcccttcagatgtctttggcattgtcatttctagcatgctcacttgtgcgcatttttcttcaccagtcagacttaactgacagagagatccatcattggtattgagagagatatccttcttactcttcctatctatttgtgttataagcttagtatcaaaaaggatttgtttgtgaaacttctagtctatccaggttaacccctctgctcctgctttgcctgctttgcttagcattgctatattctgaggaatatatttcattttagttcttagattggaactgaatctaagttgcttctctaataatctagcttctggttaactccaggttaggttttgtctatttaaataatgccatcaacaaagtgatgcaccaaaaagaccgttttaaatatctttacctgttcattagtcagcaaaagaataattaccttgaattggattgagtgctttaatatgtcatcaaagccaagaatgcacccattctcttagtcttatgttccttgtgcttgccattttttgcttcagctctttgtaaggctcaattttgtctgccacttgtttgccatgttagcactctatttctattactccactatttgttgctttatctcatagcaagtttttatagaaatgtctttacctaatgcaatctgtaggtggttctagcacatttcaagattcaagattttagaaaaagtatttcaaattaaaatatacaaaatataggttcatgccttactatccaacaatttaggctatgggttgaattcatgttttaggtcatttatgaccaaagtaataaagataatttggtgcacgtcaaatatgatgggtgtccatgccaccttccatttagattgtatgtttctatttgtctttgagaacttactaaaacctttgattctcttctttcattgggatattaagttttcaagtttttgcgaggttggtaatagtcaaaagctatctaagtaacttgattttgctataccattttgcaatgaacatataaatatggaataaggttcaattaggcccttgaactttgcagtcaggtgcaattcgaccatttttaacttttatggccaattcaatccctgatcttttcgaataggttcaatttagccttttttttagcgagttagttggacacactagaacaagagcgtgaaaaagggaccaaattgagcctgactataaagttcgaggccaaattgaactcaagccaatttgaagtgccaaattgaatttaattttcctttaagttaaaaatttaaaaaaatatgattttttttaaaaaaaaaccacaaatcctttaaaacatcaaaaccaactcactaccgccaccagtacctttgcatcactaccaccaacaccttttaaataaaaacattactagcattatcattataaaatgaaagcatagatgagattttacaatccaaggccaccatcgtcacctatatatcagcctccacattactgccaccaactaattgaaaatctaaaatatataagaaaaagttaatatataaattcaattataatttcaattattttttaaagagttaaactgagccgtacaaaaagttgagtggccaaattgagccggcgtcaaaatttgggtggcaaaaaattactctctgtagcgcatgcagctcactctccaaaaaaagggctaaattgaacttatttaatgagtttaggggttaaactagctgaaaagtaaaaaaaggccaaattgagcctgactgcaaagttcgagggccaaattgatccttactctatatgtttgtctatatgtgtacatgtacatgtccattaagcaagactgcctaagatcataaaaatctcaaattcataaaggtcatatctccaataagacaaaaaaatcccaaaaattagatgatctcttataatattaaaatcaatgtttcttgcaataataaaaaataatagattttggtcacaactaattttaacattacaaggccagttgtgggtggtgtggagggaagttattagtgaagggatatgatagcaactttgattatgtaaagatttctgtcctaggtaaggaatctgctggtattgctaccattcaagtattcttgcctattccaatattgcaccaattttgtcctcaagatgtttaactcctccttgctactgtgcaattttacagccacctagatggccttgtctgcctttaaccacttcagttcactatcagattaaagcaaggtcattggtgagcatgttttgggttaaaacttaatcactgaaggtgacaaattaagttatttttttcccttaatttttattcccttttctcccttcctatttttcttctagttctcaatctccttttcttaatcctctgctcttctccttatcatcatcattccttactaccttactaccttatcttccatatcttatcatcctttaccttcttattttcatgtattcatccttctcccttttgcaactttacaattcacttggtactaaaaataagggaacctacgatggaaaaataacataccatggccctattgatgactatcacatcgaagagttataaaagaaaaattgccaaattgaggttggaggattggatacttattctgttaagatctgtggaatgtgaattcacaaaatcatgatatttttcatgtccaatattgagattccatgagtttaataatgaatttctgaaattttagaagcatgtgggtcaatgtaaataggcgtccttttgatggaaattattttgagacttctaaggtcgtggggtaaactcttagagattcttatgggtaatatcactttcaaattcatgaacttgatttaaagaaattattttgagacttctaaggttgcaggttagagattcttatgagtaatagctcttcatgaacttgatttgggagttttttatcagttactctttcaaatctgtaaaataaacaataagaaacttttccagtttgttgaaaatggaaaaatagaaaagttagcactgataccaaacaggctctaagtgcagtgtttgttttctactctttcctttttcctaagtcttagaccagaattttaaaatccttaattttccattttatggcttctcaagtctcagagattcttttctctatctgccttcactcttatcatctttagattcgcattcattcagctggttaaacacttgtacaattggaaataatttgcttgtgcataagattaaagtatttgggtgagcctttgggtgattaggcagtctcgtggtccgaaattataaaaatagccttcttgaggagaaggctgtgtcatctcattttgtccagagcttgcagtgcaggaagccttgtgcattgagattcattttcctttattcttgaaaagcttaagaattgtgcttccaaaatcattttgtgcacttcctatgccgcgctgtttgcagctaatgtttatacatgaataatttattataatggtttatttctgttctttcctgctcaagttgtgtcccaatttgcccttgtttgttttggttttattactgttgtagtctgcatattgaagcatctaatgctaaatgcacttggcttcgttaactcacatttcaatttatttaaatccttctgtaactcttggcaatgtcatcagcaagctaataaattataacagccatccgaataagatcaagagaaactcacataactcacatttcaatttatttaaatcaatttatttaaaatttctgtgcagccatccgaataagattggaagagaaacttatctgatcaaacctattaggataataaattatcctgcatggagtttgcctcttgtagtgttaaatgttgttcaaagcactgaagtttgaattcttcaacatgcttatcccattttaggctagtgaagctgggtcagggcttgtattgcaaaataacagacaagcaatagtgcacatcttgtgcttctaaatttagataaggaaggttttccattggtattagaacctaacttttgaattgactgtagatgtctaagtgcacgacttttttaggtttctttgttacgcaagtccagtgtgtatgtttgtaagattgcagaatcaaaccaaaagtcggaataagttcaagacgtaatattgagtcccggaaatgcaaaactattatgcaatcatgaaagtcacagtgcctcaaacatatgaaaggttcaataattgcccttttccctagtgttttcaaatgtggagtttcatgctttggattgttttcttgtggagaatattgaatcattattgaatgatcaaggacgctgaatctttctcacttttaatttagaagtaactggtacttgtatgaatattgtggttcatttgaaccacacatgctctcatggaatgttgccatttactttctgatattttgacatgatattccttattgtccctgcatgtgcagctattgtttctggtggaaagggtacagctcaagat

SEQ ID NO: 6530 - DNA, 1867 bp, Ricinus communis
  Intron number 1 from transcript 30099.m001641 (locus 30099 .t000020) derived from phytozome v7.0 (chr-ID 30099; pos 1 00500 to 102366 reverse strand)
ctggttcgtctctctctcttttagaacaaaaataatgtcattgattttggatggtggagttctattcttggtaggacccactatatcaggaaatgtgtgtttaaaatgtgcttaatggatatataaattatttcttattttgattccggatcattgaatgaaactcataaattttctatcaaaagaaacataagtaaacggctagaacatgaatgataaagttgagagtcctattctcttttaaaatatttttaagcttgaatgccaattagctgagtttataatcacttgatctgagtttgatgctttatatgcttgtgcaaagcaaaatactcgtagctgattagaagcaacaaaatgtctacacttggcataagattttacttgatggtgttttactggaagtgtatgcttttattttgttactcgtgtatctttttctcctttgatcattcccccaagtggttgtctttctgtgcaattagttggctggtgctcactgtttgtaggtgtaattaaaaatgttaaccaattaaataacctcattcttaatgagattggtgattgcacaatctcttttgttaggatatcaatgaatcaggctgctcattgtttagcaggagcctctgttccaatgcctgatccaaatatgtgggatagatgccctgctggtttcgttttaattgtattggatgttgatttgcagtaatatttacctcatttagtttcaaaaagaaaaataactcattcaacatggtggtcataatttgcacaaggaagatgttagcttttgactttaatataaagtttactagcctgggaattctgtaataaatattccttcccgtgcaattctttgatttagtcagagactttctatgagaaattcatggcatactagcaattagcatgttggtttaacaataaatatttgttctttctctatctctccatcttatccatttttagccatcatgtgttggcaatttcttatatgccaattgattgattggtgttacaattgtgaatggttttaaccacagttgttgaatcctaattctcaaaggaccttgtgtcatatcatttcttactgggctaaattctgtttcttggtacttagattagatttgcttttctgacaagctcaatgcctcttcattttgccccctttttcactgtgcctgccattttgatttcttggttcctgcgagcagtttcctcctcatgttatagtagttagaatccgtagttcttgttattgggaaagctaccagttctaatttgataaacattgttggttttagtagcttttttgccagtgaccaggaacttacttccagtttttgtagcttaatgccactaattagaagctttgtgtcataactgatgcggctaactctattgtggtctgatggctctaaatctacacttacgagtttaggctccttatatcttagggtgtgttttgaagctaatctatggaaaattttgaggtttatgatctcagtaatgctgcatcaagaaacatttaactgactgtatgtaattgacatttcattcaaggaaaatgctcttcttatcatacaatttgttttagcaggatgtccttgataattattaagacgacaattaaatactgctataagaaggaaatatttctgaggaatctaaattgttcggcgtggtagttacgtaagttcacatgatggttttatttgtgctgaatctctgtagaaaacgtcaattccatagaatttctactttcagagtggaagtttctgctttttcattatatactacacactctgattgtttgtaccttgtgattatagcaaaaatattgccagttgtcagaaatcagcatttg

SEQ ID NO: 6531 - DNA, 2338 bp, Ricinus communis
  Intron number 1 from transcript 30055.m001563 (locus 30055 .t000033) derived from phytozome v7.0 (chr-ID 30055; pos 2 26101 to 228438)
tcgtaagctcatttctctttgatctcttctattctgtaagctctctctctctctcgatgtgtttgtgtgtattcatgttattttaggtgtatagattattgggtatttgttagatctatttgttttgagctaatctaactagggttgctcttagttttacatagttttgtttcttgacttgatatgtgaaagcttagattgtttgtttgttgagctagatattatggggatgaggggtatctttcacaagtgggtcttcatacttaaacatatgttgttttttgtgggcaagaaaaacaaaaggttgaatctttttcaggtatatgctctttcttttttacactgaaaatgaaatttttgtattctgaatctttgttgttttaaaaccaaaaaaataaaggttaaaggatttttaattacaacctattttttgaacttgcaattttcatcgattcattgatgctttaagtatttcatttccctttcctttcaaaaaagttgtcttttgtaaatgtaatattttcaattatattaccaattcttgatctcagctaggtaaagctccaaaaatttagtgaaaccagtgagaattgcaacaggtatgcaggagaaacggagatattattaggagagattagcaaattaagcctttagtaacttcagttttatggcatccatctatgttcttcactactccaaaaagtgaatacatgtatggaaagcgtaaatcttgatctttggcagcacactcttctcaaaattttcactgatccaacattcctatgatattactgacaccttttaccggcatactttctgagggccttataagtagttgactcttacctttgcgcttagcttagatgaaatttgtttcatgtgttctcttatttttttagcgtctaaaagatattgaactgtgcagcttcctcatattttgttgacaaaatattacctggtctcgacccatttcaaacttgccaccttttatctgtaaatggtgattcacaatttttgctaaatgtaattgttaattagaggagagtttcttggttagtttacattttgcctttcaattgaaactcaaattgatgctaatatttgcaactattggagttccttttgatttcacatacacattctttatatatgtcattgtctagatatggccctgcaaaagtaagtaaggctctaggttggagaattaagttgtgtggtatgtgcctgggcacacattgtacacattggttgtaggatgttatggagaaaaatgcatgtggtagtttatttgattgtatttggccttgggtgcagttacctttgtaagatttttttaagtcttaatcacatgatttttttagttaaattgttgtaagggcctctaggatattaacttcctgtaaaaatctaatccttagaacactaatatgaaatattattagaagaagagtatgggcatccttaacaaaagaaaataaggaacaggataaacgtgccgagttatgaaaactctaaaatgtagtccagttgctgcacatgtatcaagttcatacatgtatgaagttcatactccctcatagcagtcacatagatcttgcttaccaattttgtttattatgaagacaaatatgttacagcatatttaaccaggtcaattctggctagctcaagctatggagaccccttttatttctttctctataattttaggattacagatcccttatgtcaatcaaattccttggatactagatagccaagtactactactatggcagatgatggcttgtgaagttctttcattctagaatgttctggttgcagcataagtttgaagcttgaagaatctatgcttcattgccattctttttataaaatggagcttcgagtgaagagcagagagctcttagttttgccacttctcataatgctccaaacataaattgccttattcttgtaaaaatggattaattagttccatttttttgtgaatatatgtgaggcatacaatgccaccccttacttaagggtgcctgtgcttgtgtttttataagagtatgagagccagcagtcagcagccacttgctcagagttgtacttgtggaacctttcttctgcttctcttcttcctctttctccttttatcgagtcccttctgttgcaactctgatttcatattcttttatgcctctgaaggcttttttatcatgttgactcattatctcatgttagctcctataagagggctgttagagacgtctgatacaagaaattcttctcttgctaagagactccaaggaaccaactgatctttgctattttcaattcagggttaaag

SEQ ID NO: 6532 - DNA, 4709 bp, Ricinus communis
  Intron number 6 from transcript 30157.m000795 (locus 30157 .t000004) derived from phytozome v7.0 (chr-ID 30157; pos 7 3432 to 78140 reverse strand)
cttacgcataagaatttgttgcaccaggtttgtatgctgaacctttctttttaggagaattacttccataaataaaactatattatatctttctctaatttttgactactggatctccatgtcggttttatcgaggcttgttgctgcttaactatttcgtgcaatcaaagtgtgtattcatgatttaactggcctttttttgacatggatttgcattttttagtatgcttgaattaatttttaagaatgctatagatggtttcatgaaattccatttagcagcatcaccttgttactactgagttgagtacaaccaacatgatatagcacatatttgaataatttgttctacattgattttcggggaaaataaagattttaaaattgaattcccggttctgaattaatagaaattcagttctaaaacagagaaataggatggaaaaagggatagcgagtctatcttgaattttacacatttttttaattctatcattttcttcaacttactaacaatttgctatatgaactttgtagatggttataattttgttcaaatctctttagacgtatgtctttgctgatgtctcatttactatgtgtagttaaaaataataagatggaaacaatataaaacatagtgttaaaacatcaaaactcactggtttttactagacaaaatagggagttttgatttatacattaaaactcatcattttgtcttgtggaaaatggtgattttgatgtttgatcctaatggagttgtattcaattacaggttttttttttcttcttttttgttcttagttctttctcttctttctttgccattattctttctctccctcggtccttttgtcaaaaagggcgaattttaatgttttacctttttcttttagtgttttttccatctcataattcttaactaaacgtagaaaataatagatacgcaaagatgcatgtctagagaggttggataaaactgtaaccattcacaaagttcatataccaagttattcctaatttgaaattatgataaaattacaaaaatatggaaagttcatggtagatagactcattatcccaaagaaataacttttaagcctcaacatttagaaggtttaggagtcacacctaaagagaattaaaacacacaattctagagcaacaacttgccggagatctttgtttattgaatctgaaaaactctcccctcaaactattacaagcctaggtatacatataggctaaaataatcctaagagtacttggattgggaatcctaaagtacgaaatttataaactaatactaactactaaatactaaaccaactgaatcaaacttaataaaataaagactaaagtaaattttaacaactgttccaggaaagaaggttatttcgcacttttaagtccttggtgatttgatgaatggatacgaggttaacggacaattttggaacatgcaacacattctatagggaaggagagggcgttaaatttattgttccttgaccagaaactgtaacagttgagccatctgcaactatgatttttctatttccaggacatgggttataagtatcaaatctggttggactatgtgtcatgtggttagtagctcctgaatctataacccaagagctagaaagatgtgaacaagaggcactaaaagcataagagttggggtacttacctaattgagccaatgaacatgtactaaagggtttagtaagagaatttagaagattccttagtttttgaatttcttcttctttgaatgtcccaatctcgtcattgttggggttggatttttcttgagaagatccttccccatttgttaagtgtgtttggctttgttgtcctttaaatcctctatttctaccaagtaattgagctttcccatggagtttaaaacagttctcccttgcatggcgtggctttttacaaaacatgcaccagattccttctcggtcttattctcagacttcccattatgccctgggttattgtcatccatagactttgtggagatcatggctgacccttctattgtttgggaatcgagcataactgttcttcgactttctttagcacgaaacattgagaaaatctcactaagagagggcaaagtctcttttcccaacacttgaacacggatctgatcaacttctgcattaagacctacaagaaattcaaatactctctcccttcttacaaaatttctcagcattacagcatcatcactacatttcatcttaatgtctggataatgatctaattcaacccacaaacttttcattaggttatagtactctgtcactgaatgtgtaccttgcttagcagatgatattttagtcttgatttccaatattagagcagcatatttcatttttgagtaggtctgacgagcaacttcccaaatttctttagcagtagtgagaaacatacaatttcaggcctcattgaattccaaagccaagacataatcgttgaatcttccttgtcccatgcttcaaatttaggatcatcaggtgttgggctagttccataaagatgacttaattgtcctcttcccttcaaaaaggttttcactatttgtgaccactgtagatagttccttccattcaatctatttgagggattaatattctgaagttccccattagactgcattgacatgtattcgatagaagttttggaggtatttgaggtgttagagatatttgatgtatcttcagagatatctgacattttagaaaaattggaaaaaaaagttaggttatgaaggttgataatctgcagtgaaggctgatggattttctagggtttcggcaatgaatgctgcaggtgatttaaataaaaagaaaattccaaaagaacagcaggatgctctgataccatgtggagaaagacaaattctcatatttctgatgagcaatacaaccatgatttatacacaaagatgtatctaattaaggaggttgacctccaatcaaatcctaaaaatctggaattcctaagaatcaggaatctagtaatctaaatagtaactagaggaaagttaggaactatgcataagctgtacaaaacaaacacagaaataaatcacagatttccaacaggaatcctaaactaggaaacttataaactaatactgactaggtaatactaaaccaactaaaactcctaaatcatagtcaaaataaaattaaaaaaatcttaaaatattgaaactatagaaataccctttgggtattgagattgcaaatgttagaccaaaattctggatcttttgattttttgaatttgaaggaacttttgaagttattaattgaagttgaattgaagttagaagatcatagcacgttaacttagaaggtacttctgagactttgttgatcattggctaggcaaatttgctaggtagaggagtagtctcatgttaggttttatgaatgattggcataataatgttcctaaagattttaagatcgtgatataataaagacatgttatgtaatgtaagcagcttttacataatcaatttacagtgttacgaatttccaaccaaaaagggtcttgcatctttaaattcttctcaaacagctcggccttttgagcatctctttttatagaaaatagctcaccaccaccgaatttcattagtcgtaacaaataatttattcttttgcatatttcaaaagatattaatttttggggaatttataaacatcccccttaggtttggcataacctgcatttacatcccttattttttaataatatgcattttcattcctcgtgttaactgccatctatttaggtgtttgtattgtgtgaaattactgaaaaggatataaactttgctcaattctgcatttttattactttctttaaatataaaattatattttttttagatggaaaaaaataaagtgctgcattttttccttaatttaagtgaaaaatatctttatttcattttattttagtttaatatagactcacatagggtaaaagtctccttctaaattagtaaaatgtgacacctcagtacttagaccaacttaaaattcattaaattaatagactactatgatgaacgacatataaaaagaagggatgaaagtgaatatttttaaaaactagaggatgtaagtgcaaattatgtcgaatctcaggagggcatttttaattaccccttaatttttttctaaaatcgcgagtcaaaatttcttcatatttttgacgtttagtcaaaattctttgcacaattatgctttagatttaatacacccagtgaaagtgacagcagcaagaaaaatagaagcaaaaaatagataggtgttgcacatttaagattaaatatagtggcaaggggcgaaaagagggagagaattttaacaaaaaagaaaagaaaggattgtaatagaaggaaaagaagtttatgatttctaacatcccttaactaggttatcacttattttcgctctcttcccccttcatccactcttcccttatcctgtttgcttttctatgcttcacaattcaaaggttcactatatttcatcttgcttaagtaggtttctttttctctcttttagctacaattgaagggagtatttgattaagttattactgagactatttccagtgtcatgtgttttccagataaataatctattggacgttgttcctgctgaacc

SEQ ID NO: 6533 - DNA, 2856 bp, Ricinus communis
  Intron number 1 from transcript 28152.m000904 (locus 28152 .t000033) derived from phytozome v7.0 (chr-ID 28152; pos 1 71198 to 174053)
cagaggtatgataatcgatgttcagtctacgtatatatctttaattttgttttatttcttaagtcctctaagaacatggatttcgtacagcatacattcttcatttggtgtgtaaacataattgtatgtttctaggttcttgtatgatggtttccttttttttttttttcagttaatgagtattccttgtctgtacagtaacatatttggcatgatgtaagcattagatataagttcctaaagatgacaaactaataattgcatttacttggactaatatcaaaagtacaaatatatgaaagatgtaaatatgtgtgtttgagagctggtgagtgggttgcttatggatgaagcatcttgaggcacaaatcgagaattgcatttagttggagcaagtaacatgatagatacaactttaaagaggtgtgtatttgtgttgaagagttgatgagtggataagttatgggatgaagcagctttaggtcatttgtataatgtttaaaggatggtcaagagtttaaggtgattcaagacttcgccaagtatttgctaggtgtttatttgtagatgacttttggcaaaccctttttcaaaatgtatgctacttctatattgttgtgtggtaaagacattttatgtggtcaagcatttatctcccttctttgggatgcatgcttgtacatttagttcattctaagcaatggaagtaaagacagttcatccttgtggctatgcaatgatctagattctatacaccactgaactttctttaaggttgagaaattgtcaaaattccgttatgtcactaaatttgtatccttttgcttagtttaagcaaaagctcgatggagtttccaagggcttaagcatgctttgaggtgttcccaaaagagcattggaaactggcatatatggttaatatgatgtaaatctagatggatatgcataagtccatccaactactagctattttaggttttgagattgttatcaattatgtgttcctttaggttattgattggagtccaacaacataacatactagcaaagagattacaacatctccaagggtgctctttaaagaggttatagcatgtccaagggtgctctttaaaataaagagcatcttttgtgtaataaaaagcatcttaatgaatatttaaatataaagagtaagattttatgctctttatattttgctctttattttactttttctccataagtattaatgattttaatttctctttctttttttttatatatatttttgctaatagaaaaatagaattaaaaaattaattaataaagtataagagaattgtaatggatttgtttaattaaaataaagagtgagatatggctctcccaacatagagagccaaaataactctttattttatatttaaagaataaaaaactcattaaactcttattttatgaaatgactttttataatagaaagttaaacatatataaaaagtctcttggagatgcccttagaatgtaaaagttatattatcaagtcatccttctttgtttcatgttaggcgttgtaccagtggtatcatagagattggagaaggttcataaagatttcgtctgttctgtttttacatgttctttcatgggattatgttatctactctcaatcagacacttactgaagtgggaatctaatcttagctgattttttgcacccccagaaaaccaaattctcttgcagaggatacattcttgtctaaagaaataaaaccaaacctaagttctctactacttgcatgcatacaggaataatgattattacaaatattcaaggtggactggggcctcttttaggatctattggaagtaatgcatagtgcatcaagcggttttggtgtttgcataaaagggatatggataatgcagctcaaacaagggaagtggattatttgagcaaccaagacttttagggtttctcatggtgtggatttatgaaaggtattattgggagttgtgactcattttccagatgcactgcttagggtagctgggatgatgtcagaagttttaggagatccttggcctgggaagaagaatatggagaattcgctagaccttttgcttgggaagaagctttaagatctgactttctagaattatcacatttgattgtccttaatggatgtggtcagattgataaatctttattgtggctacaagaccttaattgggaatgctggtatgacctttcagtattaggagaaagaatctctaggttgtagcttcactgcataattattagctcagaatctctaggttgtatcttcatgcacaattattagcttttcatatgttctacatatgaaaatttgagtggaagtgtcatgttgtctttatactgtctttgaagttagaatctattacaagtgcctcattttggctaatttgatggttatgtgcgtctaagctggaatttgacctgctgatccagagtggggccagtttgtttagggctcaattatacaaagcctagaagtttcaggacatcatggctgtttttcatctgaagaaaataattatttgcacttgaaaacttgttcttctagatgttatgaaaacaatttcctgaatttgtttttaagaatattctggcatcacttatagtccgtctcagtattagcttgtatgcattgatagtctttgtttatattgatagttctaagttgagatatcattcttgtctgcatgtttgtactggcttctatgcttgcaacaatgttatactttattgccaatctgttcaggtaattacaatggatagtcttgtgattttgactgtcttgacattctttgaccagaaaaatttgtgga

SEQ ID NO: 6534 - DNA, 846 bp, Ricinus communis
  Intron number 12 from transcript 29908.m006240 (locus 2990 8.t000291) derived from phytozome v7.0 (chr-ID 29908; pos 1854942 to 1855787)
acctttcctgagccaaatcgtcgcttattgcaaaggtagtttatgcctttctttattctatttggatttgtagctcttctgacatgccataaattttcccatcttttttcttctccaattcttttgtcgctttccgtttctatttttggctacccagccacctgcattctggaatttacaaactaatttaacttgcatgttttggcttataactctaccttcaagtatgatattttcactagaatggattaattttggaccttgaaagatctacaaatttaactcttttagtataagaacaggtaataacaacgcaaagaccctgaagttatagtcacagttcattttgcatgaaatatctactgcatgcaaccatatatatagtgcatatgacttgtgttctactgcatgaaatatctactgcatgaaatatcacttgtgttcttacacccaatttacttacaatgcatatgactaaaaggacactggaaaataagaccaatttgttctctgaggtctatgcacaaaaaatggaaggtgggttggaaggggcgtttggacggtggcacatttcaatttatatcaatctgaaatcattgaaatgatttttaaccaaaattagatccttttttttttttttctctttttatttgggttaaaagctttcatccagctaactctatgcatttttgagattagggaatgaaaagaatgagttccatctacctaattttttgttgtacatgatgcctttttacctatgcagagtattgttttctctgctctgccttatgcgttgatttaaatattccttttcctattttgtacgtgtacagaattctattg

SEQ ID NO: 6535 - DNA, 1293 bp, Ricinus communis
  Intron number 1 from transcript 29801.m003230 (locus 29801 .t000175) derived from phytozome v7.0 (chr-ID 29801; pos 9 35213 to 936505)
tgctgattcagcacctggattgcgccagaaagaaggtacgtgccttgctcttccttccttcctgtccgttagtttttctttttcctaatcttgtgcgccgcagtctatcgtgctaagcatactcatagtttcgtcatccttagattaattaacgctatgatatgcataatattgttgacttttttcaacctcaactgtttgattctgtccaagtcaattgacttgtctcaacttttttatcacttcaaatgagtattatattgtttataaaataagttatgcacatcttatggtaatctgcatagtatctttaaaaaatgaaatgcctagggcatttttttgcattaaaagaaatagaggaaactctgggatgatgatggtcactgatttggtatccaatgagcaaaacattaatgatgggaacacgtaggtgccatgataagggtcgataaccacctcgtttcttgaaaaaaaataataacaaaagaattcattacttgatccagttttgtagtttaacaaccatatgaagtaaacgggggtgtcattactgccaaatcatacttggtgtatgctaaattgtctggggtcgagcgtatattaattataaattcaggatgaaattagtggaccacccaacttgtcaaaatgattgcaagggagttaaagaaaggtgtaaaactaaatgtaaatacgatttggttcaacaaaaactggacatgatgcatggggcatgagcgtcactatcattagtcatggaaaaggctttcaagtttgaacttcgaagagtaggctcctctcctcgctccgcttcgctgctatccttctcgtgaaaaactaaacgcgccctgcctttaacttcggcatgtttggtggctttagttgctttgcttcctaattttgctttattaaagacatcaaacttcccaattctttatctcttttcattttgacatttttcaagcacctaattttcttgcttttacagaagtaaactaatgcgaatgtaaaaggtattggataatgaattttgccttagataggccatgtggttgactagtatttagcatactcaatgtactattcattttccctttctttttattccttggttgacgccaacatcagacactgagatccttttctttgatcctctgaattcatgcacattcacaaattggtagtttctttttttttttttcctagaaaagaaaaagttcatagatgttaatggatttccatatgcaatgcaatgtaggctgttgaaattggcaagcagctggcaaagaagca

SEQ ID NO: 6536 - DNA, 4435 bp, Ricinus communis
  Intron number 3 from transcript 29794.m003474 (locus 29794 .t000173) derived from phytozome v7.0 (chr-ID 29794; pos 1 132013 to 1136447)
caaccaattgcagtcaacttgtcgaaataattcaggtgatgctattttttgctcttttatagttaggatgctagttgaaagcttgtttttaatcttgttttgtggatcttatcttctaacgatgactatgagagatcaatatgattagagttattacattatgcatggaagactttttataattatgtgggtattgcttggaaatctacggtttgtagagtaaaaatcagatcctggttgttcaagtgaataatagcccctctcaagtttctagcttctataaagacctttggatgctccactttttagcagcagactcccatcagaatataaaattttgaccaagtgggattcatgtgaattcgtgttgcttgaagtagatagaccttcggaaattcaatgcctgaagtcccaaaggatcaattttctacttaagttttaatattgtaatttgactgaaggattctaaaaagttgaattaaccaataaagttacccccatatatatatacattatgtacaatcctaattatctaaggactcttaattaaactaatcttctaattgctataaacaatcctatttaatatacaacatctataccattcccccttatgctggaacataaatattaatcatgtccagcttgttacagagataattaacctgagtcccattaagagccttcgtgaagatatctcccagttgttcttctgtcttcacataacctgtaaaaatcaaactttgttgaatcttctcacgaacgaaatgatggtcaatctcgatatgcttagttcgttcatgaaatacagaattggacgcaatgtggagagcaacttggttatcacaccacaacgttgctggtactgaagttttaagacctgcttcagacaaaagctgatatatccatattatttcacacacagactttgccatagctttgtactctgactctgcacttgaacgtgagacaatattgtgcttctacttacacagtgacctgaagtagaccttcgatcatctttggatcccgcctagtcggcatctggagaacactcaattctactatgattatggttactatacaatattccttgctcaattgttcttttcaagtagcataaaatttgttcgagaactgtccaatgattaattgttggagaggacgtgtactgactcaccacactaactgaatacgcaatatctggatgagtcacagtgagataattcaactttccagccaatctcctatatctctcaggatctttaaataattcaccatcttttgtgagttgcaagttaggaactattggagtattgcatggcttagctcctaaatttcttgtcttaaacaataaatcaagtatatatttcctttgagataaaaatatacacttcttacttcttgttacctcaacatccaagaagtatttcaacactccaaagtctctggtatgaaactgaatgtggagcagagatttaaaggatgaaatccttatagtattactcctagtaatgacaatatcattcacatacacaactaacaaaatgataccagtagcaaaattcttgaagataacagaatgatccgacttacttttcttcgtgccaaacttctcaactgcctgactaaactttccaaaccaagcgcgaggaccctgctttaatccatataaggatttatgaagataacaaacttttctatactccatttcagtaacaaagccaggcggttgctccgtataaacttccttttgaagatccctatgaagaaaagcatttgtgatgtttaattgatgaagaggctaatcataagtagccgccatagaaataaacaaaccttacagaggtcaacttagcaacaggagaaaatgtatcagagtaatttattccataagtctgagcatattctttagtaactagacatgataaatgggtttgggtagaattcattcccaaaagctagctctaagtaagagggtgcttaatccacttatatacactataacagcccaataaccaagcgatgtgggataaataaaacttctaacaccctccctcacgcttggcatgacatgcaaacgggtcgagtccaagcctactattgcagacaaaaggccggctctgataccatgtaatttgactgaaggattctaaaaagttgaattaatcaatagagttacacccatatatatacactacatacaatcctaattatttaaggactcgtaattaaactattcttttaattgctatatacaatcctatttaatatacatctataacagatacattacttactccaaatatagacatgttaaagattcaatacatttttctcctttcttaagaatgaaatgagggacaaggctttatttaatacggtaaaaaaataataatctatctataggttagttggggaaatttatcctcagttatgccaatttttgctaactgacagggggtgaagggtcaatgtctcaagatggatagtcaaactgttggatttgtggcaaccatatgatcgatagtgtgtaactttcgaccatacattggctaagtttagcaagtgcagtttttcttttttaaattaaaagttaagtggcaaccatagttaggtcatctcttgatcatcatctaataaatgccacctttattaacattcattataaatgcacaaaaaaggcacaaagctcgagaagaggaaatgtattattttttcataatgtacttttataacaggttatttttatataaagcagtaggtaaatttttataacgtgtttatttttcaaatatcaatgttttttatgtggaaatttagttattgaaagatattcagagctcctaaagataaatatattaattttaaagaattttgtacttttgtagaacatatgtatctctgagacatatatcttaaggtggaaatttgtgttgagtataacaaaatttgtatcgctccagcatgatatgctaaaataagctaattatgtcaaagtctagacccatatactactcatttgaatgggtaaatggacacgacacaataacccatctactataattttatctaataaaatgacagaaagattggcctaatgacattaaaaatccaaacacttgtctctttttgcaaatttggcccatcctttaaatttttacttaactgacccgatttgactaattgattgcaattatagccaaattaaaatattagttaaaattggatactaccctcttaaccttagatactaatattttatttaccttaccaatatcgttgtctcttaaaaaaatatttataaaatcacgacaacagtgaggaaagaaatgacttcactcttcatttttgtggcagtgatgtgtaaattattgataataaataatgacacgtcatttgccatgtcatcctattttgactgagattttaatttggctataattgcaatcaattagccaaatcggatcatttgagtaaaaattaaaaggatggaccaaatttgcaattggacataaaggtttggatttcagtgtcattaggcctaaaaaatatatgaaatactttttttatatatgctatatattatgaatatgaaaaaaactatcttaaaaaaactattttagtacaaaaatatttagtaaacctatagtctaatattaaaaagtggatgctaaatgtatataacttttatatgtatatattattaatgagttaagcgtgtcactgaagggttagtttgtaaacccggaaggctgcaatgtgacatgatttatttcgtttcattatcagattgatacaataatggaaactaacactataagcctctcagcccaaactctctatttccatgtcatgtcatgagcgcccttatattatattaacattcatctcttagaattacatatactaaatatcgtgtttgaatggcatgaaagatgactggttaattaacaagcagccgatagttagtaattaaaaaatcctatttatgttagggataatgtaagaacaaatgatggagcgctttaaactgaaacagtgattgaacatgaaaagaatttaacaaatataaataagtgttggctaaataaatagtatggttgaaagtataactgttggccatgtggttgcaagaatgttgacagtctaaatgtcgatcttaaggggctgactcctggccccccacttaaaaaatgggcatggttggggaattcccaactagcccatatatggaattatttttattatctttttgtcatatttaagtaacaagctcaaagaatagccaatttgatggctttttccaatcatccttaggagtggtcatatgctctatgatagaatgaacttttaactcaatcatatgctatttatgtattatctctgttacgatatggtgattagacaaagtggtttctgcaggttatccagg

SEQ ID NO: 6537 - DNA, 1395 bp, Ricinus communis
  Intron number 10 from transcript 30169.m006594 (locus 3016 9.t000371) derived from phytozome v7.0 (chr-ID 30169; pos 26340 to 27734)
aaatataaggtacatttgtatggcaatctgcatcaacttcgattccttttctctattctccctttccttgtccaataatttctatccacaaacaaggcaatctgtatttgtatggccaaaagctgctgaggaaactcaggataagaaaaatataatttttaccttctctggaaactaaaatatagataaggggaaaagaggattaattatttcaaccatatgtgaaacatgttgagattaaacttgaggaggttttccccttctgagataaaatttattgggtcccagtttgggaggtttttttatttttttctttgcctcttaaaaccttatttgtcagacaaaataggaaggaaccttcatttccttcccttcccctctataccacttttatcaatgcatgctatagtagttgtcaagaatgctgctcggatctttttcttttatttgatttgatttaggtagctaaattaatactcttcttttttaactatttcttatgcaatgaatggcatatgatagatttggtgatagtgttagaagaatatgtgacaaaaggttgtatagtctaagaaatcctatttatgaaatgaatttaaaaagaagaaggggaaggtattgtttggtgtgcttctctccctctctctttcccccttgatctcagtcttgaaattgagcccttcctatgcttgaggcatgatgtcttttatggattatagattatggttgggaagaaatcaaacacagaactccaactctccatcctgattctagtccaattgtccttttaacttcttacctgcattaagttaggtacagttctactaagaactgcaaaaagaaaatagaataaaatattctgctaaagtctgacggctaaatgttggggtttcttttccaaagcatcatcttcatcttcatctttcatcccaatccatttggtttaagattcttagagtgtgtttgggattgtttttgggtgttgaaaaagcagatttagaaattttttaataagatatattgattttttttttttaaattgttttttctaaacctacttttaggaaaatattaatttacctgtttttcacaaaagtaattttcaaaattcaaataataaaataaattaaaaattgaggttggaaaaacactttttctacctcaatgccaaacaaccccttaatgtcttcttcctctttgtttgttaaatttgtccattcctacttgatgatattacctttttaagaattgattctatggaattgtgcatatttatttatccaattgccaaaagccaaatattgcgagtggtgttttaagagttgattctatatggattggacaattaactgtcttttgtgctgtttgagatctgttaattggcttcttctcagc

SEQ ID NO: 6538 - DNA, 1125 bp, Ricinus communis
  Intron number 1 from transcript 30090.m000242 (locus 30090 .t000007) derived from phytozome v7.0 (chr-ID 30090; pos 5 5830 to 56954 reverse strand)
ttagccgtactgttcagtctttgcctcactggttggtgagtagttcttgctcattgctgataatggttgaattacctttcttttttaacaatttatggaaatctttgatacccatcttgttgttttgattactaatccatattttaccaaatgggtatttgtaaagattagttctttagatgattcttgggatggaaggaggtagagtgatatttgagttaaatggcactttaaatctatagatattttattgacttttgtgatcaaattttaataaaaggagtatatatgccttatattcaaacgaagatttgagtgagtgatctattctatgcgtgtggggctattttggaagttagttattgttttctgctttgataattgcaaagtctgtcttgaagtttatggaggataaggctcatatttgtttttattaattgtagcttgaagtaaattttttgatgaaataaaagttgtaaattggtaaaaattctacttggtctgccgtctgccctggctggtcgcttggaagtgttaggaaacgtcatgatcattgtggtctgaattgatgattgaaagtaatggggagaaaacatcataaataaactatccaagattactttgccatatagctttagggagcctgaaagggaactgaatcttgcaacagaaagaatttataagaataagatgaataagaaaatctttaatttttgttgcaatttttatgcagaaactttagttctgaatgtttagcaaatcttatctgctcttgcagattctgtattcaggcatagcttaagagaactatgcacgttttcctttgtgacataattgccaagcaaattaagtagtagcttttagaaaatatgaacagtaaaagggagatgaactatgttttatccataacttatatggttttctttgtaatctattttaatttattctgtgatccagatattcttactaagcttgttttgaggctgactactgccgcctttggccgagtggcatgtatttcaagatggtagtttttgaacttttctaacaaactggacttatttatacttttcattatctgatcttccagctatttcttgcactctgtgttggcacaaacagcag

SEQ ID NO: 6539 - DNA, 8289 bp, Ricinus communis
  Intron number 6 from transcript 30142.m000654 (locus 30142 .t000028) derived from phytozome v7.0 (chr-ID 30142; pos 2 50442 to 258730 reverse strand)
ccaagtttgactctcagaaggatacctacgtcgtgcgtaaccttattctcttctaaggttttgttttctatgctgtctaaatttatattcattttcccttcatatttgatttagaagaattctgccatttcttcatgcccttgccttttaacaatggaatttttagtcatcagttgtgtttctaagaatatctgctgttaggggatgttctaaaatctaatactatgtttgtagcctgaagtctgacccaacatgatcttctgctctctctctctctctcgctctcgctctcacacacacaggaaaagaaagtaaaaagatcattacttctctcatatgcaagctatttttctgttttatcttatttttctcatggcctagtatctgtgtattgatctttcaacttttttatgttcttgtattatttgaattttttattagttgaatgaggattctgtgattcataattaattttatttgatcatgtgaactaaacttaaatattcaatatgaaaagtaattctctatttagtcatcaacgattgttacatctatatatacaagttaaatctctaatataggaattcaaatcaaattccaacttctaagtgaatctataattattctcctattatgtatagttgtacactcctaattaatatgaaatagttgcaacactccctctcaagctgaagcataaatattgattatccccagcttattacagagataatcaaccctaaccccattcagggtctttgtaaagatatctcccaactgttctcctattttcacagatcttatagaaaccattccttgctgaatttattcatgaacaaaatgacaatcaatctcaatatgcttagttcgttcatgaaagactagattagatgtaatacgacgtgcagcttggttgtcacaccataacttagccggtactgagatcttaagacccacttcagttaggagttgatatatccacattatctcacacatagacttggccatggctctatactctgattctcactcaacgtgagacaacgttttgcttcttatttttccatgaaaccaaatttcctccaacaaacacacaaacgactgaagtagattttcaatattctttgcaccctgcccacagttagaagctaatatatccatattatctcacatacagacttggccatggttctatactttgattctgcactcgaacgcgagataacgttttggtttttgttatttcatgaaaccagatttcctccaacaaacacacaatagcctgaagtagatcttcgatcttctttgcaccctgcctagtcagcatctgaaaaacatttaatcctagcatgaccatggttgctatacaggattcctcgcccaggtgctctcttcaagtaatacaaaattttctctacagctttctagtgattgatagttggagaggacatatactgacttaccacgctgacagaatatgcaatatcaggatgagttacagtacgatagtttaacttcccaactaatcttttgtatctttcaggatcttcaaacaattcaccatcttttgtaagctgcaaattaggaaccattgcagtattacacggcttagccctcaattttcctgtcttgaattataagtcaagtacatatttcctttgagataagaaaatccctttcttactccttgttacttcaacacctaaaaaaatactttagagcccctaaaacttttgtataaaattgaccatgaagaaaagatatgagtgatgaaatcccactggtatcacttctagtaattacaatgtcatcaacataaacaactaataagatgataccagctgcagattgcttataaaaaaaaatgattagacttgcttttcttcatgccaaacttctcaatagcttgactaaactttctaaaccaggcccgaggactttgtttcaatccatacaagaatttatgaagacgcaaacttttccatactcctcctgagcaacaaagccaggtggttgctctgtataaacttcctcttaaaggtcaccatgaagaaatgcatttttaatatctaactgaagaatgggccagttatatgtggctgctagagaaatgaataacctgacagaagtaagtataacaataggaaaaaaagtgtcagaataatcaactccatatgtttgagcatattccttagcaacaagtagagcctttaacctagcaacagtcccatcaagattgactttaactgcaaatacccatttacatctaatagtcttttcacctgtaggaaaatttaccaaggtccaagtactactttcatctaatcatagcattacgccatctaggctaagatagagcttcatgaacagttttaggaatagaaacagaatcaagagaagcaataaaagaacaagaggatggtgacaaaataggatactgaataagtgcattgatgcttacctttacgaagggcaataagaagatcatcactataactgggagccggatctgatgacgaaggaactggtgcaggacatagagcaggaggacttagaacatgatctagagttggatgaggaggttgttgatgacgagaataaacttgcgttataggaggcttaactggaatagagggaggaagattcgtaacagtataaattagtaaatcatcatcctccccctgatagacagaatctaaaaatgaggcaaatggtgtttgttctagaaaggtaacatcaattgacacaagatatttattaagactagaacaataacatctatagcatttttgtacacgagaatatccaagaaagatacatttgagagatttaagatcaatggacatacgattaataaaaaaacaggctgtagaaactgcatcagcttaaaaatgtttagggacctgcatatgaaacagcaaagctctagcaatctcaagaagatgtctatattttctttcagcaaccccattttgagacggtgtatctacacaagaagtttgatgaataatgccatgttgaatcatataattttggaagcattctgataagtattctttagcattatcactttgcaaaatttgaccaggcacattaaattgtgttttgatctcagcacaaaaagcaataaagagagaataattctgaacgatttttcatcaaatataaccatgtcattcgagaataatcatcaacaaaggtaataaaatacttaaatccagttttagacacaactggacaaggtccccaaacatctgaatggattaactcaaaatgagcattagctcgtttattgactctaggactaaaactctgacgatggtgtttagcaaattagcaaggctcacaatctaatgaagacagactagaaaactgaagtcaaagtatctttaatatatgtaatgagggatgaaccaaccgacaatatgcttcaaatgaggtcacgactccaaaacacgctatagactttggtacttatgtctcaagaatgtaaagacttcccaattcatgtcctttaccaataatcttcttcgtcttaagatcctggaatagacagaaattaggaaaaaatgagacacaacagttaaaagaacgagtgagtttactgatagagactacaaattaggtaaatttagaacagattgcaaaggaattgaaggtgttgaaataattgtgccagaccctagaacacaagatatagacgcatctgctaaagtaactgtaatgctaggagtatgtgatttaaaggaagaaaatagattagatttacttgtcatgtgatctctagcaccagaatcaataacccatttggaagatgaggaaacaagacatgtgttcattttacctgaatcagcgataacagtaatagaagtagacgaagactttaaagattcatagtgttgtgataatttgacatactcatgcagatactagaatagactcaagagcatcattagtagatgcaacatgtgctgactggtttgactgattcttgcgctgcaaccttctacaatccttcttaacatgtcttggcttatgacaatagtaataacaacacttgtagaattctgtcctcgagtactagtattaccagagtctcctcctttcttatatggttctctcagatttagaggtgcaaccaataagaacactattagattgaatatgtgctaaattttttgtgcggagtaccctactgaaagcttcttccaatgaagatatctcagagctagacgaaatttgagatttggcaccctcaaactcggaaggaaaccaaccaagaagctcataactggcatcttttctctctgagcttgctgaattcttacatcactactaaatggaagtaacatattatgttcctcaggagtcttcttaaaatccataaagtagtcagtgagagttctatcatctttttctgtatgataaaaggcttgacatacctcataagtgcgtttaatatttcccttgctggaatacacaaacttcaaataattcatcaattctttcacaaattcataatgattaattagcccaaccaccttactatcaatagaattatgtatttgcaaaaataaacgagcatcgtctcgcaatcatgaggcttttgaatcatcattaggtgagtcatcaattaagtaattatccatataaatactccacaatcaattaagtaattatctatagaaatactccgcaaataaagccgaacatatttattccaatctaaataattagatctattgagcttatgttgacattacagaaaagaaatcagacacaacaactcactttttctcctccatatcagaaaatcaacctaatagcagaatagaaaccacaacacagctgcaatttgttttgagaaataacctgtcccaaactagatcccacaccgagtagatgctgatccaaacaggtagaagaatgtctcgtggaagtcgaggcgagtcgttcaagacaaatcggagcaaaatctggcaagggatgcatctccgtgtgctggcgcatggatctgtggcagaaggctttcagcggcgcgtgtgattcatgcgtaggatctttggtgacgaaacttcaggcgaagcacggtcggcggacggtgcttcctttgatgcaggcagtgagaataacagaccactagaggaaggggacctgagaagccctagcttggtgacccaaaaatacagtgttggctgctttgttaggcagcaagagaagaaaaaattctagaattctttcactgctctgatttcatgtgaactaaacttagatattcaatgtgaaaagtaattctctatgtattcatcaacgattgttacatatatatatataaaagttgtatctctaatatatgaattcaaatcaaatactaactcctaagtaaatccctaattattttcctattatgtatagctgtacactcctaattaaatataaaatagttgtaacagatcacaagatttcaactcgagtatcaaggatcccaaactagttaaaattgttgtgtatatcttttttttttctcattctgcctagtttaaggatccctgtttagaaagatttaggctgttaggccttatatcactctttcttccagagtcatcttaggtccaccccttactttctggaggaattatgctatatacaatattttgagtcaaatatccttaatacggaacaaagtatttctttcaaatatgcggtaaacgtatttcatttatacagtttcttgattttccttgttttcttcgctgctgctaactttgaagtgtctccctcttcttcttgcacttgttcagtttattaatctaatttttaaaagaatctaaaatacattgatataatatcctgtccatcatcatgaacctctcaatctcctcctcattaattcatatcattagtttttttttttatattgattaataaatttaatattcaatatttaataatttaataattatattaatttttcaagaaaccaactttattccttattaagtaattaataattctattattcaatgattaataaaatatttagaaaaacatgctaatcgtctatatattattttcttttagtgttcattcttttaaagcttatggttggtagtaaaattgaaattttagaagttattaaatatgaagaatttgtttaaatattcttacatatgtaccacaacgatagaggtgaagtgaaaattatactctatttaaaaagaaaagtgcgttaaacgcgaaattatttttagagcattttttatggagagcattttttggattgaagactgatttaataaattttctcctatcttgtgtcgtaatatgtgatttattttgaaaatattaagcttatactatttatagtattcgttcttcataaagttagtaaaattatactgctattatttaataattttttattccaataaatattttaattataaaagagtctattgtactaaacataccaaaatacagttcaagtataccagaaaaaaagaatattgttttaacaatagttaccaaaaattttggtaacagataccatttcctatgaaattgaaagttattgcattttttttaaagaaatccgtatttctcaaaatggttgtttttctggaaaaaaatctctgacaccatttaaattttattttttggttttctttctcttgaaaatttcccatattaagtctcttgcaactttagtgtgctctatcttaaagttgatatgtttgtttgtctctgatgcatatgtccaaaccattttaattaacctcttttttcgactttcctgaatgaatactagtatcactgatatagtacctacatttttaattaaaaaacattcaagttaaattccttaggaaaaaaaaaaaagaaattttctattttactagactgaatgaagatttttacttgcataaatacaatatacatctatagtgaaaatgttattgctaccttgtaagattgtagtaaaattttgaataaaatataattaagattgataatattttattccaatgtcagttttcccctatcaattactaacaacaaaataataagaaacaaaaattaatccaagaggtaaattaaatttagaccataacctataataaaactaaatagacactgataaatttgacaactttccttcaaattttcattgctttaaagcaatcaatttataaaacttaataataaaaaatacaagtaaagaaaatagtaaaattcagcttataatatattcacatagaaatctgtaacttaacaatccattatagtcagagagtaatctttttttaaaatatatatgcaggttggtttggatcaatttgcagattgacaattataagtcaatccaactcagaaaatgaagtttgaaagaaagttcaaactgatccaattcaaggcacttatcaaatcacggtttaattgcaggttggtttagattgggaaatttctaaacctatactaattagtactataacataatactaaattctgtactctaagagcatcaccaagagtctccccctcctttaaaatagggagggtatcctcttgaacaagctcttacattttccttgtccctaaaatttttaagagtcaaaatctctcttctcaatcttaaggagtctaaaatattagatttatttaaaaagtgaaataaacctataaagaaatactattatagtcttattaataaaaaaatgaaaataaggagtattgttggacatgcatatttttataatataataggaagtgaaatagggagtcttgttggagatgtgacataatatttatggtttatatataggtacctgatttcagatatttagttatattacagccatgtactatgtgttgttttagatgttctataggcactcgctctttgaattatcaaaatctgcccttctcttgctagaaatttgtccaacgcttaaatcaatctaatcaatggttgcttttatctttataatttgggatacagattagattttgaataggatctattgattcatcagttctcttaattggactataaagatgttttctggctttacattttcatcaaatacggtcgatggtatttatatgtaggctccttctgtctaattcatatttctttcttcgtagatatttttggttaatcatgttctggcttctggggatactcttttttttttagatctttttattttaacatattttatttgaggatgtaaaaaggttagtttctttgctagatacctaaaacatacttttaattgcagtgtcacc

SEQ ID NO: 6540 - DNA, 446 bp, Ricinus communis
  Intron number 3 from transcript 29848.m004616 (locus 29848 .t000172) derived from phytozome v7.0 (chr-ID 29848; pos 9 80466 to 980911)
aggtataacctttttcttttcctgtgcagacaatcctgtgttataagtgtgttactaatggtatcgatctgtaagtttacgcgagacatttgacttcttaacacacagctaattagaagttcaagactgatgagatcctgcataggagattgttcctaagggggaaaacagcccccactgtaatatgtcctaggtttggtagtatcatgaattcttaattgaagaatttctaaggttttgaaatcaagatttcatcatttttcttgattttttttattctcttgtatcaaacatctcaatcccttctttctctttttggtctattggtatttcttttggagttcttaaccttaaagaaacatgtttcatctatgctttcaatatttattacttacctgtccaaaattgcagtggaagaattgatcgcctctttgttccaattggca

SEQ ID NO: 6541 - DNA, 3495 bp, Ricinus communis
  Intron number 1 from transcript 29612.m000373 (locus 29612 .t000001) derived from phytozome v7.0 (chr-ID 29612; pos 1 13239 to 116733)
ccgcccctcctccatccttttctgccacgacccaggtaagcagcttttcttttttctttttgcatttttttttcttttaaagcttgaagatcgatatcagagttcggagaaaggaaaacagagttgataattaactttaaaatgcatgttattaacttaaaatccttttcttagttgctgttcactgaccatctatcaacccacccagttcttgattcgtcaaaagactttcggatgatgatgatattttaacagcacgtgaaatttaaacgaggcttctccaaaataaaatgacatgattttgcaaatggcattattttgcacaaatttagttcattcttctatgcaagtttttattctgtcgctagaacagaaattaataatttatcactcaaaaaaaagaagagagagagaataaacaaactcaagcacaaataggaccctcgccattttctcacttggccggaaccacttgtaacattgcacttatagttcatgaaaattgataggacacttgcaggcagttcagtatcatgttgtcattttatagtggcaccagaatgttgtccccagatcccttctcttttattcgataacttcatgaacttgcaatatattccttaattctcttcttgcaatagttcctttccattatctcttcttgcaatattctttaattctcgatctgttcttttctttttatgcaaattgatacaaccagaaatgtattcttgtgatatgttgggtacttttttctttttctttgcgttcttgtttgatatattttatgttaacagcatgtcaaatttaaacgaggcttctctaaatttcagattactgcaggctgccttatatcatttgtgttgtgacatgttggaattttcttcgttttattctaatttgctactatggagtttgttgaactctttatttttatcaagagcttggtttaattatttagttttggaatttagatgcatattttgcttgtatataatttatttataatttcaagatttacaattacttatttggtaagctcgagctttcttaacaagcttgaattcgagcttgtacatagccgagcatgagcttagctcgcttatataaaataccgaactaataacgaactcgagttcaactcatttatatatagtattgagctaattacaagcggagctcgatcatatctaaattgcaatgagctgagtttgagctttaaagcataaaaaattttcaagcttgagcttagttaatttttcacaagccgagcttgaatattgaaaagcttggctcggctcatttgcacccctacctgccaccattcataacctcacacagctcatattcatttccatctcaagccttcactcatggtcatcatcttctacaaagaatgagtttgctaggcatttatcatcttcctcgtcggattcgaacgggtttgaagaattggtcatcttactcacgctcatctcaagttgttctctgtagactaagaagtatttgagtctgaagaattggtaatacgtccgtgaacctgtctagtttttggttgttgggttgtattgatttgtggatttctttttcatttgaagttaaaaataaaaatctaattttgaaatttggatgctgcattttgatgatagttgatttttctattattatgttgtttgctataattaatctagtgctagttaatagttcagtaatttggccaactttctttgtttcttttctttttgaaaataacatgtaacattgcctgcacttgcaactattcattggaaaacaaagaattagtgtcaaataatggtacttcatttgcttgtttatttagagacttgttcgtggtctaattacttttgaaagatttactagtataaatactcaagttcttcaaatatttatgagtaaattactattattttttttttacttattaccagttggtgactcttagtgataaaaagagcttctcatgtttttatgcactaggcaacttctcatattttcttagttggttaggtaatgaacttggtcttagttgtatattgtttattacattttacaaagctacttaatgtatattattttcttcttttagtttctaattaaaagaatattcaattttaaagattctttatatgtttgttgtttagtaatctaataagtgaattttctctattttttttttcatataggcattaggtatgctataatggataagaattggatacacgagcaagataagataagttctagatatttgtaaggagtagctaattgttttagcatttgctagtaatttatttgttgatgggaaaaaattgcatgtccatgtataaaatgtgtccatttcaattgcccaacacattgtcacatgttatttatttgagcatggattttctaggcaatatatctaggcaagcatataactgtgataaacagttatacaagtaaagcttcctcagccgagagctctactagcaataacaatcaacaaatattacaaaattaaaaaatatacatatattcattcaacaatctgcaaaacacaaataaccacaaataaagagtaaattttttttgaaaatataagacaacaaaattaaaaagagaataaagaacgacatgaccaaccttaaagaaaagcaagcaacggagagaacaaattgatttttctcttgagggttaagttttatgcgtaaaacctacaaaatctagatcgcggatggtaattagtatgctgttctcaatccgtccgtctcttctatttcggctcagtagtaacccacaattaactaagacgtcttcttcttttttcttttttaaaggccctagactagttacatttagaaaagttgtttattttttttaaatgtaactagccccgggcctttaagaaagaaaaaaaatatcttaattttttcgggtcactattgagttaaaaccaaagagagagaccagattgagaaaagcaggccagttaccatccgtgatctagattttgccggtgaactaaagttgtgtacttggctttagtataacctaattaatttcctaattatggatttagtttaatgtaggttaataataagataacaaatattcaatcagattgcagcatttcacttcatttcctttcttcaagtcttttactttcttttaggccttgtttggaagaaatcatatatgagagctcaattgaaatgaattcttgcaagattatgttaatttcttttgcatgatttcatctctcaaaaaatgccatttcttcttaataaaaaaagttgaaagagttgaattctagcagttatgcaccttgaaaatatactatacctaatagttggaaatgcatatacttgatatgatgttttctttagttattcgtgatttcttttttggttattagatttagtatctttgaggtaatggtattgtggaaggatttacttatgccctggttgctaccttgattcaggtcttcaagtg

SEQ ID NO: 6542 - DNA, 2409 bp, Ricinus communis
  Intron number 5 from transcript 30157.m000798 (locus 30157 .t000007) derived from phytozome v7.0 (chr-ID 30157; pos 1 87988 to 190396 reverse strand)
cttgtaagtcagtctgctgtttcaggaaatttattatttatttccaaatagcttttattcattttatatttgataccctacagcatcatattctataaagaatttttcttgtgattagttttttttttaatattttttttatatattttttttaatttgtggaaatagaaatcaaattatgagatattgatatgaagtttgtttagaaaacaatttagcaatgctgtaaattagttttttttttttggaaactatttagtatatatgtcaaactttgacaattggaaatctgaaacaaaacttgcaagcgattggtgtttagttaagtatgttacttgtgcatgcttttcagtgatgcagttagagaatttgaactttgggaattattttgatttaattatttgttatgaaattcttgtctttcttgtacttttcaatttaagaagtttaggatttagtattatttaggaattctattctcaatagtaatattttaagattttttagtgatattaatatcttatttagaagtgggttagtagtttcctagatactaataaattttcaatcctaacaacctgtttggtttatgggattgcttaactaagccgtggtattagtaaataacactagatttggtacataaaatagaggttgggcttaacaatcctaaaggcttagctaacccatgtgagcagtcttattagctaaaactaagcctgcccatgactttagtaaaagccatctccaatggggttaataatcctatgattcatgaaatttaatctcgccttgatttttagtttctttactcaaaatagccttgctttttaatgaagaagctaaattagattaatttacttcaccaaaatttagagagttttctattgctaatgtgaccattcaattttgaaatttattttcttgcacttatatatgatcagttttattaaaatagtacataattatttttcttctatttcatttgcacaacaaatttgaatcatggttatttataagttccaatcgaaaccatcactaaaatctacccaatagatcatgcgattataattaccataaaagacataatattatgaaaaataattaatacctgagagtaaaagtgatgcttcaagccaaaaatccatgcagactaaatgaaaagatttaaagactttttgagaaagataaaaagaagaaacaagggagacataattttatatatggagcaacgaatgtttaggtaatatgattattctaatactaccaaacatggacagcaaaaatagaattaattaataccatagatcaaaatgtttgtaccaaataaggtttaatataagcaattaaatactataactaaacctaggattaagactaatcttaaggattttgtatccatgaaccaaataggctgtaatagtgttaggattatttttggagttccatataaacccatgtaaactagctactatattaggttaattatgatttcaatgattaaatatattaaaccttttccatttcctatagctgtgtgcttgggtttgagttcgtatgtgttggtttcttagtggtctacatcacgggtgcttttattgggtgcaatgaaagtggacgtttagtataatattcttgaaatttccatattacataagttggttggttggtttgctttgtttgaattttcgtaatctctttgtatttacactgtacttttgttttatcaatttgtgcaaacaacacagtatcttagcttttttaattctggaaatgcatatatattacaaagcttcttactttacgaagaaaataaggttttacttgagtatggattgtttagtacagtgacatttggaatttaattagttgtcagctggtgctagaattgatatacaagactgtaaactttcacttcttggcatagaaaattacagagaatatgatgctcttctttcagtttgagtatgtttttctgatatgctctcatggcaagttttagacctgattgtcctgctgcattttcggagtgtgcctctatcttgaatttttaataaattagcgaaaaacttcatgaatggtatcaggaataaagaaggcctagaagctcgattttacaggtccaagtctagaagcaatatatcaatactttcagcacctaaaattagtgttctctatactataaaaagacatatcatctatggtctagttggactgaattatgttctggatgaaaaatctcacgtggagagattgacaaagctcaatttgcctatcattctgtgcaacactgttttctgtaacagagagaaactaaaaaaaaaaagcaacattcttttacttatctttatttattttcataagctttgtgcaactttccagctaacagtataattgcagggcaacggt

SEQ ID NO: 6543 - DNA, 1131 bp, Ricinus communis
  Intron number 1 from transcript 29929.m004667 (locus 29929 .t000170) derived from phytozome v7.0 (chr-ID 29929; pos 1 031437 to 1032567)
ctctcttttggataatttattgtttcatctttcaggttaaacccctcttctctctttcttttatcactctctgttatttgtttctagattttcttccaagctttagatctatcagcatttattattcttctgcttagattgttaattcttgtaaatatcaagtagatttgcttgtttcttgcttctgttactgtttcttggttttatctctcttcttttttgtttaagttatcatggctatttttaattcattagatggtttctatttgtgtttattctccaatactgaacctaatagtttttctttttcttggatttgcatttttgagtgccttttctagctctgttgagatggcttgtagtttaattatcttctttattgctcggtttgatctttttatcattcttgtagctttagagtttcgattctttgattgcaatagtataagatctagcattttcattctctaatatgaatcatctagctgtaaaattttatcatactatttggcgatctattttactgatttttagatctggttcactggagattctgttttgtaggttttctccaaggattttaaaatgttttttttttttttcatctgacctgttcaaaatcaagttttacgaggacataattaattaacttgattctttatgtcttattctattttagaaagttaggtgaacttgatatttgtgctttttgtttttcctttgaatttaccttgagcgtaataatgtctatggaatgttagttgtgtcaataccatttatttgcctttggaaatgaagtatgcaccttttccttttgttatgggggaaaaaatggttataattttagaaaaagaaaagaaaagaaagataatagtatttggttttactttttaaattttttctgttgcattatcgacattcaacaaggcctctatatgattcctattgaatactattgcgaaatctaggtggaatagtcgagactagaggccatttttttacactcttaaaaaatttaacttagaatgctgtttttttttttttttaattccctaaagttcatgtttttattacttctaaattaacttttgttccttttccatttgatcaggctgttagatattgactcca

SEQ ID NO: 6544 - DNA, 3008 bp, Ricinus communis
  Intron number 7 from transcript 29701.m000590 (locus 29701 .t000011) derived from phytozome v7.0 (chr-ID 29701; pos 7 7524 to 80531)
aaggaacttcgagttaaggtgtggttctgtttatttaatgttttcttaccatgtgttttactttatggttctcttgttggatgtataagacaatttgaaactggtttatcagttagaatgttgcatgtgaagtagaaatgttctgttgcatccaaaatcttatagcttacatgattctgcatcctttaggagatttattcattcttctaagtggaacctgttaaagtgccattggaatttctatttttttttttaaacgaactgcaaatggctagcccttgagtaagaatatatgctaccaacttatgtaactgtgtacttctaaaaatggttgcaagaatctgggagtcccctgatatgacgaatggctgaccacttctgccatctttttctttccccttggaaaggatatgctgatgatagaaaatatttatatagtatagagtgattattctaatatctattaaattctttgacactttggagttgtagatttccttaggtaatgaaattctgtggatgagttagacatcctcttaagcttagccacatatgaaaaaccaacaattcatacagaagtgcatagcaattatactgaatagtgcttattggcattacttgaaagcccccaaagaagttgggagaaccaccttgcgcataatagaataaaggggagggtacaaaaaggtatactgttgtcacagggtttttacctttgtggttttcttttgggtcatttcagggtatttggtttcattctttcttttatttacttcaatgtcctctcaattatttttttttttgttatgaaatcaataaacattgattttcaataatttttgaagtgttctactatcaaattgaccaatgggatactcttaaaaatattataaatttattttagaaactactttatcttattccttacaaaattaaagaatacatattaattttattagtcataaattcaccattttagttgtatgataaattttacttaattaatgattttatttttaaaaatctcatattatattaatataagatcttagaattttgactatactagtatagagggtattagagtgacaaataaataaaaccacaggttctgaaatgacaagaaaaagaccagtcctttagtgaaaaagcacataaccactaggtacttttttgtacttctccctagtaaacagaaaattgaccatctaaagtatgcatttttaaatagctataatttatgttgaaagattagctacagggggtgctacctcatgctgggcttaatgtcaagaggatgctaccagtatttgtatagagaagatgctaccagtagtaaagagtctaagatgctgaatatcaagggatatcaagaggactccatagggaattggtcaactttggagacaaaaatcaactgaaaaaggaaatacatggatcgctagactgtcttaaggagtctaattcttgaatcatatgtagacttctggcacataaggatgttattggtcttgaactctcacataaaatgaaactggagcttaatttcatttattatctgtccatgaaaaggactgcgtacttctttccagtttatggaaaagaaaaggacttataatgacatttcttttagttgtggcatttgcctggatctgcggttggatctgaactgcaaatcattgtaaatggagttactaatttgcagctcttggtactggaatattgcaatttaaatgtccaattaagacgaaccaattgtttgggttgattacaagcttgtgtttttctttgccacaagtgctgtggttctgtccacttgaatgctttctgtgaagcgtgctactgtagaaaggcttatgtcaggtttaatacgcgctggaaaacaataattaaaagaaaagtgagggaggaagttgaaggaggaggatgtctgatatggttttttcagttagatttctatatataagcattaggctcttgtgttgtttcagttaattaatacattatttaacattgttcagttcctatttattttctgacattattgatcattttggcttcacacctaaccactgtagttgcttactgcttgagggtggtaactcctactagaactgaagctataagaaccaaatttgttcttgtgccatgattgtgactccaacttaaattgtagatatctcactatactccctggatttatccctagtctcactcaggatcctttttcctctacttatctattgtgttcacctgtttactttgtgcactaatatgaactttctctgaaagtgatctcaaatgaaatctaaattaatgtccatgagattcacatgccttgtgaactggtgaaatattatattaggtgaaaaaagatactgaagtcccatggggtcgctatttcttccatttctctgcggatttcttaccatttatactcattgctatgtctgttaattttctaaacaagttttttcagtatcatgacgcaaaatattgttagtggctagaatcgccaccttagtttcctctagcatgaaaaaaaagatgatgttttccttggtgatggtctgtaaattgtttgttttgagatttgttgctttagataatgcccttgccatgcttatttcttggttatcattttttttttatatacctcattctcaattatcaatttctcggcagagaattgttgctttagaaaaagatgttactgtgtgcttatttctttgctaccattttttctccatgttaatatcattcaggcttgtttggccttcatttttcgtgagcttttaaaaaatatatgtcctttaatgtggtccattaacttgtatgttctggtattcaagcatttgctttgtttataggatagcttccacatttattgaaaaggggtcctgctcctccttcctcctcctcttccctctcttgcatcaattatataatgatttagtaattatctgatttcaggggacatatctacaccacaaagaaattaaggctgc

SEQ ID NO: 6545 - DNA, 4391 bp, Ricinus communis
  Intron number 2 from transcript 30065.m001146 (locus 30065 .t000011) derived from phytozome v7.0 (chr-ID 30065; pos 4 60686 to 465076 reverse strand)
agggttcttaagcaaaagcgaatgtaagtaaattttctgtgttttttgggatgcagtacgagataattgggattcaccatattccagttatcaacttattattgtgacttgtgttttatttgaataagaatgaaggttgatttggtaatatatagatgtgctattcattgtatatttgactatttatggcatatttaatttcgctgaacctaagaaagtatattttgcttgttcttgttcaatgctaattgctgaaatgatgatatgcagacaaactaccaattgggattttaaggtgaaactgtgtaaccctattttctgctcttgttaatttgtgattagtttgacttttcatctttgaatatgaaattggctcgttccacctgaaaataaaaaaagggaaataaaatgcttttcctatattatttgacatttttataactctacatggaatgcatttacaatcttagaagatgcatttttgctgtattgctttttaaccaggtatcagttaatgttaaacagcatagtccacttctttggtgctgcttataatcaattagtgccttaaatttggtatactcttgacaaattaactatgtaaatctaccattttcattgaaagactcttaagcagtaatcttaccagatatttagcgataattgtcatcgtttagcagcttcttagatatgcctgcacttgtttccagttgcaggaaagtcttaacctatgaaataatttttcagcataccgaaattatgtagaaaccctgtgtctacattttgactagtgaaaccccaaggtcgaatgaaatttgttgttttagtatggcacatgtggctggcatattccaattgcttttgtatgttatagttaaataataataagatctaactcttaactatctaactacttcaattgattattattccataataaaaatgcttttaagttcacatgaggtgcatattatgccaaagtacacatttatatgaactattgaggcatatagacagttgtcagctctttcagtttaacaagctttgtgctttagacagcatataaagcctccaaagtacttgcttcgtgtcaaagttacatatagaaatcttttattatggtgaacattatatgacattttccatcttcagaacagaaatcaagaaaaaagaagcctattggtacccatgcctccttcatttatcttatatttgataaatggaagtgagtgctgagtaattgtgctggagttatcagggaaaactttagtagtgatcttgaacctatcactttttgaaagttatgctaggtcccataaatatatcatcttgaaatctaatctagatggtctatcggacaaataatttgtataatttcttccaccaaaaagaattattcgatgaaatatgttagaaaattagtagattgagcttgaaatgtatgaaaagctgtgatgtagaaccataaaggaattacatgcgcacgagcacaaaccctagcacatagctatgggaaaagcacaaagcttaaaagaaagcataaaggcttaagaataataatctgttacttattaaaacatcgcagcattctttataatagaattgcaacggtatttatagaacccaaaagttaacctattattactaggattagaaatcctatacttggaaattttgaaccaacactaatcgggaaaattaaaaccattactaattaggaaggaattcctaacaacaataggattcctaaataaatactaaatcataaacttccaaaacagatcattaccaagaaatatatcaaatttcttaactaataattaaattgaaataattcctaaacttagaattctctaactgcatcctctggttggagaaagctcgaccctgagtttattactgttgcagaatgaacaattggatttaaaatttatgcatctctattgtcttggatggcagcaacaattccataaccttaaacttcattattccttttgcatcaccaagttcatcaacacataagaaactatagattgcaacattgacttgctcttgaattcatcatatataagaaaattaattggatatgcaatcttctttgttttctctatgttcgctagatctttttttgagtaggctcttcaaatttttctagctcaatttttatcttcttgattttcaagatcaaattcttcaaattatttcagctcaatctcgtcatttttatttcattatcatacaattttgactcctcgacttgttgtgttatatcgactttgtattcctttccaaatatctttagtctctccatctctttctagatttattctcccttattacgttgatttcagataagattagttattggaacgtgttgttctctgtgtaagatgataaaagattttagacgacataatggtacatgtaattataactactttgttgtaagacccttgttgaaagcgcattctccatacttcaagtcgttcttctctatctcgtgaaagatgtttgaccgtcaaaaattctttgaataaataaggagatcttatagcacaaccatagtgacccctaaggtaacacaattcatctaactgtaccttgtaaacatagatttcatcttgtagtctttgaatttcagcccacactagcaatctctttttttttttgtggatctgaaaagtaaattcacgcagtcgaggaagagattatttaggtcaaacctgaccaaattgatatagaaccattaaggaactacatgcacatgaacacaaaccaagcacatagctatgggaaaagtacaaagcttaaaaacatcacaaggtttaaaataattatcttgtaattattaaaacatcataacactcgctaataataaaattactgtgggaatgtgtagaacattatacctaacctaatataactagaattataaatcctaaacttgaaaaattttaaacgactatttagtttagctatttgtagcaactggtagctgatagttgatcgttaatagctgatgaatatgagttgtttggtaaaattttattagttgttgttagcatgttaaatgatcgtttagggtataatttattttttaatatattctcatttatgttatattattttttagttatgcaaattatcagacatagcttataataattaaaatgctttaattaactttattcaacatagttgtatttattatttaacatatttataaaagctattttaaatgtaggtgttaagagtttaaactccactagtgtaaagtttcttcttcaaatgctttaaatatgaatgtcataattatttaattattaattataattttaaaagaatgatttatttgttatgaattataaaaaattaatttaaaaataaattatttttttacttcttatttttcataaaaatgatagtctaaatcaatatataaatttaattaactatcaactaataagaaaaagctccaaaagtgagctgataaaatccttagttgattgggattaaatcagttatcaattgctgattttttaaattttacaaagctggtttaatcttgatgtctagcaagcaacaactatcagctacacaaaccctaccaaacgtccattaaatcaacgctaactaggaaaattactaactaggaaggaattcctaacaataatagaattcctatataattctaaatcataaacttcctaaatggataattacaagaaaagcattaatttcataactaataattaaataaaataattcctgaacttagaatctctaactgcatcaagatgtagataattgaaatgggtttcagagggggagccattagattttagaaatctaatttctttgtttcttttttaattgcattttagatttatgaattttgaggggattttatttttagcctgaaagaaggaagaactaaaacttaagtttataaaggaagttaaaagatgatgatggtaaagagtaaagggatattgaagtaccaaaaccaagggatagtgaagggtgggaaggagggagaatatacaaggcccgtttgatggctgaaaagagtagatttgggccatttgactgctgattaggatttaaatgcttcatatcagctttttgttagcttatctgttaaactgagacaatggacaaaattagagtaatagaaccttcatgaccactataagcctcagtgatgagttcaatgcccatggatcaaatatatccgtatttggtgcattgatagatttgtgtgaccttgttttatggaatggaattagaatatttcattgagtgtctttttataggaaaacattgtatgacttgtcttatatattgttttcttctaccatttatagaacccataaacatattggacaggt

SEQ ID NO: 6546 - DNA, 1055 bp, Ricinus communis
  Intron number 4 from transcript 29693.m002075 (locus 29693 .t000113) derived from phytozome v7.0 (chr-ID 29693; pos 7 68669 to 769723 reverse strand)
gaagaagtctgtaaccttagtacttgatttgggtaagaataggtttgtttgtgcctcggcctttgttttgtgctgctggattactttagttttttgtttgattcggtatcttgtttgtttacttttatatgacccatttattgtttatagtaatataataatcatcattggagtgaatctagtggatagttgatggattggaaagattaagatcttaaatctatttgacattatgcagattcactgtacttcctgatactttaggcttataaggaaatcatctgaagcttgcaggatagcatactatagtttgcagaaaatgtaagaaactaccaatcaacaagtactttacaaaatgtagcactatgaagctatgactttttgtggtgagaatagaagagaaaaacctattaagtttagattatatatattgtttaagttttgtgaactggtaaaatgacattctcataaaaaggaatgaagttactgataaatttttattaatgttgtgttaaaatgtggaatttattttaaatttcatgagttgggattttttaagtcggctcatttagagaattattttgaatgctcagggaaattctcaaatttttatcatatgtttaatcaggactttgagacttttcctgggtctgaattttatagcagaaacttgtgtttcgttttcttttcattggccttgcaatcttgtttagcattaaaaactttcagttgttggaatttcctggattatgacaggctcaatcattcatgagatactgggttgatttggtatatgtttgtgtgaagaaggaaaatttgtaacctgatctctctcacaatgtctctttttcttttttaatatgttctagtttatccaactgtaggcagtttctgaatttgtatctggcttgcatcggttgcttaccttttaattaaaaaagaaaaaaagattctttgcactggattctcatatgcaagtattatatgaatatctaaacaaggtatattttgaatatgcagaaactttagtacactctacattggaacattgtgat

SEQ ID NO: 6547 - DNA, 4029 bp, Ricinus communis
  Intron number 8 from transcript 30106.m000668 (locus 30106 .t000025) derived from phytozome v7.0 (chr-ID 30106; pos 5 28828 to 532856 reverse strand)
ggtgtacccctccaagggtatttgtggattatcaggtattaccttttcaatgcttactcttgctattttactttataacttgacaaaatgttcagtggtccaagcaaagaatgatgctagactcccgaagttacccttcaccaacaatgttggctaaatgtcacactagttttgtaaaaccatatattctgataatgttgcatttagtgcatgactatgaacgtaattaaataattttttttttttgttatgaatttagtataagaattttttcagatgtcaacagccatgttaagactgcgaaataaggatcatgtcacggggctattaattggaaaatcttgcaaggattttcctttgttctgattccttgtgcgactgtgggaatcactcaagcttgttagaagggagctaatttctttttctgttatgaatttagtataagaatttttttcagatgtcaacagccatgttaagacttcgagataaggatcatgtcacggggcgattaattggaaaatcttgtcaaggcttttcctttgttcttattccttgtgtgactgtgggaatcactctagctcgaagggagcttgatatcttagaattcatttgaaagagagagtttctgatctcttaagtttggtaacattctgctggtcttatttttatttcttacgtcctttaaataggacttgcttattacatagaagtaggaaagttacatagaaataggaaagctataatttaatattataaaaccttcctaattataagttcttctaatctaggaaacctttataatttactcttataaaaacttcctaactataagttcttctaatataggaatcctatatacaataggattctattatcctagatatcaattactatccttggcagcctttgacttgcgtgaatatttgcatcctacaaaggcatccgtaacattactcccctttgaagaaaaagcttgtcctcaagctcaaattaaggatagactttgcgaaaatggtcaacatcctcccaagtagcatctgggcacattgatgttcaatttcgcccttttataaatgtggatagtgatacaatacaatcgaacaatcactggcttggttcccgatagtaaacaaatatgatgatcacaattgtggagtggtggcagtccccttggctcctgaaagaaatcagaaaattttgccaaaagctgcactacactaaggctgtcttggttgttcctcgaatcatggactaagtggagttgacagttctgacctgtttgttgtcctcgagtgttatttgtttgcttccagagttaaaacacagcgagtgcagcaaagtcctagagaatgggcccaaagtttgcgaccatttaaaacctagcacaatatcaaaaccagccaaaggaataacataaaggtcagcttgaaaatcatgggcagcaatagaaaacaatacacccgaacaaatttcttcattgtaaactttctttgtattggccactgacacacttgcccctgtctgaggttggattggcaatccagttcgtttggctgctgtagaactaatgaaattgtgtactacctaaatctaccaaactcaacaacggttgttccttcatgatggcctgcaattgcattgttttggtgccctactgacctgtgaaggcgtgcaatgaattttccggttcaccctcatgttttgatggttgttcactattacttgcgtcagctagttccaaccaaaatagcttcttgcattgatgtgtagttgtataaggttcgttgcagttataacgtaatccttttgcccttctccctgccatttcagcccttgataactttttgatgaaaggggtagatgaaggcgcagtggttgctctctggatgttgttgtctgtagaaagtatggaagtcgaatttgccaaattgttagcaaaagtgaaattgctcctagcattttgccaagaccccttcctcgctattgcttccttcatcaatatttgcttcttttcaaatgcttgagccagattcattgcatgtaacaaatctgggggattatggagctcaacatccagcctaatagggttcgacagctcctctgtgaacaagcagacgtgctggtctgtgtagacatatttgcttgctcttgctaatcgttcttggagctggcgttattcttcgatgcttgtttgtttcaagttgaccatctcacccagtggattactacacacaggaggtccgaaccggagaatgcaatactctttaaattccacccaatcaactaagggcctttcttgttccaattggtggtaccataattgcgcctctcctaacatatgggacgctgccaatcccaccttatctgcctcacttatgtgttgattggagaacttagccaaaccattggtcctctaagccatcagaattcggaaaatcgagtttagtataccggggaaccacctcacttggtggtgctcctcccccagatggctgaggagctgtcgggtttgtggttgtccaagtatattgctgctgctagcagttctagcagaatctcttcggtataatgggataatgcagcaaatctttcttgtaattgaagagataactgatgcagttggctgcccagcggtgtctccacctctgtaatcctagcctcatttgctgctcgttcttgttggaggagggatccaatgtcggtattctaactagaatcacccatcatgtctggctctgataccaaattgttaagactgcaagataaggatagtgtcacagggcaaaaatcctgcaaggcatttcctttgttcttattcatgcgcctttttgttggaatcactcaagctcgttagaagggagcttgataccttagaacttgtttgaaagagagtttctgatctctgaagttcggtaaaattctgcttgtcttatttttatcttttacgtcctttaaataggacttgcttattatatagaagtaggaaagttacttaggaaagctataatttagttttataaaaaattcctaatcaaaagttcttctaatctaggaaacctctataatttactcttataaaaacttcctaattataagttcttctaatctaggaaacctaataggattctaatatcctagatatcaattaccatccttggcaccctttgactcgtgaatatttgcattctacaaaggcatccgtaacaagccatctcatgttaattggtaaaagtggacaaatgtctgttcaatttatttctggttttgtactttcttgtatatgaatatcttgcaggttctattctcactgtttatcggaaaagctgaaaagaatcaactggatagagttgttagatgaagttaattgatctagaactactacctgttgactctcccattctcaattccacctaacatttccaaacaaacaaatccataatcttacctttctttgcagatccttatgtgattctgtgcttgtcaggtttcatttcttttctgcattgaattccattatcattttaatatgttgttgacacatgtacaatctcgcaacgtcctctcaagctatgaatttttatttcattaaatttttttctttatgctttcatgtctaatatgcattttaacttagttaatgtaatgactggaatctcattggtatcttttgtcctataagcggaacccagtatactatattaactcaaattaacttcattcttattattctgcaaattcaaacagaattttgttccatccattaaaatgatatactcagcttttcacaaaactggcctatttgagtatatgaggtcctttatcaaattcattcagtagtataaaatctgaagtattgaacagctatgaaaagcattaagagtcagttgtcaattccctatctcctacattttgtttttcatttaaaaagtttcaaaatttcttatggttagaattgtaaataattacctagaacaagcttttaccttcatagttgttgaaaacacttgtttaaattttggttgtgatagg

SEQ ID NO: 6548 - DNA, 1813 bp, Ricinus communis
  Intron number 1 from transcript 29844.m003210 (locus 29844 .t000056) derived from phytozome v7.0 (chr-ID 29844; pos 3 52914 to 354726 reverse strand)
agtaagttcatacatttttgctaaaactgtacattttcttttaaaaaaagaattagttctggtgatagagatggatgtgcatgtcattttaaagtttagatttttctttgtgatgttattatgtttgggtctattttactattgcattttgttgatgaatttagtagtaattgtcggtatcagttgaatactacgggttttaatgctaggtgaagatgtgagaatttaaaagtgaacggtttcttgcatttattaagcaaaataattcgatccttttcttggtaaggggatcaccaaatacaactattagagactagatttaatatcttattgcctatactcttaaaagtttttgtggtgctatcataatagtcagaacaatcatcttcctctcatcatggaaatctagattttatccgtaacattttactcatttccctcctattttatcaaagtaaattgtttataacagttttcattaattaatatattattcattatcatatttttgaaatcttattactttgaagaacatgttctaaagcttcttcaattcatgattatgcaacttgaaatcttaatattttggaggacatgttttaaatctactttgtgatccatggtctaacttgtgatctttgactactttaaaagagagagtatatcatttttttctttgtttctttacttttttcaattttaattttctcggttccccttgtcatgttttggcaatataattcgtacaatataaacattagatctgtgtgcatgttgattagtcgcttagagacatgactatcatgtttgaggcttgtttgtttggactgttattctttgttttttcatctctgccatgccacttttattttcagtctgctcttttaagtttactacacaaagaaaaatctcttgtatctactcgtcatgtatgtaaaggtaaaagctttgaacgtgcaatcaagatctcatagttgaatgtctagaaactaggaagtttattaggtataaaaatggtaattcacttgtacacatctctttatagcttatgagtatgacgttcttacaaaaccttatttcattttattgtttgaattgtttcttaaatctccctggtttgctcttttgtttttttttttttttcttttttctcttgatggcatgccatcgtaaaatgagcagagttgcatataaatattaggtttctgctatttttagtggttgtgttgtagtcttgctttacttgctgagcgtgaaagtcttacttcttgaatctgccaaaatcgccatcttttgtgctacttgttaatatatttagtctctgtagacaggcatccattttgaaaggtatccagtcttgttacttaatgatgtctgaaagaataggtgttttgagcaaactgtggtactagtatgaggctaggaccacattgtggatatcacattaaatgcttgaaatccaattctattttgttaagcttctactgtgaaattcgttcctaagctgtacttaccatgttgatacctgttcataaaacacaaccctctacgtttatacctgaaagcaatttgatatttgggcatgtggctgatattatttctgcttagcaaagcccacaagttttgatattgttaagatttaaatgtgtgtcttattatagtttaatttctttccaccaactcagaaggttgggtcatagattatgccgactaatcttgcattattcagtggctcctttaaattctaatgtccaatgttattttattgtttgtttcagtattgagatctacaagcatcccaaagaagaacgta

SEQ ID NO: 6549 - DNA, 1141 bp, Ricinus communis
  Intron number 4 from transcript 29801.m003111 (locus 29801 .t000056) derived from phytozome v7.0 (chr-ID 29801; pos 3 33680 to 334820)
gttggtaagattttaaccttcaacaattttgatatacagaatgaggatattctgctttctttatgctttgttttcattggaaattttccagtacgacaatgtctgagcgttgttatgcttgggagatacaatttctaagctgaaccttgtaaatttgagtgatcatttcctctgataatactatgatatttaaaaagtaataataataattgtagaaatgtagtagggtcgcgaacaagcccaagtaaccctgaactgtttgggtcgaaccaaactgaaccaattttcatggtttggtatgtaaatggagtggttatattttgagaaatttattaaactgatgttttggttgggtttaaggttgaactgtattctattgttagggctaccaaaattataataataataataaaacaattattttcataaatctaacctccctatctagattatgtaacaaaaaaagactctttataattcaatgggagtcttattcatctcactcacccaatattctgaaaacatgaaattaatgttaatgatcttatgagaaaataaccctaaaattttatgggttgagttggttgaaaaaagaaattaatctgaaaaatcttaactgatatttttgatttggaatatcagttggttttatttaatttgatattgagaatggttggctttgacttacaccttaaaccacccaaactcaacctgtgtacacccctagaatgtagaacttaatgttattggtgatttatattgatcatagacctgaaaaagaacatgttgttagctggatcaaatgcaactcattgggatgaggttagttgtgcctgatttatgcactatatgtaatctctcttaattgtcgtgatattttgacatgaaaggccagatacttctctgacatgattccaacaatagactgttggaaaaattggataattgttctaatctctaacttcactatttgaagcatagctagttttcggctaaaaataatcttgcaaacctaatgtttcgtttgtgctattcataatttagatttatatgccattttcttgcaaacctgatgttcactaacacatttgtgttatcaattgtaggaatcgattacttatccgttgctgcctacagtgat

SEQ ID NO: 6550 - DNA, 3059 bp, Ricinus communis
  Intron number 2 from transcript 29743.m000291 (locus 29743 .t000002) derived from phytozome v7.0 (chr-ID 29743; pos 2 3445 to 26503 reverse strand)
gccctcttttcgagtaagttttgttcttgtttttctttgtgggttaataattgagttatttttaggtggaaatatttttgagttagtttctggtaaattcatattcatgtgcttctgtgcattttgtgaaacactatcctattatgctaagttctgctatcaaaatagtattctcctacagtggaatagaaagacatgcctagagtactaactttatgaagcacccttgttggtttaaatatacattcatgtcaaacatgaaagtacttatttcttttattattaaaagttaattttatcagaataatggtttttgtaaaagttccttgcacctgtagtatgatctctaaagtcaaacattataacccagtagcaaatagtttttaaaagtgcatgttttattttagtagaatttccttgtaaaatatctaatcttttagataaatgttttaatggatttctttatggttttaagtttgatattctcaagttattgagactagttgaaagaatgatcaagtttaaacaacattggttttttactttgttcagatttaacaaataatcctagcctgagtataattttaaactcatatacggatgaaccgagcttgatagtaccaaagtgttaattctattaaatctatttgatttgtaatttaaataataaaaggtttgaagaatctcaatatcatatgtttagttttggacctttagccttttccattaaattttttctttttcttcttattattactatcatatcattgtcagtaattatctccattatcccaagttaaagctttcatcaataattgggaggtttgcataatggttagagtgttatgtggcccttcctttcctattgaatcgtcttaaattatttagagtatgctagaagatgaaattagaaaatctagaactatcttgctattagacctgcatgctgatagacagtttcttgcatgtggtttatatggtgcatttcgttcgtatggtcaagcgaagaaaataatagttttctgcttcaattgctctgcaaaaattaggatgcccttgtacataatttagatgctgttggcctttgtatttggtatagggctttaaatatcactatcgtgaaccatattggtatggctgcagaaaatgttgtctcaatgaaattctgtccttgctttgagaccaaaatttcagattgacagccatttgttagaaccacataatggttgcctcaaaccaaactgacatataatcttcttccatgtaaggaaataattgatacatagaagtaggatttcagaaaatcaagttttaaggctcaatcttaatcataaactaaaatttatgatccagaatttgtttcagataatttgggacaccattgaggttatgggccttggaatctttacgagtcttgcaaaaatgtttgatttttttaagtttccgctggttcagtgtcttagaacttaaagattcatggtattttgtagtttttgctttgctaaaacaggcttgatgaatatccttacagtctatttgtgagtccttatatgtttgagtcgtattttaagtccttatatgtttaggaaaacaataatccttttagtaagggagcctaaaaatatcatgtacttttgagtctaataatacccattattgaaatgttacgatttagttttttgtgccaatacagcttctttggattgtatgatgcaattcaaccataggtgcgatggttaagtggcattcaatgtgatgtctaaggattctaaaagtgaagcttagaacttttatttctgtttacttttggtacaaccataactaaaatactgctaataattgtggattttagtgaacctaaaactgttttgtccctcttgaaattcgtacgcaaacttgtgcctgcttttggatggaatatttttgaaatgagagatatgaattaataatgaatgaactcttttgatggatttcaaaatcctacagaaagctgtaattgcaatcacttcaaatgagttctcattctttcatgattttaattttcattcatggatctatctaataaacaatgggatgactttcacgtattttgaagacaatgccaaatctccatttgaaaattttccctgtagatgtttataaacaactattttccttgtatataattccaacatagttactaatcctgtaagctatattggggtgtctatgaatattggtttggtattctacaagccaaaagttacaaattaatatgctttatcagttgttactactgatcttaaagtggatttagtttagagttactttttgcatttttcgcaaaagagtccaagataataactttactggttgagcatatgaagtagggctaaattaggatttcgaaaccttgttgatagcctcagcctccaacctctatcgctctgggttaactgcattgtaaaggcaacatcataatttgaacccaacataataattaacactaatttgtgtctcctatgtcggaagtaggtctcaatgggtctcttgagataaatggtaagaataacacttcctagtgtctcagtgggtctcttgagataaatggtaagaataacacttcctagttcaacttttttccacctaaagtgataaactaagatccatttaggagagagaaacgttgttaactacttttcgttattaattttttcttttccaatcataaaagcttacccagaataaaaaagaaggaaaaaagaaaagtaaacaagagtcaacagaaaggcttaattgcacacttttctagattcaggtacttaattgttgatattagaagcttagagactacagtttaagaactctaaagtgaagggccaaaaatctgcttaattcacacttcaagaaactaagttttaaagttggtgttaaattatcattcaccgggtgatgctcttaaggtattccagtgtgcttcaaattaaaagcttctcttactatttctctgtgaaactgttaaacataaaatatcattaatttattgatttctgagaaattgttcatttacagggaacttg

SEQ ID NO: 6551 - DNA, 6664 bp, Ricinus communis
  Intron number 2 from transcript 29839.m000430 (locus 29839 .t000004) derived from phytozome v7.0 (chr-ID 29839; pos 8 5881 to 92544 reverse strand)
gacccgattctaggggattaacatttgcatcataggttagtgttttaaatttctttgtcctctaattaattgttagcattttttattagaattaaaggattttttggaaaaatttacaattaaagaataagaataaaatcagcagtttaaagattagtgaaaaattagaattgtcaattttttatactctaaaggaaaataaacaaataaatctagggttgttgcttagatctcgtcagtgggtcatttacttatttgcaagaaagaaatgggccaaaaatcaagaagaaaagagggagtttgacaattgagttcataacctaaatgttagagtagtttgtttgattaatattttctttattttgactagagtagaaaaaatgtataagttagaagtatatagataaaagaaatttatgtaatatcacagctaaatataatcttataataaaaattttggaaaagaaaaaatagccaattatgttaacaaaaaaaaaaaaaagagaatgtcatgagaacaagataaacataaaagtttataaaatatgatagataaatataattttataataaaaatttggcaaagaacaaaagaacagtcaattatgtttattagaaaaaaaatttaatgaaattgccatgagagaaagaaagaaataaaaagttatgtgatatcatatgtaaatataattttgtaataaaaatttggaaaagaaaaaaatagccaattatgttaactagaaaaaaataagaaaagagatgcgaagttggatcctatacaaaaggccaaaacatagtggttatttaatgtaaaggccaaaacatagtggttatttaatgttttgaaattgttacgatgtttgtttaatattggtttgtattttgccggatatatggtgacccgagaaaaactggaggcgaaggatatatctttacttcttagaagtgctttaagctattgaaattattattttatgttttatatatttatttttactttatcgagtatttggtgatcagaggaaaataaagggtgaaggatataatatggctttttaaagaagtactacacaattaatactatatatttttatgtgatgtgcataagattagattgtttattagaaaacagactcaatttacagggcaaaaacttatgtgcatagagaaagttctgctaaatttttggagaatgattaaaatcatttattttttttataattaatacaatataaataaaaataacttgaactcaactatacactattaagcaagtgtatatagccttattagctcgtttggtgtctctcactcgatagtgagaggtcatcggatcgtccaagttggataatttgggaatgcgatatttgtatataaactgggcacatgtatagttatccatgcatatacagaaagacggcaatatttgttattgttctctggatgcattttgcaatatgtgttgattcatgtgattaactttaatggattataagtcatatgaatgggcacatatttcatatgtgcatttggggaactgtagggagatactgctaaattttctatatatttatggatatcgtgcacttgttcttggtcgtatggatgcatttctgaatgagtaggttcctacctatcaaaaaaatgaagttataaggtgttattaagcgtattaaagaaatcaattaatctacgaataagaatatgcatattaagtctatttaaaggttagttaattaattaaacaataatttttttttaaaatacaaagataaagaatgggatctgatcgtcaatggatgtatagcaggcttcataatggacttctgaaatcgggagtttattagtgatatgaaacattttattgaattcatatgtagtcaactagaatttatagataagacaaaaataaggtgtccatgtaaccatcgtaagtgctagaactgcatgtttcatgaagtggaaacagtaacgcatcatttatacatatatggttttgtttcggagtattacaattagactctttatggaaaaactgttatgggatgtaactggcaccagaatgttaatgatttttatggagaatatacataatcatccaatccataccaaacaatggtaatggatactgcaggtcctaaatttaatcccaattaaatggagaaattattgaaccccagggctcaatgcagatcaagacttgtaccctggttgtaataacattcgcagttatcgcttatagctcagttgatgaacatgaaagtaaaacaccaaatgtttgaatgaaattttaatgacatggtacgattgatcaaagagactactcctgttgatagttgtgtgcttgaaaatttctacaattttaagaaattagtgcagagtatgagactaccagtagaaaagattgattgttatccctactatatgttatattagggtgaagatagtgatttgaatagctacaagttttgtgatcatccttgatgtaggaggcaacatcgagttagttatcaacgtaaaacattacagccttataaaaagatgtactactttcccctatctcatcgactgtaacaattgtatgcattaaatgcaacaactagggaaatgctatagcacgctgagtaatgaggttgaagattgtgttatgcagcattgctcagattctcctgcttggatgcatctcgatcagacacatctagattttgctgttgaaattcgaaatgttaggctaggtctttgcactgatgggtttcaaccattcaggcaatcatgacaataatattcttcatggcccattattatgatggcgtacaattttccaccttggatgtatataaaggatgcctatttatttttaatggttttagtacttcagccaagaaactccaaggataaacttgatatttacttgtagccactaattgcaaaacttaaataattatggtatgaaggtgtgtagacatatgatatttcaaggaaataaaatttccagatgagacttgtgcttatatggacaattagtgatttccctatatattcgatgttgtttggttggagtattgctggaaggttagcttgcccctattgcatggagcgatctgatgcttttacacttactcagagtaaaaagcaatcatggtttaataaccatcataagttcttaccaccaaatcatccatttcaaaggaacaaaatgtcgtttattaagaataaaatagttaataaagttccaccactagttagatcgagagttgagatattacataatattgagcagttgggcttaagaaggttactaaagttgatgctgatgatattaatctatcgatctgtaatagctgcagttggaggaaaaaatgcatcttctcggatataccttattggagtactaacctaattcaaaacaacttagatgtgatgcatattgaaaaaaatatatttgataatgtgtttaacactatcatgaatgtggatggtaaaatgaaagacacatccaaatctagaaagaggttgcatcgatattgtcgtcgacctgagttggaacgtagttctgtaatgagaaagtaacttaaagcttgttatacactatagaagcatgcgaaaaaagtattatgtgaatggataaaaagtctcaaatttcctaatggattgtgtcaaatatggctagatgtgtggacatgaagaaacttaagctcttcggggtaaaaagccacgattatcatgttttcacgcaacgattgattccaattgcattctgtgaactatttcctaaaaatgtgtggaaggcacttacaaaattgagcctcttctttaaggatctaatagctacaataataaccaatgagaacatgatatagattgaagtaaagattcctattattctttgtaagttagagcatatttttcctccaagctttttttactttatggaacatcttccgatccacttggcttatgaagcaagaatagtcaatcctatgcaataccagtggatgtatccgtttgagacgtaaagaattaaagttacattgggctaaagaattgtataatgtataatctgcattatatatttattatgttccgatgttataggtacattaggagattgaaaaataatataaaaaaggttcaattgcaaaagaattctcgacctttggcgtttttctcaatttaatcacatgtttttaattataacaatgtcatgcgcgaccttattaattttatcaaatcgatacataaatgaaatttccggtgaagtttattccacgtggctgctggcgctctggtaacttaaacacatagaaacggtgcgttttaaagtaaaagcagaaatgatgcgttttggagataagaaacagtcagcttttcacatcttaaacaggaaaaaaaagaatgaaacgatggcgtatatggtataagaaaaccctaaatccctaaaattgaaatagctgttacttctcaccgtttgtgattactgaaaccatttaaagaatagagtgaaagtaaaagagagtgaaagtgaagccactttgaagaatcaaacacgttgtggtcccttcaaccaacaaatacactgaagccaaccatcgttgactccattaccatcttcactttcattacctcttccaatgcgtcctttcagccttcaaatgattcatcacctctttcatataaggaaggcattcatatgtcagggtgaagccatcgaactactgatccagctcgcaattgaagcattacaagatcagaagttccaaatgaaacttccaatcaacctaatacaacaccattacctcttccatgcgtgaccttcaaactagcagacaaatgtcaatttgagggcatatgaaccatgagaataagaacaactagggttacagattgcatatgaatttgggaattagggatttggggcatatgaagcacaatgcatttggtaacaaggatcttcaatttaagatgtcaaaaacgcactgtttctcatctccaaaatgcaccatttatgcttttgctttaaaacgcatcgtttctacgtgtttaagttaccagagcgccggcatctacgtggaataaacttcaccggaaattttatttatgtatcgatttgacaaaattaataagatagaaggtagaaggatcaatatgtaatgcatgtaagtatgaggcagaaggatcaatatgtaatgcatatttggtcgaagaagcatcattgttttgttcgcactactctgaggatcatgtaagtatgaggcatcagaaactgccatgtagtgatgagggttgttcaacagtgggagaaaaacatgaaggtaatctttcaatatttaattatctcggtcaagcagttggaaagggaacatcaaaatttataacgaaggaagaatataatgctccttaatgctacattttactcaattgctcaaaatttgaatcgtttattaagtaagtattcatatttcatattttaatttcataaaaaaaattgaataattaattttttttatcttgtagaatttttgtttacgatttaaagcaatagcaaccaaacattgaaagatatgaggttgatgttaaacttgaacatgaattttcatattggtttgataactacatgagtatttgtgtttgaattaaattgttaatttgaattttctcttcaattagcaccttttgttcaattgccaataattcctttaggcacataatccattaaacaatatttcaaaccaattcataaagtatctagctaaaggtctactgcaaactgtcatttcatacacagtatattatgtgaatgggtacaaattccatactgaatgacatggttctaacagagctaccatgaactgtggtatgtgcataaaaggatctaattatagtagcaatgtgagtgactattatgggcaattgattgaagttatacagttagagtatcctacattatctattaagagaaccatactacttaagtgtgaatggtttgattcgagttgaaactggggactaaagtttattctcaaaataagcttatagaggtcaaacataagcacatatttaataagtatgagccatttattttagttgcttaagcttgtcaagtgtatttttgtccttactctagcctaaggcgtgacaaaagcgaatagtgggttgtttgcaaaattaaactaaggactatactcaaaattatagaattatctgaaacaacacaactatctcgagtcgtaccgtccttccaagaagatgacattgagactcattctattataatttaagacattacaaactttttctctttgaatgatccacaaggtgaatacttagaaattgatgatgacattgttgaaaaagaagaagaggaaaaggaaaagttagaatcagatgatgagaatgaagaaacagaagagaatgatggtttgtactatggattgatagtgattaaagataatgtcttagacgaggttgaacatactcatttatgcgaatatgtattaatttattattttgaatttcaatctttagaaagattttgttggaaagtgattatctataattgattttttttttttgccaatttttgtttgtatatttacctcatatggtttgattgtagttaatatgaagggtcgagataggtctacaccgtcaggccgtgggacgg

SEQ ID NO: 6552 - DNA, 738 bp, Ricinus communis
  Intron number 1 from transcript 30170.m014089 (locus 30170 .t000501) derived from phytozome v7.0 (chr-ID 30170; pos 2 789338 to 2790075)
ttcttaataacaatacggtgcgtatttgccttttctgttgcatatccttttgccgctctatttatttatttatgtattctacaaacaagtagttcataaaccctagttttatgtatattagaaatctggagttatcaatgtttttcagatttcattatgattattttaatgtattattagtattgtgtaatttatgaatctcattctcgtatacatgattatttagactgtcattttcgtttatagaattgctaggtcgagtgagtactaatgcggttgttgaataatagcatgtaaccgaattagagatgcgttatattagtaattatctatgttatactcacttgatgcctttgttggctgggaattgattagtgtgttggttggatctcttgagtgcttaatgatggaagtgctattaactatccgtacaatttgtattctgggaatgtgattaatttcatatattgctatgatatgatattaatatgaatgtgcaaggacatgcctaatttgcccatcctagttttcaaactttaaatcacctttagagaaggagaactagtgttaatacttgcttcactattttgtttgatagtgacaataattataataatgtgattttaattcaagtaggaactatcaaatgtattatatatatatatattatgttttgccaagcttttgattacaaaactctgaatgaatgtacttttttcttttttctttttcaggaag

SEQ ID NO: 6553 - DNA, 1640 bp, Ricinus communis
  Intron number 2 from transcript 29216.m000259 (locus 29216 .t000011) derived from phytozome v7.0 (chr-ID 29216; pos 9 8510 to 100149 reverse strand)
gaacacctctgcgtgatatcactgctattgttagggtaaaatcgatttttttccttgtacaactgttctgatatacttaaaattaaagtcttctttggtactcctttttatatatgtctttatcttgattatgtctatagcataatttggtgaagtgtttgttttgagtttagataaattatttgttttttattttattttaaatatactttaggttgttaaaattaattatctctattgtggggtttaagattgttgatgaacttcagtttctgatgttgtttatcgcatgaactcatccttagattagtgattttcaattgaccttttcttgttttgaaattggaattcacttattttcattttttaaatgcttctttcgtgattgatttgccttcttgattggctgtttttctttattttagagtttaaaattgtcgattaacttattgcatgcactgatatagaaactcatttgatgatatctattaaagactgagttgtttgtgtagaaatttaattaatccattgtggttttgcttcttaaccctgttttagtctaattatgaactaatgaaaatttgtgaatcaggtatgcttttattggtgcgagtatttggtcttggaaattgtattctgatttgacagaaactcgattggaaaagtgtaattttgattagctttgttgtttgataaattctataattgacaaatctttgtaaaaactgtgtttaatttccattcccatctgtaatattccaaaataaaaacttttaagcagaattatttttttgattcacgagcagcaaaagtagatcaaacttttatatacttccttgttgcttgtatatgcttgtttgaattgttgcaagatattcttctgaatataacttttataccgtaaatcaagtctaatattttggtattctagaaatttgatgtattcatggcaatatgttgaccaccttttacctcatcttgtagttctgttctgagagtgtcattaaattgccatttggctttcctttgatgcgtatccctctgttttattttcttataccatcttcaagattttgcttctctcaaccttttttcttttttctttttcctgctattttagaaaacgcttgatcttttgttcatttttgtagtattgggaccattgttttagatatgtccattagcttgatgcagtaactcggttgaaaacttagtttgcaaccgaaaccatgagctgattctgttctgctaatttctcttaatcttattaagcacatgtcgaactggtccagtggtctgcatgtgtctctgagttcaagctatataggtggtgtgtttgctttgcttgaaatttcaagtcaggggctcaacttataatgaacaccaactgtctgtcaataacttggttcacgacgcctgcttgatacctttgctttggctgattttccaagttctcgactttgagagaattttttatttagcgtcttgtttcagtaggtgcaaaactggaattttccagattgtgtttttatgaaactgaatctttaagggggcaactctactcctttaactagtaattttactgtggagtaacttgttgaccaggcaattgaaaggagaagagaacttttgggagaagg

SEQ ID NO: 6554 - DNA, 1154 bp, Ricinus communis
  Intron number 1 from transcript 29964.m000157 (locus 29964 .t000008) derived from phytozome v7.0 (chr-ID 29964; pos 1 05369 to 106522 reverse strand)
atatcctattaccgtagtgaaggtgtgagtagcaatttaaatatttttaaaaaataataatttaaatatttttaaaaaataataatttaaataaaaaaattatagacatataaaatctaaaataaaagttacaagctagtaactataaagaaatttttttaatgaaattcaaattaattatgttaaaaactagattttaatttatccagtctaattatatatttttaaatttaaaatagtagaatcgaatagaataaacatgtaaaaatatcaaatttattgccatccatgaatgagattttaattttttctttttataaaaggtataatagacagtaagacacgtaagaataaagaaaaatttcagtaaattatattgtggtttaacgtatttttattttaggatttattatttattttttattattttaagactctataataatgaccaaattgtactataccattagcaagtgttgacgtgataactgaaaaaataatgactattgcatgccacgttagaatcttttaacaatgttacgcaacttgaccgctatttactaacggttatactcacagagtaagaaagtaataaaaaataaactacatatcctaaaataaaaatatgttaaactacaagatagtttaacgaaactttctctgaaagtaattatctatttatatttattataaaaataaaaattatataataaaaaaacttagaattaaatatcttttcttgaaacaataaagttttcaaagaaaattgaaattaaaactttttcttaaaataatacacttctcacctaaattagaatttaagacatcactaatttcactgaagctagtatttaaatttaagatttcactgttttaactcgagttagaatttgagtttaagacttcactaaatgatgcttacctgattaatttttttgcttaaatgaatggagtggaagataaaataaaaaagaagaaattaaagaaaaagaggtaggtagttacaagtaacggccaatcttgggcgtaaaacccaacacagtaaccgtaggatctcacgaaaaagaaaatactgcaataaacaattatcttttttttttttttaaataaaaataccagcatacaaaaacaactatttaccaccttcttcaact

SEQ ID NO: 6555 - DNA, 1189 bp, Ricinus communis
  Intron number 3 from transcript 29641.m000385 (locus 29641 .t000010) derived from phytozome v7.0 (chr-ID 29641; pos 5 2984 to 54172 reverse strand)
ttacgtctcttacgaattgcgccacgtggatttgagttagtatccattgaatccacaacttttttgcgacattagttgtgttaatattttttaggtttgggtgataagttctatcatttttttgcacatgtcactttttaagtttctttttgcgtcctttttttttttctttctcattagaaaatttattataatcttgtgttatttatacaaaattcatggtatctaagaatacagcaaatttgatccttgtaatgggtgtacaagtattgtcaagttggtcctagcaagttgggttgttgcttatttctgattagattttcaagtgtttaaaattgttgcttatttctgataagattttatttgatggacacggtgtttaaaattgttagcagctctatgtatgtgttgtgaacataactataagatctttatactggctctaaaattttgcagaaaaaaaggctaaaggagctgagtgttccatttaatccaaatactttaatatggctaaattagaccatgacttctatgttatgttcaatttattttcatgtctaatacaggtttacaatttctatatattatatattaaagaatattgaaattctaaatgtttcagaattaagaaaagaaatctcttgtgccctgcagaaaatgctgtggtctatatcaaatgttaaagtgcataaatattgtcactgaaaattttgtggtctattttactttagggaataacataatcagaaatgttaaagtttacctacaataactcggggccaaatcatttttatgtctctgaatttgtattgattagtcagtttaacaatgtaacttttaatttaacctaacagacacttgaattttacttttttaaatatctaaacacctttaactttcaatttaacgtaacttacacctgaactttattttttagtaatactcaaacacttttgtgcaatatatatggatgtattgaatgaagacacttgtcaaagagtgttaaaatatcataaaaggcaagttcaggtgtctgttaggttaaattgaatgttagagtgttaaactaactaaatgactaaggtttaggggcataaatatgtatttggccataactcggtttcatccaactgtttgttttgcttttctatcattgaggctgcaatgttaaattgttttcaaatacagg

SEQ ID NO: 6556 - DNA, 2335 bp, Ricinus communis
  Intron number 3 from transcript 28169.m000028 (locus 28169 .t000002) derived from phytozome v7.0 (chr-ID 28169; pos 1 2110 to 14444 reverse strand)
ggaaggtaatacttacaaaatttcctttttcctctttttcttgtataatattatttattctagatgtgtacactgtaaatgataggggagtaaacattttatactacacggagtttatttaataataactagtttttttactcacacgctatgtatgtaaatattaatatttagactcgttattattagtttattatatatattattttttatgtaatttttgtatatgcattaatttaaaaatcaaataaaattctacttaaattcattattgtaaaatattttagagcagttttaactaataataaatattaaataaaaagataaaataatcaataaagaaaatgttattttatattcatcaattaagttaataattttaagaataaaataaaaatatatgataaaaacacaaagaaaaatactttgcacagtatattatctttttcaataaatagtactgtctattttcaaatcaagcactcaagttattttgaatagttattttattattttaaacatctcttattttattttattttaaattttaaataattaattaaaaaatatggcatatgatatagtccaaataaaaatttatttttcaagtatttattttaaagtttcttgaatagtcacatcctatatcttaaggatacatccaattgtctcatccgatactgtatagactgagttgatatttaattgctcaaataaagtgaaattcaatctaatgataaaattctgatataaatattatcaaatattaaaataatatctaaaatataacatattttttattttgatttgtttattagttaattcagtataaagttataattttattaaaagtttttcatatagaattacatattttatatagaatttttatttcttcaaacatgttattatatatttgtttggtattatatgtttgtttggtgagtgtagaaataattatatacttataatataacctagatttccataaaaatgctaaggattattttctatataaatttatctgttcttcttttttattttaattttctattagaaaatctattctaccatgaaaagaagtcaatagaaatgcatgctttaattattatagttcacatctttgtacctttttaatcaaatttaatgatttattatgtccaaagttagatttgtaatttaatgtattgttaatatttttactaatactatttttttttgtagatttctctattttctcattaaaaatcatattctaccaaaagaaaaaaaattaataacaagaatatcatctttaattgtttattacttttttatttaataaagattttattctataattaatattgaaaatcctaatagagttgaattttagagttatacttgatgaattattaacattagctattaataaattcaattaataagtgactaaattatcagattatacaatcaatatgactttttagtaaatttacatgttcctcatttttgcacttttatatatactcattcccataataaaaaataaaaaattattaagtttagaatcatacacacttttaatgttatataatggtatagtttttgactatattagttcatctcaatattataacaaatattaaatttacaatcaattttttttaatataaaagagaaattataaaatttgtaaattaaaaaattcaattattgagcacaatacaataatattagttttagatgaaaaatttatatatttgacattatctttaatactttaggcataaattttatagaaatattattaaaaaaaaacactttttattggttgtttgcatattaaaaataattataataaaatctcttgtgtttttggaaacaataaaaaaagttaaaattcatattttattttgatcgtacatttagtcagtaaataattcatgcttttatatgaaatttttaatttttctacaactataaaaatttaagttaaattttaactctaactattgtaagtgagtatatattatatattatataaaattttataatataaattattattcaatatattttaaggaatttaataattatttgtccaaacttgcctaataataataataataataataatgattatagttacgatagtaatgatgatgataaagtggttactattataagtttttgccatgtatacaaaacttataatttttatgttagttttttccttttttcgtaagcagaaatttttttaatttcctatttaagatagaagctaatctttagttggttgacgtgattctatgtggaagcttctttttgtatatatcaaaagggaccataaaca

SEQ ID NO: 6557 - DNA, 3447 bp, Ricinus communis
  Intron number 1 from transcript 29703.m001500 (locus 29703 .t000036) derived from phytozome v7.0 (chr-ID 29703; pos 1 38436 to 141882)
caaaatttctcaattcttttttcttcccctttcaggtaaagcttgtgtcttttgtgtctctctctcttcttgtttaaggaaacggttgtaggattaggactcattttgatgtataattcgctttcacttttgattcgattttgaaattcttgaatacccattatttcttttgctaaattcgaactggattttgccttttaagttaagaaactgctctttccttgtttttcttttcttttctttttttgtgccacgctgtgtgtattcttttccttttggtttctgggtctgaatttgggtgttctgattttcaatttggagtgtttgtcttctaattgcattctaattgaataaattgttagactgatttcccacagcctttactttttgttttatcttttgtttattgtttcgaaatgcgtttttatgttaatggaaaagtccagagtttgacatcgatttgcatgtgttaaacgctgtacttttattggcgattgagatttcgccttttcctgtcaattttatgagtttatgtgcatgtgagaaattagatttctggttttgcatactggcttttctccttaaatgaaattgaagtgttgaatgcttaagatatttttatttgtcaaaattgtgtgtagaatcttcatgatcaatcaattctgtgtatttgtgaatggatctgcttaagaattcattgcaaataccatctctgatatctcagtcttttggactctgctgttttgcatagtcagtatacatagaatcattggtaaaatataagaggctttatatgatttatgcatcagttttacaaatacctacatatgtctgcatctttgtcattaatttgctgttttctgctgttgaatgacctatatttggtttaggaagcccaagctttgagcatgatgatacttgcaattctggttgcctgggattcatccaatcccatgtacaatgaaggtgtttaaacactgtagaagtttggaagtaaatattaattggattgaagctctcttgtgtacttcaatggaggttagaagattgtttgagaagtggttgtctcaatgtaacactgaatttaaatccaaatctcttgagcacttctgagagtataatatagttcctaatgctcatttaatcatttagttaggtttagtgttgctgcttttgctgttcttcctttgtatcattcatttgttcatttctgtagtgtggttcatcttctccctctatcccaccacataaatgatactctatttcttttttcttgcaatggcaacccaattttgtggatgtgtttaaagaaaagctgatgattattatgtgaattggagatcatggcagagttaagcttcctagaaattttggatgactgaacagttgggaatattggagcatgatgcttgtatttgataagcattatgcacatttgtttctaaatcttattttcttatttgttctgaatggaagttcataatttgggatgtgaattgattcgttcattttttcatcaagacgcctcccaatttgtacttgaattccttttatatctgctcgttcagttaattgaatagctgtttttgttgctgatttgattaagttgtgtataatcagaaaagcctactttcttttcacccaaaaaatctcaactaaagaatttcttttgataaagtagttctaaaatattattagtttctggttccttttagtaattcattactagctattgtatgttatgttttatggatactattgacacataatattcttgccattccaatgtcttgaatagagcactattcatcctatttaaatgcagttgtttggaaaacttacttttttgacagtgttataaagttcagtttttatggtgaaaaaaatcataacgagttaacgatgtgttcatacaaacatttctaattacttagaagtcaaattaacagaagaatactcattgagcggaattgtatttatggttcttgagatttattttgattttcagtaattaaagatgcaagcatataggtgtatgtttgcaggatttaaaatatagatgatagatttgaggttgttacaattgttttccttacttcagcagatttctaatatttccatgaaataccatagtcggtgtgctagatgctattttacttgcaaaactacaggagcacaaatgcttgttagtatcatgaatttcacaagttacaaatatacttaatagtttctaagaattgaatggctatataaggttctagacaagaagttcacctgctcgaagttcttatcccaagacaagtatagttccaagaagataaaatgctctcactgtatttcttctgtttgttagttaaggatgaccattgtggaatattggttatttgctatttaaaattgttctttcaaatgttttttaaattctatctaaacacgaatgcaatactctcattttatagatattcatctgccctttgaagattctactacgtaatctgctggttgacttgtaattttctcttgctataatgttaacatatgcatcatcaatccatcaaagaggtgactgttttatgcttgcggttttattgctgcattgaaaatatgaaatgtgtattgcttatcccatgaaacctagttatcagatgatattcctggcactttaaagggtctcatcttattaaacaaagttggagttcataacacccccttgaaatatacacatttggttgcatatcttgtaggattttgataatttttcatggttttattgggcggttataggattaaaattcagtttccaaatagattctacactgtgaaggcaaatagaaatcctagggtaccttcaacagagaaatgtttgctcaagatgatgcaggatcaaagatgaacttatttttactgctgcatatgcttacagggaattgtgaggattaaaagattatgacataatttattttatcagtttgagctttcgaatgatataaaaagacattgttagagatttccattatttattatcatgcatgtgttgccatgctgttttcatttccctttctggtttggttgttctaacttttttaaaagttgcacctagagttttattcggtcagatttgttagatctatgacttaataataggtgagttttattaaagttggaataaatgagatgataatatcctctagtcctttttgtaactatgtcaaggatgaccattgtggaattttggttatttgctatttaaaattgttgtctttcaaatgtttttaaaatgctatctaaacacaaatgcagtaatctcatttttgtagatattcatgtgtatctctatgagtacactaattttgaaattgctcagctatgacttggtttttgcttaaccgtcttgctcattctactgtaccagatagtctacctatctcaccagtctaccaactagtt

SEQ ID NO: 6558 - DNA, 4327 bp, Ricinus communis
  Intron number 7 from transcript 29724.m000826 (locus 29724 .t000006) derived from phytozome v7.0 (chr-ID 29724; pos 4 9006 to 53332 reverse strand)
agtggttttggctttgatccatcaaaggtatggatttaagtgcttctatattgatcattttggacttcaaatgcattgattgtttcaagttataactgttcattgtgctgttttcctctttgagtatttttttcataatgctttgcctgcttcaattttttctgtcaacaaatattttatcaccctaggcgtattgattatagctattgtttcataggattagctattgactggggtttcttgtgaaccacttccttatctgctctcaattagaactgattccttcttcagtcaaaccttggttgtgttgattaatgataaaactagctacatggtatgccagaactgtatttctccatgggcagtgttagatacctttgctttagctaaaatggtgtgcttagagaagttttgggcaggcaactcacgcctggctaaaagcataggtgtcaggtataaaaggcatcaaagccccgggacgtatctggggcctaggtgtaaataaagtatagttgcacatttagaagaatgtttataacatgcttttattacgttttagtaacattccaaaatcataataacacatgaatattataaagaagcaaaactacttaaactaggtggattttggtcatatgtataagttaactacatgctagataagttctacaaaggccatgtgcgagcaagaatgcaaacgaatagcaactaccactaagcatatatcacaaaacatatttctaagtgctgtttttgttcaaactctccctctttctgtcttcctctcttcattcactcccctttaaatttagccccttccttatctataatatctagcaaaatagtcctaccctataattacgtggtttttgattctgctccagacacttgaattcttttgaagggaaagtggcaattccagtttgcgattggaaaaccaggtgcttatttatcagcatagagggtaccatccgaaggctaacataaatcattaagctatacaataaaacatctaacattgcatgttaaatcaactaataaatattcctcctttttctttagtctctaaccatgcgcctaaggcatgtgcctcggtgcatagaggcacattggagggatggagtccctcctagcgccctagaggtgcttgccctcatgctctgagtgagcatggtctccggtaactgatatgctaatggtgccaagatcaacaaagcttttaatgagtttgaggatgaactgatagcgtgtacgtatagtctgttatgagcatgaattcgtgttggcctattgagatcctggtgcggatactttgactatggccctccttttgtcaagtaccctttctggaccatgggcagcattttatgatgtatcccctaacaggaggtttgttttgcacccaattagcttttctatttacttttggagttcttgcaggtaaaccaattaaagtagaatggtctgtaaaaaaaacaaggtctattgttatgttacaggtatgaacggaattcaaaagtttattaatgctatgtatattataaggatttgtataaagatctacttctcaacttggttgtaaaatttgcaagtcaactttatttttacgagttcaagacccctaaaaaacaaattgtttttatgaaatcaggtgatcatgggaatcaccataaaactgtgattaagaatcgttaaaattgtttaaaaaatgatatttaagatagtttgattatattttcctattttgaagtttattttttatctgtatccttattttcttatcctttaagatgggctctagaagctaaaaagagagcaaaaatatatgctgaaacatttaacttaaccagtaggttggagatgttaagacaattaaaaaaaaaaaaaagaaaactatagatagtctttgagaattgaacttggtcttacaattcaatgctaacttgatctcagtctctcctctgattaaaacactggtggagtattgacagcttaactgctgtgtgtgagcttcttatctatcaaatcattggcaagattttgtggtgatcgtgtttgagtggaacaagatattgcagacaggattctttctctttaatcctatttggccatttgtctttctgaatattttgaagcttatttttgaaagttaaatagttgaactttttcatgtttctaacccatttaaattctttattaaagcctgcatctgtttgtggacactttgattctttatgttctatatccttgctgtcctgtagacatatattgagcacaagatagagaaagatatcacattggtttgctgtaaattttgaaaatgcttttttgatttaaactaaatttaccatatagttgaaagagactatcagccttttaatggtccctttttgaactcataattctcttagggaatagctggctggcgttgaattgcaactggggtgattaattctaagttctgcagtttggttgcatgcttgaaaaaagacagaagtttctttgttacaattctaaggaattggaatataactatactgggccattcacattttggaaggtgcagacttttttgagtctttacacttctttgctcctgcatgctactattgttgttttcaatgttggaaagcattattgacaaccaatgttagaggcatatcatcagcagctccttcgtccctcttctcccttttaccctcctctcaaagtttttcatctttataggttttggttaaatctctctcttatttgtgttttctcgcccatttgtttccttttcttggctttttctctggacatgatttacatgttgacgttttggtccaactaatagctttgtttttgggcaacatacatgttgatttttcatggcgtagcatacagataaatatattttatgatgcctgcatgggcaggctgcttgattattagtgtagtatatatatatatctataaaaataactcagattttatatattgagatatgcaattttgcagagttcacaaaatttagtgttaaatttattttaagtccttgctcaattttcactggagcaagtccagcctggattcttgatcatgtcagaatctttaggcctagtcccatcaggcctaaactttgagccaggcagccccatgccatctttacctgtgtaaagactattgtgttctgagaatcttaagggcattgaaaaaaggagatgacatcataggagtcccaaaaggtcctgttgattcattcatgttgtggcctgcatttgcaatggtaggctgatcggaaatttttttttttttttttttttttctttttaataagcatgagactgtatcagcagctcttggtattaatagttcaagtccatttattaaaaggttaatagtaatttagtaatcaagaagacaatgtagtagtaaatttcctaatatgatatgcacctctgcctctaatcacttgtcactgaattggttgctctcctcatatgcagatataggaacaactatgaatgtacccatccatttatctctgctagtgggtactgtatttcaacaactacatatagagtaatggctgttgagtgaaacaatagtacccacttcctagtttagttggtaatggttttgacattgatatttaattcaccaatattaataaatgaacaacctactgcattttatgaatgattggtcccaccagttcagctgtcttcctctctacctccctctctctctctctctctctctctctcccctgatgccccttctctccaaacggtattgccaccacctcctttggtaggttctccatgataccttactcattcttccatttgtcttgtggtgccagcatgctactcccatcataggtccatgttatcatgcatcatgtggggcttcctcatcatgtctgctcttatttgtttttaagctgttaaccatgttgccataaagagtatcaactttcatgaacaggatggcttacttttattctttaactttagacctgtccccgtaaataattgaatatttgatacttgtctagaatattgctgatgggacttttgaaaatactcttgcttacaattgttaacttcagatcccagtttaaatcatattgaatttcagattatattgtgaaagaaatattttagttttggattttacacatgtaagatctctttaagcatgctcagaagcataaatggctttaacctgttattagcatgatatatggttctcatatgtaaaatgccttcaaaggattttgcaacattattgacctatgttcttattgtccaatattttcagagcttgagcgctgagaaag

SEQ ID NO: 6559 - DNA, 4219 bp, Ricinus communis
  Intron number 5 from transcript 29751.m001875 (locus 29751 .t000090) derived from phytozome v7.0 (chr-ID 29751; pos 5 03054 to 507272 reverse strand)
gagggatgtctgtgaatggtttcttcccaagtcatggttaggagtggttactttcctccgagacgcggagctcggctttgggggaagctttatcttctgagttcttgaagtgctgagagccaaaggacattgcaccagctgtagccaccctttccactttctatgttagttcctctcttcctttcgatgcatgacaacatgtattggtgatgagccaagttgcgcatctacaagtttctcctgttgtatcatttacgggcgcttatatcctggtcctggaccacagtgtattgttgtccggctcaggtaccacacgtgcatcagaaacactgacccacgtttttcttataaataatttatgttcactaagtttgtatgttcactaaatatgcactaaatgtttattatttaaacgttaaatattcattaagttttattttgttgaaaatatatttgtaatataactttagctggtgttttttttttggccaaatgcatatttggatacttgaactttgaccatttaatcactttaacaccttaactttcaatttaatctaatgaacacttcaactcgtaattttcataatgtttaagcactttctgacatatagctttatttaacatgtccacgtgtattatgcataagtattttaatattatcattaaataaagttcgggtgtctgttaggttaaaataaaaactagaagtgtttaatagattataaaaataaaatttgggtgttaattaagttaaattgaaagttaaaatgttaaaataattaaataattaaattttaggtgtctaaatatgcattgtgcctgtaaggacaattcgtattatatttattatatcaattaatgaatttgatatttattaatgatgaatattcattaataaattaataaactttatgcgtatgaatgatgaatgcttatgtcatttataaaatcatttcaatattcatgaaaaatactttcataaaaaatcaatattatttcatctgaaaataaattttcatagtgatatgaggaatatatataaggttataactattgaattagtaagaataaattaatgaacatgcaaattataaatgataaacatctaaaaattgccagaataaaaaatggacatcattacaatgaattttttgtctctaaataataaagactaatgtccatcataaaaaaaagtaattcttttagttatggaattatcgaaattgtaaatttttttaaatatataaaaattaattcattcactaataatagaatttctttagcatatgaagacttcctaaacattataatatattaattttaataaataatttattttatcatttatcgaaagtacatcaatttttaattattttggaatatgactaattgaaaatttttaagaaatatattaacaattatgttaatttttaaaattttatttacttataaaatgaacctacataattatataatagctgacttaattaatttataattctttagtattattattaatttttattaattaattttactatttaaaagaaaatgcaaccgagttaacaattatgttaattttaaaattttatctacttataaaataaagttacataattatataaaaaaatctgacttaattaatatataagttttgagtataatattaatttttataattaattttattatgatttttcttaaaagataagcaatcaaatgcgacagtctccaaactactgagtatgaatggatcataaataaatcaattttaattgaatctaactattagcatgacttaaattaagttaatagattttacctttttactttataaactttgttatattatcttatttatcggatgtggaataactcatatatttttcgatataagaaaataagaattaattgttggtttcatgctagtgtactagtaggcagagaccctattcaagctgaagctccgctggacttaaccaagtgttttaattaagttaacttgtcttgatatttgtctcttttgagttgatgcatatgggttttgatttagcagtcgtcttcttgcttttcatttcatgccaggataatccctggcagtagggtgtttgcggttggtttggcttgttaggggacaaaggacactgttaggagtaaactgtgctgctcgttggtttatcaaaaaaaccatcgtcgttgagcttgtaatatcctcttacaaccttgtgagcatggtagggactcagggattgatgcaatatggtaagcttttccccttcttttttcttttttgtctgctcctgtaatgtctagaagagtccataaaatggccagtggctgctacattattaataaaatcaatatgaccagttttataatctcgttatctactagaactagtcaatataacattattttgtatttgtatttgaatattgacttcattgagcttatttctcacatccttcataatttaagagtatgaacaaactcgtatgattattctaaaaaaaattaaaatatgatagagtgtcgtatcgatataatatcttatcctatatcaatgcatgatatattaaaaatatattattctattaaaagtgtcgatattttttaactaataattttctttctcgatcgctcggtgttatcatgtattatataatttcatacacacatcgtcatttttcatgggtttcaatttaaaatggtctcaaagatttttctggaaatgcaatcaaatttgaagtgattttgtactagaaattgaagtgtaaagacaaaggtggagattttgtactaagatgagagcaagtgattttatcttctcgagaagtgacttacaacagctcaaaaaccacatcattctcttgccattttatattacatgtgcctcaattattcttgtttatatgaaatagtcttccttggttcctctgaatctggccatgacatgattggccaatcaagtgatgggattttattgagccgccaccaattgggagagtccgccgggcgaattacttaatcctgaacgacttgattaaaaaaaaaaaaaacaaagaaaagaaaaactggagctaccgacaatgaagaaacctaatgtcagcaggcaatcaaaacagtaatagaagaacttaatttttgcagccataataaacgatattcagagaaaactattcagtttgcttagttctgtccatacttctgagagagaaaagaattgaaagaaaacgataaatattgaataagatctctccatatttggatagtttgttattattttttaaaatattatagatctttaaatattaaaaaattattaaattatatttatagattttattttataatcgaaataataataacggtcgtgtaacgcatgaataaacgactagtttgtatgattttatattatcatttaaaaaaaattgcgttattttcaaaactctcatacaaattttgcaatatctttctaattctatagtatttttcatgaaacataaaaaggaacgaatgtacaaccaaccacaatattttctattgtaaaattaaaataggataaaaatgaatcgataatttttatttatatcatgcgtatacgttgcaatataaaaagatgacacatataaatgggtgttttaccttttcaatttgaataattaatatatatttaattatttaaaaataataaatatgcgtagtttatttattgagtcagtggatatataagatgtgcacccaagcatgtattttccaaaataaaaaccgggtgtatatccgaaacagacaaacaaccttgtatagtctgcagttctatcatatcacgagcatcattgtaagaatatcagcaataactacaaggcctctgaccaccgagggtcaaggaatgactgcccacaaaacttgttcaacggaaggaacttgttcttcttaaccaacaatataaatatctgttacaatttctcattgtttttcagtctttgttgtttttcttggaattgtttctggtattctttctctagcatggcaattcaaccatattagttcattgaatctgaatacatcaacctgtcaggcatggctttgcattgcattgctccaatttcggttccaatttctacagcttgcaaaccaagtaagttgggtcggttcaatatatcatgctcaagccttccaactcgaactatgcacaaggatactaggtggtctcttc

SEQ ID NO: 6560 - DNA, 445 bp, Ricinus communis
  Intron number 38 from transcript 30128.m008645 (locus 3012 8.t000106) derived from phytozome v7.0 (chr-ID 30128; pos 301717 to 302161)
atcatatatcctgaaattattcagagccttggaaggtagtggttattctctaatctctatattagtttttgctgccttttgctttgttgtcatgagtacatgatttatgatctgttatgagaagatgtggatataaactatagatgtgtttgtttatttttttgtgattctgcattaaactgggcatcatgaccattgtgcggaaatttttatagattctgtgtattgtagatgaagtcgcaagaaattttttttgtcatctcatatactagtaagtgatcatgtgaatggtttgtttggttgggttagtatacttgaaattacagagccatgacagatggatcccaggaaaaatgcagggaactgtcacccttgtgctgtaattgctagtcagatgaaactttttgcccatttagatgacaaaattgatcttatttgtaggtgt

SEQ ID NO: 6561 - DNA, 1563 bp, Ricinus communis
  Intron number 2 from transcript 28180.m000395 (locus 28180 .t000020) derived from phytozome v7.0 (chr-ID 28180; pos 1 14327 to 115889)
ggaagttcagaggaattgccataattggttttaaggtaattgtagccttttaaatttaaatcgttctcgcaataggttaattctcttaactatgctgcaaaagtaacttaaattggacagaaatctcaacatttaacaatgttattggtaaaggtttttctctctcataatctactgttgactaatgaatatgaaaatgtgcaacataaaagtcttttaattttaaataagattgggtagttgctgcagaccagaaaaattttctggccaaccaaaacctgtaccaatattacaggaattttgcttttaaagaagtgacagaaacttgtgaggtcctatgaagaatctgaattcaaaatgaggaaaaataatctctctctcacacacacggaggcttttctcaggatctacaggaactggattgaacatattccctgtctatcaatccttttgaacttgcagtttgaaggttgtttgttgccctgtatcttttaaataagccttaagataaatttctaataccgaatttctcccaacaaattatcttctttattatatcacatgagggtttttaactggcgccaactgtcttgaagaaagtgtttttagagaactatcataaggatataaaacggttttatagcatttctcaaatgcacattttcatctgtttttcccgtttgctctctatcgcattaagcattttcacctgaaaggagatgatgtgaggtgaaaaacgaaatgatttttcagcaagtggaatgctcttgcactgagcttttccactagtttcattacttttttcttctacccttctcttatataaatgaagttagaacatctttcctgtctggctattttgatggaatctttcgtttgcattccataaagtagttcataacaggaaaaaatgatcactaaaggcgtgtatcttatgatatttggaggagtagataaagagccctgggactcgagagctttagacaattggttgaatacgagcattcagatgcttatcatagagactgcatgtgggctgtcctgattttctaattctgtttctgtgcttgaaatggccattaaacaaattaagaaactggcaaggcagccagttgacctgaatgcatggtgtttttctgcttagacctcttacctttatcttatgcagaaaatatgttgatgtggctctgcatttgaattggaaattctggaggacttactccatacctgccaaaaaatattaagatctaccactgtggatcacctctgtagagttgaaaactgttattagattaatccagtgacatagagactaactcgcttcatcttctaaaccagcatcaggtttgctataagttacagtctgttaatctataatgggcatgagattgatctaataaattacatcttatattctagattttgatttttctaaaactgaaatagagcttcaaagttttaaataatttaataacttagtggttgagttcgtcagtttgtattgattctactaaaatcattcttacagactgaagctgcagctaagcgggccttggctcttga

SEQ ID NO: 6562 - DNA, 891 bp, Ricinus communis
  Intron number 3 from transcript 29794.m003428 (locus 29794 .t000127) derived from phytozome v7.0 (chr-ID 29794; pos 8 33085 to 833975 reverse strand)
cagcctccaaccaaggaggttcctcctgaggttgatatattctttgaattttatcattttgagttacaatgattgaaaagctttgtgttgatttttctttttttctattaagttcgagtttcttcagcttataatgaattaagtttgcagcttcctaggtttcactaccttttttgtaggtttagtcatggatattaacttttagttgcaatagttgtaacatcacttttaatttctaagttggccaaaagattttatttatgttatcatgtagctcttgttagcaatgtctaattttactgattactgacaattggaaaaggaaaattgtgaatcttaagattttgcatgaaatggatttgtattcccactatctcgacagtttttagctggtccctctaatttgataatatatctagtccttgaaatataataaaataaaactcttactacccttggtccctcaatttgaaaatatgattacactattatcctggaatcttaatattataaatacttgctgatctcaaattaagttttgccattagtcgtagtgcgaggattaacccattttatctaatatcaatggcttaaatgctattaatgcaaaatttcagggaccatttactaattacccattgcttctttttttttttttttttctgtttattctagtaaccttttttgctattttttaaatgttccaatccaagataagtagaattcttcttattctttttctctgtgtatctgtttttaatttttctttggggtcggtggatgattaatctatttcaatatcatgaaatgagcccaagtcatcgcctgtagttttcttatggactgatttatgcaggagttcaataaaagagtttcagaaggttttcaagt

SEQ ID NO: 6563 - DNA, 7579 bp, Ricinus communis
  Intron number 6 from transcript 29940.m000404 (locus 29940 .t000009) derived from phytozome v7.0 (chr-ID 29940; pos 3 41723 to 349301)
ttgtcccatatacggatcttcgtgcagaagctcaggtcagcctttcttatatttggctagtaattatttattatcattattttgtcttttgcacctcaatcatctacatcgagtttctactgtaagttatcatttactggatggtaaggtgattttacacgttggcaatcaaatctagatggtatgaatgttgtgttccaattagttgtattgtgaaaaactgaatgattgtgtaattactactatctttagccttataacttctagacgtttcatttgcttaatatttgacgtaactacattaaaagtcttataacttacagtgattttgcaattatgcctaacaacatttcttccctttgaagtttttgagaaataaatactctactgttaaaattttatccttttgtttaatatttgatttatttatgaaaatataaagccctaaaccaggtgaaatagtggtatcctattcatatagcctacctcaactagcttgggcttaaggtagaggtggcaaatggatgggtatgggtgggtgtgggttgaatattaagatggtgggttttaaataacccatttatccgtatatgacccatttaaagtttatatgagtacccaaacttatataacccatataaacacttacccgttcatttatccgattagtgttaatttaattatttttaattaaaaaattgttttaaattattattattattatagaccttatttattattattattacatgttatagtactcaaatttggtgaattactttaatttcatcatttttattcttatatataaatttaaccaacacaattctttttttctttatttctttgagttttgtttctacgattttattggtattactttctctctgatgaatttttttttgtagtttcttgatgtattatcaattcaatgctttgttttttttttctattattgcattaaatttatctaaaagaaacatacagaatccagaaaaagaaaagaatatatagaaaaagctagtctttttttggaattgatacaggcaggagggttataaaaaatataataaatctcttattttcacatttctcttttctatttattattgaactaaaactactaaactaatcatgccctccataaattatagcatattacttttttcattctgaaataagtgtcttttaaagaaattttaccttattttaaattaagtgttgttttaagcaactaaaggagtattaattacttttttttctaattttatctttattttgtgagagaaaatattaataaagtagaaaaaaagaaattccatgaagtaaaaaagaattttatagaaattttatgtattttaataaattgatattttgctcatataaatttctttattataattaaaacaatttcttaatccttgtaaggagacttatttagggacttaatgtcaaattgaaacttcttaagtttcatatgcattgaaatttaaattttatatatttttttaatttcatatttttataattgatcgaagctattgattttcgaatcggtttgatttttttcgatttttttcctcacccttgaatatgggataggcttttctcaaaagctactataactagaaacttttcttcaaaaattatgtaacaagagcatctccagctatggatggcaattaggcgaatattttcaggtactcgacccgaccgaatctaatgggatggatttaggtaataataaacgaatttaagaagaaatttgggatttgattttactacccacatcgagttcgggaaggagaatgaattaatgagtctcttagaagcctaatttttacatatacttcctataataatgaaagagcatgatttaatagcttgttgggatgcactaaaagaatcattgatttaaaagatgaccaataacagcttgaaattttagtaagaataaaagcaagaaaagagaaaaaagataaaaatggaaaattgaacaaaaataaaaaagacataaatttataaatgtgattacattgatgtatataaatttataaatgaatatagctttgaaaggaaattaaaaaaatatatataggctaactgaaaagaatgtaatacattaataatacaggctaaaattttaaaattaaaaaatgagtaaagagaaaaagagtataagaaaaaaatgtaatctttttgcattctttactttttagtgaacgattatgtcatatcatgtcatttttttgaaaaaataccggtttatcttttacaaatttattggtgttttaaagaaaaatgtaactttgtaaattgaaggtaaaactattactgagaccttagaaaaaggatctttttttgtaaatattctaaaaaattgattagatggtttatttatgagtatccatatccaatttagtccaactcacataaataagatcatttccttattacccttttacaacccatttagttcttatatattatccatttattaaccatacccgtataacaaggatggattaggatggataaaaaggtaagggtggaattgtcacctctagcttaaggtatgattgaattgatttgagtattgaatcgtgacttacatgaaagctttgatgatatctagcaaaaaaggagtgtaaatggagcatcttggtggttttgctgatttctacaattgtcttgatttctatatgttcaacccattacagatatcattgtctcgttatggtcattgtttataaatatgtgttgaaaaaggatttcactttcaaaatattctccagattgggatattgagaatcttgagattcgccttcattatctattgggttatgaatgtatcttaggctcatcatacaaactaggataactaaaaggtggatttatgactgaaaacttaataaactctgatattaagagtgataagaattttatatgtattcattaatgattattacatctatatatacacaagctatatctctaatataggaattcaaatcaaataatgattcctaattaaactcctaattattcttttattttgtatagctatacatttctaattaatataaaagagctataatattcctcttcaagttagagcatagatattgatcatgcccagcttgttacaaagataatcaaccctaaccccattaagggcttttgtagatatatttcaactgttcacttgttttcatatattctgtagaaacaaatccttgctgaattatttcacaaacgaaatgataatcaatttcaatacgcttagttcgttcataaaagactagattaaatgtaatatgaagtgcaacttggttgtcacactataacttattcgaaactgagatcttaagacccacttcaatgaggagctaataaatccacattatctcatacacagacttggctatggccctatattctgattttgcactcgaacgtgaaacaacgttttgcttcttgcttttctatgaaaccaaatttccttaaacaaacacacaatagcctgaagtagatctttgatctttcttccactctgcccaatcaacatctgaattacattcaattctagtatgaccatggttgctatacaagactcctcgcccaggtgctcctttcaaatagctcaaaatttgatccaattttccagtgattgatagttggagaagacatatacagcttaccatgttgacagaatagacagtatcaggacgattcatagtaagatagtttaactttccaactaatcttttaatctaaaaagtaatctagagctcctaaatcctttgtatgaaattgactttaaagaaaagattttagtgatgaaatcccattggtatcactccttatgatgataatgtcatcaacataaacaactaagaagatgatactagctacagactgcttgcagaaaacaaaatgatctgacttactttttttcatttcaaacttctcagtagcttggctaaagtttctaaaccaggcttgaggactttgttttagtccatacaaggatttacgaagatgacaaactttcccatatctccatgagtaacagagccagtggttgctctatataaccttcctcctgaaggtcaccgtgaaaaaatgcattcttaatgtctaactaatgaagaggccggttatatatgactgctagagaaatgaataacttgataaaagcaagtttagcaacagaagaaaaagtgtcagaacaatcaactctatttgtctaagtatatcccttatcaacaagtcaagcttttaatctaacaacagtcccactaggattgactatgactgttaatacccatttatatcctatagccttttaacctacaagtaagtttaccagggtccaagtaccattatcatcaaaagcgttcatctcttcaatcatagcattacgccatctaggataagataaagcttcatgaacaattttaggaatggaaacagaatcaagagaagcaaacaaagaataagatgatgataaatggttatatgacataaaatacgacattggataagtgcattgatgtttacctttgcaaaagacgataagaagatcattaatggaactgggagccgaatctgatgatgaaggaactagcgcaagacatggagcaagaggactagggacgggagtaggaacatgagtaggaggttgttgacgacgagaataaacttgtgttattggaggcttaactggagagtaacagtatagattagtaaattatcatctccccttgacgaacagaacctgaagatgaaacaaatggtgtttgttctagaaaggtatcatcaattgacacaaagtctttattaagactaggacaataacatctataacctttttgcacacgagagtacccaagaaagatggtatctatattttttcttcttcctttcaagtttagattgtatcagagcaaatttggttaggtttcttaatttcctgaccttccatttgaatgtctagttctaacaacccagtctggtgttgctgatgcgttcactttaattaatgggacttcaaattgaaacttaattagaacttggtagatattttcactaaaccatttctcatccttttttcaatggtttcaacatgattacacaagctttcatattgctttttaacatgtcattctataattttcttggtaagccttttttgctctatcacatttgggaattggaacactacatcgaagtattcttgaatatttcttgctcattgaggattctctctaaaataattttttcaactgaaataatactagtaaccaaactgttctcgtggttctactcgttttgacttaacccatacgcctgtaaacccactcataaacccatttttagtgcctaagacctcaatctatttgcaatactcgaacactaaatcttactcatatgagaataaagcaatcttttaatgaaaaataacaaaaccatgtgaagcatgtggtgcatagcttgtactcttatgtattcttcacactctacaccttatagccttgaataacttaaaatcctataactttgattaatgggacttcaaattgaaacttaattagaattcggtagatactttcactaaactgttgctcatactttttttgatggtttcaacataatcatacaaccttttatattgctttttaacatctccttctataattttcttggtaagccttttcactcttatcacatttgggaattggaacactacatcgaagtatccttgaatatttcttgctcattgcttccacttcccattaaggattctctctaaaataattttgtcaactgaaataacactagtctccaaactgtcctcatagttctacccgtttcgaatgaacccatatgcctgtaaacctatttttagtgcccaagaccttaatacatttgcaatacccgtactctagatcttactcatatgagaacaaagcaatcttttaatgcaaaataacaaagccatgtgaagcacgtggtgcatagcttgtactccatgtattcttcacactctacatctcatagccttgaataacttaaaaccctataactttgattaatgggacttcaaattgaaacttaaattagatggtttgaaataattttgagttttgctttgaggaaagatacttttgagttttgaaattctagaattagggttttctattgagtttctatgagattttgggtaattgctttcagttttttgtgtaaaaaaactagagagaatattgaaaacctatgttttctcactactaaatattattgatatataacacctatataaataggtaatacaaggttcagtaaaggaaataaatcaaatatacaaactaaggcataattacaactattttcctttctatatatattgactaattccataatttaagctaatttacagctagcaaatccctaaaatttagattagatttccaaccttagaataaaactcgagttccagtgagtcactatttccaacaaatctccaccttttattttaaattgaatggttgagattttattaaaaatttgaatttaaatcttaaaaatgggtagttattttttagataataaatctcaactattgattctaagtccaatagttaagattatctaaacatgacctatcatattaacaataatgtgaggatcttaatccatttgaattttgggggcaatgtttatattttggttctttttcttatttcttttctttcttcattaattgttgcacaataactcttaattgacaaaatggccatgtcatagttgcgttgttgtctactttccacataagcactacagcggcatcatcatttacaaagttatatccatatattggaaattactaacggagtcaatcatgaacttaagatatttaagattgaaaaagcgcgaccaaaagcatatttttttgtattttcccctttttattatgcctttcccttttaaaaggagatcgtaaatttgtttacatataattgttgtttatttgaggaaatattttgttttaaagaattttaaactgtattgtggaaaggtggatttgaacatcttttttcaattttcccattttatcctgcaattgaaagggtgctgtgacaaagtggggagaattgcaatacatgttttccaagcaattccaaatagtaaggatgagtttattttataaaacagcactgaactttgtatatcttgataacagaagttttcttcttacttgccaatttgttacaaccaagtcgagtatgaggaagttattctttagtttcatttgtcaaacatcttacctatttccagagatggtctatttagtgataaaaagacagactcgaagcaaatctatatcctttgctatgactaggtaatgatagatatctagatgttaagaatgtgtagttttattagagctaagacgttggcatttaaagccaaatattattgcatgtcttgcctatttcattctctaccctgacaacaaaaagtgcaatatttggcttgacaattcatctgttggcaggcacatactgtactggag

SEQ ID NO: 6564 - DNA, 1084 bp, Ricinus communis
  Intron number 10 from transcript 28505.m000115 (locus 2850 5.t000003) derived from phytozome v7.0 (chr-ID 28505; pos 22773 to 23856 reverse strand)
gcttgttcaaggtacatcttctgtacatcacaaattcagctctagcaaactgtgagaataactttattgacttctacagtttctcgatgcgaccaaattacggaaggaaaagactacaggttttagactatataaccctgttatgtaccataggttgtttgcacttaacattcaggttcacaaaggagccatttggcttgtgtcagtaatagttgagctcttgactaagcctttactactcatagcttttattatgcatagccactgggctagtagcccagtggttgagcacctacctcattgtgcaagagatccagtgtattaaaaaacaaaaagatgcataagagacccacattaaaggtttcttacattgtttggatgtaaatgggcatatgtgaatgttgagtgcttgaaagtagagttccacaatgaaaaacagcagcatatctcagatttactggataatatatctagatgcgtgttccctttgttgatagtcccaattgtgctgaatatgtctcatttgagatgctttgaactttggtatcatattaccacatagatgtagaaatcgatcatgtcaaaaatccaattttttcttgtgttattttttgagatttagatttaacatggtgcaattgcatgagctcactagctacaaagaccaagaatcttagtttagcgctttcttatgctttgttgtggaggatggagaaagctgggggaagaaaaggagaaggagaaaagatgggcaaaacatcaaaatttcctctgtttgggagagaggtataaccgtatgaggaatttgaccacaaaattaaaagtttccggatacattattgataggagatgttatattggtgcttattccagaattttctatttttctagtctatttttagtagcttccaggatgaataatgtgtcttctcatcttttgtccttcatttctgcttctctgttagattgtttatcatagaaatcattttgtatattaaggattattctttagcattgcaataatgttatagcactattttgtttctctaccatccctgatgccttttcttttgagtttcaggtc

SEQ ID NO: 6565 - DNA, 830 bp, Ricinus communis
  Intron number 5 from transcript 29917.m001995 (locus 29917 .t000064) derived from phytozome v7.0 (chr-ID 29917; pos 4 20064 to 420893 reverse strand)
atactaatatactcacagcttcaggagatcaaactgtaagttatcgcgtgtttgagatgaatagattattctgggtattttactctactaattcttaatgaagtgactttcagttctatttgcgtcaggttattgaatattttctaagttttcttatttatgaaaaaatataatagaaatgagaatgggaatagttgattctcatcattaaacaatgtttagtttatcaaaaattattttgaaatgggaatccctgttaatagaaatcattcattctctacagaatgattattttttaaaaaattcataaaaattaaattaaatcaattataaatggtcaaataaagaaaataaaatcatgtcatttatatatatatattatttcttaacaaaaattaaacaattggcgttaatcataaagaaattcaattttcatttcacactagatcaaacaatatataaaatataactattctatatttaggcctagttaaagtgggaagagtaattgcatttgggatttgtaggccttgaactccctttactttttcaccaagtgaaatttcttttttatggtaaatataagaagatgactatcttctcttgtgtaactcatatcccattgggactccaatcaataaaaaaaaagaataatcattttcattcctattccttaccttaaaccaaaagggaatagaccaaaccatctgctgtattaacattactcttaatgcatttacgaagggttttgatataaccattaactattattaattgcttttgggttcaacaatataagatacctcgtgggatattgtacagataaagat

SEQ ID NO: 6566 - DNA, 1115 bp, Ricinus communis
  Intron number 3 from transcript 30190.m011113 (locus 30190 .t000349) derived from phytozome v7.0 (chr-ID 30190; pos 1 927091 to 1928205 reverse strand)
aaatccaaaattaccagtccttttaatattattgtgttattgacaaagttttacattttcttttcattttatgctttgggtcatttttacagttcttagaattgacagaacatgtgcattattaaatttccatacacattactgctccttttggaagatcagtaaattttctctatttaattgaatggcagaacatgagcatcatatgggaaagttttacttttatctcaaactggggtcacatttgttcaagtgtttctttagattgtcttgaaattaccagattagcattaatgttaacatgagtcccattttcggtaagacttgaattatatctggattttgacattgttacaagctacagttaagtaggtttcactctttgttatccttttccacttagattatatcagcactgtgtttatattttttggtcctgaagaaaaggataacattggtgcttaattggaagatatttgattggaaattattcatatgccataatggtgccttgccaggacagaccactaagggtaacaaaaaatgaagatgttattcagataaaacaaattcaaatccttgaatggcctagttatctacagcatgactgttattatttaggacagttgacccaaaaagggaagtctttttctatagttcccatatgaaaattaatggaaactattctttttccattaattgtgttggtcgaatcattcaccatcatttgctttacagacttggaaaacattgagtttgccatttggattgttctcttttcattcattgtttaggttactctgagcaggaaacatcttatgattttatgattgaatacattctgtagatatttacgtccttggctataaaatgttaatagttccctttttctccgtgatgtggtcttgttggtgacattctcctttttctatcttatccatgtattagaagaaaactaattcaaaatctaaagcaaatgtggctgagggttgcaaatattgtgtcgtaagtctgtccagctcttctactgtatcattttattattttgagcctacataattcagaataatcatttatgctaaaaacagggaaattccataggttggtatccagca

SEQ ID NO: 6567 - DNA, 3796 bp, Ricinus communis
  Intron number 1 from transcript 29844.m003289 (locus 29844 .t000135) derived from phytozome v7.0 (chr-ID 29844; pos 7 97084 to 800879 reverse strand)
tgtttggtttgcggcaggttcgcttcattatctcttcttttcttccatatgaaatttttttatgtgaactgaattaggttagaaactattttggagcttccctgttatatttacaagcttagctctgtgtttgagattaactatgaattagattcagtactcgcatttagtatgctaacaattttatttttttaaaattttccattgcatatggctactttggcagtttgtttaattacagcttcattttttttgcttacatttgtgatttctgcaaaatttgtttctgtgcttgagattaataccagtggtctttgcagtttgctttgctcagcttctgaagtaggaatgtctaatatcttacagaagctgataatgtttatggctcagcttttaggtttgttcatcgatatgtattttattatgcctttctcattaagattaaggtactttgtcaggtaggttttatcaggttgatgttcttgatggttgttttgtaattgttggttattctgattgggaggtaggctttgcaaagttgacgatgttggcaataattttgttccattttgtttagatagtattgatggtccatgattggctcaacttattcatttgatattccggaaattaaatagttgttagctacttctggtttgagaggcttaagtttactatttggaaatttttgagggaaaaaaccaaatcttcatgttgcatgatgcaaggaatgtggagaatgttgggctaactcttagaagatgagtggttccaatttatttatgataaggcacatatttaaggaacaatatgttgtagatagcctttcaattttggtaatatacttaatacagtcagaaaatatctttgcctgttttcttgcttgaatttttggttttccttagcaggtattatttacttcttagaatttgtaatttttatttgttcggaataagagtaacatcattgtagatttagacttccagtgtactatgataggtcaatgctggttccttgtaaaacagagttacaaaacaacttttgatgatcgtgtgtgtgcaactttgatgactttttctcctcttgctcatgcttatttttgaagcactgtcagaatatgttttcagtcttgatgagtcaagttgcatatgtgtgaaattcattacatttctatgttcatttttatgtaatcatttaaccctttaggattctactgtctagcaaccttcccttgtcaaaaccgaatgctggttactcagtggctatcaatgaatggttggtgcaattttaatataagctatctatgtagaaattctgaatggaaactgtttcctgtgttgtttacaaaggtagttcgttatatcatattcttcaggattttacataattagctattagctaatatgctcatgttacctagctgtttgtccttgcttcctccatccccccatttgtagccatttagtttctttcccttctcttaaaattccttgcgatcttgggatattgttgtttgttggcaactgcctatactgttggaagttgtgctgttttgctagaatgagctgaattgactatttacttataaagtctgctatagttggcagctattgtgaagtagttggcctagcatagatattcgtgtatgatctaggagtattagctctatgttcttttagttgatgctattaagaggaaagtttgcattcatctcaagctgccttctcttatccttcctctctttcttccaaattattgcagttgacatatgtgcatattctgggtctctatgtctatattctctatttaagatgattcttctatgccaattgcgaaattggtttgttcttttcttttcttttcttttatgaaggtaacttgtatgcatttttcctgtatgttgcatccattttcattgggagcgtgaggtctaaagctaccatttctcttgatagtgtacgtccttttattcaaagttacttggacaatttttgttaatctgctttttgtttgagcaagggccttgatccacatttatgatttatgttttgacttgaatattgtgaagatagttgcttgttagtcatcagtcatgttaactgtgacttgagtttacttctttgtttatgttgctttaacctgtattttattcttttattagtatactctagaagggcattgataagggtaggattcttcgtgtaattattataaatcatttctctttagtttcgaagttgcactaacttatgacttgtatctctcgtttactgtgctcaacgtcctgttggtttattattttttattacattttccaggatgttgtgagcaagcatctgacgaaatttaatgcgtgttttgaatggaaacttatttatcttttagttggtttcttctaagtgctcctgtttcagtggttgatcagaaatcagataagaaattctgtatctattgtagttgttaccatctctgtgtggaatatggtatgtgtaaatgatgagtggaaagtgtatttggttccatataactgtgtcatctagctgacaggactaggcaaaaattatactttagaaattaggcagtggtgaggtttttgtggcaggtgaaatgagttggagtttctgtttaagacagtgcacaagggtttgagtgtaataatagagaaagtgggtcatgaccataaaatcgaattgcacaataaaggattttgtaaagagaaggcaagaagcatcatggaatcacgtgtctgtcttcatttagtttgtatgcaggagagttcataatctcttaggaagttgtttgacttcgtccctccctaccatttacacgtgtcatgacatgacatgttgagcatttctcacatatttgctatctgtggctggacttgccaaagtctagcatatttactttcttgtcaactattgaagtggccaaagagaatatgaacaaacagagtctagcatcaataaagatatgctatcagaatctagcatcctttgcccttctatttcccttgcagtttatgcactttatttctgttttagagtgtattcatttgaattctttttgtgacaataatcttaatagccttatagcaatttgatagatagttatgtgaacctgcctctaattttttctttacttggatttttgtgtgatgcggttagaactgtccgtcccatgttgtgctttattctgaatttagatgagtcacttgactggctcactttggagtagtcagctggcatatctttattgatggtgctatgctgtattttaagtttatattaaacagtatttcctgcatttagtagtttttggttgcaacttgcaagttgcaattatgaaactagctttttaataaatagggtttatatgccccacttcatgtgaatcatgtgtcaggatgtggatttctactagcttactgctttatatttggaggttccatttaaaacgtgttcctctctgatatctgcaaaaggaatttgaaaagtgatacttccaccttaacaatttccttttgagtcaagtgaactctacatgattcctgtaattcaaaaacttgatccatgttatccagctgataaaaatctctaatttatcgagttgtatagggtgtgtgcatatgatttattacctttatgtctcttgtactgctgagtatgctgcctttattgcccttttagcttgaacttggagactgactgcattatctcagagaagaccttaattattactcttgaatgcccttgacatgaaaaatacaggtcttccaaagacttcccagacacgc

SEQ ID NO: 6568 - DNA, 2154 bp, Ricinus communis
  Intron number 1 from transcript 30169.m006305 (locus 30169 .t000082) derived from phytozome v7.0 (chr-ID 30169; pos 3 89495 to 391648 reverse strand)
ggtaacttctttatcatctgtgttttctttttcttcttctttttttttttttttaattaattctctgtttggttggcaagaaatgtcaggaaagaaaggaaatttggttttgaaattagacaaagttcctttctttttccttattcttgctttgccgcggctgccaaacaagggatagggttttattttcgattaagtaagtcaattcaactatcggttctgatcacatgcatgattgtcttcgtttagtttcaagtaagtagctatgatgtttggttgttaacaaatccgttagcaaattctaattagcagttgctggttaccgttccatggtagattttctttcttgttttgaatttgggagtcctcttatgcaatctctttacttggacttagccggctacattttgcgcccggctatttccgtgtatgtttgcatgtttcgaatttctggtgtagaaatgtcagaattccttgattggtttgcgttgttatagagagacatagataatccttcagttaatctaagctacaagaaaatgttctctagtgtctcggattacaatttctttgctccgttctcttaacactgtgatcctttattttgaatcaaaactaattttttttttcgccaacttgaattaagtagcaaatgatactctttgatagccttagcatttatactccttactgctatgttcatgtctaggaaaatcgtttgatttctcagaatttacaaacttctcaactcgtttgtatagagacttctcaacagattaatgtagttttagaattagatggcatgcgttttcctcttcttttcttttgttttttatcttttcctcctcagctaacttcttggtgctatgaatttagtcagattcagtcaattagttcagacattcttaagccatgtattaaacaactaggatgtttattatctagcagtttatgtttggttttcattagttatatttcctttaaagtatagccaattgctagaggtgatgttcagttaccttattgtgttgggtagttattgagtttgtgggggtacttattgtgttactgggtagctgttagttaatatcctatctaagttgcatttaattgattatatttaatcaagaaggtaagcagaaattctctctctaatgtgcccttactaagagattgaagggttctctcttaatgagcatttatttatcctttattttgaattaataattccaaaactagttcacagaccttagacaatggcatttaggcagttaactgtggaggtggctgccaagacaatttcttctgtgaaccaaagaaagttaaagtaccgttttcataagtgtcatcacctaagatacatatccactccatacttgttgtaagtgttgtttgaagaatgtggtcaattgatttaaaatgctaggaagtatttggagaagcttcatgtgttttacgttcattaacggtactacttgttaaatgtatcaacgtcaacattgtcagtattgctcttgtctagaaatggctagtcttgcttctaacttttgactacaagttaatctatgctttggctttacattgactaacattttttttaagagctgatagagtatgtttaaacatgttgctgcatttagttcactaccacttgaacttagaaatagaaactataattggagatctaaatttgggttttggttgagtagttatttgagtgaaatgttgctaacaacagaagcagtcatgcttagtatgatttccacgtattaccttaaataaagcgccacttcttaccaatacaaagttatagggaaaatccatgttttgtcatgagcgaagacatggggttggtatcaagaccaccttttaagatctaatccctagtttaatctttgtatcatgcaacagcccactttcttatcaagttggtgcataagcttgtaaaagtgacattgaggtatttggaatgtcatttcaggtcgttcttggtacttcagctggtattagcttacctttttttttttttcctctcctcattgatgttgtttgatttcaacattaactctgagctcttatttttcagtgttatactttacaggttgatgagaaaaataggtaggacgtaggcacaagaaactcgtataattaatc

SEQ ID NO: 6569 - DNA, 657 bp, Ricinus communis
  Intron number 1 from transcript 29830.m001447 (locus 29830 .t000064) derived from phytozome v7.0 (chr-ID 29830; pos 4 74810 to 475466 reverse strand)
tacggatcaagagggtatgtataactaacttcgcttcatgtgtgcctttcattatatgattttgctgccgtcactgccgtttgatttgctatattctgtaaaccaaagatccatttttttttttggttggtgtctgtgaaatttgatttctttctttttgtttatctcgttcttgtagttagggttttcaaaatattgtgcatattctgggttaatgaacatgtggaagacagaaacaaaactaattttgcaaataggttcagggctataattttgttggtgttatgattctgtgatgttgttgggtttgtgattttttgtatgcaaagagtgtatatatgatgtaccatgggtctaaaatatgtgcgagctaatggcatatggaaaatatactatttgccaaatcttctctagttgcatacttgagtacttgttgctgccattggtgattatatgctatgctttttgtcatgctttgcttttggagtgtatctgtagttttattttaggagggctgttaagtatgatgcctgcttgttttttagaagaaaactgtaggaatgttaggtgtcagggaagtgtgggttgggtttggttttattaacaggttgagtggggatttttctttcttttttgggtatggataattgaagggca

SEQ ID NO: 6570 - DNA, 14648 bp, Ricinus communis
  Intron number 19 from transcript 29737.m001250 (locus 2973 7.t000044) derived from phytozome v7.0 (chr-ID 29737; pos 335670 to 350317 reverse strand)
atttgttgaagctagcaagcagaagaaacttgcaggtaggattaaattttgaaaattacttgttttctccaaatattctctcatatgtttattgttcagtttgttattgtagaatttaatagagaaaggaaaaaagagaaatattctcttttttcttttcatatatcaaacataggaaaaacacaatttatatagactagctaaaggataaaaaatcttagatcaggaactgatttatcttatccataaaccttagaatgtttatccatatctctaacaaacaaaaactaattagttattctaacttatcaacactccctctcaagttagagcaaatatatctgtcatgcccagcttgctaacttgaaattcaaattgctgtttaaacaacccttcagttaaaatatctgccacctgctgtgtggttggtacaaatggagtacaaataattccttcttcaagtttttcttttatgaagtgcctgtcaatttcaacatgttttgtcctgtcatgtaaaacaggattatgagcaatactgatagctgccttgttgtcacaatacaacttcataggtaaattcgcagatcttttaagctcttgtagaacccttttcagccaaagaatctcacacactccatgtgccattgatctgaattctgcctcagcactacttctagcaactacattctgctttttacttctccatatgactaaattaccccaaacaaatgtgcagtatctagaagttgaccttctatcagttattgaacctgcccaatcagcatccgtgtacacctcaactcttcttttttcatttttcttgaaaaaaagtccttttcctagtgtacttttcaaataacaaagaatccgatatacaacttcaagatcttcttcatatggagaatacataaactgacttaccaagcttacagcgaaaacaatgtccggacgagtatgtgataagtaaatcagttttccaaccaacctctgatatcttcctgtgtctactggaacaccattctttacgtcccccaactctagaattagcttcaattggagtttcagaaggtttacaaccactcattccagtttctttcaagagatctagaatatacttccgttgtgagacaacaatgcctttctttgaccttgccacttccattccaagaaagtatcttacttggcctaaatctttaatttcaaactctttggctaggttttgtttcaatctgctcatttcaattatatcatctccagtcaaaattatatcatctacatagacaattaaaacagaaattttgtcttcaatagaactctttaagaaaagagtatgatcagattaacttgattataaccttgacctttaataaactttgtgaacctctcgaactatgctctaggagattgtttaaggtcatataaagatcgctttagcttacataccttggctctaaatttctgagcaaaaccaggtggaggttcaatgtatacttcctcctctaagtcaccattcaaaaaagcatttttcatatctagatgattcaaagaccaatctagattagctgcaacagacaagagcactcgaatagtattgagtttcaccacaggagaaaaagtttcatagtagtccactccatatgttttgagtgaatcctttggctactagacaagctttatacctttccaaggatccatctgaattatacttcacagtaaacacccatttatatccgacaactgtcttcccatctggcagatccacttcttcccaagtagcattcttctgcaaggctctcatctcctccaaaatagcttctttccgctcggaaacatttagagcctcctgaagactatttggaataaccatactagacatttgtgagataaaagcacaatatggtgatgaaatatttttgtaagatacaaaatttgataaaggatgtttagtacatgatctgacacctttcctaagagtaatgggaagatcaagttgactagatgaatgatttgtaggaagtttggaaacttaccataaatttcatgatccaacctctgattagattcttgatggtgctgtaggatagtgactcttttttgtgcttgatgttaaataacaattgaatgaaaaacactcttatgtttattccatatatctcaaggtatttatacaagatacctaaacctatttaaggtagtcaactatataggaataattacaggaaaggtaagtcaactatataggaataattacaggaaataaatagagaaatattacaactataattcctaaataggtatacagctatatatactaagtctccccctcaagttggtgcatagatatcacacatgcccaacttggataatgatgcataaaatgagccactagtaacagcgtgagtcatcatgtcggccagctgatctacactcttaatgtaaggaacctctatcataccagaatctaggttatccttgatataattcctgtcaacttcaatgtgcttagttcgatcatgttgaaccggattgttagctatctcaatagctgcagtgttatcacaataaagtactataggtttctttagaccaaacccgagttcttttaagagaatttttaaccaagcaagctctgtgattgcatgatgaagagcccggtattcagcttctgcactagacaatgacaccacattctgtttcttattcctccaagtcatcagattacctccaacgaatgacacatagcctgaagtagactttctatccaatttagagccagcaaagtcagagtctgtataacccataatatccaagtgcccatgtttggagaacaaaatacctttacctggagaggacttcagataagccaaaatacgatttactgcatgcatgtgtcgatcacttggattgtgcataaactgactgacaacactaactgcatatgataaaaaaagcctagtgtgagttagataaatcaactttcccactagtctctgatatctctccttgttagtcggaacctgatcaggatagatagatagaccatgattcacctcaataggagtatttacaggttcccaggcagaattaccagtttcagctaagagatctaaaatatacttccgttgggatagaaaaggtccttgcttggactgagatacttcaacacctaagaagtattttagaaccctcaagtccttcatctcaaactccttggccaagtagcttcaaaatttctctatctcactagcatcactacctgtaacaatcatgtcatcaatacaaacaataagcaaggtaatatcatcatgctccctcttataaaacagagtatgatctgccaaagcttgcttaaaaccatactccttcattgagtagctcaacttgccaaaccatgcccttggcgattgtttcaacccatacaatgcctttttcagcttgcacaccttacctcctcctagtgtaaatcctggagaaggatccatatacacctcctatatcaaatcaccatggagaaaagcattttttgcatcaaactagcgtcaaggccagtccagattggctgtaagagatagaatgactcgaacggtgttcattctagccacaagagcaaaagtctcttgatagtcaatcccataggttttgagtgtaacctttggccaccagtctagccttctacctttcaactgtccgatctgacctgtatttcactgtaaacacccacttgcatcctactgtcttcttttcctgtgacaactcaaccatctcccaagtagaatttttttagagaaccttcatttcctcttccatagcaaccttccacttaggatctccaagggcttcctgaaaatgactagaaatagacacagaagacaactgaagagcaaaagctagatgagccttagacagatgatgataagagataaaatcagaaataggataagtgacgttaaaagatgacttggacccaacatatcaggttctctacgttcacgagggggatatctcctaccatgatcgtgatccataacttgtggattcaaaatagcattttctaatgttataggactagaatctttctctaaagttgaagttgtaggagagggaacacatacctcagggttaatagtagaagagtcatccgatggcatgatagtatcatcaagagaggcactagagtcaggagaaggcataacagtggcattctgctttcttcttgtataaccgttttggtataacctaacttgtcttttattctttttctccttaaattcaaactcaaactcaacagaacaagtattatctaaagattcattattctccataatagctgaattctcccccttactcgacatccacaacttcttctcttctaaccataaccgttcctcttccttactactaatctcctcctgaagaggaatcatagatacatctcaaaaaaaagaagatacttgttcacaaaactgaacatccatggaaacataatatttacctataggaggatgaaaacatttatagcctttttgagaattagagtaaccaagaaaaacacatttaagagcacgtggatcaagcttatccctatatatagagtgtacatgaacataacatatacaaccaaaaaccttaagacaaatatttatagcagaaggaatagagtgaaattgtgataacatccttaaaggggcttgaaaattaatgatacgagcaggcattcgattaataagaaggacagcagtcatgatagcctcagcccaaaaacgtttaggaacatgcatagtaaagcttaaagcccgaccaacctcaaggatatgacgattcttacgctctgctacaccattttgttgtggtgtgtaggcacaagttgtttggtgtaggatgccatgttctaggaagaaattggtaagagactgatttaccaactcacgaccattatcagaatgaaaaacttggaactgagtatgaaactgtgtgataatcattttgtaaaattgaggaatcacctgtataacatcactttagatttcatcaaatatacccagctcactctagtgcagtcatcaataaaagacacaaagtatttatggcctgaggcagatggagtagaaaaaggaccccacacatcagtataaacacatgaaaaaggaatagaactcttattgaaactggttttgaaaggaacacaatggtttttagcataaatgcattgttcacatcttagactagagatagcaacactgtgaaacaatttaggaaataaacgctctaaataaggaaaagatggatgccccaaacgacaatgccataaaagaatcttctctctatcaaacgactctctctctacttgaaaaccatggctagggtcagatttaaattccgtagccccctctaagtaataaagacctctttccttatcaatgccaatcgtcatcttcgtacgtttgtcctgaaggacacaatgagtagaatcaaatattgcagaacaattaagacttttggtaatcttactaatggaaataagattattagaaagatcaggggcaagtaagacagatgacactaagaatgtaggagaaattgagacattcccaactcctgtaattggcatagaagtcccattagcaacctgtacagacttaacaggtgaagacattagagaggaaagtatagaagaagtattagtcatataaaaatacatttatgtgcttttggatcaagctttgaacgtttaggatcatgattatggacaaaagccacactttcagaaatttttaaaggaatgttgctagttagccgagttatgggaaaacattcactgaaaactttaattggtgttttaaagttcaaaattcttgtaggcaatctattaatcaaataaatggctgttaaaactacttctccccaaagatactttggaattttagttgtaaaactaagagctctaacagcatctaggatatgtttattttttctcttagccatcccgttttgctgaggcgtgttactacaagaactttggtgaataatccctttttcaacaaaaaatcgtcccaacacattgttaaagaactcctttccattatcactttgaaattttttaatttgagtctgaaattgtgtttgaaccatattataaaaaattttgaacacactttcagcattagatttcccttttaaaagaaagatccaagtgactctagtatgatcatcaataaaaaggataaaccaacgttttccagaaaatgttggcgctctagaaggaccccaaacatcactgtgaatcatggtaaatggcttggactgtttataaggttgcgattggtaaacagtttggtgatgtttagctaattcacaaaattcacatcggaaaaataaaggatttttattcatgaataactttgggaacaaatactttaaatattgaaaatttggatgttctagccgataatgccataacataatcttagtgtcacttgaaacataaatggaatcgaaacaagcttgcaggttttgccttccaaaggttgactcatcattgaagaagtagagtccaccatccaatatagcacccccaatcatcttccccgaagttaaatcctgaaatttacaataagaagacttaaaaatcacttgacaattatgatcagaggttaacttactgacagacaaaatattatatgacaaatgtggaacatgtaaaacattcttaagaactagagaagacgaaataggaattgttcctttcccagcaacagtggctaaagagccatctgcaattttaaccttttgatttcctgcacaaggtatataagaggaaaaaatttgcgaattgccagacatgtgatcagtagcacttgtatctaatgtccaagtgccatggggtttggaacaggctatggctgtaatgaaagaattagctgattgtgcaaaagaaacaagacaggttagatttttctaaagtttgggacttgaacattttttacaggtgctctatatgttccttggtaaaaggaagagattcagaagaagactgctgccccggattagtattgctagcttgaaaagcgcgtacatctccccctaacctggtgttgtcgctgcctgttttcttcttcggtttcctatgcaatttccagcaagtatttcgagtatgccatggctttcgacaatgataacactagggtttctactttcccctgagtctgtacctcgagttataaaagcagatctgtcagcatctatttttggttcatcatttctcagcatcaatttttggttcatcatttttcagcatcacttttcgtcgtgcttcttctctacgcacttctgaaaaaacttctctaatagttggtaaaggattttttcctaatatatgtccacgaacctcatcaagatctttgtttaaaccagccaagaaaacaaatactcgtcctctttcaattttctttttgtaccgagcattgtcattaggattctcctattgttcatcttcaaacatgttcaattcttgccaaacagccatcatatcattatagtaacctgttaccttccgattaccttgttgcattttccacatatgggtgtttaattcaaataactgtgaatggttgtccaaatctgaataggtttctcgaattgcttcctaaacatctcgagcagtctacaaaaacatgaatggttttccaacaacgggatccattgagttaatcatccaggcagtaaccattgaattttctgagcgccattacctgtatttcgaatcatcggttgctggtggttttatctcaccattcaagtatcgaagttttccttttccatcaatcaccaacctcatagactgagaccattcaagataattcttgccattcagcttgtgaatggtgagttgaagagaattttcaggaggaacgggtggaagtaactgagaagcaaatctaagcttagaaatgattgggaaatttagagagatgccaaagtaggcagtgatgatttattctccaagaagtgagtatttgtttatggattgatccatttgaaatttagtagtggagtggagaaattattccagagttgaggtttggtgcgcatggtaactcttaacttcaaaatggccatagtactttctgtacaaagtataaacctgtgaatgtgtatattaatgtttaaattgatatatctatcataaattgaaggtgtttagaaatactttctccacatgaaatatgttatgcatgttgattgattattgaagtatagaatgtaagtcatataagctaccataattgcaagctgtaatatctatccaatgttattgaagtagagaatataagcaacatgactgtttatatgtgctcgaagacgggattttggaagagaaaagaagaaaaaccagggattctgtgacagacatgacctttttgaatttggagaaacaataagaacaaacttttattttgcgtgtggaacctattttgtgtccctaagtgcaatgacacatataagggatgaaacacgggaaggttattgttatgagattcaatcttgaagttataactcaaattagtaatagctaaggcatgtattcatgtgaataacacaggggctcaaaggctatgaagctctacatgcttctctaattatgaatcacatgaataacacagtccttcattgtgatctattgattctattcatactatgctcaatcaatctaaccctggctttgctgatgcctttttttcttttgttctaagcaagcatgattaagtgtcaaatatggatgggcagaaaagacaatagctcacttctgttctggaaaatataatggctttcgttatggggatatccttcatctaatatgatttctgttttgtggtgctttgctacatgtttttttaaatgccttttcattaacattctttctaggtaaaacaattactccaaaagcagtgacggaagtgaaattgataagtttaggcaaaattttggataacaacaaaactgttggtcagtgtacgacaccttttggtgaagttgcagggggaatcatcataatgcatgttgttgtacaaccatctctagcaaaaataaaaagaggtagtcagtgtcttaatcatctttgctcatgaaatttccttttgtcctctcaattgtcatgtagcttaccttggtggttatatggacttgatggcaatgaataaaatgatctaatggctaatttagacatgggaaggtggtaaccgtttcttgctgagaactgagatttaaaattttatgatgactagttttcagctggaaatatagtattgtcttatgtatgcgtacagataagacatgtttcttgcagtttccttgaatctctgctgaagatactcgtttgaatcatcctgaacccataaagaggcctatggaactattttattgcatagcaaccttgggccagacctcgtattgcaaaacctgccccataccttccaaagagatgaaaatataaatttggacatttaatttagagaatcaaatggaaatgacaatgaccttgattactatactatctgctcctctctctctctctctctagttctgccagaccacaactgattagatattgaaaagtgttggaataggaaatattgacctagctgtaaatataggaattctaggctatattaaaggagattaggcaaatcattaggcagatttcttatatagctgtaaattgttgtgattatatactttctttatttaggtgatgtttatacctatatatatgtacaatgtaatacatgtaaattaaggagtaatgcaacctatcttttctatttatttgcatggtatcagagccatccgaaaaaaaaaaccctagcctcctcaaagaaaaatctagcaactgcaattccaccatgcctgcaactccacctgatgtgtcagtcactaatcctacttctgaaatacctacttcatccaatcaacaaaaaatcttagccacatctgattctcattcagtccaaataactactattaggttgaatggaaagaattttctatgctggtctcagtctatgcgtatgtatattcgaggtagagggaagagaggatacttaactggtgagaagaaggaactagacatggatgacccatcctattcttcttaggatgcagaaaactccatggttatgacatggctagtcaactccgtggaggaagatataagttccaattacatgtattatcacacagcaaaagaactatgggataatgtcaatttaatgtatcagatataggaaatcagtctcagatatatgaaatcatgctgaaactaggggaaatccatcaagctgaggatagtgtcaccaaatattttaattctctgaaacgtctatggcaagacttggacttatttaacttttatgaatgggaatccactaatgattgcaatcattacaaaaaaaaaaaaggtagaagatgatcgtattttcaaattcctcatgggacttaatgtggagcgaatcattgggagacagccccttccatctattggcgggtatttgctgaggttcgacgtgagaaaagtcgcaggctggttatgttggggggaaaaaggctcaaacagcagcattgaaaattctgcattagcagcagctgaatcctatgcaagaaaagtgaaaaaattttatgaaaagccccgtgtttggtgtgaccactgcaacaaaccaaagcatacatgtgaaaactgctggaaacttcatggaaaaccagctaactggaagggaaaacatgaaggcaagttcaatcgggctccctctgcgaatgaagctgaagctgtccccttcactccacaacaagttgatcaaatactaaagctgaaatctaattctggaccatttggtactcctaatgcttccttggcacaaacaggtagaaatttaaatgccatattctgtgtgagtctaactgctccatggatcatagattctggagcatctgaccatatgacaagtgtctcaagtttatttcatacttatgttccttgttctggtcataaaaaaattcgtatagcagatggttcttacacaccaattgctagtaaaggtacaatcagtttgtcaaaaaccttgactcttaaatctgtcctccatgtacctaaacttgcaggtaatctattatctgtcagtaatctgtctaaagactccaattgccatgtcattttttgtgactcctattgtgtgtttcagggccagaattcggggaggaagattggcagtgctaggatgatagatgggcactaccattttgaagttgaagtctccaaagatgaaaaacctcatggactaagtagtgttagttctatctctgttaaagataaaatcatgctttggcattatagattagggcatgctagttttttctaccttaaaaggctgtttcctactttatttaaaggaatagatttttcttgttttcattgtgaacattgcattttatcaaaaagtcataagcacatttatcattcaaagccttatcaaccctcaaggcctttttatataattcacagtgatgtatggggtccctcacggatccatacttattcaaaaaaaaaatggtttctcacatttatcggtgatcatactcgattgtgttgggtttttttaatgactaacaagtatgatgttaagatgatctttcaaaatttttacgctaatgagtgaaaatcaatttcaaactaaaatcagtaccttacatactgataatggtacagagtatttcaatgaaatgcttggaaagtttttaaaagacaaaggtatgcaacataaatctacttgtgttgatatgccccaacaaaatggtatagccgagcgcaaaaatacacttattggaagtggctcgagctattatattctctatgtatgtacctaaatatttaaggggagacgctattttaattacatcatatttgattaatagaatgcttacccgtgttcttgatttcactactccccttgaatgttttcaacgttacttcccacaacatcgtctttcatccaatttacctcttaaaatttttggttgcacagcctatgtccatttatctagcaacaaggatcaatccaaactagatccaagggctgagagatatgtttttgttggttatgcatcaaataagaaggggtataaattttttaatccccacataaaaaggtcataatttctatggatgttatctttcttgaaaatcagccttatttcaaaaggaattttctttagggggagcaattaaaggaagaaaataaatgggacaacattgttttacccaaaattgtggcttctacgccaaatatttttgaagataaaacttctattttgtcgagcaatattgaatctatgacagagaaagaaacacttccaaataatgagcgtgaggttgttgtttatacaaggagaaaagatcacaaaaaaggtagagaactcatcatctcctcagcacctagtcaatccactctgaattcaggtgctcaagattctcctcaacctaatgattcttttgataatcctcaaaaatcacatgaatattgtgatcttgatgtacctattgcacttagaaaaggaacccgttcttgtactaatcatcaaattgcaaattatttatcttataataaactctctaagagtcatatggcatttgtgtcaaaaatctcaaatctgtttattccaagaaatattcaggaagcacttgatgatctaaattggaggatggcagtaatggaagaaatgggtgcgttgaaaaggaatgggacatggaaagtggtagaactccccaaagatcaaaagattgttggttgcaaatgggtttttactgtaaaatgtaaagcagatggcaatgtggagagatacaaggctaggctggtggctaaggggtttactcaaacttatggtattgattacgaagaaacctttgctccagtagccaaaattaactctatacgtgttttattgtctcttccagttaatttcagttggccactacaccaactagatgtgaaaaatgcctttctcaatggtgatttagaagaggaagtgttcatgagtccacctcctagatttgaaaaatctgttggcaaaaacaaagtttgcaaacttaagaaatctttatatggcctcaagcaatccccaagagcatggtttgaacgattcaggaaaacaatgaaaaaatatggatacaatcaaagtcaagcagaccacaccatgttttataaacattctaaggaaggaaaaacaacagtgttggttgtgtatgttgatgatatgattttaactggtgatgatgaggatgaattatctagtttaaagaaaaagctaagtcaggattttgagatcaaagacctaggggcattaaagtattttctaggcatggagttcgcaagatcacgagaaggaatttttgtgaatcaaaggaaatatatccttaatctactaaatgaaacaggtcttctaggttgcaaagcagctgaaactccaaaggaggtgaatctcaaattaaatcctacaaagccagaggacataattgagaaggaaaggtctcagcgtttagtgggcagacttatatatctgtcacatactcgtcctggtatagcatttgcagtaagcatgattagccaatttatgcactcaccaggctaagaacactttgaagctgcctataggatgcttagatatctaaagggaacacctggaaaaggactgatgtttaaaaaatctggtcatttgcaagtagaagtctatatcgatgctgattgggtaggtagcactacagatagaatgtcaacatcagggtattgcacttttattggaggagatcttgtttccctggaggagcaaaaaacaaaatgttgtagcacgtagtagtgctgaagctcaattcagatctcttgcacatggaatttgtgaagcaatgtggattaaaaggttactagaagatttggaactacctatttccctccccatgaaagtctattatgacaacaaagctgcttgttccattgcacataatccagttcatcatgatcggactaagcatgttaaagttgacgagcactttatcaaagagaagattgaaagtggactgatttgtattctttatattcctacatctcaacaaatagctgatatttttaccaaaggactactgaaaagacaatttgattttctagtaagcaagttgtcaatgggagatatttttcagccaacttgagggggagtgttggaataggaaatattgacctagctgtaaatataggaattctaggctacattaaaggagattaggcaaatcattaggcagatttcttatatagctgtaaattgctgtgattatgttctttctttctttatttaggtgatgtttgtacctatatatatgtacaatgtaatacatgtaaattaaggagcaatacaacctatcttttctatttatttgcaaaaaggatttatgctaataagattctgtagactaacaggtaattatcaatattgccatattaacagattttgcatcggaagtttgattctctctctttaagctcagtatcaaagttagaagtttactcatttttctttcaggtatatatacgtgatcaaccatttgatcctcgaca

SEQ ID NO: 6571 - DNA, 2191 bp, Ricinus communis
  Intron number 1 from transcript 29851.m002418 (locus 29851 .t000060) derived from phytozome v7.0 (chr-ID 29851; pos 3 44790 to 346980 reverse strand)
ggcttctggtcttcaaaccaaggtgtgggctctatccaatctcaatacttaaaagtgatggcgcattttatggtaaaattattttaattataaataataacgaataagataaaattgaatagaatttttcatattttatattagttataatatttttaaaaataataataaattaaatattttaaattttaaattttttaatgttttaatatcctttttcattctagaaaaggtttcattagttaaaaattatcttaaaagtatttattaattactttttagtaattatttaaattgatactataaatataattagcattattattttcatagatctaggaaaggcggttttgtttggaaagtgacattgagacaagggttggtttcaaggaagctttccgttgattgtgcttttacgctttgatagaaaaatactaaaattatgcataaatttaaattttatgtaccaaaagtaaatatatatatgttaaaataaaaaatttatgtatcaaaaatagttatacatgtcaacaaaaatttgtttcaaaatttagtatatattagacgtttactcgtgagttgcatggctgttgctattattctgattatcaaattaaatttatagataaaatttaatagaatatttaatatttaatatttatttataatattttaaaaataacataaattaaatattttttaattttttaattttttaatttttttagtgcaacaatataaaaactgttttaaaatattaatgaatttattttggtgttatatgaaccaatactatcaatataattgatattactatttttcaggattagaaattattatacaattaaaattaattcaataataaatatatactaaagatataatctaaaatattatttttaaaattagaatgattatctaatttaaagattaatttattaattattataattaaagtataattaatatgctatttcttaggatagaattataatcattatctaattaagaaactaatttattagttaatatatattaaaatataattagtatgttatattttaggattaaaattagtatttaattatgaatatcaattattaattaataaattaatagaaaaagtatatatatattaaatttctatggtgtcgtaatttatagtgacttttcaatacttttatatattaattgaataaaaattataaatttctagattcatttacataaaattttcttttagaaagttatataaaattgtttaaagtatgtgattttatataaaaaatacatattacaatattttatgtaaatctgatccaaattttataattttttaaataaatacataaaaattaaaatatcggtgtaactatatatatatatatatatatatataagagagagagagagagagagaaataattttaatattttataagtatttagagtttcaagtgtttgtgctagttgtatagtaatatcaatgcaacttatttagttgttatgattatttataaaaaaagaaaattatttagacttaatgtatgtcttcacttgtatatcagatcgataaatgattgacatatatttattaattttaaataataaaaaatgtgtcaatcatctaatactaaaataataaaatatatcatatatacgtatcacatttttattagtcatagtatatacattaacctacactcgtattagttatattatatgcactaaatttaggtaagaatgtcgtattccggaaataggacgtgattaaattaagcaaaagacaccaaatgttggcaatttatttttttgcgctaggttgcctagttatctctaagacacgaacttggctaattattgttatttcttttcaattacttttacgttccagccactgggagatggaacacctccggttccagttaggttagtccatgtgtgtatgtaataatttaattcagattgacatttttggtaagagaagagtggtagaacttttcaggttcattgtaggtttttgtaataacttgaaccttgtaggttagtgaagactttcaaaagttatcttaagctactaatatttattgttggataaaattaattgatattctgttttcattcattgttggagacagattgaagcattaatcttaaacaatctgttgtacattgttacaggttgcaccta

SEQ ID NO: 6572 - DNA, 20460 bp, Ricinus communis
  Intron number 3 from transcript 29912.m005280 (locus 29912 .t000006) derived from phytozome v7.0 (chr-ID 29912; pos 4 9043 to 69502 reverse strand)
gtgagcaggtaactacccaaccctttcttcttctttttttttttcctgaggagtaattacccaatccttgaaagtttatgaattacgagatcacacgagagccataaccattgataatctgatgcattgcagatgattgtggatgagattaacatattgactacagtattcgtaaagcaggatggcaagaaagtttactatccaaattcagttttgattagcaaacccatcaccaatttctatggaagtctagaaattcgggatgctgtggagtttgatgtttctacttctacagagactgttcaggctctgaaagaaaaagtgaaagagtatgtctgagaaaaactgcatcttatatgcatctcttctatttcttgatttcctgattacattatgtgtactcgcattctttatttatttaaaagctggctttgtctaaacgtttaggtatttggaaaacaattataagtactggcatcctgagcacacaattcaaattaaaaggatagaggacgagcacaagatgagtatggttctctatgttgatcacaaaatagacattcacaacagtggggaaaaaaacaagcggagatccaagctagttgaagacctgaggagaatttttgaagatcttggtattaaatgtcatcttctgctttaaggacttcacctatgtttgtcagcaacttgaacagtcccatcttcttcatctatgttgttgttcttctgtggaagtttcctgttcctcattgcaatgcaagtatgttcattgttcttgtttcatatgttctgtatgtaccaaaattaaagcaacagtaataatttaagaagtgaatgattttattactctaaaagaataaatacaagagaaagagttaaaactgaagtactgcagaaaattgaaaattacagacctttatttaaactagaactcctaactaattgactaaaaaatagctaactactcctacaattatttcacaactcaaagactgattctagtacgtaacagactcttaagaaatagaaataacaaagacaacttataaactaacagtagactgcactaatttatgacagtcctcctagtgcagacttacgctcaccaagtgatgtacaaaataattcgaacttagccttaacaagtgcttttgtaaaaacattagctacttggtcttcactttttattttcttcattgagtcagaaacttctcccggacgaaatgaaaatgagtttcaatatgctttgaacgcgtatgaaaaacaggattttctgaaagcttgatggcgctcttattgtcacaataaatgggaatcagatagttgacagtagaaaccaactcttgaacaagtcttttaagccaaacacattcttgagtagccatagtcgctgctacgtattctgcctcacaacttgaaagtgcaacagtggtttgctttttactacaccaagaaattgcagctgaacctgtagtaaaacagaaccctgttgtagaacgtctgtcattcacgtcaccagcccaatcagcatcaacaaaatcacttaaagaaaatgctgcaccatgtttgtacattaatccacagcttaaagtccctttcacataccgtaggatcctctttgctgcaatcaaatgaccctcacatggtttttctataaattgcggaaacaccatagcaaaatggagctgctgagcgcaaactagcccatttaacatttgtgtgtctgtcatggatgcactcgaagagtctaccgagagaattatgggcagctgcatttcatacggcatgtcatgtcgtaaatcgattacctccatggcctaggataaaatcttctccattcgagttagtgtatcattgcaaacccaatgtgagttatttttgagtttttaggtctgtttgctatgttcatatcttaaaaaataatagaactaaacttgacccaaggccaagtagtgcatttttgttggctatgacactcacaggaagggatggaaatgtatggatttacagacaaagaaagttattgtgtctcgtgatttggtgtttgacgaattgtcatcttatatggctgattcaaataacaaaagtacaattgatcttgccatttttcgtgatgattcttcatcaagtgctgcgaagagtaatggttcttcttttgtagaaagcactcaagaaaattcaaaggttgtcataagaaagaaatcggtgagacagaagaaataacctgctcatctagccgattatgaggttaaaataaatcagctctttattttgtcttgtttctttatgggggactcatatgaaaatgaaccaaagtcatatgatgaagctaaaggaatttctgaatgggaagaggcaatgcaataagaaatttcaactttaaagaagaatggcacgtgggagcttgtaccgaaatcggtagatgctgagttagttagatctaaatgggtgtacaaattaaagaaaagggctgatggtgaaatagagagatacaaagctcaacttgtcgcttatgggttctctcaacaatatggcagagattatgatgagactttcaacctcgttgctaggatggtaacgtttcgaacaattgtctttttagcagctagtaaaggctggaaattatgtcaacttgatgtaaaaaatgccttcttgtatggagaattggatcgcaatatttttatagagcagccgcaaggttttatctctagcaagcatcctaatcatgtttgtcgtctcaagaaggcgttgtatggcctcaagcaagctccttgtgcttgatttggtaagattgctcaatatcttcacttctgtggttacaagtcttcaaatgctgatccaagtttgtttattaaaaaatcacccactatgtgcactttacttcttctttatgtggatgatatggttattacaggagataatgatgtcgaaagtaagtgtcttagagatgctttatctgttcgttttgaaatgaaaagcttgggtgaagtatcttgttttcttgggttagggatcgtaaaatcaggtggctattttgtctgtcaaagtagatatgcagtgagtctactcaaacatttttatatggaggagtcaaaagaaatgaatactcctatggaacctcttctaaagttggcaaagaataaaggaaagctgctggacgatgctacactttttcaacaaatggttggcagcttattctacttgattatttcaagacctgatatcgtatttgctgttggagtcacaagacctcacttttacgttccaagaaataaacccagctgaaccgagaaaaatcatccactataaccatcacatattgaaattcaatgtagctaggtgttctagttggccccaatagatcagcatgaagcaattgtaacactatcgatgctctattctctgacttcacaaaagaaagtcgatgagatttcccgtattgacaacctgagcaaacttcattataatgaacatctttaaaaacaggaacaccttcaagaagctgatgtgttaagattttctataaggactgatagccaatgtgacccaaacgagcatgccaaagtgttgagctaacattttgacccttctttgcaacatacgcatcacttgcagacaatacatacaaagactcatttcttttcccagtgaataaaacatcaactgaaatactatctgcatttgaaagaatttttacatcatttgaaccaaaaagtacatactttcctgaatcagtaatttgagaaaccgaagcgagattctttttcagccctggaacatgataaatgtccttgagaaatatgcctccatcatcaaaatcaccttctttaacattcccttcttttactactagatgtagagaattatcggctgtcgtaatgacctttctcccataatatgcgtgaacatcggataatagagcatcatttcctattgcatgatgagaataaccggaatcgacgatccactccttctcataatcaatgacaacatttgcttctgtaaacgcagcagcatggtgcacaggaaaaattatttgcagatcaaagacttcaatggaaaaacatttctcccaattcggttcagattcactacactgtaacacccccattacatgctaaccaatagacattagccagaaaacatacaagcatcgtagactatatactacatatagataggtcaatatgcatattgttaagaatcaagacacaaggttattaacatataaacatatgattatacttaaacatcatttaacaagtattcaaaacatcttcttatgccttacaaggcacacttctatatacatcacataactgcatacaaaatgcatcaggaggagactccacaaaactggcccaacctgacagagctgctaaaagctagacttcggatacaaccaacggatgcactactatttacaaacctgaaaagaaaaattttggagagtggtgagcctctagctcagtaaataaataatcaacataatctatatcacatacacttaatacaatttccacccaatcacataacttaccatgattcatagtttaggtataaattcataccattctactcaattcagtacaaccatcatagaagaaatacaattcaacaattatggttagttctcacggcttgtggatcccctttaatgtgctgctccgcctcatcatcacctatcgcacacgtaagctgctccgcctcatcctcacataatacacttttatagcctctctaggctttagcctcccaaggctttatatatagatatattttttttttcacagggaaatccaccattcacatgcacatatgcacttaacatcacaattcaatcatttcacttatatcatattcaagcaataacaattgtttcactcaacaccaatcatttccatctcattcattcaaacacaacacaatattaagcaaacacaaccattcgtagaacatttgattaaatatatggatatagcaaatattaactatttacttactcaaaatacacttattccttcagcatataagaacctcttttctccacaacttcctttccaggcctttgagtatctattaacacattcatcaattcacatttcatgcatattccaaatattcatgtaaatgctagttctaatgcattacaagatcatcccctttgtaattcataggtctaactcttcctctaagactctcaattactattttaatatcatataaatattttccatctagttatataccaatttaactcaaattaactgcataaaactaatctccaacatctctgttttctagacagaatttagtaccaaagtttatttattgctgggaaaaattggcccaataaaaaaatctcgtattaaatagacatatacgcttatgcgtctagtttcatctccaagaagaattactcaattccgacttctatagatttaattattctcaaattactgagcaagggtcatatagctagttgtacccgagtagcaatatgtttgctcaatttaagcaaccaaaacggtaaaaatagtaaaattacaaaactacaaagttatataggactcttcaaaattttcatagacaccaattaagcttaatttggacttatataacccatgttatgcccaaaatacagaacatcaaggttgctgaaattttgacagttttctatcttgacatacttaaacttaaattaagcttaatctctatgcaatcattcaatactctactaattcatgataatcagacctttaattaatcaatgaaagcatcaatagaagtttttctaatttgtaatcaagaaccctaatgacaaattaataatactcaagtaacaactcaccaatttcagcttttgagttgctaatatgcttaaatcctttagctttagcttagctccttcaatagttggtaaaatcctaccttaatcttaagtttttctaggtattccactcctctctcttgttccaaattttgagtttttggccatgtacgaattttagagaaatgaagaggtaaaatgagcttgctcatggttccaatttccaagattcatctctcaatgccaccacctacttaactagttttatcatcctaaattaattcttactaaccatatataggtactaacttttaattgtatcttttaagtccaatctatttacccaaccttcagctattggttcaattaagtcttaaggcttaatacacataactcaaatacttaatcaacttatctaaattaataatctaatatcatgtttcttattctcttacttataattaatatatatctgttcccataaaataaaaatattattaatataccatcatatgcctaatgattaaatgtaaatgcacataacatgtatgatgagaaaatgcaggcgttacatacactcatgtgcaacatttgcacctgtctcctgcaattttacactacattttgacttgatatggcctggttttccacatcgatcacaaattaacttcactcgacaatcacgcttgatatacccctgcttttcacaatgataacaagtgattgaagtcttcttaggctgttcatgactcttactccgagaggcataattcttcctcctttggtccttaaagaaaagaacttcctctttctgaaattttttgttgcttgcaatttgtttcactaaagcttcctgattataaagtaaattttctaactcagcaattgaagttgatttgcccaaccctgtatcgaagatataaatggcataaactcgctccttaaaccacgaatcaagtaatgacgcaagtgagaactgctcacaagttcctctggatccaaatctgaaatttcagaacacaaattcttaaccttcaaaaaatattcttcgattgaaaggttctcttgagttgtaacagccaattgatttttaagaaattacagtcgagctgtatccttcttgataaacagcttaccaagtgtctcctatacatcttttggtgaattcagatcatggacatgctcaatgcactctttgctaattgatgtcctcaaatcaaataaatctttcccacactttagcctccatttccttcgcaattcggcattttggggacttcataatattggttcggggacttctttataatgaatatctgttttgtatttggggtaacttcagttatgtagagtactgttgtgagccggttttacaacttcaccggttcaattgtgtgcctgctagtaagctatgtttcaagtgcgtttttataatttgtttttttgaattgatgcaagtttctctttttcattctcttacttattttttttaagaacattttatatattaaatcttaatttactgtattttaaatcatttttgtcgtaattaagacaagcattcaattagtgtgtagccttttaaagggtttttcactaaaacgattctcattaaagccttcaatatgaaaataaatagtaaaggtttcatattacaaccagatgatgaaataaggtacgccaatgtaatgttttaatgagtgtagaaaaggggttattggtaatgaccaatgaataagtaagattaattaacaaaaatttacgatccaatgtaaagtaattttacaaagtttgaagcttataatctatattttcaattttcagtagttttcttttgtttttatcattgttgttaggactaactttttaaattgctgttttcaaaaaagaaactttttaatttgccacttttatttcaatattttaggtggattgtcattatgttttaattaatcaactaataaagtcaatggcagcaaattccaataaagtcataagccggcagtgagaaagattgacagcgataaaaatgcatcataataagaattaagaaaataaaaattaaaaaataaaatatttaggatagagaaatcagaaaaatatagtggtgtcttaaaatggtcctattttatcaactgaaacaatgaaaacccataatattaatttttcttttacatattatccacaattgtttatgttctgtaattttgttatagaattataccaataataacaattataaactaataattttctcccgatgcatctctctctaattcaaaagatacagatcaataaaattcacactaaaaattagaaaataaagcaataatcataatatatcatcaaataaaaaccttttttttaactaaataatgatactgctgtattagattaatgggaaattaagcaaatgccttttacaaattctctatgcccaaaagggaataacaacagagattgaattgtctttgttaatttcttttttgggaggaacgtgaagagaatagtctaaaactatccctgcatctgccaaataaaaccgccaccattaaagaaaaaaaaaaaaaaaaaaaacaaagagtttaaagtaattccagtaccatagaattcaaacttcaaagaaggagctttagaatactgatacaagaaaataaaagaatacaagaagtcagtggatgattgaacctatttgttttagcttgtaaaatcttgttatgaatctaaaatatatttaaaaacttaaagaatcttaatgtatagatagcgtatatattctattctgttgagttttcacgagtaggaacaaattggtttcatattgtggaatctgtttaattatttaatggacaaacagatcatagttgtttgttgatatagacaattatctgttctttacaagttgtaataaatagaataattctatatattatgttattccatggttgtaataaatgcagaataaaataataagtgtgaggtaaaactggatgaacacaatatagctacctccgagataaattacttctgcacctttctttcgtttcccatatttggcagttgaagttgtaagctgttacgtaaaaaagaagaagaaaaaggcattagtttagatactatcttttgtaatatttaatttagaattgttgattgttcgttttggctgaaagctagcaaattggtagctttctacctctgcatttaaatggtgttcggttttggagggaagtcataagtcatcacccatcaccaacacgaagtcagctttaaaatttccaaaccctttctgcttcaaatgtcagcttgaattataagttgcagccaaagatacaaagtgaagcatggcagaggaaatacaggattatagtataaatatacagtatgtggcccaacaagcaactctcattcagaatgcccaagcagttccttcaaatcctcaatcaactgacagaaataacgataataatgttgctaaagactcggattcatcaatccacactttcaagaattctcaaacagtcccagcaacaccgaagtccattactcgaagaaatttgcaaaccagttctgttacgacttcaaatcctgatcggtcaggaaatggcaaccctgctacctgtaaaggcgaggtgggtggatctgaagatgcaaaggttaaaactgagggtaaagaaagcgaagaaaaaggtaggcaatggagactgctcgtgtttatcgtgtttatggaatcaactatatttgtgtgctcgctgtgtcttttgattgcgagcttgagagtggatagattgaataattctgtgttatgggatcttggaatttggaaatggtgtttgttaataatatctattctatgtggaagattgattgcttatctgttaacaaaagctctattattcttgatttggatgctttggcttgatgagagagttctttattttgcttatggagttaggaagagttttatggttgtcatttgggtaggtttagttactctggcttggggtttgttgtgtagccttggaattaagcgaagtgaggatacgaccaagattctccatgatgtaactagaggtctcggtggttgtttaattggagctactctatggctattcaaaactttgttcgttaagttagtaggttctttgcatgcccagaaattgtttgacaagattaaggaagcaatccgtcttcgaaaggcacttctagctctttcggtttcaatcatggcgataaataacactgataactccgacaaatacaaacaagacagtgttccgatccgtgtcaggaagtttattagatttctttcagttacggatattgaggacattgactctgacatacagaaggtgaaagggatttcatattggcatgagaaagtttgtcgggttctttccaagttggggatcaagaaggagactaattctgagaaacaagacgaggatatggtttcattcaagactatgatagagttgatcagggcgattaggggtaagaaactgcttcctctcacctatattcccaaggatcccaacaacaagaatattgcagatgatacgacaccgaagacggaacagaagataggtggtgatcggcaaggagcaaattcaattgccaagcaagacaacaatgatgatgcaggaaaaaggactgctgcagcagcgacaactgctcaggagatcactgatgaggctggagcaaagaccgctgccaatgatattttcagtgcactagcagggtctgaagatgccaggctagtatattgccatttcgatgttcgtgcaatttatttctgatacataatatgccttaagatcatcttaattttttctatttggtggtcaggtatgtggaattggaaaagctattagaatttgcgaaagatgataaagtgaaggagcagttccaaggtttagcagaagaaaaacagggagaaactgaaactgaaaatagcaaaatagaaaatatagaaaccgcaggatatgaacagattaatacagaacaaaataagagcgagacggaggataaacagaacaatactgaagggaaacatatcaagagatcagttctcaggaactgggtggttagttttattctatcaaatttgctttttgtccttctaagtttctcgtttacttggcaatttgtcaagtataaatattgcatattttatgtgttgcaggtagatatttacagggaccatgattcactgaataacactttagagcatagcaaaacagcaattgatgagttgaatgtgattgcttctgtgattgtgctagttgtaatcatcggtgtgtggttacttttcatggaatttttaacaacaaaactacttgtcttcctatcctctcaacttctattggtggttttcatgtttggtaacactgttaagactgtttttgaggctgtcattttcgtatttcttgtccacccatttgatgttggcgatcgttgcgttgtcgacggagtccaggcaagtccctaattttgcattacaaatatgcattgctatattaaccccccaaaaaaaaattgcgttttagcgaattcgtttccaaaacccatttttcatagcccaatgaatcaaaagtaattgtgatgctactagagacaagtaaaactctacggcgtctttctagaagtagccaatgtcgtgctgcatgaattccatcatagtataaaatgacactttgaagtttgatccattgcagatggttgttgaagagatgaatatattgactacaacttttttgagatatgatggtgaaaagatatattatccaaatacagttttagcattcaaacccattagtaacttttacagaagtcctccatcaatgggcgattctgtggaatttgctattaatctccgtactccaacaaaaactattgacaagctgaaagaggagataaagacgtacgtaatgtcaaattaactcttgttgccacctatttttggaaaaaagaaaaggaaaattccatgttatttgttgtggatgtgctgtatgtatatatataccttgtcaattttactgacaattatcgcaaaaatttcaggtacttgaaaagtaatcctaggcgttggaaagccgatcacagtgtgcaatttaaggaaattgaggatgtgaataagatgaaggtagctctctatgttactcatactataaacttccaaaatgctgcaaagcgggggaaaagacgatccgaccttgtgctgcagatgaagggaatttttgaagagcttgagatagagtaccatctcctgcctcaacaagttaacataataagctctggtggatccataacctcagcagtttcacttcctggaaagcaatcttatttctgagcttaagcttggatcacaaatgataaggaaaatcaaataacaatctcaattgtggaatgcagacttctgttcgatatggaagtttggaatcccgttgttggattagttgtgcaagaatggataaaatataatgtaaaattcaagatgtacagtaagatatcactttcaataattttatatcccatgtaacgattaatttttagaaacaataaataatttaagaaattatttatttatttgaaaaaaatttatttagtcttgctgtacatcacaattaataagaaagtgacacgaacatataaatattttatattttaatttaaaactaaatatctatcaattatttctcaatttagtgtataaatagagatccattaatattattttttttttttttttgtcctttcctcgataaaagagggattgaggatacacccaatgactgttacgatctaagcattcagccaagtgaatcgtgaaactgcattttcagagaaagaaactcgcttgattggcaactgaacgtgtggcccaattgcagtctctcccagcaaaatgaggaaatttatatatatatatatatatataaatgacaattttatacatgaaaatggcagatctctataaaaccatgtcatataattttttaaataaaaaatgatacatgacatatttataaaaatattaactataaatttttataaaaaaattaaatataattttaaatgctaatattgaatatggtatttttaatttatttaaatataaaattaattatataatataataattattatagctactacaaattaatagtgattttatttttttataatttatatatatataatatatttatatataaataaaaaattaataaaattgtaagagaatagaaattttttaatttggatcatgaaaataattttataaaattatgtgacatattgaagaatttattagtctaatgaaataaataaataaataaataaaattttcaatctatatatatatatatatatattattaaaagataataataataaaataaatagtagaatttttgataattttatttattaaaaataattattatttagatgtatgaaatttattataaataaaaaattaaagttaattttcatatttatttaccttaacatataaaatataaaaattctataagaataaattacataatttttataaaaattaatataaatataaataaaaaaattacaaaataaaataaaatatattttatactaatataattataaattagattaatataatataacatataaaattaaatttttagagagatagttattgttaaggacacaggaggattaaatgctgtggaggaaggctttaagtgcttggccgccgagtacgatggtaaataactagaaaataataaaggttgaatattaaagtaaataaaaattaattttaataaattttcaattcaaaagtgctaattccatccaattgtaatcatgatcatatgttaaaatatcaattcttccattcaagtatttagtctatttactcgaaaaagccgcaacaagtgtaattctcttaatataattgactcaaacccaacatccaaatcaaacttaccattagtcaactgggcaccatagcgttccatatcaacttaatgatagcattaagaataatgagaatgactaaaccaatattaattaatcaagatagctgcaattgaattaaccttgttcttttatttccctatagcctatcatgcaagctatataattcgaataagccgcaatcacacacacatgagccatctctttgctatttgtgtcaatcattcatgacaattacggatcacaaactcaaagtttagcaatagaaaaatcaatatcaaagttgagtcgtcagttcaattaatatcaataattcataaataataaaaacaagaaataaagaatacttgaattaaaaaaaaaaaaaattgttaagcacaaaacctcacaaaatcacaattagaatttattcactcttgaattagaaactaaaaacttagccaccatgaattgtagagaatagaaaaagaataagaatatgaataatgaaaatacttccaggcatccttatataggaaataaaaccctaaaccctaataaaagaatccttataaaaaagaaataagcttcctatttaattttatccatataagtaatgataagataaagagtgatataaataaattaaaattctaaatacatgggagaaagttctcttaatccaacactttcaaaaataaaagaaattaactaaagatgagtctactacaaattaatctctaaaaattttaaaactctctttcgcatcttttaacagtttataggacgccaggcatggtcacgacttgttgacagtagtcttatgtatagatttttacagagctcatgggctgtgaggcgtggttacattttatcgacattgatcttctgtgcagatttctgcatcttctccgaaagacttgatttttgacgagtaataacttaaacatgtttttagtctgaattttactcaatccttgatatttcattatctaaatcaaaataaataaaatttctataattaaatatattattcaattaaattgtaagcaaattaacggccataattatttattacctatcaatataatataatatataaaattaattttttagagagatagttattgttattgaatgcagtagctggaaaatggtgtgaatgaggttaaaaagtgggtgtaaaacaggtttcgctgtagtccacgaagcccttctggccaaggctttaatggttgcactctacgaagcctgacaacctgctgcgacagtgttttccaaacagacttgtcactttcccctttcattttattttcttctatttcctattataatgggagaagctgcaatgtaaatgtgcatctttttacttgaatctcaatgattatgaattagataatggctgagttatacgtccaataaacacttcatatatctaattagggtattttaattatcaaacacaaacttactcagtctatatgtaaattgatagtttggactatgggaatattttaacttttaatttaattttttttatttttttttgtttactttttaaataaaatacgttagtagaatattaatcctttcttattttctattttaatattggttttgttctttgtattaataaaacatttattgtttactattttaatttttaaaacatatgtgtcaaatttaattaattaaactgtgatcaacaaatcatcaattacatacacatacataaactatagataataaaatttaatattgatcattaaattttaaatatctaaaactatcatatgccacaattgttaaggaagtttagtaataaatatatgtattaagtatagtaataaaatctttaataaaataaacaaaactatcataccataattgttaaggatatttagtcataaatatatgtatcaattatagtaataaaatctctaataaaataaatgataaacgagtgctttaattaataggtgtggctttccttagtccaatttttaaatgcatttaaatttcttactttctatctctaatggataaaaaataaaaactaatatatatatgactttatgtaccaggaatcataccctaaaaatctttatattttaatctaataacatctcattaagctgcatgagtcattaaatagtatctattcatttaagtttatagattctatataaataaattactttaaataagctcaccaataagataatcaataatataattattattaaatacatacaccctaacacattcttacaattcatgaaaatcataaaaaaaaaaagtgatatttctagtatgttaagcttattctaaaaaatatatactttaaatttgaaaaataaaaaaatattaattaaaaataaaaataatcccaaatatttaagaaatgtctcgaggcttttgagtctaaatttaaaatgcttctgtctttaaaaagaactccttttaccacagcttttatactttggtgattgaacattgatttatagatttaatattatttgttataattgaatagtaattgatactgatatctatatgaatacaagatccttacgtctccatcttatatgttttagaaatgttttttaaaaactttgattaccaaaaaatattatgtactttttagttaacaaatctagtacatagtttattagttttaatattgactttattttaatatctaatgtatcaaaattattgcagtatgaatttaggggataaaaaaagaataaaagattatatttaaacactaaaacgaataaaatttttaaattaaaaaatttaaaaattaaatttatatacttagatggtaatattttagtaagagaatgaattgataactcaactcttttttattatcgtaagagtttacaatagattaataaatttagttgattattttaataaagactaaaattaatattattaaatattaaaattaaaaatttaaaaattatatgctatatatattaataggtgtgaaatacatttttttttttttttaacaattaagatctttaattatatcaattttcgcattttcgtggcccaacgtttttgtttggatacataggttgtaataattggaaaatggtatgaacgggattttcttttttcttctgccaaaaggtaattcgtataaatgggatttgattattgggtgaaaatgaaggtctagaagtggtggggtacggcggatcttatgcttgttctcttccctgtaacgcgttagggtgggaaagcacattagaacgaaatgggtagagaaaattattttcggagcaaaaaattatcatttatatatatttggggtttatatattattaattgatatttaaggaaattgtaaaaatgagttttgatcaacatttcttaaaaagaaattatattttttaaatatgaaaatatatttatattaattttataaaaattgagatgagactgcataaaaaaaagtatatctaattattgctctgtttaatagattttttttttattttttttgaaaatgctccgttttaggttctatagattgtggagaagtttttcatggaattcaggctctatggggtggatgaatgaacacttcaattgaaaatataaaagaaggagcgaagacagttgaggttttcacatcaatcggacgagtttgtcataaaaatggaagtctcgtcaattagatgagtaatattagacaagtcctttcaccatatttccaggagactatttatttttgttgaacttaaatataaaataaataattaaaaacttgttcaacttaaataaatattttgactttatatttaaatatttatgctgtttgttaaaaacaaaagaaaacaaaactaactagcagcaaggaagttgctggagattcttaacagtttttgtctttttagttattttttttaaatttccatgtaagaatctgttattattaatattgctgtcattagactatgctaacttaaattcctagtttagttattttattaattaaaactggtgattgtgggggagaaatagacaagtgctgacttcatctctgtgcaattactcattagccgtgacttgggtcttagttatgttttcctaaaataaatatgattatcatgttgtcttagaatttttttatagatataaaattattacatgtgggaaggaaggatctgaaacttaaaatctcaacccagcgatttaagcgcttggccgccgagtacgatggtaaaacatataaaccctttctagcatatatacacactgaaacatttattcactccctgtcatcattttctaatccattgctattatttcattttcagcttctattctttctctggattacaatttcttgatcagtatgaactctctttgaacaaaaatttcgtaaacctcttctgtgtttcgattatttgcatctgtttgaacttcgaataatgtgttgaagtgaagtagtgaagcatggcagaattgattgcaaaagatttcagcataaatatgcaatatgtcacccaacaagcagttcacgtacagaatccgcagtcagattcttcagttcctcaatcaacagtgtcagaccagaacgatcgtagagacacggatccgtcattcccagattctgcaactcgaagagaatcccagtcgacgtcaactccggatgaagctccgagttcaggaaatagaaagacaaaaaccccagaagcaaagttgagcgaatctcctagaaaaaaagctgagaatggcgaacaagaaagcgaagaaaaaggtaaaggttggggactgttcatgttcattatctttcttgagtcaactgtatttgtgtgcgttatgggtcttctaatttccagcttcgcggtggataaattgcatgattcagtgttatgggatcttggaatttggaaatggtgtttgttaatactggctattctgtgtggaagattgattgcttatctgttaacagaggctatgctattcttgatttggatgttctggctcgatgagaaagttctttactttgcttatggagtgaaaaagagtgttatgttttttatttggcttagtttggttactctggcttggggcttgttgtctactgttggagttaagcgaagcaaagatacaaccaagattctacatgatgtaaccaaaggtctcggtggttgtcttattggagctgctttatggcttctgaaaactctgttagttaaattagtaggttctttacatgctaccaaactgtttgaaaagactcaagaagcgatccgtcttcggaaggatcttcttgctctttccatttcaaacatggcaattcagaacagtgctgacaggaagaaggtagagaatgtttccatccgtcttaggaatcttgttagagctatttctattgcagatataaatgacattgactccgagaaacaaaaggtaaacaagattgcaatttgtcaacagaaagctaataaagttctttccaagttggggataaggaaaactgaagggaatgtggatatagtttctaccaagactatgatagagttgattaatgcaattcggggtaagagattgcttcctctcacttatatccccaccaaaaataaagacgaaatgataaaaggcgaggctagaacaagtttatattctgttgcgaatcaaaagaacatccatgatacaaaaaacaagatagctgcagcagtgacagctgctgaagagatcactgacgaggccagagcaaagatggctgctaatgatattttcagtacactagcagggtctgaagatgcagggttagtatatcgccctattcaaggtttggtgcaatttaatctctgatctcaatatgttctaagatcgtcttacttcttcttttctttttctttttttctttttttgaatttgatgcccaggtatgtggacttagaaaaactattagaatttgtgaaagatgagaaagtgaaggatcagttccaaggtttagcagaagatcaacagaggaaaactgagactgaaaagagcaatgcagaagataaagaaactgcaggacatgtacagatcaatacagaacaaaaacagagcgagacacagagcaatacagaagggaaatatatcaagaaatcagttttcaggaactgggtggttagtttattttatcaatttggttttatccttgaaatctctatcatttggcaacttgtgaatataaagataccaatatttcatgtttgcaggtagatatctacagggaccatgattcactgaataacaccttaaagcatagcaaaacagcaattgatgagttgaatgtgattgcttctgtgattgtgctagttgtaatcatcgtcatgtggttacttttcatggaatttttaaacacaaaaatacttctcttcttatcctctcaactacttttggtggttttcatgtttggaaacactgtcaagactgtttttgaggctgtcatcttcgtgtttgtggtacacccatttgatgttggtgatcgctgcgtcgtccagggagtacaggcaagtttacgttcagacaaatatgtttggttctgttatgatataattagcaccaaagaacttcgacgtagtggagtctaaaaaattgtatgacacaagtaaagttatattccttcatgtgtatcttactgacaatttaattcatcacag

SEQ ID NO: 6573 - DNA, 3532 bp, Ricinus communis
  Intron number 4 from transcript 28470.m000437 (locus 28470 .t000016) derived from phytozome v7.0 (chr-ID 28470; pos 1 30107 to 133638)
ggttagtgtttgatttatcacattttatcaacatagcaaagtatgccatcaaaaaatctttttcccctctctccgttggagaattgaaaagaataagaaaagctcaaacctcgtctttgcgtttgaaatgctaaccatggtcatgagctctagagtgaaagaagatagttctatgagactatgtcccctagattatggaggttagaagatcgaatgatgtagaaattggtttgccgttatagaataagctatgctcgtcaagatgtttatttctttctttcttttctttcattttcttcagaggcactaaaagccttttccttgtggaatttatcatattgcacttgacttatcttccttccacttttttgattctactctttttgttgttaatgagagggaaaaaggttacttggaattctagaaaccaattctcatataggatggatagaagcatcttctttaaatatttgaaattgactaataagtttgatcttctaaatcaatttgttcaattattttacaatatttattttcactgttaggcaatcctcctatgagcaggtgcattgatggtcctttttataaaatggatcgaattgtcctctcttcttgagaagatctttcattatataggcaagattgccatctatataaggaaattagagctgtacatgttaattacataaagtgatcctagaaagctatgtatggtaagctaaatcttctctcctatttataagaatatgagtgaccctaggaagctatgtatggtaagctaatcctcccctatttataaaaatatttatagcctaaattaatggtttaattacataagtaatttagttgttgaccccatttatggctttctattgacatcccccctcaaattgatgcgagttatctacaagcatcaatttgttggcaagaaagttatgtctatgctatgtgagagccttggtgaaaatatctgcgacttgaagattgctcgacacatggggctgagcctcaaaggcctcacggatgaagtggcaatcaacctcgatatgtttagtgcgctcatggaagataggattggcagaattgtgaatcgcactagtattatcagcaagaagagaagtaggattgtgttaagcaaaatcaagctcagctaatggaaaaaaatcgcactagtattatctgcatgaagagaagtgggactgtgttgagcaaaaccaagctcagccaatagattgcaaagccactgtatctcagcacaagcttgggacatagctctatattcggactcagtagaagactaagaacacgatcctgttcttgcttttttaggaaataatggctggatcaagaaacatacaccatcccgtagtagaacgcctagtgtcactacacccaacataatcaacattgctataagccataagatcaagtgaggtagcagtaggatagaaaaggccttgggaatttgtgccatgaacatagcgaattattctttgaactgcagccatatgtaggtgcctaggagatgccatgaactaactaacttgttgaaccgcataagagatatcaggtctagtgatggtaagatagaccaggctgccaactagagtacgataggatgtagggtttgataacaagtcacccttgtctttgcgcagcttgaaattaacttccataggagtagcaagaggagtagagtcttgaagaccagcatccatcaccaagtcctgagcatacttatgttgagacaaaaaaataccatgcaaaccagcagcatgaagcagcagaagaaacagcagcatggcatgagttgtagcagcagaagaaacagcagcatgaagccttcttggagcgtggaggacgaataagacactctttaatgatgtgccctaatcgcttgcagtagtacaaaacttgtcaagatagttaggaccaatatggccatattttttacagctatagcattgggtggtactcatgtcgcgaccctttcccttaccttgggcagcataggaaactgagatagtattagaggctatacgagcttgctccatactattctgagtattgatatgttgttcctcacgcaagaattctccaaaacaaatctccaaagatggaacaggatctctattcactagagaggcacgaatagattcaaaatcaggctgcaactttattagaaactgatctctttgattggttttgtgtacttgttgtactgccaccaatccttctgcagggactttggctgtaacaggatctgaataatcatttcacaaagtcagaaaaccagagcagtattcttgaattgatagatcccctcgagaatagtaagcaatggctaacccaagctggaaacgtctagcattattatcttggttgtagataatcccacatgacctttgcagacctatgcagacgtaaagaaaaaatcaaatgtggctccatagaaacaagaatctaggtcatgatttgattatttttggcagcctaagctgctttttctgctacagtagatccttctttggtgctgccatctatatggccccataactccttacctttgagaaatgtctccaattgaaactcccacgtagtataatttttccttgtgaacttcacagagacatgatctgatttctccataatcactaaggttgtgactgagaaagctaagatttcttaggtgtaggctctgctaccataataaaatggatcgaattgtcctctcttcttgagaagatctttcaagactgccatctatacaaggaaactagagctgtacatgttaattacaagagtgatcctaggaagtatgtatggtaagctaaatctcctcccctatttataagaatatgagtcatcctaggaagctatgtatggtaagctaaatctcctcccttatctataagaatatttacagcttaaattaatggcttaattatagaagtagtttagttgttgatcccatttatggcttttcatttacacctttgatatatatatatatatggaattgtagctcattaatatgaatcaggttgaagcctagctgttgggttcattgtctaaagtaaaagctctttttgaaaaaaagaaaagaaaacttgatttttcatggtaggtatccgggagagatatgttagtaattgcggggccaatgatttctttttcaaattagatattgtcattatgtttagttaaattgcacataagctgctgatggttctataaatttttacttttagttttagtccctatgttatagataattttcattctctctttacttcagtcttaaacttgaaataaggtaatttgaaaagaagcagaagaagtaataatagtaatagttactaattttattccttattgttaggttgactgtcactcgtatcttttcttgcattttaacttcctcccaaataagttcaaagttctggtttcaccttgctaggtatcttgttcctgtctaatataaattgctctaacagattggacatatctgaagataaatttttattgtact

SEQ ID NO: 6574 - DNA, 3156 bp, Ricinus communis
  Intron number 1 from transcript 30147.m014058 (locus 30147 .t000329) derived from phytozome v7.0 (chr-ID 30147; pos 4 267664 to 4270819)
cttctgggtaagttttttttccttctttctttttcttttttggaaattgagaggttttgtgtgagtatttcttggtgtaatatttacatttatttgttgcttcatgtttgggtcgttgtgaatgctgattgttctaaatttttatggatatagaagcactaaatattctcattagggttatattggatggcgcaatgtccttattcaagctgagactggattaccagttggtcaaatagtttattaggaaatccttgggttagaatttagaaaaagttttatagcctactgagttcgcacctttcaattggatatgctcaaggaaaatgtgttctgttactagtcaaaacaactgtgtaaagtttcacttgatgaacattttggtgtgaactggtactgtattaaggctcttgggattttcagtggagctttatttggtgagtggtctttgagaactatgaaagagaagagtattattggagaatggtgacagcaaatttgagagagatcacaatggctgggttttagatccaatagacattattgttgtgtgggggtcatggaagcatattaggggagcactaaaaggggatcctttggtcaaaagctgttctcatgccatgtcaatggtaatgaagtggtgctatggtatttatagaagaaaaccttaagattgggagatgaaaatatatttgaacttttgagtttccctgtatgattccacaatatgtttgtccctagaggatgacattgtgtaggagttttcatataaacatgagcaaacagcttttggagaataaggatggacatggaaaggatttatttgccttgttatgcaattcggatgattaaagcccttccagaatgtttcattatttgggaaagcctatggggattcctggaaatctgatgaaaagaagaagaatttgggtaaacatatggtctatctgtaaataaacaaattaacaatacacacacacacacacaatagagaccatttaattacatttttaaaatttttagttagtgcaaactctttgaagttttccggatgtaattcgcaagattacaatttcttaagcagagaattcagatgctggaggttaatgctggtgaatttgacattgtagaataacgcataaaggccatgttatattctttgcctattttggataacttagagaagaaacttaaactcttctggaaatcacacctggagaagtgtaaagagaagtggctattatactttcacatggatttggctaattgaaaagctccttttagtttgttgtcacattgtaaaatttttcaatcatctctttcttttggggataatactcttctgcaaattcataatctgcatgagagctccttcagttgatgcctttgttataactgttactgttatttaaagggaaaaaggtaccgtgtttaagtcatttgtccagaacatgatacatctatcacaattgagtgccattcaaaatgctatactctatgggagatgctttgcagttttggaatttatgttttcttgacattgtaaattttgttgatgtaacatactagttgattcactctcttccattattttgacatttgttctttttctttaaaaccacagcacttccatttggtgtggtttttggcaatcaatgaacagtaataaatggcaaccctgcaatactgatgtgcattttgcttttatgtaaagacacttagagattgtcatcctgtttatgtggtttctttcagagtgtttttattgttaaaaaacgctacgaagtttgtgtaggtaattgatctaatgccagggtcaacgtgtttcttgtaatatggagagcagagctctttttgtgaaggagtgaacatgacgaaaattaaagttttgaaggtttttatcgccctagttaaaggtctctcttctctggattggatcaaactaggagaaatgcaatattatgaaggtagataaagatgtgagagaagttctggattttagagaaataatgttccttctaattcttctggttcatctatatcaagtattaactgacattcaaaaatgtctcaaagcatccttaccactgactgtggtcaagtattttgctgccatatttttgttgctgatatttatataggtaatgttaatgagtgtgattttgctacttatgtattctttggcctttaggctactatgacatggaacagtctagagatgttgcaaacatgaacaagatggaagttttctacctatactatagattcaagcagcacgatctactaaagaatgaagactaattggccctgtaacatgaacaaaatgaagggggaattttgttggatagacagattctctgtgcttaaggttataggccccttttacttctttcatgacaggatttgtggggttgccagaaagctaaaacaatctagttgcttctttttttttcccttctctctctctctctctattttctatttaccccctagtttggttgctagtgcagctaatattactgttcaaacaaaatgtgttattctatactggtaactttgtttcttttcaagtcaatcatatcttacaacttaaaggattttccgcatggttgttgcctgctttctgaacaacaaatggaagaacatgaatatgaaggcgaaatagaaagccttcaaggtttttgaaggaaatgatgtagcaatatatgataataaacgccttttaagtagtgaaccatttttactacaaaataaatgaataagcaaatgctctctttctccagtacaataataaactaaaagaaaaacggagatgaaatctgtttctgacctgtgagatcattaggcatctttaatcagaagttttctcttccccaattcatagtattggaagtgagattttgtgggcagaatccaaaagttttctagatcaaaacaagtactgcaatgaagatatcataaatttatgttactgtgaatatgagatagaatgaggaatgggttattctgttttcatgtgtatctaatcattttgtgaagtctgcattgatggagattggataaatttatttgtctctctgccttttaacattgatttggtatgtgaacatttttcttgcagtaaggttcgaactcttgaagaaatactgacaattg

SEQ ID NO: 6575 - DNA, 4829 bp, Ricinus communis
  Intron number 1 from transcript 30190.m011172 (locus 30190 .t000408) derived from phytozome v7.0 (chr-ID 30190; pos 2 341289 to 2346117 reverse strand)
gagttctaaacaagtcaccagtcaaaactattcgggtaacaatttcttttttttttttttttttatcttgcactgagactcacgtacacttaaattacaaatgactataaggatatacttataaattatagaacacaatggcaattttgttatatatcagacgaagtaatggagatacagataattgtgtggatttctacaagcaacctgctttttgatcatccttccctgaagaaccatactttcgattttcaggttggttaatttccattgccttttactacttcataatttcctttccatgccaagtacatagcacattaattatattggtacgttatatacgtacaatatggattttaaattttttttttttaatgcagttgaatcctcattctatcctaaggggaagaagaagattgaagaggcaatgaaagcaagtaatatctggctaaatggtaaaggatgccctgatggcacagttccaataagaaaattcaccaaagacgaatttaaaagaaccaaattagccacagaagtttatgcttcaaaatttggtctcctaacagctcaggatcctggtgtccacgtgaattgtctatgtaagtatgtatacaacccaatgttggaagtaaaatgtaaatgatttatctacactagctatgtactgtcttcttctttactagtttatagagggataacactgtatatataagggaaaatgatcccagataccccaacctttaaacattttcgcgaatctaccctcacatttaaaacgtattaatttggtccaccatgtttgcatattgtatcattcctacccacccgtgttttggcgtgtgccagtaatgatatggcgtccacacgtggctccacatatttgtctacgtggctgagcataatgaaggacctcaaaactcattgtttcgtcctaacatttccccaattcttttcccccaattttttccccggcgaaatccccaattcagtattctagggcttccaatttcaatctcgtttcgtccacacatatagtctaagttcgctcatttcaccgaattcgctctattatctggacaatcaggtataagttttttgttagagctgtcatatcacaaattaagtagtatgttcattcttgaattttctacttgtaacagagaagcagaaggagaagtagatgcccaccagctcttacaagtaatgttaccaatattgatgtaccaaatcagactacaattgaaaatgtagaagctggtccttcataatccaaaccaccatatgataagagaataattgccaaaaaaagaattcaggtattattcataacttagttctgtgtgaattatacttagcaatcctatgagttatgtgttgttgtactgcaggctagaaaaggatatggcttgcacatatccaccaaagactggtaatatgtatttaagagtacgtactcaacatgtcagatgtgaatctctaattttatgtgttttcatatatttcatgttctaaatataaaatgtcataatgcaaatgtcaggagaaaggaatgtgaggactgttagtggttatacataaacaactacagcagcaaggcaatccagaaagaggtctgacacccaaagatcaactacaactacaaaggaacaaagatcaactacagctactcatgtacaaagtgtgaaagtttgtagccaaacttcaacagctacaaaggcaaaagagaaggtggtagctagttccaaaggcaaagagaaggtggtagctagttcgaaaggcaaacagaagttggtacctataaagacaaagactagtaacaatgtagaattggtgattcaagaagagcgacatgttttgccaaagccaatacagaagtttaaaaagttgccttagagaagttgcagtactgtgtttttgttatagcttataaaattgcatggaacaaaactgtcatttgaaccatatcaattagtttgccttcatatgtattgttttatgtatttgtcttttctcagacatatgtttaatgtacctcatgatttttgtaaggattattacagtaatgttaaaaggctgtttaatgcctattttatctatccaaatgtgaatttgtcatattaactataggttcattttacttcatcaaagccaaaagaaatacatgcaaaatatcttaacagaaaaataagagcttcattgcataatcaattataaaagttggtaatacaattcaccattgattataagattcaacccacccatctactacaaaaccaaatcctacaccttgctacatcaaccataaagcctgtctggcaatgcaactcttgtctggtaaaaataagcacaaactgatcatcaaacattaaactttccttcatcaaacttctctgtcatgacttttccagcttcacaatcattcattacaatgttcaaccataccacagaaaccgaacttgaaaagcatcaaatgttccttcacattttgtacaatcgtcaatgtaagagcacaactccaccccaattgccaaacttcttctcatttacccaatcgtcatgacaactaaacaaaacatagctccagccctacatgaccaaattgaaatgaaatcatcatacattgttcaatatttcaaaataaaacaactgaaccctaacattgctaacaaagcttaccccaatgtaagagcaacctcgtcacagacacccagaatttttcattctccttcatatcatcagcttcgctggtctctcaaattcataaaatgctacttcactcccacataaatattatcaattgttgacaatagaagatcttgacgatgcctcttctatttagacttgccatgagagaaacaagaaaaccctaggttttaaaggaaaaatagaaattagaaaccctagaatattgaattggggatttcgccgaggaaaaaattgggggaaaagaattgggaaaatgttaggacgaaacggtgagttttgaggtccttcattatgctcagccacgtagacgaacatgtggacgccgtgtcattactggcacacgccaaaatacaggtaggtatgaatgatacaaaacgcaaacatagtggaccaaattgatacgttttaaaggtgagagtagattcgcgaaaatagttaaaggttagggtatctgggttcgttttcccaacaattaataaataggtttaatcttttatctaatttagaaattcaaccaaaaaaagtttgatggtattattgctattattaaagccttgattagcactttctttgaccaatatctcatttttaaaaaattcttatctaggcttaatgtatacaccacagctaataaaagactaacacgtacgtatgagtattttatattttggtattggatgattggaacatatttcatcatttaaaactaataaatatgtgtcgttcatttattaatatgtgaataggtaaagacatacactaatactaatttttctttttttctctatctgcaatcgatgaatcttattcattgaatgcaatcatttggtctaattgtaagctattagacaaatctcgaaggaaattttagaagaccctttgtcatattaaaagccacctcactttttttccttccaacatgattttctagctcaataaaagcaaatgctagaaagtcaagcattctgattccaggactctggcaagatctattgcatttcatatataactcaaggtttgaacacaaaaccaacttggtttgttaaaagaatcaatgacaagttcctaacaaataacaatggaagagataagaaccattggaacgacgaaataaagaagatataagaggcatcccattcactttctttatactaattactatgttaaaaaacttaataggctataatttgtatttaaggacagctgaatagtattatatattcatttgtaatggattacctttatttcacgagcttattaatgacatattaaagatattcaaatattgttaactgaaattgttactaacagattatttctaattgaaactaatttgaaagtctttgagcgcgtgacctttttcaccttaaaattagatagaatttgagaactctcgaatttattgctagagtttgataaccattaagatattatgattcatgcagtctttactttatatgttattacctaattttgacccatttctttttgtatatatgtataaatcggattctcatccatataaaatccacatctattctcataattcatcccaaactaatctttttgtatctcttcaatattctacctaagagacccagaggccggagacttggtgagataattaatcatatctcttggtattgttacataattgccattaattaatttctcctgccattcttgtgcagacaactttcttccccagatattcatatctttttgtttcctatttttttaacaacatacgtttagaatatatttgaagtttacatatatatatatatgttaaattcttatcgctgcaaaatcttttaacaaagctacaatggcttatatatagcatccatggctccacggactgcgctagtacttctttctgtgtgttgtttatctttgatacatattggagctgaaggcaggaaattatctgaagaagaacatcaagaattggagaagcaatttaaaatttataacaagtcaggagttaaaaccattctggtaaatcaaaaatgactttttccttaatgacataattgcaaattaaattctggtacaacatattgacattttatgatatatacatgtatataaattatggtgttatcaacagacaaaat

SEQ ID NO: 6576 - DNA, 1852 bp, Ricinus communis
  Intron number 11 from transcript 30146.m003591 (locus 3014 6.t000168) derived from phytozome v7.0 (chr-ID 30146; pos 1194453 to 1196304)
tgaaccaaaagtaagattgctgctacacatttatttgtgttagcatattcttcttaattttagtaatcccttgattataagtgttactatttttagtatgattagttggtttacataccataattagaataattaatgggaatagagtagctagtggtattagaattaacttaattacagatattactttagcttgattatgggttgtaattgggtataatttttctgtttcctttgctaatacatgataaataaataattgtcaagttctctgccaaaaaattacaattagaataatatacaaaatcttttatctgggttatttatgttcttctgacatggtactagacctttatttctctgttttaagcacttaaaactcctgaatgttttcaaaccatagtcctgtattttttcaaaaacttcataattgtcccagaacaaaacgtttgtaaaaccaagcttccactccacatcacttcttccccgaagtgggctgctgaactcagttttcttgaagctcttcagatttcctcttctgacaatcaatcctccagtcaaatgcatccaccattcccaaatacaaatcattgtcctatgacatgtctatcagtacatgcaaatactatgatatctattgatcatccagaagaaaatcttactcaagatgggggtcagagatacctgtagggttcctccaaaataggcttcccaacacggcatttctaaacttcttagatttccagctttgggaactagtttccgacctaatttgagctcattttctacgttgtaccctcgtctaaactgcccatcacttgtactggtcccatcaatgacttgcccttctgccacgtcatcgtggtcgcaccactgccacattatcaatccaaatcctcctatgtttagtgcttcaggtgtacagtatgttctctaatgccagtcatatcttagcacgtgtccgcttcagtttggttgaattaaacctattaacaaagttttgatcgaccggttcaactacttttagatttaacttttcatattcaggaccgattctgaaggtgtttgaaccttttgaatatatatctaaagtcgatttccacaaattaagcttttctgagaaaaatcttctttttcttttatatatatatatatatattatctgcctgcttgatgtcggttttctggttgagtatcaatctctctccaacaactttcctcatcaccgagtttgtattgagaccttgagtttgagagaaggtgttagtataattggatatagctgagttatagatactacgttagcaagattcgataatacaaaacgtatctgtgtgttccggtaacaaaatatgttctgtcaatcttgttaaaccccctaattagcgttacctatcttgatttgtttgggtttctgttttgatggtgattttcttttgagtctttggaggctgctctttgtagtattcgatgtgctgcttgcggtgtctttgtgtttccttggttcttctgctgtatgtttgtagtttctggctcttatttttctgctttcacttttcttgtctagaagctcgagttccttctgctcaagctgttgtctttttgtttcaattttatggagagattttttcatcaagttaataaaaataaaatatgaatgataatactctttacagaaaagatgccgtgtacatgctcacattcaagagacataattctttctttgttaatctctttctcctattatttctgcaaccttattctgttttgtttttcatttgatgttgaccatgtataatgatatcaattatttacaagtgagtcatttcttttcagcttggagattttgcaa

SEQ ID NO: 6577 - DNA, 570 bp, Ricinus communis
  Intron number 5 from transcript 29844.m003301 (locus 29844 .t000147) derived from phytozome v7.0 (chr-ID 29844; pos 8 65150 to 865719)
caagtaagtgttttttttcccttttctgacaatatcaccggtttgaaaactcaatgcatgtagaaataggagtgtacttttaagtcattttccgagctctctgcattgcacgctggtaaagcggcagctagctagcaggcatgaaacctaataaatgaggagaccagtgtcggagaaccggcagggatctgagatattctgggacaatgtccggagtgcccctttaagtgtcgcattcattgaaattattattggttggttagtagttctttttcttggggggtaagggtattctcgggaattgaacctcattatcccgatttaatagtatttcttcacagtttattctctcctagaattggtcaatttgatcctcacccagaagtacccttttttctgctttatcacagcaaatcagtattaatcctctggctttcagtctttaattagaaattaacaattaataaattttgaattagatctttaatgggtccgatgagttgttaaatgggtgttaatttttcgtttaactatgaaaatgcaggctttttcagatcagcatcggctttt

SEQ ID NO: 6578 - DNA, 1735 bp, Ricinus communis
  Intron number 1 from transcript 30099.m001684 (locus 30099 .t000063) derived from phytozome v7.0 (chr-ID 30099; pos 3 06489 to 308223)
ggtcactagatattgtctctctttggtaagatgtagatatggatggtcaatttcttatgtgaagttttgttttggaaactgtacaatactcatgtgcatgctatattttttatggtctcattgcatttttgtggtagagttggttttacaacttaaagcataagaacactctgataactctttgaaactcttttattgcatatccttatttgttaagcatttattagtgtttatgcattttttatgaaatatatgtacttcttttgtgtttctaatcaatctttatagctaatagcattctcattctcataagtctagataacttttttttttaagcattcaccttgtgattagccattttatagtatttatgcattcattgactggctgtactttttctatatcaggtgtgcattgatagaattacatagaatttgttttaatgatgactcgaagctcttttttcgaaggattttaacgcttatattcttttgaaattgttgtctttatgttttcctactaattttgcagatccctataggtgcatgcatcagtcttttatatattggcctgccgattcttctgaagtttatggagcttatgcaaaagaagtctttcaaaatatgaacaaatgctgcttttggttactagaaagagactcttaaaatgtatttctgctttctctacttagctttatcagtgttttctttcatttcaaaatattgtatttggagtttcagtacttagtttaaaagctactgtattttaagtttcagtacttagtttaaaagctttggaactatttgactaccgtcacgaatcgtgtttgccttgtgcagtgagtgagatataacaaaattgctttatctacttccactcatgcaatgttcttcgatttcttacattttaaaatgtccatggtagttaatttggttgtttatagtggaaattttatgaccactgttttctatgcattcacaacttattttactagttttgcaaatcgctctacaagctataaactggaattacattgtactcagaagttacctagtggttctccataatgcatgtttgatctattttgtcctgcatggatctctgttgtcagcaaacacctagagctcagattgcttataaaattttgctgctagtggttttgatgcaggttgagcaataattcttgttactgacttgcagaaacagcatgcggttgggcaagaatgattaactgttcagatttttttgaaaattattttagaattctctttgtatcttgcagctttttatctccctgggatttggttattttaaaagcactgtcttttgcgaattcagattgctttaggctgtgatatatgtgtatgcttttatgtactatgtctggaaatgattttgaattggtgttggtcttcaaatgtttgtaagacagacttgtctttttagaactcgtaaaaacttttttgattttcttaaactgagtttgccagttcaaactcttcagttgattcatattgtggaagattcacttggggagaaaattaagaattgacttgatgtcataccataagaaattcttaagctcataaatttgactctcgttatgcaagcttatgtttgcttaaagcttttggttttcatatattaaactagcaattctatagaagctaattgattgtcacagttaatttgtgacacagaacaaggtgattgcattggagttaaaggtgagatt

SEQ ID NO: 6579 - DNA, 1820 bp, Ricinus communis
  Intron number 1 from transcript 29996.m000133 (locus 29996 .t000004) derived from phytozome v7.0 (chr-ID 29996; pos 3 0205 to 32024 reverse strand)
tttactaccgaatcgctgataatattctaaagcaggtacagctcctatttttatttatttgtttatctattttatctattgctttaatcatttttaatattaggttaatttagtatatttctattaggggtatttgattgtggtgttgattatagtgtaaccagttgtgaagtgatagttatatttctacattgtctttgtgaaaatttataatttaggttttagtagctgaagtatacatgataattgatgattgatatgtttattacatctacctgtgctttttctctttttgctgaggcagcttaaaagttgtatgcaatgctctgaaattaacggttgagtgttgaccaaagttatggatttctcatgggtcctatataatgcaataataccaattagcattttgccacttgttaaaatattggatcaagaatgtgaagtggataagataagacttaatctgatttgaagagtttatgcaaacatttatagtaggaggctaaggctcgcaaactttctacttgacgttgttgctttatgaaaaaacactaaatcattcctttaatgttgttactgcacatggacaaaagcaatgtgaatatgtgctacacaaacacattcctgaatcctgatactgctagtaaagagagctatattttagctccactgggcttcaagcttctgtgaagtctcttaacgtatcataatcgatagaaggctattagttttaagttactaagtagattttctgatatgacaaaaggttcgtctgggaatacatacaaccttaaggtggattagttgttttttcaaattcttgtatcagtttggctaattgattttgcttttgcttcattcctatggggacctggaatgatctcggctgcaatgggtgatttagttatgagtttggtggaaaatgacaacaacctgaaaatatgagcttcaacttcttgtaataatcatgaagctttaaactaaaacacgagtctccttgacttatgattttgtatccattttagaagcttgatgtattaaagcttcaatggctgattgtggcaggaccagttgttagttttaattgctaggaataatattctacatagttggaatggtccatgatggttcctcttttggtgtttagccattttgctttaaggagattatgacttgatttgcagtaaagaggttttaactggacatgatctcacagaggctgtctcttttctttttgtttaccagcttaaggggtttttcggtttattgtttttgaaaattttcatattactccatgtaatattatgttggtagtttggtgaatatcttaattcttttaatcccttagaaaggggttcatctcaaaacaacataaaaaatataactagttggaacataagctaagttttctatctgtttgacgtgattggttgttgacatgtaaagaaagttgcagtttgcttattttatgtttcagtgcctctaatatgattatcaattatacatgattgcattcctatgctctcttagagcattgggtgatttctggcttagtagcttttcatgtttaatcacggtgcactgatctaacatctcctttgaaatgggaatgcattttaattacttattgcacatagcaagcacgatttgttctttatttttcttctttcttagttagccatgaataacgatgcaccataaagctactatgtgcccctttgcaatgcacttttatgttccaaatccatcaatattgatttgttatgtatgtcttttaccctgcaggcggacatctttcgagaagagaaaaatattataga

SEQ ID NO: 6580 - DNA, 1979 bp, Ricinus communis
  Intron number 1 from transcript 30170.m014069 (locus 30170 .t000481) derived from phytozome v7.0 (chr-ID 30170; pos 2 610586 to 2612564 reverse strand)
gtcggctcgttgttcaactcgcagataaggctcaggttcgatttgttttgaaccgttattaaccctagatttaaggactcctttttggttttaatttttcttttcctttgattagttcgtctgatgttgagggactattatattttaagttaaggagttagggtttgttttctcttaatttcgcttgttgcctaaatctagtgttctggaaaaatgttgcactatattcacttgagttgctatgcagctgtttgtaggatatcttgattatcgagtaattcgagtatgtttaagcttttatacagctttgattagcataatgatggccttgggatttagattttcacaatggactttgttttgtatgttaaagttattggcttgaaactttcccgggactaaaataacatgagctctcttagaagttgtaaccctgagctaattttgctaaaattggattacatttcgtgaaatttcagttctaatttggtcatgagcacgttcttaatatattatttgttttcattcccttgagctactgttttcaagtcaattattacttttttctttgtatgctttcctagttgatctgtttactaagttcatgtttacttacttttattgccctctattgcttttgacttgattttccttaattaagtaagaatctgattaaatttagtcactattcaaacatgctgtggaagaattctcgtgtcgttgctgtggcttattttttcctgttgttcctttatctataacatgcttcgtttagatgagaacacatttggagttcatctaaaatagtatgtctatatacatatgcagaatcaaattacttgagtgaaataaatcagtgacatatcagttattaacaaggttattgtggagattgcatccattcgatttatacttgtttgtgttgagtcacatggtttactatagtgccatgttccattcaaatccaggctctgctcattttcagttttaaagacattgtatgcattgcttttgtggtaattgggcgagtagaaaagaggtttagattggatgagagagtgcttttgtgcctgctatttatattcaataaaggtgctacaatgatttattggatataagaagttgatatgcgatattgacatatttaagtgtgatcatgtaaaatgtgaacgattaactattgtgtagatgttatagtgttaaacacgagtgtggttgtctattaaaattttttaaaattttagcacatgagttgatgcttttggactgagtttgttgaaatgtgaactatgtagattccactagagcttattaaacttccatgatttcacttactactcttgcattggaatgtctctgtacatccagtatggataccttaataactttgtacaagtattggtatcctaatatactgcaaacatgagtatatgcagtatatcagtttaagttttgcacagttttgctattgggatcatccttgtggaagtcatgttcaaaaagattgttaaacgaacttagttagttgcatcttaatgattgtaaatagaaaatcttactgtgtatgtgcgggataaggaaagaggcctcgtccatgaccttcctgatacccgccctggggtcggtcctttcatcctattacttgtactgttggtccttaacaggaaaatatgctttacacatcatgtcctggggcttccacccacggttgaagggaaaggcccttgacacgaaattttttcgcaaactcaagagtggaggttatatatttagattcatatatgtttacccccaagtcattgccatgcactaaattactgtgacatgcttgttggtttaattgttggactgactgagtttttttcccttgtgataagttttagttttatactggtgagccttacatccatcaggagttgatgtagttgaaacacatatttgaatgcaggtctgtacccaacgctcttggaaacgacctt

SEQ ID NO: 6581 - DNA, 2144 bp, Ricinus communis
  Intron number 2 from transcript 29624.m000325 (locus 29624 .t000007) derived from phytozome v7.0 (chr-ID 29624; pos 2 61649 to 263792)
ttcgacaataattcgacctgccacattactcgactgtatgtttctcttcctctctttcaattgcttatgatttctttatattttatggtataattgttttgtatcatttgtttgatttgttcattttgctaattgtaaatattgtctgatttctggtgttagctattcataacaaaaagttctctacaaattctaggaaaatatatacatattccaaatctaaatctctaattatacatcaaagcgataaataagtgagatatatttgttaatattaaattattaaattatatacaatctcctattatcgtaaagaaaaatatatattgtcttttaggatagaaatcattaaatccctcatcaaatcaaaatttcaacatgaagagtaatatttacgactcccatgtgcccaaatagtccaaacttaccaaaatagttttgctgcattcttctaggtagttatctgtttatgtcatgatctcacaatatcacctcgagccttcaaccaagttgtggcttgaaggcttaaatgaagataaatgattaatttggatctgagtttgaattttctcggatccaaatatactgcggctctacctataaatttggtaattaattttggaggaattgagattgcttagaagaaaatgatgaatcttatttcttaggatagaaaatgatgtcatttgtccgatagccatatttgttccaactttagaaatgacaggttatcatttaccaaaagaacctcttctaatgatttgtccaaggtagtatttgctcatccaactcgacaaacattttgttcacattagtgtgccatgtcaacaaaggcacttgcccattagctcttggataaatatgaagtgaaaaaattgatacattttaaaagtcgagataaaattgataaagcaagcaaagttctagataattgagatcattatctcttgtaaaaattaatataaaataaaataaacatgctttttagaaattattctgtatataactggaaggtaattttatgatggatcaataaaattgccacttgttaataagataggttatatagatgtcaaaattttggctgagcgctattaagattcaactttatatatacatagagatcatgatatgctatcttttaggccaagaaatcattataaaccatcaaaatttaactatttacaatagtgcgtgtgtgcgtctacatatatatatatatcttatttggaatttagttatttactagaaaaaaagtaaatttattctaagtcaataataagaaaaaaaattgttctaatttagtgtagcctatatctttcatttaatttaagaatacttataatactagagtaagagtatttaatatacaacataattagattaagaaaaagatgaatattaaaaacaaaagatgtatttggcctcatccttataagacatcttgattttaattttaattcttttaaaatgttagtaattaagattgtatacatgatgatgcttatgtcaatttatcatatgatatttccttgctattttgatttttggtacaaatttcataattgtaataattgtatccttaatttgttaacttattagttaaacgtgcatggattatgatatttctaacagatttttataatgtatgggttacgaatgaagcgtgttcataataaactgggagtcttaatatataaataatttaaatagttaataattttctatatgaaaagtatttaaaagctttcttaaaatattattgaataaaaaatatgtcaatttaataatagatttccatttaaagcaataaaataagatttttttatttaaaaaactattatattttagttattattactaatataaaaatttaatataaagttgatattcaatttaatgttcaagaataccaaattcaagtactgcatggaaacaacatttgtgattgtcaacaacatttgtattgtgcagcgaaagaataatcttttgattctcttcatttccagcttattaatttagtgttagatttagtatgtgtttattatatcttgttattgaattgcattaagcaaagtttttttgagaatgaaatattttgtaactccttttccaggttagtatttaatctgaacagacgtggg

SEQ ID NO: 6582 - DNA, 2146 bp, Ricinus communis
  Intron number 1 from transcript 29737.m001214 (locus 29737 .t000008) derived from phytozome v7.0 (chr-ID 29737; pos 5 6518 to 58663)
acgtgtatcaccatccgtttcattctcagtttaaggtcagtcgctgatgttgttgttgttgttattatattaatcttttgattaaggaaagaaaggaaaaagaaaagaaatttagtgattgattttattatttgaatgggggatttgatgtttttccctcaatatagagttgtaattgttgtacatatatatgattgttttcattaatgtacatatgtttacatgaaaaagttgaatgagatgagaaattatgaattttcacttgatgcttgtgctgtagcaagtgcgaatgcttccgactggcaatgaactttacatgaatgcaaagccattaggtcttaatttacccacactatgaaatttcttcatgctctttttaactgaaatttttgcattttattgtgagggcccttcacactacaaatgaaacaaagaagaataacctttgtgcagatttatgaaatcgatctcgttggatcatcattcccaattctaatgtaaatattttgagaagttgaaaggctgattataatcataagtcctcatatagggtgctcatggctttgtattggtgctgcaaagtaggtgcaaccaatgatggcaagaattctgagagctccatatctttgtgatcaatgtcaatgagacttattgctgggctgcgtttctgaaaccatatcttataatcatcagttttgatctatgggtaatgagagcataaatatgagcaaaaagaggtgaaagtttgtaaggacatgaatgccaacaaagatatgtatgcagtcaagtcaaaagaaaaacatatcatggcataacttttgatgctgatactgtaaatggttcaattgaatgaataggatgaaattttgtgatgtttggtttgacctatgatacatatgtcccttgtatgtatgtgacattgatgcttaataagtacgaggctataaattgttgaggtaatccaacttatgaaatagggcgatttggaaatcagaaattgaccccattacctgaccagttgatcagcatgtggtttgctatcagatacttcattataaacgaaatgaggaggcagaggcgactgctatggaggctgtagtagtgcattcagctcgtacttgctgctacaatgctttttatagctgtctgttcaccatcttctgcgcttgctttccacttctagcatttctttttgcatcatctagttatgaccaggaacgtatacatatagttttccaaatgaatggtaaatagggtactaattgttggtgcacattctgtaaaattcaattcaagatatttgatgcactctgaaatgacaattgaaaagcttttgtttttcttgttcatttgtttcattcacatacacacaagtctttgtcagctaaacccagttcacctctctttagttgtcgcttgtatgaagtataaccaaaacttaatcaaatgtcaactacaccatattcttgtatgatatgttctgaaatctgaacctggcctatcccaactcctctttgaattttttgattatgagctctcaattccctttatggtcattgattttaatgtgcgatgctctgctttaacgtttttaattttccattcatcatttccatgttcacttctgttttccattcctgatcaaaggatggtttctacactttcagtctcattatcatgtttgtctctttcagcaaatactcatttaaaattaaagggagcatgttgtagaacagtcaaaatttccttggtcttgttctgtttaccatcaccaccagctttatttggttgtttgcttagcctgaaatatccctgtttcttgataagtaatccataacccactacagtaaaggttaacatgtgtggtactctataccttttattggctcttgatttgaaatgctttgatatactgccttttgtcgctgacatgtcgcaaagaatttatccctgaaatgataacatgttttcagaaggctaattttgttattttagtatcaattggatggtaataacgctgctaagctcaactggccatgtttacttgcaatttttctgcatcaagcttttctttcctttgatggggtttcctcttattttagttttccattttaactttatgctttattttcttctgatatgcagt

SEQ ID NO: 6583 - DNA, 2608 bp, Ricinus communis
  Intron number 27 from transcript 29955.m001156 (locus 2995 5.t000001) derived from phytozome v7.0 (chr-ID 29955; pos 34802 to 37409)
aaaacgtcagatattaaggtgtgtcatcgagtgtatttctaaattttattttattgaacaaaacatgctacttgaaaatacaacatgatctatagagttttcgtgtttttgacaacttgattgaatatattgctgatatatgtatgtattgaaaattttatggatattaactagtaattaattatttctggagaataatacttaactgttatgtacaagacaggttcaaacctgggctcttcaaaaggctaaaaggagacccttaaccattttagccaatcattttatttgaacatgttgcaacaataaatttatctgagcagtaattttttctatatgatggttgtaagcataattattaattgaaaattcaatatgaaatataaaaaatattaaatgaccacttgtttttcataaatcatagcattaaaattgtggtcaaagatctatacatttgaaatgtacttaatttatgtaatttttgaattcaagattctttgattttacatttctaaaatattattggttattttagctttgtaattgaaaagtatattctaaatttgttgtttacatcattttattttagaacttataattattagcttttttagtctatcaaattatttttgatacctccatagttcttgatatttatgttgatatatgcatatatcgaataatcgatattaggatacctcattttggtatttgggcgcgtaggttactgtttataactgaccagaaacaactctgtttagttattgtttgatttagacaaatacattggatctataatatcattgtgtgtttatggaaattacttgttcaacatttttccgagtaatttcctaaatgttaaagaattcattgtagcattgcgtgtaacgatctgagatgtctaatataggctgataccctgatcgctactgttaccattctttttatttaacccttgtatgtcaccaggcaacattaatgtggtttatggtgtctatatgacatgatccttgccatgtctttggtgtgcatgaaatgttatatatgcatatgttctataatctagtttctgaactacttagatagcgtaatgatggtaagtatatcctaaatgaggcagtttcagattgttggttttgtgtgagagacatcacctcatactctgctgtccttagttactaggccttaaactacaaattatgccgaagcataaaggctcctctccaaacttttgaattttgtttggtgcagatgtatgaaaaatattgtactggaatttgtctcccacattcgctaaaacataaaaacaaaggttactaaaatatatattcttcaaaagtcattctgcctagtaagctgttaaagtggtacagtctcgttctttgtcagtagtgtctgtaaatgtgtagcttaaattgggaatggactctccaattataaaattcctattatcatagttagaggcatgcgtcagacactaggtgcatgttccgattaagatgcaaggcatgcacttatgcttgccactgtaatcctctttgtgcagtcaagatcttcttttcttttttctatttatttttcttatgcatctattgtactccttcactcacttaatcccaaaacatgatggctgagaatccatctttcttcattctacctcttctgccttcctttccacctttcatccccatttcttctttcctagatgcctctcacatttcttgtatagcaacgtgcaaagcctttatatacctgttatgttagattgttaacttttcatgtcaggttgttgattatattttgatctttttgccatgtataattgttaattatgccataggattactttctatgtcttggtttaccataaaatttgtgaagaattagctctcattcaggaagcttggcttgagcatagagatttagggaattgcggagtgtgggctgcgcaagtgtattggtgtgcctgtgtaaattctaattgtttttagaagcatatataagtagattcctaaataactttatcttagtcatatgagttatcttgtacaagatcgactctctgtttaaatgcttctgatcttcacctgtcttagatgcacttgtgctttgctcttaggctctaggaccccctagtgccttaatggacaatagtaactagggataatgcatctttgcacccttgaacttctcagtcttattttattaagccccttaattattagtttgtttcattaagtcgtcgtaattttatttgtgctttgatagtagtccctaatggaagcaaaaataaaagtagaagggcatagaacaaacaaaaatctcataaaatatgtgtaagaagttcttaatccaagcaaaagtaaaagtacattgaacaaaattaaaattcagaggctcaataaaataaaactgaaaagtccagggggttaataacgggttttgcctattaactatgcctagcatacagacatttactgccttgggcagaatatatgattgaattaacttaggctacattttttattgtttattgtcggtcgtttcacgtgatctaactccaatcatttttctcctgtactgcctgccctactgttacaggttgcta

SEQ ID NO: 6584 - DNA, 1579 bp, Ricinus communis
  Intron number 7 from transcript 30146.m003512 (locus 30146 .t000089) derived from phytozome v7.0 (chr-ID 30146; pos 6 60570 to 662148 reverse strand)
aatatccggcggtcagaaaaaaagagtaactacaggttaacattctcaattttattgtagttataattctaaattttatatgtaataattaatatcaaattttttttcaaaaagaatgatggaaagcttgatttcaaattataagactaaaagcaaaagtacatattcaacaagttatgtagtcaattaaataaataattgtcaaaagattatgtgaatgcattgtggagtcaaagttgttcctgaaacaaacactgacaaatctgttgtattgagaaaatgtttacacttgaaattgctaccaaccccttatcttgcatcaatcgagaaataaggatttgattaattcagcttctaatcaaagaaaggaaaattatgcttttcaagaagattacgcacttcttttgtgatttttctgaaacttaacatggaaacgtgttaggtgttgcaaatggattaaaccaatttagttactttgatccttataggagccaaaattaaaatgaggttatttcctttttttatttatttttccttttgaaagtttatgaattattaattttatcaatatttcgatgctacatattagtcgatttttttgaaaaataaattgacataaaaagttactatatttttaatttcatatataaatttataaaaaatatagcgtatatgtaataattttttaaataaaataactgaaataagtaaacatagtctttttttcttttcctgaagtcatgagtttgagtctttgtgatcacaatctactaaaattaatagggttttattatgtttatggtaaaatataaatataataacccatgtctaataaatatctagaaaaaaatacaactgagatcaacaaaatgagaagacttattcccaaatttattcttatgtgcgtcgtgtgtaggtctatttaaaattgtttttaggtattaaaaatagcaagtttggattctttttaatttaattaattgcttttctcatgaatcctacttctaaaaagtatacaaatttacatttttttttttcccggattgaaaacgaaatcgatgattttgattccggctttgaacttgtggccaattcgtcaggattgacactagttatggccacaggcctttgagcccaaatttaggtttaattaatactgatttggttttgactgttctattctgatgctgatctcgaatagagttgtatttttaatctatatccttttttgtatttgaaaaattatgatatatctaaattattactgatatttaattattatatttattttaattatatttttattattagtttataaattaattagtatactaattaacagtattgagaagaagaaaaaaatttacgatattaatattctattgaataaatcttataatattgaatttgatctaatattatcaattccgtcatttattacgttatattttatgtttttagatttattattaatcaaattatatatatataattctttttaagtaagaaagtacaatttaatttttaattgaaaagaattataatcaacgggttttcggtttgactttgtgcaggagag

SEQ ID NO: 6585 - DNA, 1972 bp, Ricinus communis
  Intron number 10 from transcript 27451.m000252 (locus 2745 1.t000014) derived from phytozome v7.0 (chr-ID 27451; pos 129866 to 131837 reverse strand)
tcgccattgctgtgcatcctaaggtatgcactcgtgtactaactgctgtaatgctactgttaacttttcaatccaagattatcatttttgaaaaccaaggagttcaggctcattagaatgcttggcattttgaattagctgtgcaaagtctaaaattattttttgtagtattcattttggagaaggtatataataatttatgatttgggaagtttgtggtttgctcgatttaatgacaaaatgaagtaggaacacatgaaattaaaatataagaattttgtttaactgcaacattctgataataaagatgaaaccaactgtcaggtagcgggccaataacacatcaatatggttataaggcttctgaaaaatgagaaatcacgatcaagtagaagcacataacgtttgaccataattttgacacactttatttaattgtgttatcaatatttattagagcataggaacaaaaaagaaagaaaacctgtgttattggtaaacggtaactgagaaaaaaagttatggatatatgtgcatgcaattaccaatttctggtaaaaattctatatttttatagaggtataaactttagaggtaaattttatatgttggtttggagatatcacaggagagtctttttattgtccgcttgtaattctattctgacggatcaaattaggtccttctagattattacatcaatctgtgatcaggacaaaaatatagggaattgctgtaaaaggtgtggactaagttattttccatctgtttcttagtcaatattgttgcttatttggtatatctcatatcacaaggggcgagtaatggttggttcgatcagtctgaacttcttgaaagaaaataaattgaatcatgtataagtagaaactaaactgaataatgaataaaaccaccaattcttttggtttgtttctttttttttacttggttgggcttctttttattgaattaggcttcttatataattaatgaacaaaggtttttttctttgaaagttgtaattagtaattttagataactagtatttctaattaggaacatgtgattagtacatttgaaatgtcgatcgtagggagaaaagtggcataccttttatcagctctaggctactttcttctcttatgaaatgaaattgatagttagaagtcccgcacttctaaatatgtatattaaatattaacaggcacaaaatctggtctattggcttaaaagaagatagcaactgagcttcaaacagaaaatcaaattatttcatatgccaaacccaactgaactgaaccggatttttaaaatagagaaccaattacaccaaaattctgctgattggttttaactgagtagtctgtatgacatggtaaagtagtgaaattctttttgctttaacatatttgtgaactttaaactatctatttcctagttgtattcttctcatttgtatttcttctagtaagttagggtttgaattgttcatgcaggggtattttagatttcttatccccaagacaaggacctaaatgaagattcttttcctttaaccgggtcaatttttttctattagttttagtttcagccttttggccaccccttggttattatattacctgtgatatgcttttcataaggcttttgtttctttctgaaaaatgtatttttgaaatgaagggatatgaaaactccataggcatgtatgctgattgcggagctttaattagattatgctttaccagttttatttgaaacatatgtgtttggattttctgtccagtaaaaaatgaaagcacctgccacagagttaacagtttgggagtgattcagatgtcatcaaatgttgtctgtgatttaattatttgtttgtgcttgttgtactcttagcttgtatatagatctttgagatcgaagaaactttttcataatttaagtactgaaatgctatgctattgatgtatgcagg

SEQ ID NO: 6586 - DNA, 2522 bp, Ricinus communis
  Intron number 4 from transcript 29942.m000750 (locus 29942 .t000023) derived from phytozome v7.0 (chr-ID 29942; pos 3 74697 to 377218)
ctccagctaacagggttgctgtcattaatttgaaggtatgtaatcaaactactagaactttgttttcaaaaataaacttgatgctagggtgacgctactctgtgaagttaatgataaaaactctttgaagctgttatagagagaatagtgtggctaatgcgcatatttaacaaattcgcttatttggttctaaaagagttcagactactttgctctttcttgtcgttggtggttaagtttggacttgtctcagggcctctggcctacatgcactggtgatgtaatattctatgaatttaatgcagttccctctcccacttcttaaatagtattgaaatttgtaaaattgaacctagaaataagggcatttatattcttcagtcataagagttttcttcactgagaaactcaaattttttgaactgttatatgctcaagagtaaaaattaattacaatccttgtttcctcttgatcttagctatttgaaattctcaacattttttttatctatagagatggcttatatttggattgttaaaaattgagtcagcctttcaatttatatatgaactaacttttctgtagaaaagttgtgaactaggtctttagtcaaaattatccaattatatgtttgcagaatgtgtgatgaattaatatgtggaatgaaattttccttaatgctatttatataattaccttactgtaggtccatatgagagcacttttcaagtgggttgacaatgagcatgctttaactctagcatagacattgatgatggcatgtcctttttctttgtgctattttgtttatatttttatgctttctttattttgttagtggtgaagtatatcgccctatcaacttcaggttgagaagaattagaagttaatgataaagtgtgattgagtgataggaggttttagaggaatcagaataggttataaaagggccagagagggatgaagagataagagatatagtggaactgtaattatgatatagattttttaactgcattgtgaagctgaatgaaattcagattctgaaccagtgttgcaattattgcttttgaagcataaagaccagcttgcttttcggcatctgtgagctacttgtgtatctttgggataatcttcttgttcatgctactgtattttctctgggtcattgggtgctacttttcagtacttgacttcagtcatcttaccatccacttcattgtgccagcaaattatgtaattgtattagattttcatggcacctcatctttccaacagttgctatgtgttttgaaataccaatgtactctcacatcttgttggagtcatttattcttctaagctaagcttatttatgagatcttgaatgagtgatctcgttgctgtttacttcctgttaaaacttgagctgattattctcatgtctggaacgagtagacggttctaagagtcctgtcttgagagaggatatttgtcctttatgggacttactatttggtgtctttccatctctgtctagttttatatgcaactttatccttcttaagttactttcatttgttgacatatggagattttataggaaatttaagtttcatttaccctatgtctttccatttcccttggtctcctcttgatactgaaagcaagagggaaattgagcaatctaatttttcttgctcttcttttctctcccctttttaatgtctgaacaaaggacatttctctatttattttcttttctcctcattttcatctaatcaaagaaagtggaagtgtttaatttaatgagctctcttttacttttttttttttagttgatttactggctcagctacatgataaaggccatattttttaaataaaaagatttttaaggctttcctttttatttttcatttggaccattacctgttattcttttacttcttttatttaagttcttaatatgaaaaagggttctagcccttcgtgtaaaataattcttttcggatctttaattgaagttcttaactattaaattcagttcttttaatgtttgagttagctcaattttaattcatagtaccgttattgcattactgccagggaaatattgatattatttatatgtcaactatgacttgataattatggtttcttctcaaaaatttttatttaaataggtcaattgaccaaaattttactgactcctaggtaacatcaactttttacatttgttttagtttctaggaattgactcaagtattgaagtgaacataaagaatttcaaacgcaacggtttctttatgaatgagaagagctattacttctttaagtgtttgttaagttttactgtatatatatagtggcttagctggtgtgtactgtactaatatccaattaattggcagagtaattttattgttatcttagactttgttgccctttctaacttgtcaataatgtattatccatcaaggaattaatatttccactgttttcagcttcaagatacagaaacaacttctggagagtcaga

SEQ ID NO: 6587 - DNA, 1478 bp, Ricinus communis
  Intron number 1 from transcript 30099.m001686 (locus 30099 .t000065) derived from phytozome v7.0 (chr-ID 30099; pos 3 14881 to 316358 reverse strand)
agtttcttacagcccaagcttgaagctttggccaggtacactcacttcactgtttatatgtcttcatatgtatatgcatgtactcgtatcaatatgtttttattactgtattttccagcttcgttgcttcttacaccaatcattattgtatccatctatatactctggattgttgatgtgaagttttgttcttttgtgagtttgctgtacaatttcctgaaatgggttatcttagtattcttgatattttgcaagttaggttctttctttctttctttctttttttttttgatttttttttggtttgttttggtgctttattccaaaatcagagtttttacagtggctgaggatataatgtctttgtggtaatggtaaagaataaattgttgggtatgtggatatcactgtcttgaatagatttttggcaacttgttttgcttgacttattagatatgcttttacttcaggctatctggaatctttcttttttcttttcttttatgcacaagaattttgatttctattgttgtgggaatattccatcatatatattctttcaattggcatctgaggagtgtggactgaggaacataaagtcaatatttggtgattggttctgtactttaaaatgtctactgtgcaataagttgtctaattatttctaaggatatgcaataagttgtctaattatttctaaggatattttttatttgttgatattgctaaaataaatgtattttggtaatttttaatagattagacctatttgctcgtgtttgctgctgattcagtgctgaatttacctttgctttctgttagtttttactgaatatcagtatttaccatatacatccatgagtagacggtctcacgtataaaaggaattattggttggtccagctgcagtggtttgccattttacatgcaggttggtgggatccatttgtggggtccaccgatctgtgagagaccacctactctataattaaattaagtatctaaatgaagttctattatcgtctactatttgcatttgtataatggtgatgatgtcttcaatttatggttatactattattgttttgaaatcttaattccattggggcatgggtgattgggtgggagtaattattgactggtggagttcatatccctgctgtgctacttgtgatccaatgaaccttctggtggacccgaaaaaaggatagagaacatatttatgaactacattcacattagcggaaacagcttcatttttttaaaaactttaaatgatgaaatgattttgtcttgtggaagcaagaggcagaaaatttcaaaatggcttcagtagttggactacggacatttgataatttaattggttaagttttctgaatgtttcctctttatttgggcattttagaatgatgaacaaaagtgcttccatctttgatgcagaaataaggggatattgtttgttgccattgatctaa

SEQ ID NO: 6588 - DNA, 589 bp, Ricinus communis
  Intron number 1 from transcript 28649.m000223 (locus 28649 .t000012) derived from phytozome v7.0 (chr-ID 28649; pos 6 3917 to 64505)
ttggcgctaatcgcaatcaagcttttgtggaattcgtaagcttctcttttttctatgtttaagagatgattttttttttttttttttgtagttttgcttgttaacctagaaaattttggaacgtgtctgtcgtcctttgtgttgcattttctactaatctagtgtcgagtaggttgctttttttttttttgttgtaatttgatctattttttttcttctttctagtgataattgaattggatggcattctatttagtaaatgctaatttttggaaagcttataatagtttggtttctattctttcaacttaaaaagaaagaaaaagtatgcattttcaaggcattatatggaagaagtcatttgtaagagttcgattgagttgaattcttgcaaaaaagtaaaaataattgaattctggaaagtctaatatttctaagcacaagaattgactcaacagaattcaattgaattaaactcttgcatttttaggtttccaaaatctcgaaattgacatgatttgttcctaaaaagcgctaaaggggataaaatattttctttttgcaggcagacttaaatcaggcaattcaa

SEQ ID NO: 6589 - DNA, 736 bp, Ricinus communis
  Intron number 2 from transcript 29950.m001156 (locus 29950 .t000040) derived from phytozome v7.0 (chr-ID 29950; pos 2 23824 to 224559 reverse strand)
ctgctgttgctgctgtagccagtgctatccctactgtatgttgttaatctttttattattgtaaaaagctagagggtctgtgttgtgagtatcgtaaaggatttttttttatactgcccaatctcaggaggatttttacaagtataacaaatttgtttttttaaggcaaaagggtgctttatcttatgcagctggaagtaaatatttacttgaaagggatcatttttcaaggagtgattacccaatttgctgtgcgcaagcgtaacagagtggagaaagattttggtgaagatggtacattgccaagttggttgacaaccatttggataataggctttaatggagttttggcctcttaatttataataaaatctctttttttttcagttttcttccttttatatatcgaaatattaatgagttttccaaattggagattgttgattgtatagatagaggccaaatttagttttattggaggtcctgcatctattattatatcgacttcagtctctctagtcctccatattactttagtagtctggtaatcttagaagctgttctttttatttcactttgagatttgattaattaatagttggtagtgatatgttatagtgatctcaataattactatattctttgtgcaacttggagatttgaataaatggcttatgtctttcaatttgattctttctttttaatgttttcagttagttgctgttcgtgtgattcc

SEQ ID NO: 6590 - DNA, 1582 bp, Ricinus communis
  Intron number 3 from transcript 29748.m000378 (locus 29748 .t000002) derived from phytozome v7.0 (chr-ID 29748; pos 2 4788 to 26369 reverse strand)
ccgatttttacaatcttcttgaccaaattagaaaggtgattgtcttattattgaattcatattcattgtgttttcaaaagtcttaaataatgcaagaatcctcaattcttatgtttccaaaaggtatgggcagaaagaagtgaaatcatgcaacaaatgacttgattttgtatgaattcaactgttggttttgctttaagatgtgtaccatccagtaatctttggtctcgtcaaagacaagccaggttaacgaggctcctggaagaggtgagatgaggtctaagggccttaccttggtccagttgaggtgactttacctagataagcgtcgcttacattgtggcacttggtgtataagatgcttacattattcagttgatgtcaatctagtgatgttggtttacttaaattatcataaaaataattctagtttttgcacttttagctaaaaactgatgattagaaagagacttaatttgagactttgagacctagtcagtttataattttggttttttcaatcagatgatataacccagcgattttgatttctttaaaagaactagataaaccctacaaaagattgatccataaattccaggtctactgctgccttcgtagttatgggtttgagggacaaatgcagcaaagacttaccacttcgatctttaagagtgaagacaacatttatcctctcacttggctttggttaggaaaattattacttgacttagacacaaagaaaagaagacaacattttagttatgttactcttcaacctataattatgcactattctctttctttagagaagagaaccctccaatcctcttgtccccttatggccaagcataaatcttgaaaggaagaaacttagttagaagatacttggagaggattgggggctataaatccagtgtttgcaaaaatgttgctggtgctgattaaaattggagaaccataggatccttatgcatttcagtattttaagttgctcaaacttatgtttgagcgcttttgtcttataacttttttatgagatagtgccatttgacaattatgacccatagatgatgatatgcaatttatttattttattctttaatgaaagtcttcatttgattatgatatttataatttgaaccttgattacagttcttctcttggtggaaaagatgcatctttttcaactacccttcatttatttgttagagcgcctggtgtggcgctttggatgatatgtatccaaatgattggaaggacacctttcccttataatattactggtttgtcatatttgcctcttgtgatggttaatgactttatgtaatgtataacctcttcatctacaagatttaagtttttagagtggatatttttgtaaacttcctagcccaaagtttttggttagattctagaatgatgtctgtctaggagcttttgttaagttagagtcctttatggagaattgcatcttgaagctcattgttggtacatgaattgtataattatataactcatcatgtgattcagtctttattttttttccttttttctcatttctttctttttctctgtagga

SEQ ID NO: 6591 - DNA, 1551 bp, Ricinus communis
  Intron number 1 from transcript 30128.m008871 (locus 30128 .t000332) derived from phytozome v7.0 (chr-ID 30128; pos 1 429139 to 1430689 reverse strand)
tttaagcaaggatcttcaattagaatcactgggaagtaagtttttttttttttatgttttttttttctttccttttattaatgtggagagatttgtgttctgtaaagctagtgtttttctttctgtttatcgtttttcattttcccaattacggagcccattgagcaattaggtcctaaaagcttgtagacattttggttttctgtgtttttttttttttttttttttttttttttttaatttaatttttagtagtgtttatagtaaaacaaagtagtctgccattgagattgcaaaagaaaaatgtgagattgagatgggaaaaagaatggaaatagaggttcttaacattggtgattgtttcctatgttctgtgatgatgatcacgataaatgttgtgatttcacattttcatttctgtcggatgtattaggagtgaggctttagggggtgggcctttttctttagatgttggtagctaagaattgtacctaaaattgatggctagatggagatgaggcagagaaagttgatggtaaagataacgagggggttggggcaaattgcactaaggtgggaggattggaggtggtgatgatgacagatgcagaagcaaagtggctagcaatagtgtcaacatatgtatataatctgagattttcaaagttttctgtggaaggaaattcccatatcaaatactggaattcttggctccattttgctggaaatgaagagaatctatctgtaggtctaaaaggctactattattatgtcagagtcttaaagagatcttttcattcatgtcattggtaatatagacaattgcatgttgtttcccacagaaccagaattattagcttcttctcattttttggccactttacttcacattaggcattttatttttgaactcatgtaatcaagataacctcatgatatgcatacgagacaaaagactagtgatcttttgagggtgttctgtcacaatacagtaacatgattactctgtttataaagcctagggcttaaagatgttggcatactaatatctcttggatgagtttcattctagatttatcaaacttttagaaggttaagtattaagaaaaggggacaatttggcattatttattctgtagatacaagtattgagcattgtttttgaactcaccattattctagggtggtgccttatttgacaggagaaggttttttaaaactggaaaactatgtatctctttcaatcaggcatggccagatgctatacaccatttaatatcaaattctcggtgttgtttatgatttgtattcctaacgagattaaactgctgtatacaagttggcaattttcattctatgaagtatccaaacatgttctattaaactgaatgtttccaccatgtatgtcacattacttcattttgttagtcgattgtctttggactgcagcatatatatttttccttcttctttgtagtacaacatattaaaactaaatctgttgtttctttcataggctacaagaatatactgtggatacggccatagctc

SEQ ID NO: 6592 - DNA, 744 bp, Ricinus communis
  Intron number 7 from transcript 30204.m001735 (locus 30204 .t000004) derived from phytozome v7.0 (chr-ID 30204; pos 2 2461 to 23204)
aatctcttagctagtgaaagaggcttcacagagtgagaaaagtagttgttttacacaaatctaattaagggtttggtagtttttctatgacagcctggctttttatttaccaatgaagttcattaacaaaaatggtctaccatgttacaagccaaaacttgcaattgcagtccaacttttcaatgggagaaaagaaataaatcggttttttcagagagtgcattgcattttataaccattacctatatttggtttggaaaaatacaaaaggttctgtaattttacatgattttaacactcagtccctcacttcttagaagtgaatatggtccttgaattttaaaatgactcgcactttactcctgttaaaatattgtaccaaagtcctaaaattttcatatgggacaactgttattcctaaggtaatatacattgtatattatactccaaattagggactaataggctgctttatttaaaaagtgaattgagtgaagtacttgtgtttatagctcaaaatctatatagaccaaagtatacatttttgcaaaattctgtgttttttttctttttgttcttgtcaacttctatggcttgtacaatctttcaactttaatatttttattttgacttcaagatcttaattcttaaagccaaaaataatgtagtgcaatgagcatatttcttactgctcatcattcttatgcagggaattggatttcttgtcacggcaacatacttgtt

SEQ ID NO: 6593 - DNA, 1324 bp, Ricinus communis
  Intron number 12 from transcript 29866.m000624 (locus 2986 6.t000019) derived from phytozome v7.0 (chr-ID 29866; pos 250222 to 251545 reverse strand)
tcaggtatatgggatttgataacatggacatgtctggctttattgagttctttgatagtatgcacttgtctgacttcgatgagttagttatgtttgtaacattaatagcatggatgctttgttctgaaaattaaccttggacctcattctaatagatgtccctttctacactatttaggaaatttacaatctctttatacttctggatataaggaggatacaacccaaagcaatactttggtagtagtggtactactgatacctgttattactacctaatcatgtatctgctacctttgctttacctttcacatcattttaactcaacaggaagtgccctgtttctccagagcattataaattagtattcctgaattctcttttccctcttaaggccattttactttgttttgatcaatcagaggaaaagatggaataatttatgcatctttgaggctttttaattgtttcctaactaggccttgggatcatctgcctctgacaatttattaaggaattagtgctatctacattacaaatacagtgtgacatcacatgatgtgatttgatagtaacttgtttaatttctgatctatgctgcttggactcggatactgtagcccgaagcactttatgtagtttgtctagctcaggcctaaggaaagtacaaaattactgtgccatattttttcaaatgttagggttttatatatttcctaactcagctgccggcccttatttcctcttcccctttttttttcttttcttttttctctgttatattatttcttcctcgcttttttgcttgctgctgctttttcctgttccccctcctcccccttgtcgtagctgttcactctgtcttcttcaaataagcagaagccatatcaatttccatttgaagggatcccatatcagcacctgtgtaattttgtattgtatcaacattggtacctcttaaaaaatgaagaatccaagcaacatagcttctcatatatcttgtcttggcagaaggcttgtctcattaataattggtgtttttaaatgtatgctactgtttgcttatggattgtcttatacttctctccaagatgttcttctgcatggctgatcttgagctggttcatacatatcattgttatttttgagaatcaaaatcaaattgttaaaatagtcaaacaacttgtgtgctagttcacttcacagcttctaatttctcatacagttgttataattgtttttgatccttaatgtgctatgaaactctcatgcagttgcagaactgattttttaatgtttaattctgctccacaggccatattgt

SEQ ID NO: 6594 - DNA, 3810 bp, Ricinus communis
  Intron number 1 from transcript 29742.m001420 (locus 29742 .t000056) derived from phytozome v7.0 (chr-ID 29742; pos 3 48254 to 352063)
ctttgcttaagcaccctcgcttctctagtttgcaggtacttaattagaaatacttaacactattttcttttctttctattgtttcaattatcaccactccagaaaaagagtggattttaaaaataaaatacatatatccattctgagagattgaaaattaattttcaaaaaactaaatttatttataaatactaaaatcattttaatagtttaagttattgattattaaatatttttacaatttcaaatgctacatcagcaattgttttcatatatatttaaaaaacaataatataaaagttaatttttgtctatacatttatattatcgactcgtattaatttattaaaatgatatttagaataggaatttgtcaatgaaaattttggaaattgcccactttaggtaagaaatacgtgatccaaacaaattaatttaatttggatctgactcctaagattatttattgaaggctaatgaattttatgtttatattataaagtttttaatattttcaaataaatcaatgtgggggtttgcccaaatgcaaatacatttatgaacaacataagcaggctagaacgacggctaatttcgctcgcatggacaggtgccccaagatttagaaatatcaacagttcacaaatttatgagtcccgagaacaagcctcataggttttaatatcagagtgaatttcttaaatccctcaaaggaagaaagaggtcatcagcaaatcaaattaattaattattaatattattattatattatatataatctatatattttattctctcactctatttaatctattatattttcaatatattattttttcaatagagttcatttaattaacaattcaactttcaatgaaatttttttaaaaaagttattcataaaatttatatttatatttaattatttatattaattgctttaactttaatataatattttcttaatattcatacgaaatatgaactaaaaacaagaataaaactattgctaccaatcttacatctgacattgctatctattatgtcatgcacaaataatatgtagcacattatatgtatttcttattctaaaagaaaattattatatatatatatatatatatatatatatatatatatatattcttaaatttattaaaaaatcaaataaaaaagttagctaaaagtaataaaaaaataaaaaattacaatattgtcatacttttaattttatttatgcttaaagtttatgtgctgctcattgcttagtaagagtatttgttttaatgtctaattcaaatatgtggaatagttacttccctaactttttttacaatattttctacttgatttgcaataatatctttttaatagttatttattaatttatcactaattaatttatgagactaatactataattatataattattattttttgatcttttactaaattaaatctattaattataatatttttactatggctaaaacattatagttaaataattattgccacaaaattgaaatattataacaaatttgatatatttgaaatatatgattagttttgcgattgcacaatttactaaaattatatataattataaagagttagtttttatagctaaggaattgttgtttcttttttttttttttttgtctgaatcaatgtaaatcaagaagaagattatcaaatttgaagactttagttcaaatcccatttactacattcttttaataaaactttatctgaaattatctactatatatatataagtgaatgagagtttaaagtaaattaaaattaggcattagtatgttgttaaagcaattattggcaagacttaaagattgtggtttaaccttcatttaccacaaaacacaatttttttgcttctttatgaaatatatatggttagtatagtatttttttaatttatatttttctaggtttattattctagattaattaatataatttattttgtgttaatctaactattgatataacttcaattatatacatgaatcattttcttatatacattcttagttcttttaattcctatgaaataaatttttattctatcaataatcaatgtaatctatatctaataattatcaattgggtcaatcttcacaaacaaatacttccttaatcattatctgattaaggtaatcaaaatatacaatcatcctcaattgattaaatttacgataacaaattctttacaataccaggatcgatataatatatgtctaaccattcttaattaattcaatactcacaaataaacatttcactaatcgatattattaaaagataaaattatttttattattaaaatttcacttaccatataaatatttcactaatcgatatagtcattctcgattgattccattgtcatgactaaatacttcaccatattgccgtaattatgatagaataataattgatgaaaattatttaatattttatcataattgtgtttataaactcattaacaaataatattaatatggccaccactataattaacattttaatactaatacattctttaaataaatataaaattacaaaatattataaaaaaaattaaaaatatgattacatagaattgaaattatattaatagttacattcaaactattaagcataggttagtacttcataaacaaataaattgatgtgcatagtattaacaagaagtactatattttatctaaaaaatttattaaaataactcttaataataaagggttgattttctatttcaaatatagaatataaatatactatttataatatattattataggccgcattgagcatggatttacattaacatgatgttatagcaaaagctgcaaatgtcttttctttttttctagaatgagaagtagaagcaatgtatcatatattactcatgcatatatagcataataatatatcaactttatttataggatcaattgtaatattatatttatgtttttattagttctattcatatatatttaaaaaatattatatttaatttgaagaaattaacataactttatataaatagttaaataaaagattgaatcttatattatgtttataaataaattcttaaatatttttctttaacatgttgaattgttaattaaatgagttctcttaaaaatgtaatatagattaaatgaagtgtgagaatggaatatatagttaaatttaaaatttaaatcaaatattttaactaaatttaatagaaggctagtgtgatttttttatttatttatttaatcaagcattaaatatatacttctagaattctagatggctagaatctatccatttagcattgtcgtttaattaattcaactaatattaaagtaggcatgaatcttcatcagcttatataatttcattttacttaattaagaaagctcaagttaactaaaggttcaacttttcttttcccaaacaaaatgcgtatctatggcgacgccgttttagcgtcacaacagctctaagcgtgcaaacttgtcgcccacttatgttagcttatagtgacggtaaatttgacgtcgctcaatttcttcaatccaaagaaaaccataagcttccctttgatatcttgaatgttatagcgacggttcaaactttttgtcggaagataatgttgtcgttactgatgaatttattttgtccttaattgcatacatttgatttgattttcttctcttttccttttttacttgtcaatttccacaatgaaaaataacaggtaacggacgagaaaaataacaaagaa

SEQ ID NO: 6595 - DNA, 1064 bp, Ricinus communis
  Intron number 4 from transcript 30204.m001778 (locus 30204 .t000047) derived from phytozome v7.0 (chr-ID 30204; pos 3 17500 to 318563)
ttttggtagacaaaactgaaaatcttcgctctcaggtaagttggtgatcattactttccttttcccctaaattactgttttatgagccaactgtaaacagattacatatggtgaaggtttctttttggaaggctgattagttcaaccctcttggtgaagaaaataaaactacaaatccaagatattggcacatttaaacatgcatgtctcatatggaaagtttcatttatccccaaagtctaatataatgataaactcctaagaataatataggttcttaagcaatatgggtggggaatgttgggcaatgaaggggcactaaaagtgttgtggagatgaggacgctaagatggatatataggcatacaagaatggatagtccataatgagtgtcttaggggaaaggtagggtgactcctattgaagggaagttgaaagaaattagatggtttgggcattggaataacaaagctattaatgctcctgttagaaaggtcggccatataaaggtcagtggaatgaagtaaggagggagtagacctaaattaacatggaaaaaatttgtccaagatgatgtagtggtcttgcatctttttgaagatgtagcccaaaattgtttgaagtggagaaaagaatccatatagctgatcccaagtaaccttgggtcaaagcttagttaagttgagttgagtttgtgttgccaattagataatgttgtcaaaaacgtgaaacttttgattgtcaatttctctttcactcgggcaggcttagcctggtgatctggcagcccccatggatgttagtttcttgcgggacttcactcttgctgatttactcttttcttggactacctctccccctaagtgactatttattggcattcaatttgggtacttaaaatatttatgggatttaaattgcatataatgcttgttaagatctcaattatttttaaattctgttgtatctttagtgccacttactgatatgatgtgtttgctttatttatttatttattttttctgctgatgcaggcacaagatttcagacaacagggaacccag

SEQ ID NO: 6596 - DNA, 3326 bp, Ricinus communis
  Intron number 1 from transcript 28660.m000195 (locus 28660 .t000008) derived from phytozome v7.0 (chr-ID 28660; pos 1 58348 to 161673 reverse strand)
ctcttggagacacgcttatatctacgctcatcacggtctgtgtttccacttcttgtttgtaccttcttttttttttttttaatttaaatttctccagattatttatacatgcatttgaatgttaaattggtagttaatagaaatctgagttgttactctgtagattttagcaattttatttttgtgggttttggattttgaatcaaatgtgagattacccatttgatgaatcttaattaattttataccaggataagtatctttagcatttgtgattacttttgtttattatgactggcatttagttaaatgctggagtgtagtgattgaggggatttgaggaaatctagacctttaatctgtaagtcaatcttggtgattaaccttgtgttttcttattttcaatatctttgtgtttgaaacatcattgcataactgattacatttgtcaagttttgtggttatgtacaatgttacgtgaaattggatcagaagggagctaagttgtacaatacagcggttagggccatttaaagtcctctggaatttttaggagtggttaagatgtgtcattgaatctctaaaatctgagaataatttttaaaggatttaatttctggttttaagcttcaggaatggggtcaggaaactagagccttcggcatggttgtgcatggaaatatggattaggtccactaggtaaaaggtttaggtcttgaattctttttggcagtaagacgacagttaattggacataaaggtcttgcaatggttaaggtgtggttgaacttattccatcaacattttccatccataaatctattttcttccctatgatttctagtctctgtaagtttcaaccttttcgtttttttttttaaattattttcttattatccttagcagggcctctggcttggagtttttctgtccttgcttctcttgaaacgacagtccttgaaaaaattgttggtagctgatcgtagcagggcttttgtctggttttaacttgttgctacactattttgaggcagaggggatcctaggtgatttttggggtagtaaagaggagcttcagtaccatttatgagatgctgctgatcaatggtcaaagcttacatagaaatggacgataactcttttagaggtaggttgttatgaacttgaagcagctagagaaagtaataactgctgagaaacatcaaaatattagattttggataatatatgcctgctttctggggctgttgctggggcagtgaaactcatcttattgttttgtaattggattaaactaatatggaattaggtatatgtgattttgggcattctgtgggtggaagcagagtgagtggagaaggaattatgggcttgggaaggcattcttgtgtgaatggaaaagtgtatctggtcaccgttgccataatttttgggaatttggatggaggaaatggaacatacaggttttcaaggaaagagcaggccatcttgcagagaaagatggctactgaatgtattttggtcttttgggaagtcttttgtttggtggttaaaatattttgacttgtagattctcttattgcagataaccttattatttatatttttaattagtaaatttggtgctctgcctttcgttttttgtcagaaagctgcagtcaattcttaacgagagagttatggtcacatgaatcagtaattcctgtctagatatcttggagatggtatatagataacaaatatgtctttcttatgtggtaagaaactgtaaaacaagaaggaagaaggtaaaaaaagtgcctgcagttgcacccagcgcttccatagtaaggtaggaattcatgtgctctgcaaaactttcaaagctgcttgaataactttttttagtgatagttcttctgccggcaatttccttccatttaaatcaaacagaacagcgaataattttatattaatagggaactgtggttagtagaacagatgcagtatggatatctgttttaaatcagtactgcatattagaaatctgaaaaatccgaacccacaattggcataatatccagattgctatcgttcaaaataagggatcaaaattgtttcaaggtagacccagaattggttcactatccctgttacagaatttcttctcacacagagagagagagagatagagctgaagatcattttcatagaaaagcttaattattgcacaattagattggataagatcataaatgtatattttgctaatataggaaacagtttggtaaagaggtgaatgattttgtttgatcatattgaaagattgtttggatgttcgtttgaaaggggttgatttgaagatatttttgtacaaaggctatagggtcttaaatatatttctatatgatgtaaaaggctctctttaaagctcattgagtattaactatggtaaaaaggacaagtttgttaataagaatatcccctgaaataattcaacaaaaagaccaaagggaacagttaattgtgttttacataattatgatttctggaaagatttagactataaataataccatgaaatgacacttttcaattttcacttttgttttgccaagctagaatggaagaatctcatggttggaatgtttcatcattttagtggaagacatactttggtcactgtaaatgcttgtttccatcatcatctcatgaaagcatgtttgggctgaatcctgtggaacatatagaacttgtttgaattgagagatatgttaaatagtttgttaatgataataacagtaataatttaaatgcccctaagattccattgctagttagttgggttcttttcctccattttgttctgtctaaggccaattttacatttatgttgcaaaataaaaacaatcaatttcaccaggtgatttacattttctaattttgagtatggtattttgtggatttcttggaatgaaagtgctcaatgtgtctgtatctattaaagtgaggcagggattggaagagaatttaaagaatgcaatgaaattagattacatgtaggaaattgtgaaaaatcaagtttagctcatgtgtgattctttttcagatttctgtgattaatgaccattttatactagttgaactttgttgtttcgttttgttgatagcagtatgttagaaattgtttatggcaacttttttcttaaaactgaatgtttgatgtatttcttgcataatcaacattttgcattgtgcatgtgttttgtctcagtactgctatcctaaataataacctgaaaactttcaccctagcttatgtgcatttgatttcatgccagggatat

SEQ ID NO: 6597 - DNA, 4495 bp, Ricinus communis
  Intron number 2 from transcript 28458.m000048 (locus 28458 .t000002) derived from phytozome v7.0 (chr-ID 28458; pos 1 9729 to 24223)
ccttactggtcatttggtaagtcttctttgtccctacatattattcttgttttagaccatagttttttggaggccatataataggcacattgcgtacgcacttgaaatttagggtaatatttatataatatttaacactaatcttatcctaaaccattatataatacaaattatatgcatttggattttgacctcattatgcttttaaaaattaagtcctcttttggtataatatatggtaaaggattcatctggcccctaaacttggaggcaagttattaagagtgacccattacaccaattaaaatttttaattgcataaaattcaatttagcttttaaactataataagtatcaaattctatataaatattatttaattgagttagagtaaatttacttaatttatataatttgatttgaatatctaataaaaattaataattactaataagataattaataattgtagtaaaaaataaaaataattaagtaaatttaataaataataaatattaagattttaataaaatatttgaataagtattatcataataaattaagtaattttagaagtattaaatcaaatatagtgtcctcacccgatcaagttttaaaaatttggaccaagtctgagactaaaattattattaaattattttcattagaaattaagaatattgctacaatataatattttattctaattttataaaagcataattatatgtgatttagtaatattatttaattacaaacttttaataaagaatattatttaattatttatattagatattagaattaaaatatgttaaaagtaaattttgtataactcagtaaaaatattatttttttatataacttgacatttaatgtgaagtttaaggatcagtttgaatttttttttttttttttgtaaattaaatactttgcttaaagtgaattagccacttttgccaaatagctggataaattagccagaaaataaaaaattgggtgaattatctattgactccaatttaggatgcaaattgacactttagcctattagatatatataaaataaaattttgtatgtgatatttattttagacataaaaaatattaagttattaaatttttggtattaagataatcttttgagcatttataaaatgttgtatttttaaaaagttatttatctatactcttaattatttataaataaatatttatttatttaatgaataaaaaacggaaatatattaccacacgaattacttaattaataaaaattaaatgatacatacatttgtgtttatagttttcaaagaattaacttagtaaattttgtttagattgaaccaaattataccatgcttatattttaataccacaaatatgacccactaacatgaatgcaattataacttgtgctcgtaataactttgttgaaaatggttaatacaaggtaggcaatttaaaattcttcccagaatataggactcaggtatttttcttttgagaaaaaagggtttcattaaagatgatcaaataaaagttctcacccatagtttgcctcattaatagacctttggtgaagaaaacttaataagataaaatcccacaaaggaaaaaagagtgtaaatataaagtaaactcaaatgagcacactatgcaagtgagttatatcaaatttaatataataagatcctcaatgaaaactcttgcaatgaattaactacaccaactttctaataatatatttgaataattgatttagtgtcacatgtcatcagtattatatatattttaaactattaaatttattagatttaattataactattggataaaaatttactaataaaataataaattgatatttttatcaattacaaataatattatatgaaaaattcagctatttttatattttactctaccgattatataagttattaagaaaaaaaaatattaatcttacattttattagagatcaaaattttatgacaccggtatcatgtgacaccaaataatgatctatatatttgacatttcaattatatgtatataccaaaatttgataaaaaaaactctcgaaatttataattactacgttgttttattgtatttattatattgcaaatcctcattgtcccatttcacatgtttagctgtaattgatacttatatatttgttttaacaatggttgtacaattacttttcaaactaaacttttagataataatttatctcaataatgataaacttattaaaaatgaataatggtgcaggccccatatatgtttgttgaatattttcaatttagggccattttttatctgaagtaaaaaaaaaaaaaaagttaaatgttaactgctttttcactactaatagcctacagtggaatttcaatttattttattgctttaactggatacaggttttcataagttaaattttggtgacactattgtgaaataccgaatcaaaagctttaagtaaatctatatagcctggtcttgatcgtcgaacgcttaaatcaaaaaagctctaaataaatttatataacgactcgagttcgaaacccacctctttttcttaaaattagctttaagttggtaattactggttattttgtagatattgaaattgttcttactaactagggttgagcacgagtcggtccaattcggttatctataaatcatcagtaccataccaaatctcagttcttttaaaattgaaggtaccagtattataccaaaaataaatggatccgtactgtattgtatcaatttttacggttaaatacaatcggttcggtgctatttcgattctaagaaatttaaaaaacgtaattttaaatctcatttttaatcaaatatatttagagaaaatacgattaccaacctaaagaaagtagtatgaaaatctgaattagaattgtgatcacattcttgcataatctgttttgcaattcagtcacttataagtataattattcattcaatattcaaatacaaaccattaaaatatatattaatgctagcataaaaatattttgcagatgtcgattattaaaataaataaatttacaaactttatgtagcattaaaatacaagtccaaaacattatagaagctctaaagagtataaactgcaatttagaacggtaatataataactccaaattcaaaaaaaaacatcagttccacaagagaagaatagcaacaacactagtacacaccctaacaattaaaaaataaataaattagctaataaaatgaactagcattttcttataacttaattttaaccaaaattaaattaatataacatatatactatacataaatttagcaaagaaatgttattacctattctcaaaatcagcactctacatttaatcttggtataagggactcatcaatttcaagattttaaataatttttgcaataaaataaaaaattacattaataaaacttaacaacatcaacaataaaccaacatatgtaggaagtaaagaaatgttacccgactctatgtttccaatctcctctagtgattttctagctggatagacttatttgaacttttaagccaatcttgacaacaaatgaagacctccgctgttgtatgaagtaaaaaacttctatattgacttaaagttcgtattccagtactaaatacagattcaaaggccagtgttgaaactaagatagctaatacatcgcgtgcaactttggataagataagataccttactgaattcactttccactatgctaagatattgaaatcagtggtgagtttttctgcaaattcttcaaagtacctatccaattcagatttcttagacaaattttgttgcgcttcttcctctagaaagaactcatcaatctctttttttgtttccgtatcacttgactcactatcatatgcagatttctctgagctccctacaacctcacccatatataattagtccttaattatcttgttccaataataattgcttgaattatataaaatgataaatataaaatatatttttttagagtacaaagtattttataatattatagttatttttaataggtattatttatataatgtaaataattattaataaatatatgtaaaaaattcagttctacagtttggtccagatcagtacaagacggatcgattctagtacggttatggtacagtttttactaaaaaactagtaccatactataatagtaaaaagactcggatcagttcaatttggttataaaaaattttagttatttcggttatgatatttttcggtacagttattttattcaggcgggaatcaccgacatccatgctagtcttattactaacatttcaatatgctagtcttattacatatgttaaattttttctttttttttaaatgttaaatttttcctctttcttgttgttttctaatttatctcctcttgtttctggtataaagggtttcaccagtgccgat

SEQ ID NO: 6598 - DNA, 932 bp, Ricinus communis
  Intron number 1 from transcript 27956.m000358 (locus 27956 .t000013) derived from phytozome v7.0 (chr-ID 27956; pos 1 53285 to 154216 reverse strand)
ctcaaaaaccatcttcaaagcctacccaggtcagtttttactatattttccctaaatgggccgtctctatttttttgattgtgttttgtacttttgatttcaaaaatttggtacttcgatttttttttttttctcagaatttagtagttgttatttagtttatgaaatttgttagactatggaattgcacgcccaccatttaaaagtattctttttttttttggcttttagatatgtttgctgatgccaggattcaatgttttatgagagagtagatatttttttttttttgggcttcagtttttaacatagcatttgggctgaaggattaatataactataatgatgtatttcatttgtttattgtcattgtagaagtaaaagtttttgcttgtatgagtggtcgcaccccaaaagctggggtgaatgagctgatggtacagtgattgagattggtgttatatttgaaagaaaagggcaattgagattgcctttgtgagtttattgttttaaataatacttcactttatgttgaaacttcatataagctctggctagctgtagtacttttgatctatcagtttctacagattgattgctgctattactaatttttttaatcggacatatgatctatatcctggttgcttgggtgccacactagttattttactaatcaacctagtctgtcacattgatttcatgttatcatctttatataaacacatactagagctcccatcaattcaatattatttctgtgtttatctctatctatgttgatacaaatggttatattttcaatttgtactagccctttcccccctgcttttcgtgcagttcattggtcatctgttataagaattcttgctctcatttggattcatttccttgcagggaatcaacttttgtggcagaactagagtaagaac

SEQ ID NO: 6599 - DNA, 1897 bp, Ricinus communis
  Intron number 6 from transcript 30122.m000346 (locus 30122 .t000006) derived from phytozome v7.0 (chr-ID 30122; pos 2 54434 to 256330)
ttgttgttggtggcggtggatttgtaagttttattttacttactaacactacttttttggaataattttcttttgggctggtggtggtggggaatacaatttaagttaatgaaaatgatttattcattatctacctgaaaaattgaaacttactatcacatataactctgttattagtagttgttacctaagtgaaatagattttgcaagttctcgtttgtttagctcatgcttattttctggggatttacttgccatgtgaaaggcggcatttatcaggaagatatttatgagggaatagcatttactttttctcaagatgtgcactaaatttttgtttgattcattcacactttagaaattttattaggtagtataataacgtccttattgcgccagaatatctttgttgttcaaattgacttgaatttaatttcagctagattaaccttatttccactttgctatcatccctccccttatagtaagttatttcatttgaattcaggaactatgttggcaaaggggattttgactttcctcctactatataattccagcgagtcaaacatgatcatattacctatttttcaacaagtttaatttgtagagctaatctagataataagaaaaacttttttatatttgaatcagtttaggtgtttgatcctttctatttaggacgattaattagtggcattttgttgtttctttctttctttttttttctttttcttgtaaagaatgttatggttgatacaactgaactacttataatttgacatatcctaattgatagtgtagttatttttgtgggataccatgtatatttgactcataagtgagtcttcttgctatatattgtttgggatgtacatttccactttgccatcacccttccttgcctattaagttccgtagaattaagcaattaagttgtcaagtggacttccctttgactttgtactttctagtaaatcagacatgaaaatttgcctacttctcatttggtcttgtatcttgagcttgctgcagtgagaaatgctcaaaacctaacttgtcatatacttgaataaggtttaggtgcatgatcatttgaatgttttagactgcattgattagggaattctctctctctctctctctctctctcaaattaagaagaaagatatatacaacaaagaaactgtttttatttgatttgtctcattgtacattaagtgatgggagatatagtgtgtacatacgagtaataaatgaggcttcttgctattgtgtttattggtagggttgctgacatgtcaatggaggttagtgcctaatggttttgttgctaaaacaatttatttctgtcaaactaatatttcagttaatgttttggaataaattttcttgtactcaagggtcatcataacagaataaattgttctttcacttcgtgtgcaatactattctttgagaatggaatactcacttcccaactgttgaaaattagtctgttgtctgtggtagtagaatgctgataatgatggttggatgcctctgccaatgtggatgttgtctttgatgtatctgtggtattatcagtgaggaagacaagaacaggtggtactgataagtaatattgccttaattatcaacaagataaaaaccaaataataaaaatagcatttcaatataaaggaattggtggctgaggggcagtattatgagttctgtccatgcttagaccataactataatattcaatatctacatacatcttggagaccttaggaagcatgcaagtgttgagttatgccttcaggaatacttttggtcagtttcccatgctgtcaaaagaagctattcctctgttattaggtgctgatatttttgtttataacctgtgcagatt

SEQ ID NO: 6600 - DNA, 1525 bp, Ricinus communis
  Intron number 18 from transcript 30174.m008811 (locus 3017 4.t000208) derived from phytozome v7.0 (chr-ID 30174; pos 423604 to 425128)
aaaaggtcagaagttgtatatatttgctttcccaatcccatgcacttgtgcatctttctcactctctctgtgtctccctctccaagtatgccaatatgtacattctgcttatctggccaggcaatgccagtttcagagaaaggggagacatgggggcttggggggatcattagctgtatgcataccctttaaatatgtttttgactcttatgctatgagttcagtggtgaagcaacattatgtactaagggtgcaactgcccacttgttttgtgggaaaattgcatttaaggaaaacaaaaggctttgtctcccttgtaaaatagcaatcaacccttctattttcatttgtgcacaagaccagcatttaacttagaatagttgatcctcttgttggtaatttggttgaaaatacaaagtaatgtaaatgtataccttctacatcttcaatcaaattaatgcatatgaaaaatatcagataaaatagatacaaaaactaagagatgttaacaaaaaatggactaaaaataattttgttggaaaagttatgaataagattaattatttgttttctttgcttctttgtagtttaataaatagcatcaattcgttgcttaggttcattacttttagccttaatttagatgtaattaaatggggagaaaaagagatcaatgaatttgtacctccattttatgattgctacaagtattgttattagttttaattcctaaaaattattatactaaatgattattttattaattattatgtcatactttgcattattactcgtgttctttttgtgtgagctatatagtttgacaaaactgtttccattagttttgatttttgtatttgtcaaattttactacaaaccaaaatttgtccacaaaaagtgaaaaaaaatcatgacttcttgatgtgtgtgtgtgtatatatgtatgtttatgttcatgtctgtgtgttctgattagtgagtaatggctcagactccaaaggacaaaaagaataaacaaatggaatttatatgaaaaagaccaatggctgtttgtattgcattaccgtatgctagtctaatgatttttggttcttacttttaacatgactccattatagtctcgagtatttaaaacaaatcacattctatcacaatccttgctcagtctgtatttctgaaatacagaaaggatgcaactgttttgttatatgtgaaacgattccgcctatgcgtgaatattctgtgatttctcttctatgtcttcatataaattgcttgtatatggacatgctgattttttattttattttatttgctaccgctgtcattttattggcttgtttaattatatgaatttaaggttgcgtgcacacattctttagcatctttctatgaaataatatgatgataagttttatttttcccccaaaagaattccctgccatgctgtcattattagattccctggttctcattatcgtatgtgatttatttctttgcagggcaagcattgagcctaattttc

SEQ ID NO: 6601 - DNA, 563 bp, Ricinus communis
  Intron number 6 from transcript 30180.m001052 (locus 30180 .t000042) derived from phytozome v7.0 (chr-ID 30180; pos 8 73670 to 874232 reverse strand)
ggcaagctctttcaaatattctagcatcactccaagtaagcaattcatgctttctactggaaacaaaccttttcagattcctgacgtctatatttagatggctaagagactgatttcagccaacattccagtatctttttgtttaaattcaagattccaagtcagtgtttgttcttgtgtgccccattatgtagaatcttcacctatctattagttttccctggtaatgtttataggaagttgtgtagttaattgatgactggtcaagatttcatttttttaacttttagcctgtgccatctgtccagatgcttttcttgtcaataatttctccttgctattaggttatgtcatataaataattccaaaaaaaagcctggttgtatctgctgcattctatgaatttctgccttttctgcagttgtttactaaactaaccatagacacaatagcctttaaccagtaccataaatgctctgtaagctctcagatttcatgtgaggtctcatgtccatattcttttcacagattggtattaaaactgtcgattcatctgtctctgg

SEQ ID NO: 6602 - DNA, 333 bp, Ricinus communis
  Intron number 1 from transcript 27516.m000173 (locus 27516 .t000006) derived from phytozome v7.0 (chr-ID 27516; pos 6 1522 to 61854)
cttcctcctcaagaactccttgacgatctttgcaggtctccaaatcttcttctttttttccccaatttcatttcatttctttttatatattttatacaaattaacttgatttaactgttgattctttagattgttacttgtagttgcttttagctgtctggttgatgatgagaaaatgaatataaaagaaaagaaccaatgaatttcaaatttgatagttttgtagttttaattattttcagtttgattttttattacaagaaatatatatatatatatataatgaagccttaaacttatgaaatattattgatggcagtcggtttgttttga

SEQ ID NO: 6603 - DNA, 839 bp, Ricinus communis
  Intron number 11 from transcript 29673.m000917 (locus 2967 3.t000018) derived from phytozome v7.0 (chr-ID 29673; pos 123305 to 124143 reverse strand)
caaaaagtaatcctgtcaactttaatatctctgtctatatatgtatctatgtctgtgtgtgcctgtgcatgtctccttgtctgtattcttagttctttatatgattttctctgttgtcaaatttgcaattaattaaatattctatttgcagagttttctgtgcttcaaatcagccaaaggctgctctttaatgtcaattgaaatctccaatatgccatctaatttaggagtagcataaaacaatgaaaagaataaaagaaaacgcaaactcgctcgtgtttcttgcatatgactagattatagctgctacatgtgttgtgggtggtatttatctgtttcaaaatagtaagtaggaaccatatggtgttgcaaccttgctcgccaatgtaaattttttgacaagaagcataaggatttgtgtttctggaatatcacgtatatttacacattcttttagtttgaacattggcttctgtagttgtatggagttggaaggtaattaatcagccattttacatttcttctgaaatatttgtagttgagccaatatgatgggaagtctacatccatttatatgatgaaatttctgcaatgacatattcatagatcaacagtcacctttattaggttacatgcaccctatgatgcatttatctccatattagttcatcaatgaagctggaagaagtatagaatattttatttgaagctgatgaagatatttgctgtcagtttctgtttggttggattattaacaagtgtttgttattctaactttacttttttttttttttactttatcagctagggcaaactatctttcctgttaaggaggattt

SEQ ID NO: 6604 - DNA, 2041 bp, Ricinus communis
  Intron number 1 from transcript 29852.m002016 (locus 29852 .t000035) derived from phytozome v7.0 (chr-ID 29852; pos 1 185538 to 1187578 reverse strand)
tccttacaacgtcctcatcacaggctctacaaaaggttcatttctcttctgattttttttttttctcaaaatttccctttattattattattattattccatgaaattgaagttgaaattgcttttaaagtgttgatatagaaaagatacgaaatgaaactaaatagcaacctgtggtttctattatctttaatgctatgtttatttcattcgaaaaagaaaagagagaacgttaaatggaaatgataaggttgatagagatattttggttttatgaaatatgttcctaaactagtgtaggattcatttagaaatactatctattatgttagaatttagtttaactataaccaattccatacaaatttaattaattgaatttcatattaacttttcattcaaagcacgtaaactttggatttgcaatgaattccataaattttatggatattaaccaaacataacgtgagctattattgatggggattgttaaggctcctgagttcttaaggtatcatttgattaacattaatctttttctttttaaaataatgttgtaaattaagagtatgaattccattaagggcgaattttgcattgagttttggaaaatgcttttccaacctcaattttcattttgaatattttttgttttttttcaaaaagcaagttaatagatgcttttcctaagagcaggtttggaaaaagcagtttataaatagattaaaaaatcaatattattaaataaaaaaatttccaaatctgctttttgaacacccaaccgtaattccaaacacaccctaagttagttaagctgggaatggtgcactgtgtctataactctgatttttgttgggtgtgtttgcaagtaggacttgagtttattataagaccatttataagaattataagcttaaggaaatgagatttgttggagtgttgggttaattttgaagtaattttgctttctgaattctacatttgtcatttactttgcaattttgttggtgtattgatatgcaaaaagatgttgtggagaagctgcatagcaaatctgcttctagaaactagaggtgcaatatttttaaaatttgtctctcctttgagtttgaaattgtacaagtgctaactcatttacttatatggagaagtaaaatgttataaaaggaaatggaaatggggaagaaacagaaaggatgtcgtttccacttaatatagctggatagaactgaaagatgttaattccattcagtcaggtcaagtgcttttagttaagttctgtatagtcgaggggcgcatgcaagatatattcttttcaatacaataactttttcttgtttttgtaatgagatggctagataagttattgttgaattattttaccttcttgccgctccttttggagatcttcaactttagtttgaccacatcatcgtagcatttaattttgatactgtaagcagtgctgcgaatttctggtagatcttcaactttagtttgaccacatcattgtagcatttacttttgttactgtaagcagtgctgcgagtttcttgtaatcttaggtaaatgtacttgatttaaataatgatgtcttctaaattatttacatttaaagcttagagtttttgagtgccaaattggattaataaccagagttcattaggagtagaatctcttaaaaaatgcctatgttgatatcgatctcatcttctaatacagcactgacagtaatttttatggtggtagattttcatgattttacttttaagattgctgttttgcttagaaatgtgaactcacttagctggtaagtgatttatgttgtacacatgctctctctctctctctctctctctcattatctctaatcaatatcttactttctaagtcatttgtcaaacatttggcttaacttcaggaatagaaccattatgtactagtgaaaaaggtttaatgtcttaaatatctatgtttcttgaactggtagttgtttctgtcaaatgagattcatttgttatgcataattcaggaatagggt

SEQ ID NO: 6605 - DNA, 2380 bp, Ricinus communis
  Intron number 3 from transcript 29093.m000078 (locus 29093 .t000001) derived from phytozome v7.0 (chr-ID 29093; pos 4 7324 to 49703)
ccgagtcctctgattcctcctctagctgtcctgaggtaattaatatcctaattttttctctatcaacgtgcacatagtgttggtaccatcagatgcatcagtatgtcattttctttattcaattgatctttgattttattagagtaaacttatttccacggccggagggaggtttggtttttaaagggccaaaaattatagaataggtggaccgactaagtgggtggtggataaaataaataaaaatttatatagctagaagtaaacaaattaaaaaaaattaatttaaaaataacgatctcagattcggctacgaatatttttttattaaaaattatttaaatttttttaaaaaatatgacatgaattacttcagggtcgtaacacttgatatttaaacgttagatcaacttggctgcggccctacgtatttccaaaatcttaattgctaggtcactaccatcttcaagtaagaaagtcgatgatatgaagaaaacataaggttgtatccataccttatgaaaaataatatatttttattatcattataatttacggagaaaataatatacgaatagaaatagtacgtcacacatggaatgaaatctttataactatatattataagattttcatttatttttcttttagttccgttattatagcttgctttttataagagataaagactattagatattattattacagcttgccattagccttcaacatctgaggtaatggcagaaagagacaacaatgagagaccattaataaattttatatataaaattatagaaaaatattaaatattttattaatatttatctcaattcttagctatttaatgtgacatatacttttataaaaccatcttttaatttaaaaatattaaagaataattgagtaatttaattatatgtcatattaaagcaagaactgtaataaataatagcggctcctctttatacttttctcctccaaattgcgcaattagtgggggttaactggcagacttggcgcaaacagaatgagaattcataattcccacagccatgaacaaacaagggaccatgttatgaacatatttgattggtggttgcaacagacactactgtcctaaaattcccccagttgtgggcaatcaagatccttctttttataattttgctttaagagtttcagtgaagttgttgaccaattaagatcatatggatgtgcaccaagtctaaaatttaaggcatcttacggttggaaacttcttctaataccccacagacacgttcaagaaaatcataattataacagaaatactttgtctaagacgttcaagccataactgcacatgctcagtttgaaattggtctccatgtttacatgctttggatttcaaaaacatattctttatacagaaaagttgacctttttgtatgcttttgtagctgcacttaaatttttgttatttagtgtcaaccctttaaagaattggtttcaaatttggaattcacaacatctgtttgaagaaaaattttatatattttttcttatatatttctagtgtatgtctccatcaatgcatcaaaccaataaatgtttgacacatatttattagattatatatcaatcatcaaatatcatatatatgtgtaactcttttgttaattatagtatacacacaacatatagataagaattttccatttaaaatgatggttactgcctgtaatcccctgttgagaacattgtgaacattcatatataaccaaataatgtatgttcttgaaaagctaatctgatcccatgcatatgttggataggcatatgatgtacatgctaaaagggtgccaggcagctgggatgcctatctggacttctaactctatatataaaacaaaataaaatagaaatctctaatcaatgcaattatatatcatgtatggccagttgggcccttcttttgcatccgaacatctcagctagactgacattcttttaccatctatcgttatatgcctcatctaagttaatacagtaaattccaatgttctaacagtagtaagggaaactgttagataattataattaagcttgtgtacagaagatgaaaccttcttagacatcaatttctagagtgtaaacttgagtactgtaacttgacctctgtgcttactagaataggatactgagacttctgcacttatttctgttacatcttacagtatcatccctggtatagctcatgcttcttctgcaggatttatttatttatgtgcaattatgagtaagacgtgcctctttgataattcgagattcagaagcattaatcctttgttgttattttccagggaaaggttccaattttatctacaaccgcattaca

SEQ ID NO: 6606 - DNA, 5098 bp, Ricinus communis
  Intron number 2 from transcript 30206.m000753 (locus 30206 .t000001) derived from phytozome v7.0 (chr-ID 30206; pos 1 4077 to 19174 reverse strand)
acagatcctggtagcaggtaattgttttaattagtttctgctatctaattaatttgttttgatacttagatctgagtggaagaatgtaatttcttcaattattaatcttgcatatggaatttagtagaactaaagacataatttgtatatttgaataatacattagcagcactgttgcatgagccaaaattttcctgtttttgttgctcaaatctcgagagaacagcaaactggttgttatgacatgtcctgatatttgactaatccgtgggttagagcatgactagaatctgtaatctaaattctaaatacactaagaactattaaattaacattattttcagtttgatattttgtctatttgttggatttagtttcttacaagggtggagattagcattttgctacttgtaaaaactataagaagttcatgtgaccttggttatgtactactttgttttgttgtgtatataggaatacataataaatcatcattttttatcatttgcaaaattcaaatggagttttacaccaaattgcaaaagttgctattttacatacatttagtttaaatgtcttcgattgtatatactgtgaaatctttttatgaattgcattaaggggaagcccattaatacattattggatgaagagagatgaggaaatttcatgatcttttggctgctactctccagttaatgtttaaattcttaatattgactgttgcttttgtttcaaattttaatccaataaagaaatcagtgttgaaatcatttacagaaaggagatgagtaggaattttagagtccaaagaggctttaaaccactaagtaggctgtttatgactttctgtgatgatgttttcactttccatctacttactgtaagaaagtaatgatatgtgccagtgaggtgaattactgcagacttttttttggttttcggggtatatacaaaaattagttgatggaaaagtttatgttattaaagggcaaacctattcacaaagtgaacgatttctggatttcgaagcaagatgattatattggcacatattcaccagtctattgaccattgctgactgttgccagcaatcaccgagtttggtagccattgatagctatcacagccattctattatagtaattctctactataaaactacaaacgaaaaagtatggagtccctacagcttcatgctcatttttgtcattgtcacaaaattatttcctagtgatgctttgattgcatgatatttttacattacaaatggtctttgctgcttaaatacagtttgaacatactacaatgcagtgagcaacatcaagaaagagacgtccaaggtggtgtgagaagggtcttaatttttggaggaaataaatagttccaagcaatataaccaaatacaatgaatttcaatctattgtataccttcagagaatcaaaacaacaattcatgctcttctattactgtatatttactgggaagttcatatagttcttatggtttatagagagaattttttttcttgagagatgtgctattagtaaatacgatactcaattctctgttgtttacctaatataattctataaaataattttaaagtgttcttttcgataggtttagagtctttggatggagagaaatgcatgtattttcaacaatttgagttttttttctaatatgtcatgggacaggtggtgtcttccatgtcagaatctttttctttaaaatttattttcttaccaaaaacatacgagaaaggaaacagatgtataacttgtgcattgcaatgtcatgggtggtctcttggtattcctatatggcgtagcattttgcatggttaggccctaggtttacttatgtgtcttgggttgtcttaggccgaactctgttgctaaggcatggggtattgaagaaagcgccttttagggtttgactagagtataattgttgaggagtaaatatcttttttgcgaataattactaaaagctccttaaagtttaaaataataggctctttagtccctctccacaagtttgaacattataagaaactctacaatctctgatttcacaaatttttgcattaagaatggttataggactaaactttaaagttattgattttggaaatcaaagtaaacaaaataaaaattgaaaggggctttagcattcctctttcgttgtcagcttgactatctagaaagtagaagaatgcttctatgttttggtctaatccatcttaaatcacagatcaaagactaaaaagctaatctgaagaagatatgaatatgaaaaatgcttggaaggtcttaaccttaactttagcaatatgtaagaagcagaaggcaatgattttttacttgacaatcattagcatgagaatgaataacttgggtttcttttaatttgagctattgtgcttgagttgaactatgcttagttatggttgctatttccttacaattaactgtatacaacttcagttgaattaatataaatgttcatccatctcgtcctattaatgtgacttgccgtgagaaatttgagtttgctattatgatcttgtgtgtttgtgatttctttaatctgcacataatttttgctgaaacatacttatgaaatgtggatctcaaaaatacctcaaggcctatcatagcctgaaggaccactgttactcccaagctaggcctcaactgtaagatgatgtatatctctttaagggggtgtcttgtcatgcaacttaagagtgttgaaggattcttttatttatcaaaaatggttgcagttgtgctgctggatttttttttaaaaacaatttttagatcttaatgatttggtttaaaccgttggatggtcttagataatcaataaaatagctacagttgtatgaatttggacaaggttaatttcacaatatgatttggtattctgctcttagtgggatttgcctcgtttccttccaacaactgtggagcagtaacaaacataagggcttacaggattaggcttttagcattatgctgttagaaattatggataagggagtgactaaatttgaaggagataaatgaggagggagaaacattgatcttgtatggctgaagttttactggtggtgttttattcctaactaatctggctcgaggttagctgtttcttcttttcttttttcttgtgattttatgtggctgcgtctgtcttttacattgaaactagttacaatgtgcgactttgtgtgctttgttgcatttgagctattcttctgttttgataatattcaacggagtcaagcctttattgggcgctcttatttctcaggatctgggtctatgcaacagttaaacattcttttagtgtatttatcattgtattggtcattggtgagattgtttaaaccaaccatcaacagtttgaataatctaatttgttttatttaattggtggcttttataccaaagcatatgtagaaaaaccaacaaattgaggcgagtttagctcttgcttgctacctaactaagctggattttctattctttcttgttttgggtggcatttgagttggagattatgctaatcaatctcaggtttatttctaatgaactcttgagtggccatgtcttatcttatttaagatgctcagaggaattgtctgttaattgatattattgtttctcacattgttactctactagatcttgtcttttgaagtgcatgccttcatttatgtttatgatgcagataaagaaaatatcaagaaaaataaaattcaaagaatcaagagatttagagttttggtctaataatatttataatttcagtacccaaaggatatttctgtaatttccagctttgccggaacagtagctaaaatatattttaggtgtctttagtgtgatttaggagttttagttagtttagtattacctagttagtattagtttcgttttcttgtcttttcttttctattcctctatttcagatatgaatttctactaaatcaaatctgaaattgaatcttaaacctttaattttccgctaattcaacgtagaacaagttttctaaatctgtcctgtgtaggcatgtatttacaaacttgaacttttagaacgagtggttttcttgatcaatatggcatcttcaactaagggatccaatatttgggtttctggtgtattcattttaaccaatttttgtttgagatagatgttggcctatactgactccccacttctagccttattgccctaggctcaagggagtcttagaaacacaaaactctattcttgggctattatcttccatgttgagcttttagacggagtgattccttaatagcttaaatattttaagcagatccttttatggtgcacgggtgccggtgttttgctagatgtttgcaatcaattgtatcatgcaaaacaaatttgtactttccaaatgaggttgtctttcttgtcctattctagtacaaacatagtcaatgcgttttatgtgatttgagtacaatattgtgaacatgcacttcatctgatacaaatcattattgtgatagtggtcatgttaaaagcatgtggcagccaaagttcaattggagatgaagttaaaagtcattctgcttcttttaatgcaaactataatatgtgatattgtattagtcactggctgcgtatatgcttcatttctcatgattgtatgtctaggtttgcatgtgcagtcaagaatcatgaacgatgtgaatttttggatgcttcatgagaacaatatatctataaataaatttgagtacaaacttgttaataaaaaatgcatatgctagttgtgcaatgtgcattcttgcagtaagtataagatttattagctagtaaacctcactgttgatcttactctgggacaagcatttatttgttaaagtatggtggctgtaaaaccatctggcttaggtcgtccacgaaaaacaaataagagttgcaagcagaaatggggacaaggattctattattggtctcaaatgcatttgccatataagctaatgttgtgtgttttatctggcaggcctggatcatttgatcaaaagggccatttgtgtg

SEQ ID NO: 6607 - DNA, 1734 bp, Ricinus communis
  Intron number 3 from transcript 30078.m002305 (locus 30078 .t000098) derived from phytozome v7.0 (chr-ID 30078; pos 6 28478 to 630211)
ttcctatccatacaccctcattctgaagagaataggtattatttgattgcttccatatttataatttgctgttaggattttgtttcaattaattttagactaaacagtgttttatgcaatttaagtcagaagtgtttcgtagttattgtcgatagttcaatttgaggatttcttcatgttgagagagttagcctaacctacttcttcaatcattgaagtttgcaccttgaaaaggctaaggaagaaccttggtcaaactgaaattggatatactagtctgcatataaaagactcatggaccaactactcaattagctcttaattaagaagtatcattaggtcatatccttaaaaggttatatatttaagctagattctggaaactttattgtatctggatttaatttctcacaatttggaaatttcaggttcttgcatttgtaaaactatcatcactcatctgtaaataaggaagctggacacttattagatgtgtaatttgcatgatctgatgatatttaattttagttgctgactgagttagatttgtacttaatgacttgcatttgttgccttcttgtgtaattttaaagttctctatccatgttgtatgacctatacccattcatcttagccctgttcttcactatgaagtgcttccaattagttgaggttggtactcttcctaattgagatagctaatgctgtgaaccttttgcaatcaaacacagttcaggaatgcatttgatggttcaggagtatactcgggtggtctgtggatcatatctcattacaaattactaattgatcagattgattttcaagttgattggattttagacactgaactgtctctgcagctgctttacttgtaatctgtctttaatattatgctagttttagcagatacttgtcattcttgcattgttgagtatttggttttcattcatttgattgatgcatgacatactttaactggacttgttactggttagaaaaaagagcttccggttcaaggatgaactttatcgagctaattcaagataattcttactgtgcatcttaaaattactttctgttcctataaactatttattgcccttgctagttctggctcctatttgtaaaggtcaaattcatagacttgataggagtgcttccaatatagatgctactcatataacatgtacaacaaattttgaatgctgaaagcgaatgtttatggtgtgatattctcatttgttttttaacatgaaatggtcccaactcatatcaaatggaattgaaagcaaaccatgaactagtatctattatcttacatcatctatcgggttaattcttctgtgttcacttttcattccataaaaagtcatagttaaatatatatagtctcataaataccaagtgaacattttggtgtacttctagctaaaaggaagaaaattgtgctgtgtttgccagatgaggacttataagtcttgtgaatacttaacattggcaatgataagctctaaactgtcctcttgtaaagttatttttgtttctaaacgaggtcagtagaagtcttctctaccctttctacatgtaattttactttatgtgctgcctccatgactgagaattagcatcttgaaatgatggcttatattactgctagttttatcacaacaatggtttattgacactaaagtttgcctaaatcttgaattcagaatagtctctttaccagacaat

SEQ ID NO: 6608 - DNA, 647 bp, Ricinus communis
  Intron number 1 from transcript 29983.m003262 (locus 29983 .t000161) derived from phytozome v7.0 (chr-ID 29983; pos 8 73798 to 874444 reverse strand)
gtgtatacgggaacgtaactaagcaagtagaggtatgcatgatcagttttgctaataataatgatgtatctgttaggattttttgtatgtttaaagcttacttgctgatttgagcaagaaattatgatctcattgactgtcatatacctaacaacctaattcaatctttgcatcttacgtaatggaaaaattgaagtcttttttcatatttctggatctgtgacagataagatgcgagtctaactaccaatgtctgtcctgtatccgaataatttgaatttcgaccataatattttcgcaagatgcaagaagaatgaaatgaatctgattcagtgaaagttaatgtctttcagccacattgtattgccatgccataggaggaaaaaaaaaagacaactcacttgattagtaccaagacaagtaggagaagaaggaaacggttctgcagttttatggatggggagaaagaatggcacaaatgtactattttcttccttctgcccattccagaaaccaccaacctgccgctatgtttgcagtctacatcttatacaactttttgtcacaacccttttcaaattctttggagcatgtaacaatcttctctgatgattttcttttttaaaatttttgcagaacaatctgtt

SEQ ID NO: 6609 - DNA, 2713 bp, Ricinus communis
  Intron number 3 from transcript 29168.m000382 (locus 29168 .t000018) derived from phytozome v7.0 (chr-ID 29168; pos 9 9093 to 101805)
ccttgtctaaaacgtatgttttttactcttgttctatgctgactgtgtcaattactactgaggaagttttctgtttgatttggcatgtgttaattagtaattggaattgatttttagtatatctgattactagacatagtacacttgcaattcctgctgaagaatttgcttttccaccattagtaatagtgactgatagaatgttggcttgtagtttggaacctaaaggttgtactgttttagttgttttaggcttttagcaggactagtaaataatcattgtatacaagactttcatgatcctgttcaagtactgtatataatcatctgtttcactagcgtattttttctggatgcacttttgttgattatatgtgtgctttcactttgtgaagctgccttagatttgatattaataataacttaaagtgataagctgacagtatcatcaaaatagttacatatagttgctaagcattgaatggttaagaatgaaatgcttgttctgaaaatcgagatgttgaagatctgttatagaaggtgatatagggatgctggtcaaggagatatgatatagacttctacagagttccattgactggagacaactatgaacttgttgaagttaaaacactttatcatagtaccaaatgaagtagaaactcctaatgaatagagagttttggtagcataagggaatttaagatgtgatgtaaaggatttatttcagcatcatcatatttgggaaatttctttgcttcactacgactttatccaatggcgtctttctttcttttcctttttatattgaacatgaaattggcccttatacttgtgcacattttgaagggctaggaccagttgaaaatttggggtttctgttctaaactattcaggacttgaaaatgttggagaataatgtagtttggtggtggaaggtagatgaatttaaagagatgaagatgcttttctgggatagcagctagatattgagagttacggcagacataaagttttgagttagttaggggagagtgagatggaaaattattggggacataaagtttatattggtctcatgttgctgatgcaatgaatttggaatgttgttagattaagaggaaggtcttggaggtcactgaaatcctagaggcaataatctggaaaacataaacagcagaaattgggaaaaagaggagaacatggagaaaaaaaaaatgagaggagaagaagcagaaatgtcacacaggtcatttatcctttaagatgaccaatcacttaagattatgctattggtagtctaagaaataaaactgttactgaaacccttcctggttctattaggatttgaaattcgagctgctgcaattccaagagactgacaaggactcagataaaacaaacatcaaactcttcggagttcccaggtcatgtaggaaaattacaatatttatgtgtcgctggtaaaaatttctcacctaactcataaagccccaaattaaaaactcaaataactataaattagaaagaactgattttcaaaaccatatcaatgattactaaaacttagtggtgggctacagttgttgtagctaaaaccaggcagtgaaatcctcttctaacagctctaataattgtggtctttagtgatagttacttcaagttatgccgacaaaatcttgtatattaaatgaacaatttgtctacctatgcattgtatggattgttgttatttttcttattataattttttttgattcaaaacattgatactgcatttctttatttaaaaaaattatatgcataagatttggctaataataaattaaacaatgtgataaaaacttttgctatttttttaattataaatattttttaatttcaaaaattggaactacacttctttatttaaaaaaaaaagattatatgtatatagtttgactaataataaattaaatatatatttctataataagaatttaataaatggcataactacaatatcaaaaccaaatccaatattttaggattcttttctaatagaattctcaatattttaaaattctctgtttttttttttttttttccaatagtgtttagttaatatattaattacatttataacttaatagatagaaatataattaatttgctatttttaggattagaatcattatttaattacataataactttgtaaaagaaaagagcattattacgcctgtgtcaaaactatcaacaagtggcaaagaatttttaaagctctgtctctctccctctctatctatatatatatatatttatatatatgtataggtaggtagatagatagatagatagatagattttggagttctaatgctatggattacttttgatgtagtctccctttggataataaagatctgtccttggatatatgaatcagcatttggtgagtcattaactagacagcaggccagcagcctatatcctctgaactttttgtgccatatagtgtatttccattggaagatgtactgtgtatgtgcacatggctcatagcttttggataaccttttagtcttatagcgtcatttaaatttcaatgatgaaatggttttgctctctggaactgtatgtcattaatcactgataagttatttgttattatattgtactttattgcatgtgatcaggcttccagtgcgctgggacaagactgtcatagtgg

SEQ ID NO: 6610 - DNA, 2010 bp, Ricinus communis
  Intron number 4 from transcript 29687.m000571 (locus 29687 .t000012) derived from phytozome v7.0 (chr-ID 29687; pos 9 0842 to 92851 reverse strand)
tgttattgcttgtggtgggggcttcagaatttgaggtaaactcacccttttctcatttctttttttgtttaattgctggtgtaactttaatattctgtgacacttttacaattaggttagtctataaagaaaatagatgatttcttgctatgcaatgtttcatataaaaattttgaagttaggccgaggcagaatgagtaggttatattttgagaatactcgatgttttttaaagttctcactttagagaaaagactgaactatttccaggaggtttttgaggatagagttgctatgcctctggaaatatataacggaaaagagaatttatcaattaatttaacagaaaattgagtgtctggaaaaaatagaacagcagtggatattttgcaagcacattagagttttatgtaattttctccgagataacaaacttcaaagtcctacaagtcttatgtttttaatcattgagttttaaatgattttttaaaattaaatcgtaaaagcatataaaagtctttccgcaagtcttagtccgtgaactctgacgaatacattgatttggctttaatatgtacactttatcttgccacatttttttccacaacaccttaacgtggctctaattttatgattaagtcttaaaatatcttcttcttttacaattaaatcctaaaaattttctttttctttcatttcttttttataataccatcacgaataatctatcaaaaaaaaaaaaaaaagttatataaagacaatcaactaagttgcaaattctttagatctgatagatattgatacttgcctttatttgatttgtcttttgtttgatggatagactttttgtgacgatattatgaaaaaataaagaaagaaagaaagaagataagaaaagaaataattttttaagaacttaattacaaaagaagaaaatcatctagaacttaattatagaactagaaccacgtcagagtgacttggagaccaatcagttaattttaggcctttagcacgagttagtgggtcaacttcttataggccattatgatttgttgcccaactaacttatatggcattttttcccacttatttcctatttgaggttctaacttcaaacaaggaacattattacttcatttgttgtgctatttgattcaaagtgtatggaattgggttgctgcaaatagattaaattagttgtctatacgttcctttgttggatgagtttcaaatatttgcagctccctgcatcttcatgctattgaatatatattttgaaatttatatcatatcttgcccctctagctctatgaacagatagttgttccataatctagtggaatcaaactaaaatgcagggtgctttgtcgcctctccttttttcaatagatatctgcaaaacactgggctaagagtttgcataaggtgctcttgtactagtggacgactttttattctttttatttatttatttggatgtaatttttatgtagttttaacaaaagtatgttatctgatgatttctgaatcggtggtttaaagtcaaattatgatgttttgactacttagattcctgatcacccattggaatgaaactaaagcattcagaatattgtttcagccatcatacattatttgtggtggactaaaggttaaacttccagtctctttattatgtgtacctcacctgtgctatcgccaattattcttattacccacatcggatcacctctccctgttggcttataataagctgcacataggaaaatatcttaatttccactcggtcaacatgtccaactgatatggtttccttttcattaatttgtttttttttttaaggttgcttataatcttatttgcgtaaactgattgtccttgcactaattatgttttaaaattatgtgcatgaggatctagccagtgtatctccgtaatggtttttgacttttcaatattgtctgatttacagcacacttggccaggggcttcagaccagcacttatc

SEQ ID NO: 6611 - DNA, 1112 bp, Ricinus communis
  Intron number 1 from transcript 27613.m000645 (locus 27613 .t000038) derived from phytozome v7.0 (chr-ID 27613; pos 2 42149 to 243260 reverse strand)
tttttctgcaaactgagaaggaaatttttactttggtttgtataatatatctcttctttgatatcttctgtttattttgcagtttctttcagcttttttgtgttcatagtcattcttttcacatctggtcttttttatttttattttttcagccttttgtgttcatagtcatttttccaaatctgggtgttcttctttttcattttttttttggtttcttgcataactaaagttttctctctgagggttttttttgggttagattatggggtctgttttaaaattttctctgcaaaaagttgtattgtttatgaagatttctacccttgaaagttgggttctttttaatttttaaaattatttttgaattaataggttatcttaaacatgataacagaaaaattgggtggtggagtttggaaacaattggaactcctttcatgtttttagttcatataagagaaaggaaaataaagcaaaaactataaaataaattacatgttttttggttagtagaatttctcatttccctttttctactttcttgtattttgtttgtgtttctaagcttaaatcacaattcaatggtttcttttactctgcacaactacaaattctgaagtgtaaattttttaaaagttttctttcatgttttaattaattagttctctgccatttctttttctaaagcttgcatttttaatgtttaatactgttttatttactatatttatataaaaagctcatttttttgtcgttgtttctgatgattttgtgtagagtctttcgtttccttatctggatttcctgttctggttgggttgacaaaaatataggggaattttcttccctttttcagagatttagaatcctggaagatctactttcataaccatctgacagaaaaatgaaaccctagtttcttttaatttttttttttttgccttctgttgagttgtagatctgcaacttgctatgctgcttagattctgtactttttgacttttatctctttcctaaaattgaactctttttggtagtcatttattgtattcttttgtttaaaactgttttaatatgttaattacaggcctttattatatagattcaag

SEQ ID NO: 6612 - DNA, 1470 bp, Ricinus communis
  Intron number 3 from transcript 29929.m004600 (locus 29929 .t000103) derived from phytozome v7.0 (chr-ID 29929; pos 5 65929 to 567398 reverse strand)
ccactgggatcattggaagatcaccttcgtaatgacttattgtgctttgaactttcattttcaatttttgccatttgtctgtttccttttgccctatcaagttcaataatttcttctgcatttgttttagacctctgtaaatatctgttatgctgaatgataaatgccatttgttgaaatgtcattcaaacttgaaaggaaaacaaaatcttgaaagatagattctcaaaggatagggcatggcatgcttcattatctatgttgtagggtagctaaaaggcttgtcctctaatgttggttaaaataagtacatgggcaaggtcaaatcagttggactctttgagtttctgagtgacagctaagatgagtactttatttattggtattctctgaccttagtgactacaagagttaatatccagctctctttccccctcctctttttcagtttccacatgggcgatggaaagtttaccagtagatggtgacctgatgcatatcccatctctgtgtttctttcaattcctttatttaatctttaaatattggttatttgccaagttttaatttaactaaattgcatataagaagtagggtcacgttcttttgtaaatcataaacctgagcctaccttaggcatgtctagaaatgttgattaatcatttcactagatgctcaagaaggaaagaaaaattagtaacagtatggtcattgactggaaggagttcagacaaacaagtaaactttagggtccttatatgcaatattagtcttgttgctttctgagttatataaacgatacataagttgccaaccatgttttgatagtttcttttagcagtatgttctgatatttgactagattttataaaaggtataactaatttgctgcttattagaactcatggaatgatcctctcaggctagctatcctggtttctgacatgaatttaaatttgctgacacgctcaactactaaatttcttagtcaacctatttatatatttatacagtctatattttaccgttgatgaataacttgggactgaagaccaaagatcaaatagtgttggttaaaatttcaatgtcttggatacaaaagcaaatctaaggaggacatattaaatccaatatttggtcagattattggttaaaattgaataatgagctatcgagcttggagtctcttggatgattctttctgatggcttgctctctaccagagaaatatctattctggagtctagattctagaagctaaactcttcattcatcaaattatatctgtagtttacacaggtatagaagcattggatgaagtatcagttttaagattcttgggccgagtattaataatacttagatgtgtgtaccattttagcaatttcttgctgctgtactgaccagtggttgatgaatccttacacttacacagatctgccacctgctaaggaaccgctcgattggaac

SEQ ID NO: 6613 - DNA, 764 bp, Ricinus communis
  Intron number 7 from transcript 30174.m008657 (locus 30174 .t000054) derived from phytozome v7.0 (chr-ID 30174; pos 1 977098 to 1977861)
gtgttggctcctcaaatatcgttgaggtaattgtgtttttctttgcaatataccctagggacgttgagactttctatatccggcactcacacacttgcccaaggagcctaataaatttggaagaagtttatgttttgtagagctttttaatgcatggtttaatttttagtgctttatacccattcattttgatgtaatgaacacctttctgccatagtcatgatgtgtgcgtaaaagccagctatttgatgctaatttgtagttaaataccatttaaagaactaaccactatatccttatccctgggttgatttgtaccagggtttatggatcagtttggtaagggtatgtcaatgagaggttctagtgtagtggattcacaaaatttcatataattctggtgagtaaataactacaacggctgaagtacattagtacatattcatttttttttataactttctggatgggtgaccatgataaaatgagaatgcaaggaaaaaggagaaaataatggaggggggaggggggttgtgtttggtttgggtggatttaatcgtagaattgttttctccttctgtttgaatctcataggttgacatccagctgatattctccttttccaaaattcattaccttttccaaaataattgaatttgttgcatgtcttgcagttagtatagctacttcttgtaccataagtttgcaatatttttagtgcctgaattctttgtaatatatgttattgttcctgcagcaacaca

SEQ ID NO: 6614 - DNA, 1426 bp, Ricinus communis
  Intron number 16 from transcript 29629.m001439 (locus 2962 9.t000090) derived from phytozome v7.0 (chr-ID 29629; pos 563148 to 564573 reverse strand)
atgttaagtattgtttttccactttaaaccttagataaaatggatattatgcactgaacttgttttgatggagctgttttctgaattttgagctgttttctgaattcagtccttgattactgggaaaataattcttaagcaatctcataaactctgtttccattttctgggaaagcatgtgaccgttacttgctatgatttgtccttaaatgggaaggatattgttgcaagtcttctttatatactcttgttattgatttcatgtttaagtatttagattcttttttttttctgttcattttaaaatgataaacattttgtcacggtagtagaaattactgatgtaacacgacatagaaaaagtaatttgtcaatcataggtattttttggagtagtaccttatcaatatgatagcattatcccacctaggaggtgggatttttgtatgatccccatttaacaaagtgagagatttcataaacttgtctttgttccaaaattagattttggatgtatactgaacaagtgcaatgttcaaaaattctttgaattaaaagcttgagtttttgataccctgttctgctcaaaatccatggacttttaaaaggcctatccaatatggtggtatttggaagaacgaaggaagcgtgaggtttctggcattatgctatgtctaaggtggtatatgtgttaagtagctgaggattgggatttttttttatgataattttttgcctttacagattatgtaggataagattaaaatcttttggcttgtcatggaagcttttatttgaaagggtttctcttccattcagtgtaactttggacttttagtttgctttaaggattttaactaactctaatttaagtttgagaccttcctgcttgtaattgccaagttctttttctttttgactaccttctgaatacttctattatttttttattaaaaaaaagaagaaggagaagaagaagaagaagaaaatcataggaatatggctacctgtttgatcatgcaaggaatttgcgttttgaaatgcaatttggccaaagaaaccatgcggccatctgaaaatatatgaaatgaaacttttctgattgttggtaggctgataatgttataattttgaaatagtcaactgcattttgatatagccttttcaaatatatttctgcaagttatattttgtgctctgttggtttttttttttcatataaatattctccttcttgttggttttggtcacttttcacaggaaggggcctcagaagtccttattgctcaatggtttttatatagtctttatctgatgtcaagtcatgttaataactgctcacaatgattcttggtaatcaatttataagattaagaatggttttcttgtaggtcttgggtgttttagctcaaataaaagctgacaa

SEQ ID NO: 6615 - DNA, 1359 bp, Ricinus communis
  Intron number 1 from transcript 29827.m002581 (locus 29827 .t000054) derived from phytozome v7.0 (chr-ID 29827; pos 2 93082 to 294440)
ctttggttcattgtttcagagcacaagaagaaaaggtgcatcccgtttcagattttgtactttcatttcttctacttatttgttgtgttactgtcctactactgctgctgctgctgctgctactacttgcttctgtttgtattttgtctgcctgacagatctgtacttttccattaccatttctcttcaggcgggtgtgtttttggtttctttgtttttgtttgcagatctgcacttctttctttctctctttcttttttccctttccctttgtaaccatttctattttcctcttttagtttccctatttttagacactactattgttgctcctgttttggagaattctcaaacaactacaattttctgcactcttcctaacttagttctcactgttctatgcactctctttgattcctctttttgggtttctgatatagttccagctccttctcttttctggttttttcttttttctttttcctcttttctgtgtgctttaaatttggataaaaaattacgcatatacttttggtgggtatgcatacgatctacgtgcttttttcctttcccccttaaatcgagatgattgatttgtattcgtctacctgatattatgcatgagaaatgaagaaagaaaaaagaaaaaagaaatgattaaatatggaaacttttcttttctttgatctcaaggaaattattaaaactaacgatttttattggtttttttcttttggcctttttgcctttttgccttttgattataattggaatggggtatcgatggagttgggtcccattatcatgtgagaaaaacttatacacaagaaagcaaagtaacatggaaagtgaaactagatgtcggtagttgctatcttagatcttgtattttccaagttcacagtcctttttcttaaccattgcctctctatctatcacttttttttaatgtcactgtaaccttctctttcctactttttgtgatttgttacaattgatttagctttccacttctatactaatcattgtaaactggatcacttccccagaattgaattttcaggtttctttcattgatctgcttttccaatggccattctgtttcactcgatctatttaattctctttttttctttctggaaaatggattccatgattttacataatgatatttagtagtgatttttctgaatttattttctcagatatctcatagcttcaatattatgtgttcttgattgcactgaatgaggctaatataagaatctattattatgaaaatgatttttctttttctaaaacttcatgtctgttaattacaaggtgcatattggcaggtagttgatagttcctagaatc

SEQ ID NO: 6616 - DNA, 1550 bp, Ricinus communis
  Intron number 1 from transcript 30147.m014000 (locus 30147 .t000271) derived from phytozome v7.0 (chr-ID 30147; pos 3 894628 to 3896177 reverse strand)
gtttcaggtgtcaccactgtaagggtaccttaaaggttagttcttttcctactcagttctaatacttccgctacgtgttgaaagtatcaaagctggagactttccgttgaattccatcattttatatgttcttttgacgatcatgagcttgttttagtattgaatgtttagatttaatcactgtgtagatgtgtttatgagtgtgttgataatattattaattaatggatgagctaattgatcatatgtagcttaggttataaaagaggagttaattagccccttcttgcttggatccagatcagattttggttggtgatatatagttttggatgttcagtattttttttactggttgatttgtgatagcctcatttccttggctatgaatcatgtttagattctaaattttagtagtgaagaggtgcctcccgccccacaggcaatcaattaagggagaggtggggctgacagaagattttttctaatatagactttgaatggttgagaagcactgtctccttcgcttgtttttttatttgtcggcctggtggatagtagggaagaggcaaaactaaagaatagtagaaaggacttggaaccaaaactgtcttagaaatatcaaattaaacggtaatactataatatgcatattcagaactgaatgtatagttcaatgctagtaactttgagaactttgtttgaatattagggcaaacatctgcactctaagattatacatagggttaactggaccatttctttcagtgcttgtttccatgaacttggttcttggttgaaggtactgtattaagttggcagacctgcagcatcacacagaaaatattactggcaattttatctcttgttctctacctaaaactatctgctgcaaactattatggaatgaagaatggtggagatggagggcatacttgtgtgtttcgatacgtggataatgtcttctgttcacccacaagatgatcccttaggaagtagtttaactagttgactatgagttggtatctcagtagaccattgtcttaccattggtaagtggttggtagtttgcaattgatcaccaccttcattactgttggcattgtttagtgctctggccttgatttggaatctttgctttctgtagtctattaacttttattgtccctaaaactcctattttgcataaaataaattcaatgtattgttggtgaagatatggtctttgattgcttatagaaaggctagtgatattcagattgttgctagtcagtcttatgcagatgtctactgtatgtaacaaggaactgaatctgaggtctgttattgattttgtaaaaagatgcaggctatcttttggaatcctcagtatccgataagtactataatgatcaagttacaattaaaaggcttggtgtctatgtctctacttgcataacagcagcagtatgatcattgtattttatttgatgttctgtatgggatcatggcatttttcttctgcttcttttgcagctgagtaattattcctcctttgaaggcgttttgta

SEQ ID NO: 6617 - DNA, 508 bp, Ricinus communis
  Intron number 3 from transcript 29629.m001443 (locus 29629 .t000094) derived from phytozome v7.0 (chr-ID 29629; pos 5 99490 to 599997 reverse strand)
tggttaccggtaagtgtttaacatgtatcttagtgttttattagtagctggatgtgggttttgtgtattttagtttgatcattgatgttaatgaaaaaatagactgctaagtttttattgctcttggttaacccatttatgcactatgaatcatcatatacttcttaaatgtcctcatggaatatgtaacttgtacaagatgtgaattggtgcaattttgaattgactatcaaaatgattctgtaccattaacaaatcactggttgcaatatttggtccttctcttataaaatcagcatctttattctgttaagtggaaattataatcaatttcaacccaaagaaaacgagaaaaaaatccttcccagaaacagaaaaaagtaaaagaaacctctctaagtacatatttgtaggcagttaggagattttggttattggttgtgttgtagtactgattcacatgtgattcacagcaagggttatcactgatagagatactgggagatca

SEQ ID NO: 6618 - DNA, 1102 bp, Ricinus communis
  Intron number 1 from transcript 30169.m006516 (locus 30169 .t000293) derived from phytozome v7.0 (chr-ID 30169; pos 1 636324 to 1637425)
tactgtatctcactcacattaacaccagtgaccaggtattatcatatctctgtctctcttttctttttatgccttatgcaatctttttttttagttgcatgataacatcaatattctgttttatgcaaaatgtaatttttttttccatttcttttttatttcgtcaaagcataatgacgtattgcagtgtatttgctggctttcctttttttatgtcacttttagttaaccctaatatttctgtttgtttctcgagaaaatcactgattgtattatcatggggaaaaacgggattaaaagctttaagagagtaattacttgcttgtttttcactatttttcttttgtttcttgccaaccaaacagaggttcgtaaatttcctgctgttctttgtggaatgatctagatgattttgactattttcttttcaaactgagattgcttttttgctttgttttttttttttttcttttagttctctacagaatcaagtacaggcgtgcaggaattcctttttttgtatttttttatttcattcgcttttgacttcttgccctttttcttcttaaatttctattttctatttcagatttttgaatgttctaatattgttgaaactggatagcttttagattgttttatttaaaggacttttagacttcttgagttattgtgctaaatcaaaggtaattccttttttaatcagagactacttttgcatgattaacacttgcttgattaagattcttgtgtttttagttggtgctataaattaatgtttgtgatttggttcctttaataatcagagactctacttttgcaaggttaatgcttgcttaattatgattcttgtgtttttagtagcaactatgtctaatagtagcctggatattagagttgttatttggttccgttgatcattctagatcaaatcagttattggatcttaaatttctttattcctgtctttctggcgaagattcatcttctaactttatttagttataaactgactttcccttttcttttctttttcaatggggggttctgtttctataaattgaaagcctcttgcttcttgttgttgttgcacacctctgtg

SEQ ID NO: 6619 - DNA, 2999 bp, Ricinus communis
  Intron number 7 from transcript 30131.m006865 (locus 30131 .t000016) derived from phytozome v7.0 (chr-ID 30131; pos 6 7288 to 70286 reverse strand)
ctgcaaaagcccccagaacctgactttagcgaagagtaaatagtgagtttgttttgatgagtgaagccaattcgattattttgtttgcatggtaaatctagttatgcagcatctgttgtatgtaacaactgtaagaaatgtgtgttctcaattcctaggatagtacataatttctacttcggtacagaaatatgccagagtatatgactcacaatttgcataaattaagtgtaacttgtacggatttatggatattgaaaactagcctttaacatcccataaggaatataaaaattctggcatcagcttcaattcattttatgtctagaaattaaaaaaattgaaaggctgaacataattattaattatgatccggtggctaattttgtcatttgaagtggaaacttgaaggggaagaagagagctacccatggagtgtcaatattggttcctcgatttctatttgaaattttcttacctaaatttggtatatacaccgcaattaataaaaaaataacacgtataatttaaaactaatgaatatatcaatcattattctgatttgacgtacagatggaaatatataccgagtctgagtctggacaaaaattttctatttctattcaatgcacctttccaaatttcatccttgttgaaatgctatcttctttaatacaaccatattcttcggatatttcactttttctccttcacgtggttttttttttttttttaaattttaatttgcagctactttccccaatttcatcttcttcccaagtttggttgggtgaattataacacttcgatcttttctttatttttctgaattacatgttaaatatatatataaaaagttaagagaatataaaaatataaaaataaactattgtgtttcttattttctgaattatatattaaatatatatatatatataaaatttaagagaatataaaaatataaaataaactattgcgagtctataacatattagatgattaaatcaatacaaaaagaagttgggtaaaggcttaagacacaaatttgtttttgtattcgtaggaagaaaagaaaattcatgatttagcaaaaatacaaaattcacaatatatatatatatatacaaataataaattagtctaaattaacctataaaattaattatcattttaaaactaattaagaacataagatttaattaaagaaaataatagtgatatttaaattattaggaattaatatttatttatactccattaatcaaatatctataatctccaagtcactatatgattcaggttattcaaaagcattgagtaaatactattgatattttaaccaattaaaccacaatttcgacaatcaaacaatcaattcaatcaacacttgtataattaaattatctttgtttactaaaatttttgctttaagcaaactctaaaaatgtctaattgctaattatactctctcatcaattagcaattaaataaatatctataggtattgtgttaccatctcttaatctataatccaacataaatcataattttagtacccaaaaaaactaagcatgtagaacaaaaataccacatatcatataaacttagattttataaataattaaataaaattatatttcaaaccattaattcctaattaaagagtttaaatagatataattaaaataaaaatacaaaaaaaaaaaaagagagaaaagaattcataaaatgcaagtttgagaaactagggagaaaatctctcaaacttcattcctagattttcaagtttgcactcatttgatgcaatctcttttaaagtctctcttctaatgttgtttaatttctcttttcaatacctttaaattttatccaatttagtttgcatttaaacgagaagctattacacgtcatctaaactatttaaacactttttaagaaatttaacttgatatttttaatcacacaacttaaaacatttaaataaaaaaatgacaaaaagtttgaaaaataatgaaaataatataataaagagtattcaaatgttataagaatatagatcaaagaatatgtctgttaagaatttttttgagaaataaacattagaaagttatgtaaaatataatttagaaaaattaaagagtataaatgagcttaagcctatgaaagtttcacgtaccactaatgaagatatgtagtgttagagacatgaataaattggacatgtatcagacacattaagaagaaagaataataaattgaaatgtgaattaatattttacatagaaagattgtacaataaataatatgttttactctaggcctaacgatactaaacttttatgtccaattataaatttagcccatttttctaatttttatttaaattatctaatttggttaattaattgcaattatagataaattaaaatttcgatcatgatagagtgacgtgacaatgacttatcattatttattatcaacaatttatacatcactgccatatatatttacacattatacatatagatgaataaaaaagtaaataataaataaaaaaattatgaattaataaaaagaatgggtgaagtcgtttcttttctcactttcatagtaattttatgcaattctgttaagtagcaaatgatattaataaaataaaaaaaattatcttaaaaaagtaatatctaattttgaccgaaattttaattagctatactttaagtaaaaatttaaaaaatttaccaaatttgtaaaaaaaaagacaagtatttggattttaaatgtaattaggcctttactctatctattggacttgttgtttagtagttagaaagctgatagcttttgttctaagcctgttaagattttaaggcggcaaactgagtgtatatatatatattcctattagcactcggagtacaaattaatcatatcactcttaggttattcttcttctttcgctagggcaaaaatcctggtgaattttttcttagagtacg

SEQ ID NO: 6620 - DNA, 1112 bp, Ricinus communis
  Intron number 2 from transcript 30148.m001442 (locus 30148 .t000041) derived from phytozome v7.0 (chr-ID 30148; pos 2 35480 to 236591 reverse strand)
cgttagcagagctcaataatctttcatcctctagggtaagctctttataagctttgaacccttttactttccttttcagttgtgccaatttcctatgccaagtttgcctcttgagatgcatataccttcaatgctttactttctgctatcaggaactgatatcgtacaacaaaaaagaattgatattggtagttaatgggagtgataaatttgatttcttcttttctattttttttctagttttgaccctctgttaaattgttctttcttatttataaatttcttgtttgttgctttgcgatcttttctgttttgaatttgggcattcttttatcaaagcatattttcaaaaacaggcctatcttgtatgttatgtaaattgcaaaattggcattgaagttttaataattagtgctgtaattatttatattatgttattagcacagaggaatgagtttttttaatttgaaaattgtaatgcattatggagttttcgtactgctataatcatttcaaacgagtcagttgatgaaggagtgggatctatggtcatttagattttcgaatcaatgttatgagatgtgatagttgcctttcagttgattcagtagaaaagttggcagcttactttcctcttcttttttttttttttttttttttttttttttttgtgaagtccttatgtatttgttctttttcttttcttcatcttcttgttttttgtactccactttaccaatttgtctataactccaattcattgattccaaataattagaaggccaacttagaacccatttttagtttgaaggaaagctaaatacctttgttgtctgaggcatgtctgttttctaccctcttctagtagagagcacaacatatggcatcattggtactgtctttgagcgcagagcatatgcataaatatgcatattctaaagtgggcacttgaaatgcttctattcttaggatttttctgtcaataatttgctatattaaagctgttattttgccctcgagtctcttttagcataatctttgtaccttggaggcctattatacaggaaagaataacatatttccttcttgaccaaagggtgtctatcagaaaa

SEQ ID NO: 6621 - DNA, 5503 bp, Ricinus communis
  Intron number 4 from transcript 28883.m000750 (locus 28883 .t000040) derived from phytozome v7.0 (chr-ID 28883; pos 2 23557 to 229059)
cccaacctttgttggatccccttttttgcaacgtaagttcttcacagctttggaatttgtctgctcctttatgctgcagttacctatgcatcttattccttgaaattggcatccatttaaatggtttcgaattatataattttctaatatttacaggttgtagctttttgccccaattttctacaatgtctctttcatttggtttgttttaagtagttcttgtccttgcctcatttcttgaggaaggaatatgatactttagtgcatgaattagtgtgaagtttggagttgaggaccaaaaatgcagtccccaaaactagtagtggggcttgctgcagtagcctcagtgcttgctgagatattgagttgtttgttgtagagttttgtggaatgattttgtgttcttaaatttggccaaagccatgaatttatacaaagctattctatcattgcttgtacactaagaatatttacataaataggaaagctaatctaggaaacaaataagttaatataggaaaggatatcaaggagacaactcatctggagatgttgtagcctagtaaatatttacagagtaattacaaagatattccactaatactccccttcaagttggagcatggagattgcaaatgcccaacttgcgaagaagtaaagaaaactgtgatttaccaagggctttggtcaaaatatccacgatctgtgcaccagttcgaatatgagacgtagaaatcaatccatcttgcaaggcatcacgaataaagtgatagtccatttcgatatgtttcgttcgttcatggaaaaccggattagccgctatataaagagcagcttgactatcacaaaacaatcgcatgggacgcacgtgttgtatcccaaaacaagccaaaagggatttcaaccattttaactcacatgtagtagtggccatagatctatactcagcctccgcagaagatcgggaaacaattggctgttttttcgttttccaagagacaagagaagaacctaataaaacaaaataacccgtcaataatttccaagtcagagggcaacttgcccaatcactatcacagaaggcagagagttgaaaattgctctcctcgtgcagcagaataccctatcgaggacaaccttttaaataccgcaaaactctcaaagctgcatcccaatgttcaacacgagaatcacccatgaactgagctaatatatgtacagagtaatacaattcaggtcgggtaatcgtcaagtagattaggcgccctccaagcctctggtacttatctggatcatcaaaggcgacaccattgatggtggcaagatggtggttctgttccatgggtgtagaaacagggcgtgcgccaagtaagccagccttacttataatgtcaagaacatatttgcgttgcgaaagaaacaaaccatccttcccacatgctacttcaatgccaagaaaatacttgagaatgcccaagtctttcatatgaaatctctcgctgagttgttgcttgaattttctaattgccaaagaagaagaaccagtaatgataaggtcatcaacatatacaagaacatgtaaaccaacatcacccttaaaataactaaacaatgaataatcagcataagattgcttgaaaccaatgtccttcagagcagtctagagcttagcaaaccaattctgaggcgcctgccggagtccatacaatgacttgggtaatcgagacaccttacccgaagcagcagagttaaaaccaggagggagttgcatatatacctcctcatcaagatgtccatgtagaaaggcattatgcacatccatttggtggagttcccactttctggctaccgctatagccaaaaatgtgcgaaccgtgaccatttttgctacagggaaaatgtctcattaaagtcaagtccggcaatttttcgattttcgtacaccactaggcgcccctttaatcattcaatcgtaccatcagatcgatacttgactttatagacccatttacaaccgatcgctttctttccaggtggaaggtcctctaaagtccaagtcctgtttctctcaagtgcatctatttcgtcttgcatagcttttcgccaaccaggatccgttacagctcctttaaaagatgtgggttcaattcctgtagtaattgctgctaaaaaacgggtgtgtctcacagaaaacttatcacactttacataataagtaatgggaaaaggagtacctgagaactttgacagagtagagacaggtgatgtgatggggtttgtaacacgaacggtgttagcgatgaaacccttaagtttactagaaggtttctttattcgatgacctcgaccagtttcatgcaaaacattttcttcattaatcacaacctttctaatatctgaagtgataacaagttgttgaataacgtccaagtcgccacccgcaggtggtgtgatgtgtagtataatcctgctatcgatttctcttgccatacctaagtgctcctcactcccctttgctaagggagtatcctcaaaataagtcacaatatcataatacttcttattttcaaacacatcatcagtagcaggcgtatagactttactagaaaaaggaaactgttgttcacaaaaaacatctcgagatataaagaaaactttttcctctaagtcatacaaacaccacccttttttaccaaatgaataccacaaacacacatcgacaagagcgagaaccaaacttatccttcacacgagattgatttttggcaaaacagagacaaccgaatacacgaaggacatcatacttaggaggtgaaccaaaaagaatttcatgtggtgttttattatttagcaatggggtaggagtttggttgatgacataggcagccgtcattatactttccccccaaaaagaaatggaaagattagcttgaaaaagtaatgcccgaaccacattaagaatatgccgatgtttacgttctacccttccattttgttgtgaagtatcaacacaagaggtttgatgaataataccattgtcagcataaaaccaatgaagacatgtaaattcatttccattatcactacgtagaattttaacatgcttatcaaattgagtttgaactattctacaaaaatccttaataagttgaggcacctcaaatttggcagtcatcaaataaacccacacggctcgagaacaatcatcaataatagttaaaaaataatgagcaccacaactaacaggcaaggtatacgcatcctagatatcacaatggattaaatcaaaaacatcttttgctttattattactcaaagaaaacatgcttttagtttggttggctcttaaacgaatatcacaaggttcatggataatattaacatccttatttccactatctctaataatattaggcaaaagaaattctactttccgagaagggtgtcccagtcgttgatgccacaagtctcttttatttcccacagttgcttgataagcttgaagttgtcgcaaaggccgaaaccaataaaccccatcacattgctcacccgctccaattagagtccttaaagcacggtcctgtatgatgcaaagcttatcagtaaaagtgacagaataagatagatcggcaaacaagtgaaacactgacagcaaattacaagtaagatctggaacatataatacattatggagtaccatatgcctgtttaaagttatcgtgccttccttagtggcaatagtttgtttaccagtaggcagcctaacagaagtaggagaaacatcaaatagttggctaaataatctagcattaccaatcatgtgattcgagcatccgatatcaatgatccattcagcagaagaaccaaatttaccgctcaacttttcggttgaggaagacaacccttttgaagtgttaagtaggtgcacaagcatagtccactgatcatctgaaacacccaggaatgccacgatgatctgaatcttggatgggtgcctgagcaacaggcttcgaggtggttgcggcgtttgctacctacccacggcctcttttgccagcaccctttcctcccccccgtccagacttgcctccgcctctactgtgccgtccattggtacagttctctgaataccagtccgggtacccaatcagttgaaaacaattttcttgttcattgagagcaaacgttgttggttcgaggccgttcattctgccccccaacagccccttgtgctgtgaaaccgacaacatcataattggtttcatgggtacgagcaacagtttggtgacgttcttcagtcacgattttagcaaaaaccgtgtttaagctcggcaaaggatccaacatcaaaatgtttgaaacagcagctccataaagagtggaatccaaaccaataagaaaatcatgtaccttttcattctccttctattgagcaaaggaagtagcagtggcacaagtgcacgtcgaaatagtagaatatcccgcaagttcattccatatcttctgtagttcgttgtagtaattcattaccggctgcttgcaagaacccaaaagagtttttaactcgtgaattctcggaccgtatcgagaaacgttgtcaaatatcgtcccacatgtctttcacatcgtcgggttgcaagatggaggagcgtaaaactggatcaagagtattatgaatccatcccacaagtgtggaattaaccgtcacccataaggatgcttctggagttccttcctttggcttggttatggttccatcgaggaagcctagtttgttctttgcacggaagttattgcgcatcgaacgaacccattcattatagttatcaccacataacacaataggacaaattgtaatgtgtgggccgttagagggatggaggtagtagggtgatgtgaagtcgagaggtttggtggtctggtcgtcacccatgatgagataacgatagtcatatttcgtggtggaaaagcaaaggtttcagtcgctggagaatgattgagaaaatggtcattgtctcctgtcttgaaatggctctgataccatttaaagttttgtggaatgattctgtgttcttaaatttggccaaagctattctatcgttgcttgtacactaagaatatttacataaataggaaagctaatctaggaaacaaataagctaaaataggaaaggatatcaaggagacgactcatctggagatgttgtagcctagaaaatatttacagagtaattacaaagatattccactaatatttgtgactgcattattaaatggagttaaggacacgcatttcatttatgcacttattcttgagtttctaatatggtctattacagtgaagtaattcttaaagcagttaagttttgatactagatacccaattgctgacgttcaaaccaacatatctgttgtaatcattatcgttgatttaagcagttccgtattcaaaccaaacatagattcagattctttcaggtcacatatctagaacctggtgaga

SEQ ID NO: 6622 - DNA, 1303 bp, Ricinus communis
  Intron number 6 from transcript 30068.m002666 (locus 30068 .t000156) derived from phytozome v7.0 (chr-ID 30068; pos 1 014269 to 1015571)
ttgggcctttgattgatctttgtcgtcttgaaaatgtgagttataaaatctttttctttttcatatgcttagcgaccaagcctcttcataatgcgaatttttgataagttttttctttcttttttctccaaactcagtttagaattgaccttaagcgtgcaggctcttgtctggaatggttttctatatcttaatataccctgcaataactgtcacattttttttattcatatggccagatcttttgacagcaaacctttcaaaacttaacaagagattgaccatatgtatgcattgtcaaactcttggctgtctttagaagtgcattggtgaccttttaaagcaattccagacattctttctcagggtcttgctcactgtaatattatttttcttgtgctttctcttaaagtcattgaactgttggtatgcttggatctggtgaacatgcttaagggtccctattatatgcccacactgatggcattgatgaatgcttaacttttctatgattttattcttagtagtttgtgacattcttggtgctttctttttatctgaattttaatagttgtgaagttttaattttcggccccacctccctcaacttctatcatgtcaatgaaattattccttctttcaacaggttgctattctttgtagttctctaagcatactgcatatgtttctgaagcaactactattttcgggaaggaaattgggagaaaggtatcatctactcgcttatatgctctttttgttcatttacttcgatttctcagttggaacaaaagacttgagattgtatattgcactttgtattttgtggttatctggtgatagattgtttcagtcacattgatgttttatcagtaagtggtgatggcattgttaaaaatgtcaaaattgtggagtaatgcatgataactgtggtagaatctgaaaggtagacaagtccacatgccatccatgactattctgacagtgttatgctgttgccctctataaaaaacaaagcagatatgtgtgcgatggttttgtggagaaatcatgaagtttattgaagttcatagcattgtcttggaaaaaggaatcaatgctccgttcttttagatgtattcatgtttggactgcttatgttctgtgaaatgatgcttctacaaattcctacttatatttgtgggcttatgaactttgatttgaactttccagtgcactctactcagggacactgtcaaggttgagggagcaaaatccgggaacaatttcaaggatagaggcctgtttagagtgaatgaggagg

SEQ ID NO: 6623 - DNA, 1074 bp, Ricinus communis
  Intron number 1 from transcript 29630.m000787 (locus 29630 .t000012) derived from phytozome v7.0 (chr-ID 29630; pos 7 8431 to 79504 reverse strand)
tacccttgaaggtgtcaacaagtgctcttcatttggtacctccctttctactttctgtttatttttatttgatttcgttgggattgtttatgtcattgcatgaaatgatggatggatttggatcttgatttgatttttgtttgtagttattattccttttgtactatattattcatttcgtttttcattgtgagggatagatcctgatttgatttggtttatgttggcaatgcacatgtttaatattatttcatattcttttacacttgcgtcataattgggcatgtttatgtttgtcattaccgtgtcacgcctggcatgttatgcctcaaacttatcatttaatcctaatgctgttctctttgctgatacatagatgcatataaatgcgactgaattgtgtttatttagtcgtaacttttattcaattatgtaatatgttatgcctgattattttcctagtcatatgttcttactttttttttcttttctagaattctatttgcattgttgtgtttgcacgtttattcatagctcagcttttatgttttgatggatgctcctcgtatttgtatatattttttaaaccaatggagcttttatccattggaattaaggtatgagtttgttagataggttattcatatgttatttttgaggtcaagaattcgtcattggattataatttggatgaggaatttaatagcgtccttatgtaactactagattcggtttctgggtggactcctaattaacaatgtgttcactaatagttctaagtggattttggacccttctcctttcctaaccacattctatgaaatttattttgcattcatttcaaaattttcttgcagaattatccttgttgatgagatttctttttctggtttctgatgcgcattgttgaaattttacctgttactttatgcctacattttttattgtctatgttttctggatcaagatctagatcctctttcattatgcttctattgtgtttcttggaccaatttctcattatgcctctgtgcttcagattgtttaggcaggcgactaggaccaaggtttggt

SEQ ID NO: 6624 - DNA, 3469 bp, Ricinus communis
  Intron number 2 from transcript 30190.m011101 (locus 30190 .t000337) derived from phytozome v7.0 (chr-ID 30190; pos 1 834627 to 1838095)
ccgggaaattgagaacactttacacgctctaactggtttgtccctttccctttctctctacccttcaaccttcctgtgtttatgttaatcccttcataattattatcttttttgtttataatatatacatgtctgtcatgtgataatcattttaagcttaactaattaagcgctaaaaatgctctcagaaaaaaatttggaaattaattcttttctcaagtaattatagtgatgtgtttggaggatcaacgggcataagattttatcattcagcatcaatctttcagaatataagatgcaatttaggaaggttttctttcaccagaattgtttatttgggattaataaataatgggtttggtgggcaagaggataagaatagctgggcgggttccttgcaagtttgagaagaatccgtgaaggaggttgatgcaatgtaatagggacctaccattacataaatttgattaatagcaattagttgttagttagttgggtggagggtatcaccaccaccaccaccacctccaccaccacatccctactagctcccaacaaccgataaaagtacagaattggaatattattttttctttatcttgattgtatatatatagtaaaaataatgcatgagtctttttgatggtttctccaccttgaaaggctcgtttagtaagtatatactgtttatataggaggggtcatcatcaatctttcatcttattattgcattaacagaggcaaaattaaacacacaaagggctgatccactaaattggtagcaagtcctgaagtaaaatgctaagagcaacagatcagcccttaagatcatcccatgaagagttcagtttttaaatgaatttcggaatactataaacagtataatttactaactaaataaatgaaggcattattatttatggtgtctgtcctgcctagggtttggtagaccctgacttgtagcttcttatttccatggccgtactccaatccataaaattctagaccaacttctctcacagcagtctaggcttaggaaatagcaccgactttaatgcaagagagccattgtatagtagaaattatctcatggagagcatgaatatttgtaaatatgaaataatatatatatatatatatgcaatttatttatcagtagtagtcgtgtggaagagtttaggatcaatgcatccatctaaatggatagtgctggagaagaaataagtcaaggatctgtctcgtagcaatctcgtgcatgttggggattcatcaatggtgtaataattttcagttattatactattgttaaacatgaggatggtgatagagcaaattattctacagctagagggatggtttatcttaaatgaggaacatgttctagctaaatctattgttaaacttggtttagttattaaataatatttaaaatgatcaaattgaacttgttactagtttaaatttaaggagtttgaactttgacttattcatgaattatatataatatgctgtttggagatctagaaatagggaagtctaatactttctcaaagaaaacttcatgtatataactacttaggaagaaaataccattataataaagaagttgtcaaatagaattaggtttagcttcaatcaatactaaaactagccatttgaatgcttagatcttatcacttataagccttttaaatttgataattgtttactttaataatgtggatattctaacagtctttctcaagtacaaatggaattcaaatttagagatcaatggttacttaaaattgatatttttcgtctcaaacttgaaaataaattgaagatgaatattcaggtagatcattagaaaataagaaataaggtcatacttgttctgatgcaatattacaaattgaattgattaagatgagaataatataaatggacaaaatatattaaaaaaaaactcactaataaattggatttaaatccaaccaacatcaaaatattggttaaaaagaacttcaattacatgttaaatttttttatttggccataatctcataatagaaattggtaaactattagccacttagcaatcagcttttcagttcgtaaaagcttaagcttttagtctctccgttaaatagcttatttaatgatgtggacattagctattgcatcatttcaattagaatatgtattaacttatctttcatgattttaaaatggtagttctctaaattcatgcatcatttctttcttccataggaagctattttaagcctcaataatgggttatattatcatgccttagcttcattaggtatttgacatgattatcctcagatgctcatgacttcatgatttttagcttgcgaaagaggaagtagttttaaagccgtttcaaatgctaaatctctatattttactagaaaataatatccaaaaactttgctacaatgaaatgctctctttacatggacatgacttaaccataataggaagaaacattttgattaagcagaccattctaattgttttcaatttcttttttccattgaaacaaagtaaactgatatggagttcaacctagaagttaccacataagctaagtacagatctttgctttcaattcttaggatgaagtgaaaagttttcttgctaggtaaactattgagttgaaggaatcaaatagttgagaacaaggtttttctttttttttttttcttcccactctctagtctttatttatgctaaaactgactgagatttagcaatataattggtgatagtcgagaacaagaatgtccactttagaattcataaaaagggggttcatctttgtatgggttagagttcaaggtagtctagtggtagctttagggtttcgctagcttcaggcccaaacaattaacttgagattagccccgcctaaagtaggcatggccctgctgccctgtcaagttctgtgtcaaatgcaggactaatgcaggatagccttataaagcatccatttccctatatattttgcagtctttccctgtttccaaaattaaatatgaaataccctttagaaaaaggtatgaattcatctggaaggaaaaaaagaaaaaaaaaaaaagagaaactgtgaaatctaatagccaactaatcaaggtgtttccaatgtgtttaggattcgagcactctttttactgttttttctgttttattttaattttaccatcacctaatcagaagaagcacgcaaacatgacataatcttttcacgagtcacaaaggccttgattgtgtaagctaatgatggaagaatccttctacttttccattaacttcggaagaaaatgattatttttgacatctgagacgaaatatgtcttggttgattaatagtttttgtaattttcatgataaatggctcataaagctttctttacgcgtctccttttcaggagtaactctaggtgaaggcacaggtgcaacc

SEQ ID NO: 6625 - DNA, 3489 bp, Ricinus communis
  Intron number 2 from transcript 29631.m001030 (locus 29631 .t000037) derived from phytozome v7.0 (chr-ID 29631; pos 2 25590 to 229078)
ttgttccagaaaggtctcggtaagtctgcattcaatcgtaccccttgtttttctttctcttttttaattccaaaatgttgaatgaaaaggaaataaaaattcttttccataaataattcaattaaaaattcccaaaataaatgtcggtccacattgcactagacaaattttcttatgcaaatctctatcacttaatacttcattagtttatctatcatgctacaaatagtaagcttttgactatgtatttcattaatctaattagattgtattaattgtgggttgagtagtcaaattacccccacaaacttttaataatcaagacgacaactcctttgaatctcttcataaactaatttagaatttgatatttaaatttgtttaattgtgtttgctcaagtaaaagtggctgcccaaacaggtaaagcataagttgcaaattcaaaatcaaagtattattgttaaagtaaaatatatttttaaattcttaaattttttaattttattttattgagtcttttaaatttttattttgtttcattaaatccttgtaactttattttacttatattgagaatctaatactccttaattaaaataaaaaatatataatgactcaataaaataaataaaaatctcataaaacatctacaaaaagttattaacaaaattaaaaataaaatacaataatttaataaaataaaaatttaataactcaataaaataaaataaaaaagcttaagaacacaacaatagattttacctattttcaaaagcaagttgcctcaaagttcaaactttattctggtttttcttgacacatttatttcgcacgcatggtttctgactaaattgacgatgtaatgtgccactcaagtgctaattaaatattttaaatgcaattgcaattacctggggctaatggtactctggttaggttatatgtagttaaaacataatatttagatttaatatctaatttaaaaaaatatcattaaaattttgatacgaaataatatttcctatcgaactgtaatttttaattattttacatttcacttttctctagtaactatcatcactttattttaaatatagagaaaatgaaatgtaacaagggtcattgcgcaaccacttagttgcttaatcgagtaattaacgtcattctacaatttcaactcctaataatataattttatactaaaatattaaaaaggggatattaaagaaatggcctttgggaaattgataagacttttgtcccatgtccgtctctcatgtgatgaattcttttgccttatctttaaattttattagaggtgacatattgatttggatattcatttaataatttagaattgtccctatttgacattgatatcacaatgcaatcaattcttatgtcttttactttgcactatttagtttttgtcctttgttgtgaattggagtaattgtcataatacccatattaatcaatttaattaagccatataaagtgagatatcctcttagaaaaatattaaagaaggccctttttttagtatacaagcaattaaaagttaaaaagtagcatatagtgtctattgatatgtttataaagccactagaatctcaagtgtaattgatttttcagcacataaaactagctaaaaaaaggaccctagagatattaacttgattattaacatctgaattattaactgaaaggtgaagacaaattcctccattatctaaaatctaatttcctcctcattccctaattatatagaattgataaaagcaccaaatttagataattaaaagaatcccaaatctcaaaagtacttagccataatgtcaataaattccattaaaatcaaagcaaactcacagaagaattgaagttgccaaatattgaaaaagtttgtaaagtttccaaaagaaagacaaatcttaaatagaaaattaaaattagaagctaatatgagaaaagaaggaaggcaattattatgtacgctttttagctaaaatttgcttcttagtcccaattcatgagtcggtctcacacatcttattctagtttcttctttatcttcacataaccaattaaaagaaaaaaccaaaaaccttttttcattataattcaaagatctgattaaacgggcagatctcttcccctttgttttagcaacttatcctgcggtctcccatattaatacgaaaatgagaggcacatttctccataaaatgatgagttgatgacgtgatgatcgttagcctcacgttcttccttgtctccacgtgtcaacaatcatgcgtcctccttggttgacttaccaccgaaactctcgcgaggcactaaaaaattcccgtcagcaaaatttttgtattttctgccacctttattgaactagtccaaccaccgttggatcaccgtccataaacatcaacgctctcgattaattttctcaatccgttaccgtcttacaccgcgtcattttcctttaagaggaggataaagtcgtcattttctagttcgcttccctgtttctttacaggggggttgaacaattctgtcttaaaataaataaattgaataatccattaattttcaattattttaaattctttatcaaaattaatcataaacatggggacctttgctgtataagtaagaccactagatttcatataaataaaattcaatactatattgtaatttttatataacttaaattgatttaaattttttataaattcttggatgagattctttcaataattcatttttggggacaaaataatagaatccataaatttggcgtattgtctttgatttactaccttaaacacgaaaacctcctttctgacagaattgtccattttgtcctactacgttgatatgttttaacggccgttaaattatgcaaaaacgaggggttaaaaagtaagagggaagagaaaatgcgcttatataagtgaagttgataagtgagtctgtgctgctaattctttcctcccaaacagagaacagaaagcagaatctcattgcagagaaaacaaaaaaagagaaagaaaaggtccgcagcttcaactagtagtatctgcaccgatcccgattcagatttttaactaaaagaaaccactgttttattacttaaattcttttcttttatcttaattttcatttcctttcctccttattctaaattctctttctcaattcatctgtttaattacctttctcttccacgcattcattgtaatcatctttttcttgaccatcggtttttggcacgttcttgattctggggactgtcatccattcattttctgatattcttgattttcataattcttgctttcttagttttctgtaattgactgatccggtagttggcagttctctttttgcacttcttttcgtttgatgttactgtttcatttctgagaagatgattctgttcttttatttctgaaatatagcagaaggaggaagaaaaaaac

SEQ ID NO: 6626 - DNA, 1994 bp, Ricinus communis
  Intron number 1 from transcript 30005.m001264 (locus 30005 .t000030) derived from phytozome v7.0 (chr-ID 30005; pos 1 74756 to 176749 reverse strand)
tcccaagctgacgtctcttacaggtgagtgattctgttcatcttatcttttttgtttctgggttttgtttatgtttttttgtaatttgagttcttttgatgatgcttgcttttctttcttcttttttcttttctgccttctcgggctgtgtcaatgttttggtttctttttgaggtcaaaagggtttgaagctgcttgctggaattgttggcattttgaggacattgatttgtaatatgggttcagtgagaatttatttgtgaaattaatataaggggaaagcagaagattttatcattaaacagatcctgcaattggaataaggaaatagtttgtttctgtctccatgttttttaacagctgaccttgatggttagtcatttaaataaatgaatagaagatcatgttgtttgaaaaggttatcttgtaaaggtatgttttgttaatgtatggttcaactccatcttctgtttttgatgatttggattgtggatttacgagttttcttatcaactgccttggccattgtgttgctaattttcttaatgtggtcttttcaatagaatgaaacagggcctccaatatattttgcagttctgttatgatgaattctattgaataatgaagaaccttgtcttttagattcaccgtgagaaaaatatggacctcttgtctgttcttaatgagatctatagataaaagattctataataaaagcattctgtacaaatcaagctactgtcaacatcatctactaatatggttatacgagtaattctaatatttagtagttttttctttgttggattatctacagtcttttccagaaatttctgtaatatatgctactgtatacaataaatactctgttttcctattctcagacagcagtcgattattcttctcaagggaagatccagaacaagtagccacccctaagtccacaaagtgtatattatcatcagactgcatcagagttagctaacttggtttaagacaaagcagaagtgatgatgatgtttcttgatgagtgaccatcaattagtttgctagttttggcatcatgttctaaaattgcagactttcatgttactttgactgactgattaagtgatgaataatgaatcaactgagttgtttgtcgatgttacttttgtattttgacagttctataatttgttgtgaattactttcccagtttttgtattttgaatttctaatgcattgataatagttggctgacagtttttcaaagttgagtcttggattcttcagtgtgcaatagattttctaccacaattctggtccaagctcctccatccttgaattctagttaaaacgtttccaacttgtaagaagtcaaagctgaggtttttaggacaccttaacatttgagatatccaacactggcaagtaactcatttctgcagtgcctaggagaaaagtactactgtgcagtctccttatctcccatgtttggtagtttcatttttcttgttatagacttttctttagtaactaccttcatgttaattgcagtggcccctttatccctcttgcgccaactgatttttccagtctgccaacaatcacaaactttataccggagtatattttgtgtcaattctatgcaatcctttcagtttttcacctattaaaaactttatttgttacaaagttgcccttttttgggtattagttctgcttttcttggataaatcttgattgaccctgaagaatcgggatactttgatcaaattacttacgagtcgaaacatgttagtgagatattgttcttttctgctatatccatataaccatcatcaatattggtgtttagtttcacactgcttgtggtgtttgtcaagtgcatatgttgttttatttctcttcctgttgcgcactatggcttgcttcttgctgtttgttagtgataaatgtttctgttctcctatgcagttgtgggtcttgtggatacccgttgaatttatcgt

SEQ ID NO: 6627 - DNA, 1513 bp, Ricinus communis
  Intron number 1 from transcript 29625.m000704 (locus 29625 .t000031) derived from phytozome v7.0 (chr-ID 29625; pos 1 65958 to 167470 reverse strand)
gcttatcctacaccctcaattacgctggtaaaatcctccatttcgaaatcttaggttacgtgaatgtatttaatgtgatgtttaattgttcgactagttggctaactgagttattttttgccaattgattgatttttctgcgcataatcatatatcgcctatttgaattactttattgcatatattaaattggcttagttatttgtgaattgattcagtgttagtataaaatattattagtgaatcaattagtattatcatatcaccattattggtactaagttcaatttttgagtactttctttattcagatggttaaagatatttagtttattgctttccgtggcactgaatcggataaaaaaataggtacctttgtttgcttttttagtaggtgtttgcttgtagctgttatatttgtatatgtaaagaaaaccttgaaacttcattaattttgttggaaatgtgatgttaaggatgcttaaatgttagattaaacggtagctggaattattcttagcaattgcatataacataagatcatgatccttttgtttttttctctctcttgttcttacgaattttcttattgctattttgatttgatttgttacctctttgagtagccttatcgattgattaagttccatattggcttagttaggaggcaaagattaagtggttatttatttgtctttttccaggcctattgaggggataacctactttttgatttagctgttctccaagcagcctaacatttttgtcgatacttatttcttataacatttgattgcttttagacctgttcaagttcaaataggggttgaaaataagagaatctgtggtttaagttccttgcttcttaattaagttggagtgtcagaaatcagttctttatcctcaaattacctccacttgtttgttttgccattgttctgtttgcccctttttgttgaaataatatataaaagaagagaatgaaatttgttgtgtggagtttaagaaactgttggatgttcaatcagcgtctgtatgcggacgtggacttgagggtcactgtcttgtctgggacatactctaggatctgcaatgagcatgccattttctggataataaagagaaaaggaaaaatgtgaagtcagtctctcaattagaatcaccttcatcattgttaataagttcaaatttcagtggtttcttgttcggacggtgaaaggcatttctcaggttaatgctatcagtggcatttatgcaaaaagagtcatgtctttgtttgttttacagtggtaactacaagggcttgaaaaatgaattaatagtatatgctaatttaattggaaagtaatgtattatacaaattattttccagaaaagaaaaagatgataagtttgagttttatgaagttattacctgttgcccgttggtcatggagctttcttcaactagttatctttcttttatttgtattttttggagcttagttttggttttcttgttcaattttaacag

SEQ ID NO: 6628 - DNA, 1216 bp, Ricinus communis
  Intron number 1 from transcript 30131.m006949 (locus 30131 .t000100) derived from phytozome v7.0 (chr-ID 30131; pos 5 72081 to 573296 reverse strand)
aatctggacttcgctctccttctaatccttctcaggttcttttatctttttccttttttctttcttcaattcctttctcttctttcttttttgtttcattcaattcgtttctttctcctatttgtctttctttctcattcttggtttttgtttctctcttctccatcaatagaaattgtttcaaatctttttggggttgttataagtgagttgggttatggaaaagtcattgcttttgctttcgttgtctgagttactgatttatgattttgagatcttaagttggtttcattttgttaaattttgatgcttttcactctggtgaatccattttgagatgggttttaatatttttgttggtaggtggcctgttagtcaacttcctgtgagcgtatcttgcctttttttttttctttggagttattttgttgtttagaataaatgtgtatatatgttctagaaatgataagtgtatatgttatgatagaaaagtgatggcttttaatgtttctggaatactgaggttgctaagctacgtgagaggtttgaattttggcttttattctgaaccagaatctcaatagtttcataggactcaatctgttttttgttgcaatctcaaaaccaaagctttacgtttgctgggtttgtagttcatctgaagaacagttcttagtgtatcttgttattatcatatagctattgcagaacagattacttttgagttttgaccaaggctagatattaaggttacatccatggtcatgacttggtcagaatatggaaaaattaggtgcctacatgctataagttggaatacgaaagtgaagaattcctcaccagaaagataaggttccagtggaatttttgtgtattttctgcctgatcattagcatgtcactgaagctgtacatcaagggctaagatatactgatagctatggtatctcatctcttttttgtgtgtatagatttccttgtcaaagttctttagtgcttttcaggttaatatttgttcttaagaaaagatgcggtacttactggcttaaactagggtgtgatgactgatgtgttttggtttacccatattttcatttcattcttaaattattaaggggatctgcaacgaacttgataggaataatgttttttgtggaactaagtttagttgatgccttctgtgaacctaaattaatttgtgtggctatgcagctttc

SEQ ID NO: 6629 - DNA, 1495 bp, Ricinus communis
  Intron number 8 from transcript 29757.m000706 (locus 29757 .t000001) derived from phytozome v7.0 (chr-ID 29757; pos 7 568 to 9062 reverse strand)
ctgaactcattattaacaaggtaatcaatgtactacgcttataaagggtagattgaagttgcttccagtgttcaaagttgaaaatttcaaaatattgatccagaagataacaaaatttaaaattgctaacatatttttctgatgcatgtaatatatatagatgatcagctaaataggaggtcataatgcatcgctatattgctgtattgatcatgtggtgctaatgaacagcattcattccattagactcaatcttttgatcttagaaatttattttaatcaccaaattatatatatatatattgtttagtgtttctagtatcattgctttagagtttgtttcctttcaattctattagtggccatggctttgtgtattggttaaagttgtgcagttgcaacctcaagatgcaggtccaagttctgtgatcatctacttcactaaaaggatgctaatggtgggactttgttaaaattctctctcttaggaaaccagtttggtgggataataatttggagatgatccttttgttttctctaatattctgttttcttaatcatttttagcaatttgatggaagctgcctcttctatggaaagagatatacaattttatgaagttcatgatctgtggctagggcttaggtggtgacatggtgttagtagcgtttcatgtcttaacaagtcttagtaagaggtaaaacattgaagtcaatcactttctggtccagtagcctttccatcttaaacatccggattttaggtctgggcagtagggagcacagggtactggaattatcttcacggatcacactgatttttataattaggaaaagctgtgtaaacttaaatcaactaacccttatttccaagctaggaaaagcttcttatttaaaaaatttaaaaacatcaaggttctattttgatgtatcattcttactgagacaggctacattatagttcaacaaatcattttcaattttctgctaaattactacatttgcacattcttatgttggtgctaaatctcttaaactgaagccatgattcattgcaaatgttctttgcagcaataagattgtagatatgagtcttgagagcaagttttaaagattttgcttaaactaaaaggcttacagggcccaaggtgttgggttattaaaaatttctgattctgtccagtttcgaaaatttagataaagttctccttcatgatgtaggaagctaatttcaaaagttctattaaaattaatgttgaacttggctgccctatgtatttgttttcttttagttactacttgagtttcttggctgaatcattagctggataccaaatttattcaactttttgtgtcactttttcctttccttgtgtttcctcctcccgtcctttatagcatatatcaacatgtttgtcaccatgactcaatctaatgttgcctgttatatatttgttgtagactagccaggagaatttagtatcccatctcctgcc

SEQ ID NO: 6630 - DNA, 2508 bp, Ricinus communis
  Intron number 6 from transcript 29670.m000151 (locus 29670 .t000008) derived from phytozome v7.0 (chr-ID 29670; pos 8 9156 to 91663)
tattttctgatttctcaaggtatgtcctttgtgatgtagaacagatttagagtaagctgttctatatgtaaatttgtgtaaaacatagaagttaaaggttgaaatttgatgtttatgacaggagctgagatacgatactttaatgagcaaagaaaagatagaaaaaacttctaagaatcacctaaaagctcttgagaatcacacctaacaaaaggttccttcagaatcacacctagggaagaactgaatcacacaattcaaaatagcaacatcgctttaatttttattgaactgaaatttatatcctcaactattacaagcctaggtacatatagactaaactaatcctaacactacttggattaggaatcctaaattagaaaaattacaactaatactaagtaggaaatagcataccagtaaaactcctaaatcagactgaaaacaaaataaatactcttaaaataaagtgcagctattgttctagcaaagctagaaattacaaaattttctttggatattgaaattgtaaatattagaccaaaattctaaacctcttgattctttgaattttgcttttcttaaaggttttcttgtttgcatcactttgtttgtgaccactatatcgtttccattaaaagctataaggtcacttttagttttattcttagtaactttttttttttataaattcttattatttggatgccttgctcattctttctattctttctggtggaatatgtatatttccgtaacttaatgagaatatgtgtataattgataaaagtgttctttgtatggtagttcaatggcctcagaataagcaattaatacttaaaacacaaaggcatgacaaaaaaacacattaaactttaacaataaaggttttaaatccaaaatatataaggttcctaatcctagtaatgctagactaaagctataattcttaaaacacttgttcattatcaaagcacaatgtatcattattaagctcaatattgtcttcactatcatcatcaaattccatttaatcacttctaatttccgcttctaaactcaactaagccttaataccaagttaattggattcgtctatatggattctctttctctgcttcaaagattttgggttgcatagttctgtaaatcataaaaaattttgagtttatgaaaattctgtaattagaggtattgagaatttaccaattgggtttagctcagtggtatattttcgatcttcaggtaattgcaggtaggttaatggtttcaacagccaaacccttcccctaaaagacaaaaacgaaaggtgaggaaaatatgaatatagagaagtgcttttctcaagcaggtcttgtagttggagttcactcctttcctccacgcccatgaaaaaggtttatgttctgaggtgtcattatatgcctgtgtttaaacatgaaagagaagaaaagagaaacaccctatctagatatcattagctttctgtcacgagagctacctcctgtctgttctataatctatcctcattgaatctttgtattttgtgatgtggaagttcagtatgaatcaaatcaacttctttatttgaatgaaggcaacttggcttaagaattcattttcttttttcacattttgaccttgtttagttgatttttcttttgggggttttttggtgataaagtctttagaaaatgaggcttttctgtgctgcctttagtagaagttttggatgctttaccatcagaatgggacctcgtcttttatgggacctcaaatgtgggaattggtaattagtcttggatgtagtaatacaagtatgaaagagatcatatagagaattgggtttaaattttaaatgaatccagtgctagatggtttttctgttttcatttgaataaatagtctagttaaacattaaagctgaaattcagatgccaaaatatgtattttgatgtatgttcacgctctttagtgatcatgtttgtttttctagtcaaattttgccatgtgcgtacctaaacatgaatgttcttatcttttcaagagtttatatgagaattacaatcttcttagttttctcctttggacaactgtcttttacatgtgactcatctatggccactttatttattacttgaaacttccactggagttttctagcaaaagaaggatgaaaaagcaggaagggagactgagagtgcttatgtgaaagctgatgttggaagggagagcatatctatattttctattgctagtaactccatcattttttttcatgtttgacgccatttttttgtcatgtttgacaagcttctttggtgggatggataaatgatccgtccaagatatttacttagttgcaacaacttacttttctttttaattatcccatatttgtttcaaataagtgatatgactcagtgcctttctttctttttcacttttttccttttttttttttttttctcagcttaggtactgggaaagagacagaggaaaataatt

SEQ ID NO: 6631 - DNA, 653 bp, Ricinus communis
  Intron number 4 from transcript 28076.m000425 (locus 28076 .t000016) derived from phytozome v7.0 (chr-ID 28076; pos 1 41367 to 142019)
attgcacagttcacaggaattactttggcagtcaggtaagacatatgcagtttgttcctttgagtagatggattctgcaaagatagtgaagcatgcatgcataatgtgtttacaaacttttgtcgcaattttctattgcaataacatgctcattgttccttggaaatgaggtgaagaagttttggatttggtaactttagaatttttttcctaagatgtatgatattgaaatgcattttcttctcacaataggatttatgattctgggataggaatgggttttaggatcttgtgaatgttgcggacctcgacaattttttaaattgttattgccatggtttctgctaatttcttttattctgggcattcatattgattgattttattacaaattattgtaaaatgcatagcacaatgcaacatatccatttcatctgtagaacatgctggagtccttgataatactttagtcattttaattatttggtcgttggcttgaaagcaagaaaactaaaaattgctggaaccaaccaatttatgaattcctaatttattggcgtaactcattatctgaacttttggaactttaatttgtttgctaaattcatgtctgctcagattcaaagctttgagacggagctatcagttccaga

SEQ ID NO: 6632 - DNA, 1905 bp, Ricinus communis
  Intron number 19 from transcript 30174.m008710 (locus 3017 4.t000107) derived from phytozome v7.0 (chr-ID 30174; pos 2338176 to 2340080 reverse strand)
gagcattcttcaagcaagtaagaatgcatattattaaaagttgtatattcactaagttctcatcagttacatatttttcttcacttcatggtttactgatcttgttacatagtttatgctcattgattctatgttgctctcttattcaaacaaagagatagatctgaaataatagtcagaggtcaagttaattaatgctctatctttcttgcatagttgatattggtagtaacagttaatgtggaaatgcttaaattataataattttgcttccaaggaggagcacaatctaggattgattataatcggaatttgtacacacttctgggatccaaggaagtttattctattttcacctgttggattcattgaccttccatttttgcacgagtgcttttccttctgctctctgcatttgacttgcttcttggatgatgtgtctgtatgcattgtgtgaattggaatccagatgctaatggaaatgggaaaatggtgaaacagcatttttcaaaaatataggagatggagatgtgggggagatgtgtacatattttaaaatataggagtaaaatatataaatattaaaactacagggtaaatatacctacaagttccctaataataattaatgcgaaaaatgaaaagaaatagtgactcatggcacttttcttttgattttttctttctgtttaggagtttgattagtcctttactcctaatcggtttaggaatttcatgttcctttgcttcattttcttttgtcgttgaggaaatacatttctgatctggaaatgattttttattttaacatattacaaaaacagggctgaaatgtttcagagaagcttcttggaggtttcctttccgaaacgcagaatcttaaattgggtgaagtttctgtgcaccatagtctagatgcatgtcagcctaatttggtcatgtttagttgggttgtaatcttctttagcttgcttggtagcagagggagacttctatcatgtgctttccttatttttttaattgtaacaacttaactaagtaaccagattaggagagaactgacaatcccatgccaatccagtttgatgaaaggcagctttaggtgttgttgaaattgaattccaaaggttaggtggtaaatgttgcaattttgtttataaggttgaggaatagatgggcatgtgttttattttgaaattcaaacgaaaaaagattgttgaggctgcagtatgtggggcagtggcagtggcagtaatagtgctgtgaacaataactttggccaattgttatttgcacagttttactatggccatatatgttttctttttcttttcttttttcacgtggataaatttttatgtaatagaaaaggttgaccctagaacaatggttcttatattcctatttgatgggaaataaattaggttctcataacaagatttctaatgtttcatatggtgaaaattaacattgtaattctgtaaattatcagcaaactaaaggaaagttctaaactttacaccttaaattttttatgcatcaaacccaatatatcattagtttcactctgtgggttagaattgcattatatgattccaaagtagcaaatcattggaaattcttgtagtacttctacagtttctttatgtgtaaagtattgcaagtgtattcttttagacaacccaagtctaagtccataaatacttggactttaagtatgaagaaactaattattgcatttatttcattttcatttgttaagatattatcgccaatagtagattacaccgcattccctctttaaatgtaaagaattaattggtatatgtgctgtgaaaatttgctgatttgtcaagtaatacttggccgttatgctcctttgtttctgtgtcaggtcagccaatt

SEQ ID NO: 6633 - DNA, 5966 bp, Ricinus communis
  Intron number 6 from transcript 29010.m000218 (locus 29010 .t000004) derived from phytozome v7.0 (chr-ID 29010; pos 5 4138 to 60103)
ggccaggtatcagttgctgcccttgctaacttacctctgatgaatttattatttcataattattcttgtgtgtgcgagtattggaatgtgttttagcaataagaaaaatattggaatatgcatatcctatagcattgacattttttaacattgcaaggctcttgctttaaaagttaaatgataaaacttgatggatgtgggctgcatatgaatttgctaaattctcttgagtattccctttgtggtagaaaggagtgatcaagaaaatggaagttgtaagcaaactttgagagaagaatttcttgtatgttattcactacaatagcatatgtatatagatgggtaaagttcaaaaaactaccatgtgattttgcgcttttacacttgaggaaaaaaagctttttatattaaatgattcatctattttattttttagcattttttaggtacataccatgtttttctaatgttttttaaactgcaaatattaatagaaccataaatttttttataaaataagtattttcaagtaatttaacattcggttagatattttgtgatcataacaaattattaaaatacattctttttttaaataaaattttaatatatttatgaattctctaatgtattagtagatgccatattataaaatcataatttagtgatgtttcaagttaaatacatgtaaaactatataaaaaagaataaaaatataaacatgtatcaaaagaatgctaaaaacacaaaatacgcgatactcctttgatacaaaaaatatctccgtcccttaagtgtaaaaaaaaggggtcaaaccacattgtagttttttgaactataccctatatagatatataagagtaagtcttattctagaaatgaattctatacaaaggactcctaattaggcattgattagtcttttataattaagctatatatactttcctatataggctgtaacttcctatacaagttgtaacactctctcttaagctagagcatagatattgatcatgtgcaacttgttacaaagataatcaacctgagccccatttagagcttttctgaaaatatctctcagttctttagtcttcgcataccttgtggaaatcaatccttgctgtattttgtcacggacaaaatgacagtcaattttgatgtgcttcgttcgttcatgaaacacgggattgaatgcaatatgaagagcaactcggttatcatactataatttggttggaactgaattcttatgacatactttagtcaagagctaatattataatccatattattttacacatagatagtgccatagcttgatattttgattctgcactagaacgtgatacaaccgtttgcttcttactcttccatgaaaccaagttacctccaacaagacaggatgtcctgatgtggatcttctatccaccttagaacctacccaatccgtatacgaaaaacattcattttacaagtgcgtccatgatttgtatacaaaatactacgtccaggtgctattttcaagtaacacaatctattccaaagctgtctaatgaggttgctctatatatactttctcctaaaaatctccttgaagaaaggcatttcctcaatcatagcactacgccatccaagatgagaaagtgcttccttaacagttttaagaacaaaattagaatccgaagaagcaataaaagaacaagatgaagtagacaaatgattgtaagacacagaaaagaagacataataagtacaccgacgtttacctttacaaagagcaataggaagatcatcctgagagaccagatttgacgatgaagaagctggttcaggacttgagttggaagaagtcatccgtcgaaaatacactagcactataggaggcttgaacttaggagaaacaagattagagactgaggatgtgatagtgtggataagcaaataatcatcctctccctgacttgtgtaaaaactaaacagagaaaatggagtactttcaaagaaagtgacattagcagacagaaggtaccttttaagattttggcaataatatcccttttgaacatgagaaaattaccaagaaacatgcattttaaagatttgggatctatttagtgacatgccgacgaacatcccgaacaaaacaacatcccgaacaaaacaagtacactcaaataccctagtttcaataggaaataatggtttgtttggaaaaagaatatgattcggtgcctcaccatgaagggtggaagatgacatacggttgataagaaaacaatctgagaaaacatcaactcgaaaggttttgggaacttgtatttgaaacagtaaacctgttgcagtttctaaaagatgtctatttttccgctcagcaacttcattttgagatggtgtatcaacataagaagtttgatgaagaatgccatgttgaattgtgtaattttgaaaaggtttagataaatattcctcagcattgtcatttcccagagtttgaacaaacattaaattgtgttaatttcaacacagaatgctaaaaaatgagaaagcacctcaaaacgatttttcattaagtaaattcatgtcatttgagaatagtcatcaacagaagtaataaaatacttaaacccagaaggagaattagctcttttattgactcttggatttgaaattagatgctggtgtttagcaaactggcacgactcatacttgaatggagagagactttgagattgaggacataatttctttaacacggaaagggaaggatgaccgatttgacagtgtgcttcaaatggggtaactattccagaacaagctatggatcttggtacttgggtatcaaggatgtagagatccctaaactcatgtcccttaccaataaagtccgagtaaatttgcttacagaaatcaaatcaaagaataattgaggtaaactaagagtaaatggtaatggaagtgatagagtaggaataatcatgctagacctaagaatagaagacgaggacccatttgctaaagtaacatagaaggtgatgtgtgtgattgaaaggtaggaaccatactagaattacttgtcatgtgatctgtggtaccagaatcagtgacccatttggaatatgaggaaataagacatgtattatgtttattggactcaacaatagtaataatatgagtagattgagaacttcgcgtatatatcataactgatttctcggaggtatctttagtagttgcaatatgagctaattgtgccttcttattttgcaatttcctacaatcctgcatcatatgactaggtttgtgacaatagtgatagcatattcctcttgaatcttgtccatgagtatcgtgttcgagcatcaaaattgttggaaccccaccctcctattactattatattgttgtcttctagattcaaaggtattattacgattggcaagggcactaggctaaacagactggggatgctctgtgcaaagtactatactaaaggcatcttgcagagaagaaatctcaaaactcaagagattctgagacttggcagtcttatttccagtggaagacgtgccagaaaactcattacggtcatcttctcttgctaagcttgttgaactttcacatccaggctaaatggtaaccacatattgagtcttcataagtctttgtaaattccttgaaataactcatgagagacttgtcttgttttgctgcacaatagaaagcctagtaaacctcatacatatggcagacattcccttttctagaatacaaaaagtccaaattttccatcaagtctcttacaaatccatagtgatttatcaatccaataacatcactatcaatagagttacatatttgcaaatacaatcaagcatcttccttaagccaggtttgttttcaatcattatccttaagtgggtcatcagacaaatgatcatctttattaatactacataaataaagtctatgatcatctttatttcaatccaaataattagacccatcgagtttatgttcggttatttttgatattacgggaatcgtattagacatgactacagtctctttctctaccataacaccaacaaaatgcataaatctcacaaggaaaaaaaatttcagaaaccaaaacagaaagctcaaacttattcttttaagaactcgagcacccgaacacccaatcacccaatagaccatagaaatcatttctacagaaccaggcaagctaggaaaacaaaccagaaaaagattctggcgaagcacgcaccctcatgctgctggcgtgtggaagtcaggcaaattttttgaccagcaacgtgagattccagcgaccgaactctctagacaggctatgagcaagcggcactccttgtgcaggcggtgacagacggtcgactctctaatggtgtaacctaaacaaactgccctccttttgtcgattttaaatccaaaccaaaaactttgctgaatttaatttctattattctactctgatactatgtaaacacattttgggagaataaactcttgtatgttattcactacaatagcacatatatatagacataacagtaagtcctattctaggaaggaattctatacaaaaagggattttcattaggcattgattagtctcctataattaagccatatatacttttctatactgactgttattttctatacaacctgtaactgaagttaagggcaaggcttaaataaattattttttttaagaaaaggtttcttcaagtagagaatagctagtgaaatggtttataaattgaggattctatctttgatcatgagtctatctaccctcttcatgagttttgtttgtttttcatccactgctatctcagatagtaatgattctttatcctataaggcttttgtttcttgtgagcaagaagattatttgtatactttctttgtactagagtctgtttgtgttttagcttcttatttaagttgtttatgtaagaaagaaataagtattttggatatgcgatccttattggcatatcatgtttttgattgattggaactgggctatctttagtttgttcaggaaatattgacgcaacagtgtcaataatggaagtgaaaattgccttaattatggcatttgatttgggcaataggtgggtgattcacatgtttatttgttgttttttaaactctacccttttcattcttctaatcattatgagcctctatttgtcaatttatatgtgactatacgattaagcacatagatttaggaggactaaaccttttaacccattgcatgagcaaaatgcgatcctttatctcctttgctctaatatcaagatacaatgagaggtgtcctgttttgattgggtacttcttttactgtcatcttgtttaccacccctgtagtgcatttagccggtgatagtcatgttcacaagtaggttcaagggcaaagcaatatgtattaggatccttaggtcaaattcctttttttttttaaactataaaaattggaacgttgataaataggcttggatagaacttatttccaaaagctagctcaaaggaagggagtgcccaatccactctccctcacacttagcatgacatgcaaatagggtggttccgaatccatcattgcaaacaaaagtctgaatgcgatatcatgataaattggcttgggtataactcattctcaaaagctaactcaaaggaagagggtgcctaatttacatatatacacaataatagcctggtaacttagcaatgtggaacgaatataacttttaacaaacatattcttgaggatgtcgatatgtagtctaaacttcctaagtatggcgttctcttttgtcatgaaaagtatttatgtgattaatgtgttaaaaccaattccttttaatgtgttaaaacttattattttctggaaatgtgctaccctatacagcttcagaaacatctaagtg

SEQ ID NO: 6634 - DNA, 2264 bp, Ricinus communis
  Intron number 5 from transcript 30005.m001258 (locus 30005 .t000024) derived from phytozome v7.0 (chr-ID 30005; pos 1 27580 to 129843 reverse strand)
accttcaagctcagagagaacaagcagagagacatgtaagtactgcaatgaaactttcttagcatcattgctgttctgattcttgttgtaacctttcttttccttttggagtttaagaacgggtgaaataagcctgtctaactaccttcaggttggattctcatctctatatgaataaacggattaataatgtgattaaataattataggtgatattagtttcttaggagctctattctttaacagctacgatttgttttttggacataaaattgaggtgccacccatcatctatgtgcattcagagtataaactgtattttgaatcaaactaaaaggcccataaaacaagagtcacaatgtcaaagtaatctgtaaaaaatattccaatcatctaaaaatggtttcctgttcaattttgtttacccttttaggttttctttttcttagtaatggcttccgctttatcataaaacaaccaaagtaagagcctacattttttttattatattttgacttacaaaaagaaccgctttgagcattatgctcttcccctttgtgctccatttattacccaatttgtcgctagagccgcttatgcctactgtcaaaaacgctatcacccatttgcaatacatatgcagatggtttgtgtaggttctctggtgggttagttgcttgccagtaaaatagagtgaggcctccataatatttacaagttttatggtggattatggttggatatgtcttgtgttcacatgatgttttacttgaaactaaatttagttcgtgttggttgttaatatttcattcttctatgaaccctgccaatgatggttgtctgaatccaattacattgtaatttttgttaccattgcaaactggcaactaatgcagtttaacttgagtcttaatttgatcagatggagtcagttttcccccctaagtttagcgctaaatttactgaagggtgcaatattgtatattcctttcgtcttgttgtcccaagtgattttggtgtatgggtgattataatttggttataactgaaattcggaccgaatggaggaaattctatcttcttgttaactttttggttttctgttcagttaggttatttgaaaattgtaactaacacaattatgtagaatttgtattatatcagtagcacttattttacattaattgttgtgtaatttataagctttttttttttaattatttttatttgtaaccaagtaaccaaactgatatattggtgtggtacgattggatttgctaacatattcagtctgatttattaaaccacccatatccttgattttaggttcacacaactttcacttggttaagcacagacttttgtgttggtgcacctgctgcattggacttgcccaaaccatcttagcctctttctattaagtcatcttcagtagtcaccccttctgccttcttacaagttaaaaattttcttatattgtcatgcatccatttaataattctcatatttgtcacatttgattctataaatatgtttcttcactgcccacatttaatatccacatttaaggatattcgttataatatgttaaattatagtcttgtagagattgctatttagttagctggaacatactacattatgattgcatatgacttacttatttaaacttgtcaacatgcttatacccgccgtcattttgtacaatagaaccaagtataaaaattgtgcattgtaggaccgctacactgttcaaataaacataacttactcacgttactgaaattggaatttatgctccattatcttagggcttagcttgaaagcccttgtatatacatgctaaagtcatgaatgctccatgaggcggtgtctatttgaactatgtcatcaataaatcacattcaccaagggggtaaactcttggataagctcaaggcttattgctggtgcaagtctactctttactgtgataggaagtttcgtctcatcacccctaatagcttgcatgctaatggtgtggctggcttttagataacaatttatcaatgaacaaatttttttgttaatgatgagcacttatctccttccattcattcaaaggctcaaattaagggaaaagaaatcaatttagttttgtactgtttgtgcttgccttttgtgtgggttttgatctggaaatggtccttggttagattgtttaattaaatgttgttatactgatattattgaatgctgattccagagaattgccgaaacattgg

SEQ ID NO: 6635 - DNA, 5107 bp, Ricinus communis
  Intron number 2 from transcript 30027.m000841 (locus 30027 .t000034) derived from phytozome v7.0 (chr-ID 30027; pos 2 96251 to 301357)
ctcatttgcaagcacatttggctactcagctctaggtgaacaatttgttgaggaacaagatcaaaacacaatcagaaagaaccaacggtcaaagactgttggtcaaggcctcagtcctcataatcacaggtcacaaatcaggaaaaaggagcaacatttcttccctaaggaagaagggtcacttccacctcttccaagttaggaaggaacattagaataggatcaaaaatagcaaaaggatcgttacaagtataacttgtatataacggaacatccatattcatatagtctcagaattcttatgtacatcatcatagattaataaaacaacagtttcttcatggtatcagagcaggcttgatcctgtcatcccctaccaatccaaaccaaccaacaaacacaaaaataatctctttcaccatggcacacagtgacatcataaaattatccaacattgtgctaaagggcaatcaatattattttgaatggtcgaggtgagtctacatcagcctaagtggcacgaagaaattagggtttatcatagggacccgaagtaaacctcaaccaaccgatccaaatcaaccgactaaggaagaaatgaagacaactgaggagtggcagacgatagaccatttggtcatgttgctgctcactaatactatggagcctcagatagccaagctttgcatgctcttggaatcctcacaggcaatatagaacaaaatgaaaggcctctacggccacgagcgaaattatgctcacatttttaatctaaagcaggaattagcacagattaggcaagggactagaacaagcacaagctacgcaacagagattttgactagataggaggagctacaaagctacctcccaccaacaattgatctagaagaggcgagaagaagagctcagtaagacctagtgtatacttacctaggcgggttggacacaagctatgaagctcttcgatcccaaatcttgctgtcgagcaatctcccctcaatagacactgtcatagccaccatccagcagaaggaaactagacgggcgactatgagcataaatagtggctttgacattacataaaccaaaatttacatcgcccactcatcgcacctttgcaaggcggctcgagcgagatgagcgcccgcgagcattgagagatgcgaccattgcggaaggcaagggcactcctaggaacactgctggcatctccatcctagccttcggccaggtctcaataggggcgagagaagcagaagtggaagacgagagaaagaagagaaaagaaggttcagcggcataggtatccataaccctaagggttatgaagaaatgttagagtcggggcggggagcttgtcacggttcagtttcttttaacttacaccgaccgactcaagctatccgacccgacccggaaccagtgacccgacccaacccgattcctctgacccggatcctgcccattttgttcagctgacccgacagaaaaagctcaacttagagaattaatctctcagcgttagacaattgttcatctttagaaaacctgtgggtcaggttcggtttctaaaaatttaataaaatcattaaatgtctctcacaattggatcatagatttcgaggcaacggatcacatgatatgggacgcaacgaaattgcaaaattttgttcctactaattcccaacatgtaattgttgccaatgaaaatcaagctaaaatttctggttttggctcttctcaattattgcataaagatatttctgatattcttctcttacttgattttaactctaatttattatctgtcagtaagattactagaaatctaaattgtaatgttatattctcaccctctaaagtgttgtttcatgaccgaatatcaggaaagatgattggtgagggtcgttttgaaaatggcctatattatctcataaattcttccaaccggtgtcttgtctcgaccaattttgccaatccagcaatgctgctccgtcggcggtttggtcatccatccgatagagtcttaaaccggcttttttgtttaaaaatgaactctagtggttgtgatatttgcaaatttgctaaacacactagattatcttttcctgtatcttctactatatctaaaaatatgtttgatctgtttcattctgacatttggggacctgcccctgtcacttcatacaatctttttcggcactttgttacgtttatcgatgattactcccgtaccacttgggtttatttgctcaaaggtaaaaatgaagttttttcctgcttccaaaacttttttaattttattcaaaatcagtacaacgccaaaattaaaacttttcattcagataatggcactgaatacgtaaacaaaatttttttgaattttttctccactcaagggattttacatcaaaccatctgcatttatactcccgaacaaaatggggtctctgaaaggaaaaatcgccatctccttgaagtcactagatcccttctttttcaaaataatgttccccatattttttagtcggatgctcttctaaccgttgcctatctcatcaaccacctaccaagtcccaaactcaacaatctcagtcctctagaaactctcaaaggctggaaaatagacttaggacacattcacacttttggttgtacagcctttgtccacattaggtgtcaccataaattcgacagcagttctgtcccgactgtattcctaagatactcctctgccaaaaaggggtataaatgttatgacccctccaatcataagtcctatatctctcgggatgtgtcatttgatgaaggttccccgtacttcacagccaacaccactaccgatcatggaccctctactttattatttccgaataactctctcttttttgacagcttaatctaggaacctacatctgacaaggagtacatattcgaggcaattccttcagggggagacaatctcactaccgaggcacctccttcaaggggagagaatgagccacaagaagaaggaattgccctacgaagattatctcggctaatcagacctcctgccaggctaagggacaatgtgtcctataaggtttcgtatccagtccaacacttcattaattactcttcagtatccaaagaatataagacatatctagggaaactcacatcaaacactgagcctacctccttctatgaagataacactaaccccaattggtgtaaaactatgaaggaagaacttcttgctttagaaaagaatgacacataggatattatcactttgccccaaaataaaaaacccgtaggattaaatgggtatataagattaagtaccaatatgatggtaccattgaacgatataaggctaggttagttgcaaaaggattcactcagacctatagagttgactaccaggaaacttttgcccctgtagctaaaatgagtactgttcgcatattgttatcagtcataactaattcaggttggagtttgttccaaatggacgtaaagaacgccttccttcagggatctctagatgaagaagcctatatgacccttcctccaggacacaggtcttgccttctttaacttacataccaaggaatggtcagaccattccttggtatgtaagttaaagaaggctatctatggattaaagcagtccccaagggcatggtaatgccaagctaagccatttttgttaaaaatcaattttcataaatgtgtttcagattcatctatgtttgtaaaatacactcacacatccactattattattcttgtttatgtcgatgacattatcataactggtaataataatgaggaaattgaagaggtaaaatcaaaactaaaaggagaatttgatatcaaggatttaagtcaactatcatactttctggggatagaaatagccaaatcatataagggcttatttttatctcaaagaaaatgtgttctcgacctactaaaagaaacaggaaagataggagtaaaaccaatgaaaactccaatggagactaaaaccaaactaaacctggaagaaggggaacctcttgacaacataggaaattatcagcatctagtagaaaaattaatatatcttactgtcactagacctgatattgcctatgccctgagcatagtaagccagtttatgcatgctcctcataccagtcatctggatgcaatcgacagaatactaagataccttaaaggcactccaggtcaaggtatatggatgaaaaataataacgatgctgacactatagttggtttttctgatgcagactgggctggaagctgtgacagaaaatcgacttctggattctgcatattcgtgggagggaacttagtagcttgaaaaagcaaaaagcaaacggtgaccgcgagatcgagtgcaaaagcagaatatcgagccatggcatcaacagccaacgagctcatttggatcaaacaagtgcttaccgacatgaaaataggatgcaaaggcccaatgaaaatgtactgcgataatgaggcagccagacacattgcatccaatcttgtctttcacgaatgaaccaaacatattgaagtagactgccacttcataagggaaaaggtctagtctggggaaattgaaactccattcatcagaagtcatgaacaattggtagatatctttactaaggctctagacaaatcacattatcatagcctcctcagcaagatgggttccattaacttgtttgaacccaccttgagggagagtgttgaggaacaagatcaaaacataatcagcaaggaccaacagtcaaggaccatcaggaagaaccaacagtcttctattggtcaaggcctcagtcctgatcatcacaggctacaaatccggaaaaatgagcaacttttcttgatagcaaaaggaccattacaagcatatcttttatataacagaacatccatactcatataatctcagaattcttatgtacatcatcatagattaataaaacaatagtttctttacaatttttggtttcatccccatttctttattgctaatgcattactattattgttgtaagacttaagtgtggttggacattattatgtagagcttgcttactcg

SEQ ID NO: 6636 - DNA, 5683 bp, Ricinus communis
  Intron number 3 from transcript 29631.m001056 (locus 29631 .t000063) derived from phytozome v7.0 (chr-ID 29631; pos 4 17877 to 423559 reverse strand)
tctttgcaccggtgcttccgtttcaactctctctggttagtctctcatctgtctctgtcgtagaatttttggatttattttgttttttttttaatattttctttgctgggattcattgatttttgtgatatacattttatattttctttcttctgcatcatctgtgccacttacgcatataaagtagttaggaaacataaatatcctttaagccttccattacaatcgctgatactggctccaaaatgttgtagattttaatcatatggtgcgatacgcacaaaacccacatgaataatgaagctagagcgacagcaatttctttcctagtagtcctagactactactactagtccctacttttgtttctttttccttgcaagaatccgcttattgacgagaacaccaaccaataatgtttaaagaacaatccacagctcttgggtataaggcaataataacacatacaaacaacaaaaaccctagacacggaaaaagactcttgtgtcttgtgtgtaagaatggctactgtaggagtaatacataaatggaaatgctttgtgaagacactatagggtctgtgatcttatgtttaatttctcttcattctttagtaaaacaaagagagcttgttcaaaaggtcaagatttctgctgtgatgggactttgtaacagttgtttcaaccttttctttttcagttcaatgtattcaatctccttgcatttcccgcttaacttttccttgcttcgtattcttgtttttccctttttttttttgggttacatgtattcttctttttaattcctcttttatctcttcttttctttctttttccgtttaagaaacaaaattcccttttgattgtgtcagataaaaatgagacttgaaagaaagacttttgttttagtctgattcctaatttgacgtctcagagttcagttaaccgatgcaataaatagtggtttgatagatttagtacagtgatatctgatagtgtattaccaaaaagtggattgattacccggctaatgctgctttctattgcaaatttacaatgagttcaagttctagcctcttccttatttcagaagccaattcttattattccaggtgtttgttaaaccttctgatgtaattatagagaggaaataacattacataaaatcagttaaagtcatgactaacaacactcgcattttgaaaccaattcgtttacagatgcaaactaaattagaagcgggtttaaattggacttgctttccttatccattacgcacgagtagagaagaaaagaaacaacgaccttatttatatgtttgctaattgcgatattgaactatgatttgcaaatagatgaaaaatgggaaatgattttaaagttttacctggtaggataaatactatcctcaaattacagtcttaaacttgaagaaacttcgttcgcattcttaaccagtaaactacacaaatgatagctaattttgttgtggttgcattagtgcaatttgttgtaattcggttactaaactacaacttttatgcacatgcataatctcacttactccagcataatttgaatacatataacccacacccttaacactatatttaggaggatttcaggagagcataatttcttcaataggttaattagagtgagtatgaaatcacaaaatggagcagtgtagaatggaataaatctagatgtcggtaattcaccttacatatggccaatttagtgttctcttgtttgtgattagaattattaccaagttgaactctcacttcttatattataatccgattgattttgtaacccatgaataaaagaagactgttgtgaggcaacatgttattcgtgaatttctttttgtttttccaaaaatcttgaatacaaagttttgctccaatcttattctaaagagcaagaaagagaacttgaagctttttattaagcatccatggcttgttttaaagatttatataattatttagctcatttctcagcgattaggcttacacacacatacacatatatataaaacaataaatatgatcaaagagaagggtagttttttttatataaaatgagaaattaaccaccatattttgaaaaacaaaattctcaaactcgaaactttatataactagcttgaaattcttttaatttgatcatatatattgtataccttttattggtattcaagtctaaaagaccagatagtgattgatgcaaggcaccgtggtgcatcttttaacctacttgtaaaataaacgggtttgactaatatcagtgggatggtaatggcttgcaatgatgcatggttggtttctttaaatagcttcaagttccaatagagcatgaataaatcatatggatactttagaatttgcatgtaagggccgactgactcctgcctctgaagtgctgcggcctctcatggttatatcttcttggaagttgtattactttttaagaatatagatataacactctattagagctcaaacaaattgtattttatgtaattggttttaccttatctatcttcttcctcgtcaacattacacatgcgaatcttacaaatcacgtgggcatgggtcgcaaagacttaaaaaggacttgtgttcagcttgtcagcttgatgatgagcaatccccatgctttgcttatctgatatgcagttaactttatagctactttaaatctcataaatccctttcaaggctgtctagttattaaccaatttagataatcgttgcaaagtagatgcagacctagaacaaaatctcctttgttgattactttagtagttccattattaatctgaatgataaatctacaattgttgcacggattaatccttttttaagcatctatcaccaagaaaagctgctattgtttccattcgcataggagtggagtatgtggagatcgtgcaattggcatgttattgcagccttaagagttaaaaagacggttatcaaacaagatatggtttaaattcttttttatagaattcagctaatgatggtgtctatagatacatctgatctggtttttattggttggcaattggcattgtttttctttgaaagtacaaattactttttgagcaataatcttatcatatattatttagttctctgtgtactttattttctcgtttaccagttgtggattttcctcaatcttcctctgttaaactaagattcttttaacttactagaaaaagaaatgagtaaagtgattctccataaatgccaccatagtagatgcccactcgatcattttaatatataagcatacaatacattcacgtggcttggattgcgttatggtatatgccagctgccattctaattagacagtttatctctttccctttgtttttggggcctaattaggccagttaatactattggccttagacttatcttttgattgtttcattctggactatttctatatttgatgttaattggcttgtgtttaacgctttctacatagttttgcaaaaagaatccttctaaattatgctttagaaaatcaatcatcctaggaggtattttctaattaggagcagagggagaagctcttttcttgcttatttatcagcctggcatgaattggttgcttttggctagatgaagtcttgaatgtattatacaattccaataggaattttttagagttttcaattgttctaccttatagagtattctgcagttaacttgaaactacttatttcttgccgttaggaagttaatattctcaaatggagtaggagacgtgctcatctcatgcaaatttgatgccttgtatgtgtgtttggagagccactgctattctatttttgttcaatttagacgcaagccttcttcatccatttattatatagattcttttttccatcacaattctgatctttcaatcaccatggccatgagaatttatgttcacgtcacaagtggatgatggccatttttttttcccgggaccagtctataccaccttgatgatcttttgcgtaatataagtgcatgcgaatagggttgttaaacaagaagtagagagagggaggagttgtttatatgtgttgtggagggagacagtatcagatacaaatgtaggttttaggatgatgaataaataatgaatcattttgcccgggtagagcgggtggccggagttcacatgggactcccgtagatttcgctgtgaacccaccagccttttacctatgtagatttgagagagagagagaactgatgaatggttaatttatgccatctctttctagtctttcttccacgcactactgagctcacctgctactgctccagctagtgttagtgttagttttagtggttgtcatttccatcggcattaacttgttgccttgtgacttttgtgggtctttgtgctttttgataggcaccacacgtgtatgagttttgcattggctcggaacttggagttttctagcgggtcccaaaaacagtgccattggcattcttttattaattttttgtttggccttttgggtgggttagctacttggcttattctagagatttatttcgttccatcactccacttaatatttaagggctcagctttcttgccagcgaattatctgcattctacgcgagacagtcgctgtcatctattcggtgccaaagagatatactgggaagtaatgttatttattaaaattttccaattaacaagctgggtaattatggcgatagtggacttggaaactatgaaatacagcaatatgaacaacatattcactcatatgagttttggtcagtgctattgcggttattatagaatcatctttagtactgcaaaatctctagtcgtgcttcaatgaattaataaaaaaattctgaatcttggtcattggctgaaggatttttccatgtttcaagatagtgtttatgttgtttttatttctcctttcaagaggtaaaatctaatggtattctgaggtaggaatatggttaaagagatagttttgtcatctacataggtttgattatcacttgttttacatattggtccaaaagggccggacttgcattatggacttgcaatctagaaaaggcgttctttctcctctctggaagctccgtttgatatggttggttgtggatcgtggtcggcgtgctacattatctacatttttaaataatacaataattaaaattttctgtttctgctctttaaagtttgatttgatggccgtaccatcttttctactgtgagactcgagtgtctctgacaaacgacataactagacatgaccggttcgcagactgcctacggggactgcataaatagagagagagcgcaaaccctcttcctcttttacctttggtcaaagcaaatatccccgtccctggtcgtcaaaagggtccatgtgggtccctttccttaacatgcacaaaaaaagccctagtcttcaacatctctttcttgggttaacgattacactagtgcatgctgtgggaaactacattacatgaattctcgatttttcaactcggacgttgcatttcttgtctaaaatgtgtttctgattgtctccaccaattatttgctgcgttcatgtacaaatacaattcagtaatgtattgagatttgctcgtgtgcttacccttttggtgcag

SEQ ID NO: 6637 - DNA, 1650 bp, Ricinus communis
  Intron number 1 from transcript 29996.m000134 (locus 29996 .t000005) derived from phytozome v7.0 (chr-ID 29996; pos 4 9977 to 51626)
gaggtttcggtcctgtttttaaggtaggtttccctaaacttctctatttatgtattcgggtacgggtcctaaatttcttattatctggttctttcaaatgctaactatagcagctaaattatgttctctcttggttatttttattaattaattaattgattgtttctaaagctatatgagctttataatagctgcaatgtaatggaattcttcctttcattacattaaatttgataaatgttctttcattcgtcgcgttgtacagtttggttacttcaagctctataataataataatattattattattattattgttgttgttgttgttgttattgtgtatttcattaagaatagataaaatcttaaaattaaaaaatatatctttgacaacaattttaagaaattaactcaaaaagaaaacagaaattaactcatgcaacaggcaaccatctaccaactatcattattattattattattattattattattattgttattattatcttttttttctgttgaataatctttacaatcaaattgaaggaagagacaaagatggattcatgatcataatatcgtataacaaaattgatagatttcattttttttctctaatagtttatttgggaaatttttttaattagttgaattatgtgtttactgacaacagaataaaaattcaaaaactcatttaaaacttgttgaaatggaaacatattagagcaataaatatgctttgctaaactgatttttggaaggaaatatggaagagagaaacaattacgaatgtatatgttgaaaatttttagaatccaactttatataaacctaggtatatggaaagtaattattctactaatttcatgttaattttttcttttcaattggttggactttactttgatgcaaagacacccttttggttaacctacttttgtgaaattgttgaccgtgtaatcagttggacattcataggagagttatattatccctaatatgaacttaatttcatacttaagtcaaagattagttagattcaaggatgttgtattacaagctttatgtgcttcatgattttgtatcatatgattaagattgtacgtcttttatagggatagggtaggactagggtcttgttatattttttcctatatctaaaaggatgtatgtttatttgtacccatgctcatctcatttgggtaatattaaagcaaaattgaaataatttatatgaaaaataaaataattaatagaatattataaataagttaataattaaataatttgtctacttttccaaatacaaattcaattctaaaatctctaatattgtatatctaacttaaaagaacaaaaaaacttgagtggagtatggctgagtatgtgtaagatactatattgttcataccctattcatacacaatacaatttttttgagaatggatttgcgcatacctattatccaaccaattcgtgtagtacccggtttgactaggtagaattcaggtgggtgcccattgatagggtagaaattgccatccctagtattttaggatccgttttgattggctgtggctgtggtgggtgtttctgccaccaatcgtaactgaaaagtatgctcttgtttatagggattaataccta

SEQ ID NO: 6638 - DNA, 3154 bp, Ricinus communis
  Intron number 11 from transcript 29634.m002113 (locus 2963 4.t000059) derived from phytozome v7.0 (chr-ID 29634; pos 380587 to 383740)
tttattctattccagcaacatcttcgaaagtgctggtgtgatttcttttcctctttggcttggattcctattttcttgcgatttgttgttaaaatttgctagactggtgatgcaagataaattcttgtatatgtttggatagcaagaaaccgatagaaaacagagtagagagaaacttaagagaaatggatgagagaaaatagagctaatcactttaatcattatatagagactccaagattatagctagccaatcacaaaatgacaactcaatactaactaacaaaatgacttcttccgcatatcaataccctctcctttaaacaaccttgtcctcaaggttgatgtgaaaaaagtggttgtatagaaggtctgagtttcagctcgtctaataccttcctgtggtctgagtttcagctcctctaataccttcctgtttagagtttgttgaggttatagcatttcatttccatccttttctaatgttggaactgaatatttaccatataacaacccatgttccaactaagttaattagatatttacttcttcagttggatcagcaggaaccaattcaaatatagtttttaagctccggttggcctagtacactgtataatctgctgtccactctcttgaattttgctttctactttcttgaatttggttccagtcctagttgaaattcaggtcaggtcaagttcctgtccatcagttgtcaattcagtcttctcatagttccaatcaacacaattcttcacaaaaaatgcgagaaatgtatcaatatcaacacacgaccttccttcagatcctgtgatcttagtcaatggtggtggtgtatcaattggacttggtctttccatagagaaccaaaattgatgaccatgatcctcatcaatggtggtggtggtgtatcggtgggaagaggccttcccatcatcaagaagaaacctgaattgataatcattaggtcctcacttccaagatcatcaagctcttcttgcccatcatcttgcgttgcattctgatcttgagagaatgtgactgaaagaacgctatttatttccaatgttgatggtcgggtccatggctctgattgttcacgatgagtttgagcctaaaatcatgttaaacctccaaagctttcttcagattcttcgaggtcttcaaaataggaaacttcatagagtgtagacatcgtgtttgaagaaattccccataagagttttgaatttagaatcaacaaaattagaaattaagaactgaatcaagaatggcgattttcatgtgagacagtaggaaaatagatcaagatttgggtttgggaatatgggtttctgatttgatgaatttagggaccaagattggaagttagggttgcgatgaatcgatttgcataggtgaaattcaagaaaggatcttgaactgggaccgaggattaagaattgaatgataggatcagcaacaaatagaactgctctgatattaaatcatgcaagataaagtcttgtatctgtctagatagcaaggaaaagagagaaaatggagagagagagagagagagagaaatttaagagaaatagagctaatcacatcaatcatcaaaatacacgctttacataagcacacgttgtcggtacatacagactgcaagactatagttgtccaatcacaaaatgacaactcagcactaacaaacaaaatgacttcttccatatatcgactgacttaactgctgctttaacttaaaaattttcagcatcccatgtctcaccatctgtaacacaagccatcatgtgtggccttcgcatcgcatggccatttctggtggagccatgtggataagatacctctaagaatatgccatatgaaatatgaaatgaattatagtagtttaatttattaggttatagcacattttaaattctttgaatgttaataataataatgttgcgcataaattcagttaggaagggttattaattcctttttatctttagtttcacgtatatgaaaaagatgagatgcattgcaaaccattatgtgcaaattctcagttatttctagtccatatgatgaactatgcttttgtttatgaaactgaatattcttacgaatcatttcggaatatttactcttaggaaaattagaagagtgaatgacctaaaatcatgaactttcatcccttttcattagtgctgtatagtcttatacttattaagttagctcatctggcaggtagtataaatagctaaaatacttggttgagcagtgtatcttagacaattgtaacaagcagttatatgttatagaaagataaagttttccaaatctttctctcttcttaagatccaatttcaccattttacgaccttctcaagcatgagccattatatatatatatatatatatatatatgatgaaatatttgaattgcatcaaatctagcgcaagtcaactatcccacccagttttctgacttgtttaccagtaagtgaattgatctctgaaacaaaaatatataacattgtgtaacaaaattgtcagacttgttggctaaatagttaatttcttgcttggtttgacacaattctgatagctcatgttacacggccaaattacgatatcatttgaggtttagcacctaaaacactttggtgccacctatttaaaagtgaagcttctattttattagttaaatattaaggttatatacatcaacttagatgttatataacaagatttaaataaatcgtgcaatgattcaagtatttagctagtaaaaaagatgtgggctaatctcttagaggtttaccttcttgacttggctaataatacaagagtctgtttgtagcctggaaaattatgttgccactcctgttatttaacctccattccaagggaattgtcaaaggctgaaattcagtgatagttaaatactccacaggatctgcctttttactcgtggtactataaaaattctagtgcaccacatcacattaaattatgacagggaaagttcctactttgtaatttgcatcactgttcatcctaagttaaaaattagtcttaaagcatgaatttttgaaataaatctaatgctgttatgaaattggcagggctttcctcgggtaatcttgctacagttggactt

SEQ ID NO: 6639 - DNA, 3231 bp, Ricinus communis
  Intron number 5 from transcript 29654.m000304 (locus 29654 .t000006) derived from phytozome v7.0 (chr-ID 29654; pos 1 20083 to 123313 reverse strand)
ctctaataggtcagttcctacttcatatcattattgcatttcatagttaattttaataagccttttagctgatacttcaaaggtttttagttttctaggaaaacttcttaattttcttgcggtgttctgttgtttcattgttgaggtgtttataggctggggaccacctggctttattttaatcaaattatcaggcttgtacaaatgttttctcccaaagccaacttaagtaaatctgatgtaggacgtatttagataacatgttctacgttttttttcctgaaaagtaaagggtttaaaattgaattcaggtctgattggaaagaaactcggatatgaacagaggagtaggaaagaaaagatgagaaaactcaaggtttaggattcatgcctagagagaattgaaacacacacttttagaggcaacagtttgcaagaaatttttgtttattgaatatgaagacttaactactacagactttggtatatgtagactaaactaatcccaacattacttggactaggaattttaaactaggaaaattacaaactaatgctcactaagaaaatactaaacctactagaactcttagattcaaatttaaaataaaacaaagacttgtaaaataaatttcaactgttgttccagcaaagctggaaattgcagaaatacctgttgggtattaaaaaaattctaaatctcttgattctttaattttgcttttcttgatgttttccttgtccacatcattctccccagttggagaaaactagacctcaagcaacaaaaacaataatgcgttggacttgaaataagccttcttaaactattggtagcaaacgaaaatacttgaaccctccctttagactcatctacaaattcactaggaataatgaagtccaccttttgaacactagcaatgggcagcacaaattcaccttcttgagcatcttttctaacttgaacaacaaattttacctcttgtttcttttccacatgttgataatcatcttgcaagagctctacttcatgttgccttcccaattcttcgtttacttgaattggttcttcatattcaatgtcttggacatgtgatttatggagcgagtttcgtggtttgaggttttgcagttgcaggatttaattttctgttttcttttctatattgatcatggagttgcacaggttctttttatagttatgcaattgctgctccaccccttttgcttgttgagcaagtgtctctagctgtttaatagtctttaccacttgctatcttgaaagtcctgcatgtgaatctggccttggactttctggttgtatattttgaagtttttcctctccaaatagcaaatttgcaaaatttctagttgcttgtgctgcacttttggctttcctattattagatttctcactccttcaccaacagtaggcatgcagattaggtcttaggtttgactttggtacagcttgtaggctttttgtcaacttctgaatgttgttctccaacgatcttgaatgcaacttgtagacttggggctgatttttgtagaaagacttgattaattattatgattgctggggtttgaaggtaaccttctaagcaactcatgtaagcaatcaaatgaatcaaagcttgaagtcatcccatcattcaattgatcaaaatttgattcgttctcttgatgaaaagaacacattgctttttaatacgatcatcattcaatctgctttttctattgattcaagtaattaggcattggcatgtagctatatgttgaactatatataccatttcatgcattctttggtgataatatgatagcaaatattttctcgaagctttgttttcatctcttgccatgtattaatttgcagttgccttcctatttgtatagttagaccaccataattttgcagatccgatcagttgcactttgcatattctaccttttgcagttcctcatagttgtagctatgataccaaaactgatgtagaacagatttagataacacgttctccaatgattttcccttaaattaagggtttaaaattgaataccaggtctggtttgacagaaattcatatttgaaatagcagaataagaaaaaatgatgagaaaacttctacgagtcaaaactgagaaggtttaggagtcacacctaaagacaattgaacacaaattatagagcaacaatttgcaagaaatatttgtttattgaatctaaaaatgtaaccattacaagcctaggtctatatagattgaaccaatactaacattgcttggattaggaatcttaaattaggagagttacaaactaatattaaccaagaaatgctaaaccaactaaaactcactaatgagttccctcgtctcggaattaactgtataagaaccaatcatggcttgatctgcctgtgaaatgaaatacattttcttttccaatagttttattctcataggtaaaatatatagaacacattgctggcctttccgagctcttgatcataaaatcttggtctgataccctgaattagattgggcctgagccaactatgacaacactcttgcgattgatttaacaaagtagcaacttccatagacatatattttgtagtcgggtatgattaggaagcaaaatggcaggatggaagatgaattttagaaactaacttgacttattccaagtattcccacttccttagagaactgaaggataaattttggccatataattgttgatcatgtgatgctcctgtgaatcaaaagtaccttagatataagcatgcaagtataatggctaagccattgggaatattatcggagttgaagaaaatacctgtagagattctagctattgtccaaccatgttgttccttgaagattgtctcccattaaatgtgaagaatgattgtctgcttctaattggaagctgctgatacggcgtgctacccaccatcagccccacttccttacagaaggggaaaaatgactttccatcatcattttataagtctcaattgtgcaattacgctttggaaaatcttcattatccttctgtagcatcatctagttcatgctgagaagtgttcggattgattcatttccaaaatctttgatgactttcttctattctatgtgcctatgtttacctggttttgggctacaaataacttggttcttttagtaaaatgtcttgtgccaatatgataatttcataacatgcag

SEQ ID NO: 6640 - DNA, 1311 bp, Ricinus communis
  Intron number 13 from transcript 29827.m002612 (locus 2982 7.t000085) derived from phytozome v7.0 (chr-ID 29827; pos 454940 to 456250 reverse strand)
cattcatcgaaaagggcctgaacattgttggttgggtaaatttcttgcctgggtttttcccccctgatttttggtagataattcttaattgttttgcatctttatagtagtcagtagagacattgaattttgaggctatccgattatggtaattaaaaatatgacattttactaaaagcgttcctattctgcctgcttcaacttggtctttgcatggttgattacatggtttatctttttctgatgtatgtttattttgtactgtgaattgattcactaaatgtagttcaaacttaaaaagctgctaacagttcatgtatgtagtatatatagaatgcaagttaaatgtaaggaagtggccccaatcttgtggaagcatttcagataacatctaaagtagtggttctacttttatctgtgtcttgagatactcgactcttgagctagaggcaaattagtgatcttgtaactcatggatgagctcgttcattgaaacaaaaattttaggtttatctaattaatggaccaattgagaatataagtgaattcaacattactgtggtaaaagaaacaagcttgtattcgttcgtatttgtcaatttctcacttgtagttccacatagtaaatagccaactttaaactaccaaaactttaatcattatcgagaaattttgttaattgttgattctgaattataggattttcatgttggtaggtgaacgtaaataatcataaaataaattgctataagtcgttagttttagagtaaaaggtctcgtgagagagagagagagagagagagagagaggagtttgggataaccagtctcacattgctaacatgaaatcaagtactttgcctagatgcgttaatgtttgtatgcggttgagctcaaacttaaatgtaaatacaggcatattctcgtctttttctgttagcctggcctagttgcattagttttttgcaggtacttccttccctctgcaagttttgatatattttcttagtaaactgagcttgaacacaacttaaacggccatttagagcctgaactgagtttgagcctgagtgagagggactgagtcaggcctgaactagagaatgcagcatgtctcagttttgtttacatgacttttggcatgcttttaataccacaatgaactttgaagcaagatattttgtcattaaccaacatttacctaaaatgcaggcacacacacacacacaccagtatgaaggtgcttatgttgattcatatgttttatttttttgcagttaaactttttggttacagagaataggcgacgaga

SEQ ID NO: 6641 - DNA, 2925 bp, Ricinus communis
  Intron number 6 from transcript 30193.m000706 (locus 30193 .t000007) derived from phytozome v7.0 (chr-ID 30193; pos 2 22576 to 225500 reverse strand)
agagtcttcctgagtaagcaccatcttcggcatgaactctttcattaacatataataatctaaaggggatgaagcctattagattctgaatgaagttatcatattctgtgagtttgatgctttatctttcttgtcagtgatttatttaaactggcagcagctttacttggtctatattgctttacaaggttcattatattagatgctgaaaagtggtcattcgatggctttactagagttcggagtatatattttaagtggatccattttctacatttctatgtccatatgtgtttgctgtatgcatatgccacatgtgaaaatcgatgctacactacattttaagtgatctaaaatacaataaatcttctgtagggcaagccctttattctatcaaattttttatcacctttctgaaacttctaaaattctcacctgcagacgtggatagagcaaccatagagctttttggtggacatatttgattttgatagaagttcctgtaagaacataaattaacttgaacaaacctcacataagcactcacagttcctatcccacaggatcagaaaaatctctgagaccaatggtgaattaacagaaataaaaattgctcttgggacctaatgtatattaacctgaaatagaaagggaaagaagaacataaatagaactgtaagttttcattagcttaaggtgcttatatagcagaagaactttcaagttacacggatatttctcaaataaccacttcgggttgccacatcatatttctggagcttttaaaatattttcattaatagccaatttttggaacttcgtcttaacagctatttgaccaagttaaattacatcatcataacatagaatctacaagaaaatatatttcagaatttattcatggcttgtagcttgaagactctggaacaaatttcatatcaattaagatgatggaaataaagagtatgtgaattataggattaaagaaagattagtagaatggcaaagtttgagaggagtcttatgttatgtgccctagccttggatcgagtaatgggaccttaaagtgtaaaatcgtctcctaactttattggacaaggagatttattgagattattccttcctctacctatcttgactgactaataatagtatgagagctcaattagggagagagctcaatgatctcacaatattcagatgaaagtttgcttgcctcttcattaacaatttcgcctttaaatacacggtgaaggtactataactccctacttctaaggagtgataagtataaaactcatcctgaattatctcaataaaaatagaaataatatcctaaattatcagcaactaaatgacagctaatagcaactaataataaataacaactaagaaactaattagcagaatatcttcccactattgtgccacatggagtgttgtactccacttctttccttttatttctgtatcatcttatctgatcaaaagatatttgctaagtttactaatgctggaaggttaagaaagagcagatgcataagataagtgtggtagaggagcatgctaagatagaagtgcagaaatactggaaggattgaaaagagctgctagtgtaaaacatagcaactatagacactttttttattctggagttggccctaaatcaggcaaactaaagaaagatgatgcgtatagctgggctgctgactacattgggaaaaggttagttgagcgagtaagagaatagcacgagcttattttgacaaactggagaaaagtgatgccctaaaccaacaacacttactttgactggccatggttattataattttctaaaggcaacttctattcaaaagttggagctaattaaatgctaaaacacataaccttctagtccaaatgttttcatgatttttctattgaatgaaggttgatgttcttcgagcaagttccaaaatgcatgaaaatgatttcaagttagctttcatatgtttcaattaaataatggaaattaacacattcttttaggtaatcctgaaaaaaatatttgttagaagtaattttgtgcaaacaaacagagactttatgatgacaaataactggttggtaaataaaacaaatgttttcctcttctctaatgtcgaagatatcacgaagaatcttcttttttttttttttttttgtaactatcatattaattgtaactatcaatttggcacatatacttttttgatttgtatttactactgcaagacctgcatctagaccattcaggctcttaatatatatagttatttttatttaaaagtcttgtttagatgtttgtagttgaatgatatagatctatgactaaattgaagttttagtaatgaacagttattaattatcttttattaaattttaatattaattattttctattaaataaaatttaataatttagaatataggatacataatctcttttatatctattactttctaaaactagtttggcccccaaaatttattctctaggtctgccattgtaagtaccgtactcgtagttttgtcatattaacatcaatggttgaaataatgcagattatggcattgacatatatactttgaggtctacatcttgcatgaatcaccttttatggctctctgtttccctatgtgaaacctggctccccattaccaaaagaaaaataaaataaaaagtatgatgtatcctttccattgaaggaggaaaaaagtcagaattctgtcattatctgacaatgtaaagttaaagtaagatcattaaaaccttaaaatcatggatcgaaaatgcttggcctttaatgaagtatgcagttaaattgatcttattcctaaatttgtttcctcattatgttattttcaggatagttcccaacttggctattagtaagattttat

SEQ ID NO: 6642 - DNA, 4865 bp, Ricinus communis
  Intron number 4 from transcript 30051.m000526 (locus 30051 .t000009) derived from phytozome v7.0 (chr-ID 30051; pos 3 19623 to 324487 reverse strand)
taaatccaaccatttgtcgttccaaaccattcaaggtaacatccattccctattttatctcttattaaaaagaaataaaattgcttttcctattgcaatggaaataaaaatacatacggaaataagtttttagtttccctttcatatggtgttccttttcattttttccatttatttatattagtttggcttgtctttgggtagtggactaaaatttaatagctctaggttaggttgtgaccatagttgttaaagacgaaaagcgcacaaaggcgataaaaggctcttggtggtgcctgaggcgaggtgtgcacctgactgaagtgagacataaaaaataaaataaaataaaatacaataaacacaacaaatgcataaggtaaaaaatttaacacaaccaaagaaaagaaatgaaaaaatcatgagaataatgttcaagaggcatttaacaaacaataaatggatatgttcaaaagagataataaaaataaaagatagtcttataaataactagaatcctaaagcatcttccattactaaattactataagtctataattatggtcttagtcctactcctacatgcccaatcaaaattttagtattataataacactattttagcatagatgaaacttgaaagagagtaggaggaaaagaagatgagaagaaggaaagaaaagaaaaggaaaaagcaaattccatcggtacaatacaacctacatgtacaacaaaaagagaagaggagagaagaagaaaggaaaaaataagttgagataaacaatccttaattcaagatgaagccgagttgtagatcctagcctcttggaaactaatttcttgaagggatagagctgttaaggtggctgttaaagaagttgtgcaacaagtcttctcttctttttcttgatcaattttttgccctaatcttctttccttttttttttttttttataatttttttagagataatcgggtgtgggtaagcctacataacttacattaagcttatgatgaagagctgagattatttcgtgttttagaagaaaaaataattaaagtcaaaatattacaaaggcgtgcctcgcctgtgccttgcctcaagtctaaggcgcaccaaagcgtgcgccttagtgaagttttctgcctttcttggcttgaggccctaaggcttgtgcttctcgcctcagtatcaacgacaaagattgtggactatcaattggtaagattatggcagaaattatggatgatattacaatatctaattgactacaatctgtgtattagctgtatactaatctaagtattagctatatatagatattctttcccagagtagattagcagtaattagtgtaatagctgtatatatattcttgcctaaaataggttgtacaacaactcttatttaatggaaagatccttaaagagccattttactcaaactttgttatggtatcagagcctgcctctggaattcgtagttgaatctttgaatttctgtcagttttcttttgcttctgcctttcaaagtttctaggttgattaatttctaatcaataattttggctttgggattttttcatcctggaagaatgtctatggagaattcttttagaagggtgtctatagagactttggccatcaaatttacaagaaagaattatgtagcatgggagtttcaattccgaatgtttatgaaagatacgacacttagttaatgggaggcaaaagatgcttgaattatattttggattttgggttcgattgaagcacatatggcgaacaatttacgcccctttagtataactaaggagatgtaaaattatctgtagcgcatataccatcaagataataccacgagacaatttcaattggaacttgagattggtaactttagtcaaggtaatctctccatcgagcagtattattctggatttattaatctatagatcgaatattctggtattatctattcgaaggtacctaaagaggccttagccagctttcagcctgttcatgaagatagtaggtgtgatcagtttttgatgaaattgagaccaaaatttgaagttgttcgggctggattactgaatagaaatcctgttccttctttggatatatgtcttggtgaattgttgcgtgaagaacaaagaatgactacacaaactgttctaggtttgtccaaggaggcatctgaggttgttaatgttgcttatgctgctcaagggaagaactgaggaaaaggataaatgcagtgctatagttgcaaggagtttgggcatattgcttgcaattggtaagaaattctcaattactgtaaacaaaatggacacattatcaaggactgtcctacactcctataaaacctgcgagcccaaacttttcaagctgctatctcagaccctactattattagtcctacaaccacaactgctggaaccaatcagtctattattactccagaaatggtccaacagatgattatcacaacattctctacccttagacttcatgatcaaggtaagactgttccttcttggtttcttgattctggagcatcaaatcatatgacttttcgaaagtatactggtaaataaaacattcagattgctaatggaagtaatcttcctattacaaacattggtgatattggacctttttgtcatgtatttgtctctcctaggttgtctctagtataatttctgttggttagtaggtggataataattgtgatgtccatttctctcgtggtggttgtcttgtgcaacatcaggtgtcgtgaaaggtgattatttccattgcaatttactattcctagaactttgtctatggcttctactgttgttcaaaataaggctgacgtttggcatagacgattgggccaacaatgaagcatggttttcttggaaacaaagatcaatgttctcctaattttgtctcttgattgctctacttgtaaactaggaaaaagtaaaacttttatcttttcttacttatggtggtcatgctaatacatgttttgagattatacatagtgatgtttggggtattgctcctataacttcagatgcacaatataaatatttttgtgatggtcattgatgactatagtcgtttcacatggatatattttatgcgtaccaaagctgaggtgttcactgttttcagaagttatgtggcttatattgagactcaattttcgacttgcattaaggttttacggtctgataatgttggcgagttcacatgacttccaagcctttttacaacagaaaggtattgtatctcaacaatcatgtccttatacacctcaacaggatggggtggctgaacgtaaaaaccgtcacttgttggatatggctcacactttactcttggaggctttagttttcctagattttgggtggaagccctgtccagtgtagtctatcaaattaatcgtctaccttctcaacaattgcattttgattctccttattttcgtctttttggtatgcagcctgattatcttatgctacacatttggatgtgtttgttttgttcacttgtcttcttatgaacgtcacaagcttacagctcaatcagtacggtgtgattttataggatataacactacttacaaagggtttttgtgttatgatggtgcaactgatcgactgcatatttctagaaatgtggctttctttgaacacgagtactattttcagcagcatgtttcccttttgaatggtgttcttcttcctagctttgatgaatggtgttctccatccattgcgcgtttaaaacttggttttttctatcagcgatgacaacccctatcagcgtaaatccttcccgcccttgatccaatacccgctttagtggctctttagacatctaattgtattagtcatcctcctgacaggtatggtttctctgccatttttgctatgcaagaagaacttcaagctcttcaacagaatcatacttgggatattgttccctgtcctactggtattaaagccattggttgtaaataggtatattccattatgctgcggtctgatggctcacttgacagatataaagcaaggttggtggcactcagtaatcgacaagagtatggagttggttatgaggagacatttgcatctataacaaagatgacaacaatgcgacttgtcttagctattgttgcttctaaaggttggtcattgtgacagatggatgttaagaatgcatttttgcatggggatcttaaggaagagatttatatgactgcaccaccagggttattttctacaccttctttcgatgtttgtaagctaaaacgatcactctatggtttgaaacaggccccgcgtgcttgttttgataagttccgatccacacttattcgcttctcttttgtctagagtcagtatgattcctctttgtttctttgcaagactgctaagggaattgttttgcttctcttatatgttcatgatattattattacagggagtgactctgaattgatttctccgcttcaacagcaccttcaaagttcttttcatatgaaggacctaggtcctttatactattttttaggccttgaagtagactctacctctgctggtatttttttacataaccacatttaggagatcattactctggctggtcttcaagatggttgttctgttgatactcccttagaagtgaatgttaaattatcgtcctgatgagggtaatctcttgcatgatccctccttatatagacatttagtggggagcttgaattatctaactattactcgacctgacattttctttgctgtccaataagttagtcaatttatgcaggcacctcggcacctccacttgactgcggttcgacg

SEQ ID NO: 6643 - DNA, 4278 bp, Ricinus communis
  Intron number 3 from transcript 29651.m000290 (locus 29651 .t000010) derived from phytozome v7.0 (chr-ID 29651; pos 1 07388 to 111665 reverse strand)
tgccccaagtaagtcatacttgatattaatggaagatagctctgtaaatattcttcttcatgttttatctgcatatttttgaacactcaggatagataagagtctttcttttaaatagaaaggtgtaatatgggcgatgccctctggagaaacagaaaaatgctcaacaatcaacagctaataccaaaataaaattgttcttgtaagagctttgtgaaggtcacccattgagaaatgcatctccctgaaactgtttgtctgtctgcagactctacagtcttaagagttttctactgacattacctatgatttatccagctttcttggtctctcatgttctaccctaccagtaggtgaggcctcttcagtaaattttagtggtttgtagtacatccttaggttgtgaatatttttcctttatcagaataattagtcatattatgttctaagttgcctaaattaagctaattaattatgcatgtatcaaacatgatgggagcttaagattctgttatttaatcaaattttgaggttaacgggattcttttgtcaacattagaagcattatgtgctttagaacatggataacttctttatttgcagtaaacttatttttcaccagttttacctacgcccaaaatggagagctttgtttcaattgcattgtttcagttataattgtatattattaatttattctccctttatttctgatagccaagcattctattacttgcaattcctagttatattggattaacatatttctcaaaagttcattaaagagggattcatatgtggagaataatttaattgatcaaatgattccaacatctaggaagtgaagtcattgcttgaactttaatgctttacttgattaaaagaagataaagaagccgaagtcggattgctgataatgaaatacttcaagtcataaattctttcttatttattatttgttttcattattctaggcaacttgagaggctaattcagtgttctttcactaattttctttaattacttagtttaaatgttgtcataatacatgcaaggagtttacattaaactaccttttctgactaaagcataaagaattttaaacagaaagttgattggctgtagagcagagactaatatagattacctattagtagaatacagatgtgagcatgtgtttgtgttgaaaattccaagatctgtcaagagggggagactactaaatcaagtacaagggatagatacgtgaatgaggcatatggacttactccagatcttacgaatgttaaaagtaaaatgaaaaggacaaggttgctagagatgactgttaaaaaaaggggaatgagttccttctttaaggttgagacaaaatggtataaactcttccttttgagataaaacagtatatgttcttgatctaggactatcacttggcatggttctaaaagtcttgggattgcaactacaaggataagttgtagcttttggggtaaaaaaagaaacaaaagaacaaacaaagtcattggtattgtatttgtatagaaaagattttggcctttatcttctatgatcttaccattcctttttgaggatttatggataggaaagtaaggtttaggtctgatatctataattatttgaatttcaaagtaattctccatggtcattaagacctaaatgaaaatctaatttgatacatcacatgattagtcacagcataccaaggagggcagataaatggtgttctgaaagcaatggatactataagaaataaatttatataattgaaagagatgaaattggaaataatgcaactaaagtgaacagtgaaagtaaaacaaactcagaattgaaggctgaaattaaatttaaaaagatgctaacgaaacaaacatcaatgtagatataaaattatctgtggaatcatttttattaatgtgtagaaagcccatacaataggaattacaacccaagaagtaataggtacttgggcatggacttggaaacctcctacacaatggaaagattataatcaattattcttgatatgaggcgtggctgatggttacatgggattttctctctagcccatttgtgtctaattgaaatttggacgtgaaatacccttgactggtagattaatgaatacaaaattacgactaaagcttacttcttcttaatataattaaacattacctaatcaaaccgagtgcgctataaaaggtgttagtgaaatgcggggctgtcaagaagctaccaataacaatgaacagagtgcagtgtctcttaccattttaaaaaatacaggttgataccatcaagatgtaaaagttaactggttgtcaattcttgtagttctcctttaccaagcttggtacatgctatgcatgaaccagctggggttataagccttcctaaatcaggagtcatgcatattcagataagcgtaattgattatttgtcatgtaaagtattacttgtatcacatgcactttgtatatgtgacactatggtctaaaaatactcttttacatggtttgcacttggcacccttgaaattctttaattgctttaatttctattttttgagcttgattttctaatctgcatcattccagcctagttgcagaaaagtctctttgaagtttgaaatggtgtaataataactcttggtctcaaacatccattatattgatgcatgaaaatgatgaaattgttggtttagttgtaccttggactgtaaaaagaggttctttaacaggacagtgagtgggagggtttgtgttcatgatggcgatcaagggggaggggttttcaactataagccaaatcatcttaactcttctaattgatgtggatatgatatcatcaaagtccctggttaaagagatttaaggcgtagaaacctgacttggtatcatgttgtttccacaattgatgagtaaatctcctgctttgaggctgtttcatgtaccctgttcctccttgagaaattgtcagcttttgccagtaggctgcaccattttgtcctttgaaagggttgtcaagtcagaagagttattgatcttataagccaagtgcatgacttgttcctcagtatttacatttgcaattggaaatggtggtctctctattcaccttctctaatatttcacaattttatgtttatatttttgtgattgacatccttgcgttgcaacttttcctgcaggtgcaacttcatgaatttctctaaaaatatacgatgtctaaaatgtagtgaaggcggcccaaaaaaagtcgatgtttcagacatagagttgaaaaaaggagactggatatgttccaagtaggttcctgataatcttatttttgccatgtcaatgcccttgcttggtaacaacaatcatactgtttttatattgcccgtagattaaatggtaataattgttgtaaaatggtggagtacctatgacatcataactcttatatctctatatttctttttttcttttctcaaatataaaacttaagtttttgtatgcagatgtgatttcatgaacttctccagaaatataagatgcctaaagtgcaaagcagagggaccaaagagggacgctgtaaatgacatagaaatgaagaaaggagattggaattgccctcagtaagttccctatcctttatcctaccaagcggagggctagtcactgtaatctgaaattggtctcttgattgtagcatttgggaacagtttagtttattgtcactgtaactagtcttctaggcaattaatatgaaaggttcataacctagttatacggaggaatgaggctaacatgaaaaaccaggattgggttataccccatatatgcaataatgatatatgtggtgattcaaaggccatggcctaatgaaacttcttattaattgacaatattagttgctagctttatgaaagatttttgtgaaaggtttcatcaactcctaattcatgccaaatagaccttgttgctgtagatatatgtcaaatttcattacatttgatcaactgtgattgtcaccaataaagcatttactttttctacatgggaaagaattgttccaaaagttatatgcatgtgcacatatgtttattcctttgcctgctctatgaagaatctacttcaaccaagaaaacttatcttgctatttcaagaaaatctagcttagggacttctaatgtttgacatggatattttcttgttttgttggtaattactgtaattgatctccctggcttctatatgcaggtgtgaattc

SEQ ID NO: 6644 - DNA, 8660 bp, Ricinus communis
  Intron number 4 from transcript 30157.m000795 (locus 30157 .t000004) derived from phytozome v7.0 (chr-ID 30157; pos 8 0517 to 89176 reverse strand)
gaagagctatcacaaatatacaatcattctgaaaggttcgggaaaaaggttttgtttctacatattcgttttctctatttacttttgtttgtgttacttcaaaaatcgatgatcaatgaggttggtttagtatatgtagatctattaatgtttggtattggtttgttccttcttgaaatgtcttgcaaatatagcagtgctagaacttgtaatttattttaaatttgacatataggggaaaaggttgattaagtacgtatgactaaaagatgtggaagaatagaaacaaaaatgttctatatggatgtaaaagtaagacaaaacattacaggaaattatgtagacattaaatgtactcaaaggtcttcaagaaggtttgagcaaaaaggaggaagagaagtcaaactagtgatgtaggctagaaagggaacacattctaaggattagaaggtgctgcaatcgagtttcaattttaataaaattgcttacatagccgaattttggtctaggatctatactttgtatcatctgggagtcttctagttcataagatttctgaatggttagatgattggaagtgaaatttatttctctaagaggtcactttacatatttggtcgtccacatttcatatgtctaaactttcattgtcttgtatctatcaacttgtcctcaatgtcatatcagccttcctatgattgtgtttatttttcaactgctctgtacttatatgttcatgcatttatctttgctccttataactaatcttctgtgctaagagttgtttctaagtctctgaaattccgagttccaataccagcccaattaacaaaaacaggaaaaaaaatattcttgtgtgttatttcttcaatgccaatgctgactgcaatactaagtaactaaaagttggaatagaaaattagagagacaagaattctgattattcactagcttgaaacattgactatgcaaaaagttcaaagcacaaacataacaaagtatatgaaattgattgatacctgttttattctctataaatcgcattagaaggctctaacatgatgttattttctgttggaggaatgtaaaaatggttttatctttttgttttatgttctctagtttaatttgaaatttacccaaaagtttctcttttttaaaaaaaaaattggattgtgcctcatcccttttgaaatatgttcagctgtatgattcctcggtatcttaaaaattatgtcagatatagtactatgaaagtttcttttcttttccccttagggaaaaagatagcctccatggtgtattttctaagcattacaaaagttactttcagatatttgttaggcaccctactctatactaaatcatcatccctgaagatcaattctggattcttaagtttggcaactttgaatataaatcttgttcgtatatgtagataaccaacatactcttcctttcgatcattctgtttgaactccgatgtaaattaaagtatggccaagagtgaatgccacatgttgaaattctatattaatagtcctagaatttaggagcattatctaaaataaagggatttgcttagttttaattcttatcttttatggctcctagtttagtgggataattatctaaattagttagataatctcttagttatcagcagatctagaggtgttgtctcttgtataaatatgtacctttacgctcgttagaggaatgagaagtgaaattatttcttttcttctcaaatcacttcatggtatcagagccttctttgaatcaaaatatctcatgactaaatacaagatggctactgagagttcagttacctcagagtcagaacagtctctctagggtaataatggaggagctgatggtcccaataatagtcatctcctcattactggtcataaattgaatgggcataattaccttccatggttacaatctgtgttgatgtttatttatggaaagaggaaggacgactaccttactggagctgttgtaatacctaagaaagcggatcctaagtacaaggttggaaggctaaaaacaatacggtaatgtcttggctcattaactccatgcataatgacattggagaaaatttcttgctttatgagacaacaaagaaatatgggatgcaaccaaggaaatctactcaagtaattataacgcatctgaattgtttgctatagaaagcaatcttcatgatcagcgacagggggagtccacatttacccaatactttaatactcttacaaagttttggcaacagttggacttgttcgaagagtataaacgggaatgtgctgaagatggaatcaagtttaaaaaggttatagagcaagaaagaatttttaaattctttccaggattgaatcagaatcttgatgaagcaagagggataatactgggaatctaacctcttccaaatattctagaggttttttctgaagtccatagaggagagcagaaagaaagtaatgatgggtttgtctacaaccacatcaccaacagaaagggataatactgggaatctaacctcttccaaatattctagaggttttttctgaagtccatagaggagagcagaaagaaagtaatgatgggtttgtctacaaccacatcaccaacagaaaatttcggctccgcccttgtaacccatagcaccagtgaactgcaacaaaaggtaagtggcaaaccatggtgtaactactgttgcaaacctggtcatacaaaagaaatatgctagaaacttcatgggaagccaacagactggaagccttctctcaaagcaagtgacaaggagagccgtgcagctgtagctgacagtatggaaacatgtcatgcaactgaatcttgtccattaaataaagaacaaatggagatgttacaaaagcttttcattcaaccacaacaatgtcctataattggaactagtacattgggtcaacaaggaaatttcggagtgccttaattgtaaatagaggaaatctaagttcttggattgtagattttagagcttcagatccaagtatctttcgtcattacagtccctgtgatggtaatttctcagttagtatagttgattggtctattccaaaggtagctggtacaggtttagttattgtatcaaacagcttgactctccattcagtttgtttggttcctaactcggattgtaacttgctttcagttagcaaacttggagacgaattaaattgtgtttctaaatgctttcctaattattgtgaatttcaagacttggattcggggaggattattggcagtgctaagatgtgcgtggtactctacatttttaaggtctctacctatcctacaaaacaacttgataaggccgcatatgtttctcaaaaaagtcaatctagtttttatcctaagtcttgttgaaactaataattgaaaaattgtttccttcattgttcaattataaaagttcaaaattttttcaattttgaagtatgccagttgtccaaacatactcgtaccgcatattctattcaaccatataaatcatcttatccattttccatgatccatagtgatgtttagggacctgctagggtgaataatggtacaggtgctagatggtttgtgttgtttgttgatgaccatactagagtttattggttttttctcatggaaaaaagtcgaaagtcaactaaattcttagaaatttctaaaatgattcaaacccaatttcatgcaaaaatacaaatcttgagaattgacaatgggaaagagtattttaactctattcttggggactacttactaagtgagaatataactcatcaaagctcatgtgttgatacaccataatagaatggagtatctgagaaaaaaaatagacaccttcatgaagttgctaggtctttgatgctttcaactaatgtcctaagaatattttgcggggaagctgttctcacagcagcatatctcattaataggatgccctcacgtgttcttaagttccaaaccctatgtcaaacccttttacatcattttcctaattctaggattatttctagcatacctacaaagatttttgggtgcatggtttttgttcatgtcaataatcagaataggagtaagcttgatccaagatccattaagtgtatctttttgggatattctcttacaaaaaaggggtataagtgtttctcaccaatcagaaaaaaactttactgttccttagatgtcacattcattgaacatcagccatattttgccaaaactgatattaggggggcaataataaagaatatcaattttgggatgtgagactcctatttcaactaaaattcctactcctacttcaaatgaacactcctatttcaactgaaattcctactcctacttcaaatgaacttcctattcaaagaaagtctccatctttattcgaaacacagccttatcaacttgcacctgatccaacaagtcagccttcaaataatgatagctcttccatacctgaatcattatcacctcggtgtcctagttcttctcaaccacctgatcaatataaaccaagaactaccaaagacctaattatatatacaagaaaacataaacctcaaagagaagtagtggaacaagctcctcttaagcgagcccaagaatctgacccgaattctttggtcttggaaatcaaacagaattcagatactgctgaaacacttcaaggtaatctctccaatctaattcaaattgggaaataaaaaactgatgatgatttgcctattgcactaaggaaaagaactagggaatgtacgaaacatcctctatatcctactgcaaattatatttcttatgcagggtcatcaccaagtttccaagcttatgtcacaaatctgaataaaattcagattccaaacaacatacaagactctctcagcataccagaatggaattcaacagtatatgaagaaatgcgagctttagaaaagaatggaacttgggaattctctgaactacaaaaagggaaacatccagctggttgcaagtggattttcatagtcaagcataaggtagatgggagtgtggaatggtacaaaacccatttagtagtaaaggtgttcactcaatcatatgggatagattacctggaaacttttgctccagttgccaaacttaatacaatttgaattttgttgtcattggcagcaaataatgactggccactttaccaactggatgtcaagaatgcttttttgaatggggacttggaagaagtctacatggagatcctctaggatttgaaactcaaattagtggcagcaaagtttgcaagctcaggaaattgttttatgttctcaagcaatctccacgagtatggttcgagagatttacaagagtagttaagaagaatggatatattcagtgtcaaactgatcacacactgtttattaaatcttttgaaggaaaacttttcatcttaattgtatatgtggatgatattgttgtaataggagatgacattatagaaatgggtagattggaagagcttttgaagaaaaagttgaagccaaagacttaagaaggcttaattatattttgggcatggaagtggcttgaactaaaggaggtatctcggtctctcaacataaataagtgctcgacttgttaaaagaaaactagaatgatgaattgcaaaccaacttacacccccatggatcctacttgtaagctaggtacaataaaagatagtgcacctgtggacaaaggaagataccaaaggcttgtagggaagttgatttacctctctcatactagaccagatataggatttccagtaagtgcagttagtcaatttatgaaaaatcctactaggaacgggtaaaatgcttcgctggtaccaaaccttagccacttatatccatttggtattaaacctttaatttgtttcattttggtatccctcctattatttttgttacttccgccagtaccaatgagaattccgtagttatttgatgatgtggctgccggatttacaaaataccacagaccacttgccacatgttttgttgactcccttattttatcctagtcagcaaatcaattgtgtcccacccccaaataaataaccataaattagaaaaattcccaaccacctctcaggcttaaactctctacaatcttggcctcacaccttcttcatcctgcccattgcataggctgaataatcagcaaaccaccctttccctacacgggtcccgtttggcaaaatatcatcgtccatcgttagtcttgagttgatggccacagatggaaacagcctcattgtctctgatagagctgcgtgcaagtaatgaagctttttcaaatcgttatagctaaatattctcattcttgattctgacaccgcttccggcggcgccacttcaattagttcttgataaatcaagtgtccacaacgagggtttctcacgagcaaccagaaaagccatgttaaggcagttgatgttgtgtccttgccggcaagaacaaagcttataactatatctctcaagaacttggtcttttgttgctgatcttgaaattcataatcacaactcaagaacatgaatcttgataatagatcttgaatcttttcactctctttttcttgattctttgatttgatgatctctagagcaaacttatcgatagttccaatagcttcttttagtcctttttctgatccaagattgagcaatcttttaagcttccatactggtggaaatggagaaaagaatctagaaaagaagcagattgctacagcatcatcaaaagctttagcaaaaggcaaattagcattgatgattcaggatccacaccaaatgcaacttcacatatggtagtaaatgtaaactttcctaacacctgttgaagatcaaagattttccaaattgagaatttttctgatttaggattatttatctgggggtgggacacaactgatttgctgactatgataaaataaaggagtcagcaaaacatctggcaagtggtttgtggtattttataaatccggcagccacatcattaaataactgtcggagttctaattggtactagcgaaaataatagaaataataggaggggtaccgaaatgaaataaattaaaagtttggtaccaaatggatataagtggctaagttttggtaccaccgcggaattttatcctactaggagcatatgaatgctgtttataggatcttgaggtacctaaaaaagatgcatggtcagggactttacttcaagaaaacaacagaaacaggggttaaagttttcacagatgccgattgggctggttcaactacaaacaagcgctcaacatccgggtaccccacattggggaaacttggtaacttagaactaaaaaacaacttgtcgtgtcacggagcagcggtgaggcagagttcagagcaatgtctcaagaagtgtgtgaaggaatctggttaagaagggtgctagaggaattgaaaattctatttaagaaacctataataaggcattgtgataatcagactgctattagtatcgccaagaatccaatacatcatgatcgaagcaaacatgttgaaattgattgacattttatcaaagagaagattgaagaaggaactgtcaacttttagcaagataattatctgaaaattagttagataatctcttagttatcagcagatctagagctgttgtctcttgtatctatatgtacgtctctgcttattagaggaataagaagtgaacttatttcttttcttctcaactcacttcaccacatcagttttatatgtttctgtgcctgtataaatatgttgcttgttgttgctttgaatattagtcatttttttgaaaatgttttagaggaaaaaaaaaatctctcttggtgtcaattagtttcttaggatgacggtcctgattcattgctggtcaactacttgaatgttgatatgaacaataggagattgacttcctttttccatcaacaactctatttgaattcctgttttccagactgttctgttggtaactgatgattgcaagggaatttcttttgtttagcgacatcaaggctttacacaagcttagcttgtaaattgttgtagcgaaagactagaatgggatattaaagttggaaaatcaaaacaatttagattttaaagaaatctctcagttaaaaatgaagtcgaaatcagaaaatacaatctaaatttgagtctagcagccctatttatactagctagtatagttctaatcgtctatcaaaaagtaatctcaaccaattaaatcctctttcgaaaagtaatcttaaccaattaaataaattattaaacaacaatctttaattaaagatggaaagaaacctaaccaaaaaaaacatgaaaactaaatgaagtcctatactaaataaaataatgaaagttaaaaaagaagttataatttgagtggaatgttcctgcactaatgtttctgttgatttatcatagctcaattgtgtgtttataaaaatgattactttgaagtggatttctttttctttttatttctttcaatatgttatgtcattggtgatattgctgatatttccctttcttattgctacagtgttgcacttgttgtggacagtcctgaattgttca

SEQ ID NO: 6645 - DNA, 4360 bp, Ricinus communis
  Intron number 3 from transcript 29799.m000643 (locus 29799 .t000021) derived from phytozome v7.0 (chr-ID 29799; pos 5 56694 to 561053 reverse strand)
ggaacctggccaggtaagggtcttttctttgttaatatctggatgtccctgtattcattttgcttcacttttaggtttgaatggaacatgtctgcttaaaaatttctcatgctggatgcacaacaaatgatcctttttgactagctattgaaaatttgaagccaagacatctaaatccgacaactgttagctatttatcttactgtgtatttggacaatgggttgctcactaaaacaagttgattgggcttgttcccaatggagtgagggcttaaaggtgcattcagttttattcaaaatcgagctttgacatattttactctttctttgggaaagaaaacggtcattcttttttaatgagttcaattgcagaattctgataataacaagcggcaaatataactgacgacaatgaagctgcaactgaagtagcaaaatttataaagataaccccatgcataaaatgatgggatgctgtgtatctcctatcttcatctttgaaagagattatagatttagcgtgccagtatcaaacactacaagtaattaataggttctatagactcaagctggtaaaagaggacagcacttctggatattatcttttctaataagctgtctttttcttcaacttcccattttcttttaagcatcctcctttatattataatatatctggttccattctcatactctgcaacgaggagtgttctgttatcactttttttgggcttattcttgctttctcttcctttcgattttaataaaggaaaactttgttgcttaaacttttgtaaatgccttaacaatcgagccaaaccacaccttctgaaacttttgtccacattttagtacgttggtgagattctgcaatatcatttgcaattaacaggtcacaggtcattaaagaagaagaaatgtgcaaaatgatggatacaggactgtgtagatcttcaacactgaaggaacagttgatgataattaagaattccctttttcctgctcatcattttattccatcatcgcatggctaacaacaccaaaaatattttgtacttaaaagtatatcgagcaagccaatgcttctgctagattattattccaagctgagactgttccagtgcaaccagttttctgtactgtcagagatcaagtttaggtctgagttgtctagcatgaagcttgcacactgttatttttccttttttccttcatttctcctgcagtggcttttatatgttcattttcatgagtagcctttcctcttttgtgttcaatgtttctctcaggcgattatgaacttctattttaggcatacttaatggataaaaccaccatcttctattggtaatttatgaaagatagatgaaatataatactatgtatgttcagtagttgtaaaaaatagtatcgctaggaattaggctggttgggatactgtgcatagattccacacttatttgtattataggaaaacttgtttttggcatggacgcaatggaagatgatctttgtatgaatgaaagatttctcaactatgacttgagaaaataggttaaatctactgaaacatcttatataatgcagagaagactgcatggatctcacccttcttggagcttggagttcctgaaaagtttttgcatttgggcaccttttaattgctaaagggagcccagttagacttgtttctagacctaatttttgaggatagtagctgattagtatgcaagagttgctgattatgatgggaaggattgtttagtgtttttcttggaattctaagttttgatggcctgttgcatgattgagaatttgatacatttcttttctctttgggttattggaatccacaagggtgagaaaggaagatgagtataaggttgtgtagtttcctcgaaaaaaagattggatgagtataaggttttgtgactgggaggccagcagatattttgatataagaaatgttcttagaacacgattgtcttatatggcaatgaatggcaactataatccatattcactgaataatctgttgctgcaacatacagttgcaaggaagattgtgagaattggaaaacactttgtggttggttcatgctttcttcaatgatatagaaattggcagtttgtttaattcagctcattcccttgattttgtgttttcgttcatctgccctcctaagagcatttgtgttagtcgatctttaaattgcgtcaaacgcgtactaatttctttattgatcatctcttgatattgcggaggtacaactattgtaggattaacattagttgttagaggagcacctatttagctcagcacaattactaaagtactgtgagatcagagaatggtgttggtgcgatggttctttgtggtggattttgcacatagctcatgggagatcatgtatgaataagaataagggtattgataaggaccatatacatatagctgaaaagttgattgttgaaaaggtgatatttgttgaataggtggtcgattattgtaggtaatctaaggaggaacacttctaggtggtggtggttctgaggtgcgagtgttgtccggacgagacattattttttaggaagttatcaacaaaagatttattttcaggaaagtttttctttgggaaaagatatagctgtttcccacaaacagcaccaattgatgacttacctaaggaattgatgatgttgaacaaggctcacttattcctcctgtaaacgtataaaagaattaaagagaatatcagacttggcgtccaatatccactccgacaatcaagtttgtatttgcaaaaagagaatgaatataaagttgagctttgtatttgtcttgaatgaattgaatgtcttacctgtggggtctcttatatatatatttattattcctactcctcaatgtatttggagatttcctagctaggttgaaccaaaccctatcaggattccttctcctttaatatttgcattgtaatcattcaatgatgtagaagttggcaaattagagagcaattctggaagcatagtaatggagttggatggaggaaacttcagctgtcttgatgtgagaaggacagcttgtatggacgcaaagcttcttgtgcatacttccttcaggatctctttagctggctgctataattagattctttacaaccatctctttattatcatgactgagaatagacaattaaataagataggattttttcatagaaaatgagattattctgttccagtgagagtcattaggtctggaaagcttcaagttaatcagcattattcctcattgttaatgagattgcccaacacctctctctctcttatctatatacatattggtaacatttggacaatctaaagcattatgactgttagcaatatggaatctggtttttcctttcatattttctttccttattttgctcgcatcttccaagctttccatatgcttttaggtaccattttttggttttcttatttcaatttatttctaaataagaaagcttgacttatcagacttcttatcttatggcaaattcaaactttcttcctcttctgagaaggtctttcattatatagacaagaaggccaactatacaaggaaactaaagttgtctatgctaattacatagaggatcctgggaagctatatatggtaagctaaatctcctccgttatttatgagactatatacaggctagattaatggatcaattgcagctattacttaaaagtgttacccgtcattatttatggctttctattgagagaatatacctaaagtaacctggaggtaaatggtgcatgacgatctagtgactttacatctctccaaagatgtggcctagaatcatttggaaaagagaaacaggttccatataactaacctcaaatagattggactaagtcttagttgagttgaattgagtaccgaatgataatctgggactttggatgtgcttgtatttgtaatgaaatcagtcaaatatcttaaactctgctattacaaaccattatgtactttactaatggattttgatgactggttgtcattctgcttaactaatttcagtaatttaatcaaggcggctaaatgaactctataattttattaatactttccactgtatggttttagttttgtggcttttattttaaattctttctttttcattcttttcagagtttctatctgtggataatgtatagttgcatgagctatttctatttatgattcttcattccatcaattttgattttaaatggatgtgcaattgtattgtttatggtccattattgtccattatttgcagccattctggcagccacataacagagctgttgcgag

SEQ ID NO: 6646 - DNA, 2822 bp, Ricinus communis
  Intron number 2 from transcript 30075.m001190 (locus 30075 .t000057) derived from phytozome v7.0 (chr-ID 30075; pos 5 01745 to 504566 reverse strand)
agaactgcaattcctttgcctcaaggaatatctaggtgtgttcagagtcctaaggtctttaattgggttttgtaaattagctcttgtattttgtttggatattgttattaaagctatagggacaatatgcaatggtttaggaggattcttttgtattgaatttatgatcatctaataaaacccattatgagggaatagaaactttcttttttcctttttgtttttctcttttgtgttttttaaattcggaatatttcatgaagttcagattcaatgtgctgcttcaaacatcccagtatattttagccagcactggtgcttctatattgaatcttatttgtgccaaagattaatgtccctagctgcagttttggaggcatcaaacctcaatttgtttccataaaagggtgtcacacatgggtgagtgacatcgttccttgatgttgcttttccttcctgagttgtacataatcctcaaatattcttactgttcaattgatacacagatgtccagtttaatccagttagctccattatacaaaatacagtcacggttgataacttttttcaaatctcaatttaacatagttcttttttatttttaagttattttttttataaagggtcttgtgtcatatttgagtctttagtgatcctatttgaaattgtcaagatttgtagccataagcatgtagagagcaaaaagatactgtatatctatctatatgtatatatttgtatgattgtgtgctctttcttttactcgttcaaattagaatgaagtttctgcagctgtcttctaaaattaattattgtactaagacatgatatttatgagagacaattgataagtttaatgtgtggcatatgaagcaagtattttagtttcttaatgccttctcattcttcaaataaacaaaagtttgctatggaaattccttagtgcaatgcaatatccatttaggatgtgcctttgcatttttttatcggcatttaacatgtgaggtagctcactgataaattgaagttgacttgaatgtcaaactttctttttgggataatctgcttcttttactgttttacttcttttttatgttttctttgggtcattatatatttgaatttatctaacattttcactttcagacttcaattttaagaatgaaatgacttcaaaagaatatgaaaaattgcaatgcatttctttagttggtgagtgtaatttgataacgcttactgaacaattctccgtgcttataatgtcagatatctgtacatttggaagaatacaaataactgtctgtggtatgaatattctgttagatggaaatgggaagaagaaacataagtaataatgtttatttatgtttacaattgtatgactgggtttctggacagatcagtccatgcttagatatagatgatattgcaactggttatgcatagtacaggctgggatgaggcaaataatattgtattttctttacatgtttgtggtcctttttgcttagtgaaatatgtggataatgagtatctatgcatccatatgtgtttgtggacattgcattttgggttaggtggcgagggggagtaagctagctttaacacatgttgctgtgtgagtgtatcccaataagtcgacagcattacaccattgggatacttcgaataaactatcagatccccttgttatttggttataaatctaatgtgaacttgcaatgctttaggataatatttgcacctttatgatacttaagggaaatggaccttcctggatagatactatgcatgaaattttttgaagttgataccacaatgaattgtaggtctatttgtatttcctgccagggcaatagttgtatgttagtgttttcctgatatatggtaaaggttaactagtgggtggatatcttaagcttggaaaaaaatgaagtctgtgctagcaatggctcaaaaaagtccctgattacatgcttctgagaattggtgggttgttttcatggattgaagtcctttaatattctccggggaaattctcaatgcactcggcatttttatttgtctactgtttgtttaaatgacttgcattggaacccattgaaaatagatagagcaggtgaggcgcagttggctttttgctaggctgacttgcattgaagcattttacatgactgcttattacataaattttagatatggatgttagttattttttatatacacgggattagtcttctttctcatgtaatgtcaatatatctcacacatgttgactctttctgtttgaataaatttgttttttcagaatgctgtgcccagaaaaagtttaggaattcttagttcaagtaatttgcaagaggaaaaactacacttctcctctataaatgtaaagcttcacagcagttttgtagtttatcagtgttattgtggactagctgagttttgaaaaatagatcctgtgatactgcacttcaatgctactcgaactcatcgctatgaagtcctacattagtttgtgggatcttagaccgttgagtatgtggtattccctggtggctaggtagagctgctatatagctttgtactgaatggctgctaatatgtgatatcatagttttgattcctatttatttttcacattatgtctgctcttttgaattattaatttccttcctttattcttctgcttcctacaaacaccttgttctcaatttgattgaaaatttgtttagtaattggtcacttcattttacttattttactttgatatgcatggaaacttaggtattttatcgttaaaagttgcaatcgtgaaaatc

SEQ ID NO: 6647 - DNA, 5756 bp, Ricinus communis
  Intron number 4 from transcript 29835.m000648 (locus 29835 .t000024) derived from phytozome v7.0 (chr-ID 29835; pos 2 42706 to 248461 reverse strand)
atagtcagaggtggtcgaaaatttcctttgtacaggtgtagattatcttgtcctttaatactagttatgatttaaagaattcttgtaaacgaaatcaaactcttcctctatgagatcctgaaggtggatctgctaccactaacaacattttaactgcttctctaggcatgaaatagcaaaattctttgctgctgcaagttattcatgtatgactgacttgattttgatcagcagtccatgaaactcgtgtttgtatctgcacccttattcgaccatgcctcagtcttttgtggcccgatgtgcacaagtactatcaggtttctaaatgctataggcatttgtcatagtcgcttgcatgtttatttaactgaagtgatctcttggaattctagttccttaagtgcatggttcaagaataatagcatgtcatgtactgatttctttgtcaaaaaataaaaaaagaagctagagggaacttagtgcagcctttaagcttatacaaaactctttgatcataacatatttttcgggtcagaaatgataaattctaaaaacagtaactcttgttcgtttttagagaaaaaaaaagacctcttgttcgtctatgcacaaaatgattagcatgcccatgtgactaatagcatcctttaagtttaccacatcagggttgacattcagttgacatacagttggtacccaaaatactgaagcaaatgatggaagccatttggagcattcaatttactagaaaggctgttctaaatcacctgttttcgtgaggctttggatttcaatttgctaaattagatattaacttcttcagaaatgtcaagtgctagttttcaggtttaggttgtttccttgagcttccttcataaaattaaattgtcatggagcaccttacatatctagaagtcacagcgagcccactaaaattttaatttaatttgctttatttattatattctcctgaatgtctatgttagatttatgaattatggtaagttttgggtacaccacaccttctaattgctatctgttgagtctagcattaagtcagctagcttgtctcattgttttgtctcattgcatgttagtagcttctttttcttagtttagcttagtttaatcgacaaggtaaagcattggcagttctattatccaatgcatatgtattagtggtattagtggttgcttgtgttagtgtacaagcctttcattttcttgtaaacttagtttaagtttgtatttataacttctggttttatttaatccattaacaagtttttccaacaatatcttcttatccaacttcatttactttactttttccttagaaaaacttaacaactggcatcggagcacaaattgatctttaagggatctgtgaagcatttcttctgttcttgcttgacagaagcttgttcattctgtttcctaaaaactttccttaaacactttgtctaatcacttaaacacctttacctctctttttccttcttaaaacaaaatcatgtcttcttcaagtggctttgttattgtgcctcctccaatcctaactggtgacaattactcaaaatgggccattataaagcaaagctatctgcaagcctttgatctttggagctatgttgaggatgactcagatcctagtcccttaggaaataatccaaccttgaattgaatcaagatttttaataaagagaaagcaaaaaagtgtagagccaaacttgccttcattctacagtctcagattctatcttttacaaaattatttgctttgaaacacctatggagatttgggatatctgaaagaagaatatcaagaaaatgacaaaaccaggaagatgtaggcattgaaactgagaagaaagttcaagatggaaagaatggtggagagtgaaaatgttaaagatttcacagataggttgatgaccattgttaacaaaattagactccttggtgaagaaatgtctaacgaaagagtagtggagaagcttctggtcagtttgccagaaagatttgagtccagaatttcttctttagaagactcaaagggaccttacaaccattactttgccagaattattcaatgcatttgaagcattagagcagagaaggatattaagacagaaggagctagttgatggggttttctttgctaagcaaagatgttctcaactgcagaatgtcaatgtcaatgttggagggtgtggaaacaagcagaaacaacatgctgagagtagtaaagcaggagcaaagaaagagaaattccctccatgtcctcactgcaacaggacaactcacaagggaagaagttgctggtataagcctagtgctcaatgtaagaattgcaatcaaaagggtcatactgccagagtatgcaagaacaagaaaaagcacgctcaacaacctcaagctgttgatgcataaccagcataagaggagtctctctttgttgctacatgccttaaggatttgagttctgccaagacttggctgattgatagtggctgcactcatcatatgactgctgatctaagtctctttagcagcttggacagaacttgtgttccaaagtgaaaattggtaatggagcaaggattttggctcaaggtaaaggtgatgttcctatacacacaccttcaggtataaagtcaattactgaagttttggatatgcctggtatagatcagttgcttgaaaaaggttatgtcttgtcatttaaaggattggagtgtgttattttttatcctttaagagttaaactcttttctgtcattatgaaacataggagttttgcattagactagagactaattgagtctacaactcaagctctctcttctagtgttgatgagtctgttatgtagcacaagaggttatggcactttaattttgctgctttgaagataatgtatgttgttatgaagagtttgcttgtgattgatgaagttagtgatgtgtgtggagtttgtatgaaaggcaagcagaagagactgccatttccatctggacagtcttggagagttactcagaagctccaattggtgcatactgacttgtgtgatccaatggacacaccttctctgaatgtcaatgtttatttcattgcattcattgatgactattccagaatgtgttgggtatatttcctcaaaagtaaagctaatattgcttctattttctggaatttcaagaattggattgagaatcaagctagtacaaagttaaaggtcttgaggtcaaataatggtgttgagtacaagtccaacaagtttcaagatttctatgattccagtggaattgagcatcaattcacaaccatatacacacctcaacagaatggtgtatgtgaaagaaagaacagaactataatgaagatgaccagatgcttgttgtttgagaaagatgtaccaagaaggttttgggcagagggaattagtactgctatgtacctcctaaacagactaccaacaactactcttgaaggcaagactacatttgaagtctgatatagacttgttacagttgtatgttgattaggaaagaaataattagagctcgattatagagcttgattatagggctgatttatagggattagattatagtttataccttgtaattttgtataaatacctatacatgttgttgatcaatacacataaaatctttctcttatctctgtatactacaacatgttattagagcactgaaatcccatttcaatttttttcttttgggtttttgggttttctggcttttttgtctcaaacaatccaaggtctgatttctcagttcactatttcctaacttttggttattgtcaccatcttccaactgcgtgtaataatatgcaattcgattgataataaggtggttcagtcagtgaatcattgtagattggtgaaagatttgatgcaatacttagcatttctatactccggcaaagggaatatttctcgtacttttgatgtcattagaggaattttcaaatatgaaaagggtgacaaagatatgactagcctttacataaattataaaaatgtttatgaggagtctaatatgctactcccagtgtctttagatatcaaagaacaacaggttcagtgggagaaactaatcattgtgggttttcttgctgctcttccatctgagtttgagactagcagatcttaaaaacctttccagttatgaggtttcatttttagaagatgtgtttcgtagggtgctccgagttgagaattccaactcatcctctacccagtctattagtgctcttgtgagccgtaatactgcacctagatctagaaaaaaggttgagtcaagtaactttgattgaggaaatgattgaggagaaatcgtatgtcgctattgtgagaagtccgaacatataatcaaggaatacaaaaagttacaaagcaagaatcagtcaaagccatcggctcatattgcctccgctcgggatactcctgactcagttctcatatctgcagatgagtatgccaaattctcacagtaccaagaggctctaaaagccgtcatctagtcctactgttgcagtcgctgattcaggtaaaccaaatacatgtctcatttccttatcttccaaatggattattaattctggtgctacagatcatatgacaagtaattctaaactattctcctccttttagtcaaataattctaattctcctgtcactttagctgacggatccacatcacgtgttcttggttctggcatagttattcccacaccgtcacttcctttacacactgtgcattgtgcttctactttgcattatcaaattgccgaaagagtcttgaggtatataaaagggattgttagttatggaattgtatttcttgctggagataaaggtcaattgaagttagaggattattgtcccagtgattgggttggatcaagtattactatgagaagcacctttggttatttgttttgcttaaaccctaatattttatgttggagttcgaagaagcaggaattagttgctcaatcaacagcagaggcagagtatattgctgccatatcagctgttaatcaagctatttggatgagaaagttacttggtgacctaggtgctcaacaacagtctcctactcttgtccattgtgataaccaatcagctatccttatagctagataccttgtattctatgccaggaccaagcattttaagatgaaatttcattttattagacagacacaaaaagatggggaaatcattctaatgcattgcaagtctgagcagcagcttgcagacattctaactaagccacttgctaaagtaagatttgaagacttaaggtccaaaatcaatgtttgtgatctggatcaatttctgcaccttacgaagccaaaaggaggagaatgttaagtctagcattaagtcagctagctcgtcttaattgttgcatgttaggagcttctttttcttagttgagcttagtttaattagcaagttaaagcattggcagttgtattatccaatgcatgtgtattaaaggttgcttgtgttagtgtacaagccattcatcttcttgtaaacttagtttacgtttatttttataacttctggttttagttaatccattaacaagtttttccaacaatatctttttgtccaacttcatttgcttttacttttttctaagagaaacttaacactatttttttcatttcttctgtagtcgtgttgtagaagctgccccacataaagccattg

SEQ ID NO: 6648 - DNA, 1323 bp, Ricinus communis
  Intron number 1 from transcript 29633.m000905 (locus 29633 .t000024) derived from phytozome v7.0 (chr-ID 29633; pos 1 24240 to 125562 reverse strand)
caaataggtaaatttgttgctctttttcttccaattttctttttcctgttttgggttaattcttgttgcaggtttgtattaggattaggatttggagttttgggggattagggttcgtgttgtattagaatattaggaaatggaaaaattctataagcgataaatgaaacaagttttggatatcttgaggtttgtttatggccaaaaatgggttaggggtttaaataacgacaaagaatttggagtgaaatatgaagactctttggtacgacacattattaatttgattgtagtagttgatattgataccataacaattttgtaatttgtgttaggtgattaatggccagtggtggtgttaggatgcattcccttcctaacattaatacatttaacactttggtaggggtaattggcaatgagcttcctgtagtagttttagcaatgattgcatagtagtgtaggtgaaataaagtttgcaaccaacaaaacaactgcttcctatgctaggtttatagagttttatgtatggaaacttgaagctttaattttgattctttttttttttttttccatttgctggatatggtcccttgtttttgcttgaaattcttaacctccaagaaaatagtttctttatacctatgcgaagcattcgcggaaagttctttgtttgatcattcttttgataagatgatcattgaaagccatttcatgactgtggcctgcctgcaattatttttatttctattaaaatttgatttggacaattgctaattgagaaactccaatggattggaaactcaaattgaaattctaatttgtaattatgaatttaattctgggtccacacgaaagatattctgtgcattttcacctaggatcaatgtcagtggcaaacttgaagttcgatttacaagtctatacttgctgtgatgttgagtggcttgcttttaagttaacttaggattatggtattatgccgggtgaatgtggacttggactaactgatagtttagatgatggaggaaccaaccaactataaccaagtgggaatgtgcccttgaatgtccctgcaagttggtgttccttgttttcgttgtctaaccgtttttaaaatgggaatgccttgaatcagctttccagcagtgctggctcagctaccaggaagtctgttttatctactttggagatattcttattgcttgtgcaaaataagttgtaagctcactgggaacactattttagttgtttccagacagtgggagggaactgactcttgtaattttgctggtgcatgcaggtggatcagcgatagccgtg

SEQ ID NO: 6649 - DNA, 2358 bp, Ricinus communis
  Intron number 1 from transcript 30138.m003935 (locus 30138 .t000109) derived from phytozome v7.0 (chr-ID 30138; pos 7 44064 to 746421 reverse strand)
aggatccggttaaccagcccctacaggtaatcttataatcatttcgtccttccgtatattgaatttattgcgattttgaaaattcccatttgatcttcaccttaggtaattttatctaattgataggacatgttagtcttatgtgtaatttactactttggatgctttgtttttctacgaactgtatgcttttgtaatgcagttttagctagtttgatatctatattagctgagttactatattatttcttttgagttgattacgtgacagttggatgttgatttctgtttagttgacttgcttcacatttagtgtgagacaggttctttggtggttgggaggtatgtctattcttctcaattgggtttactgtttgttatatagggagaatcagagaagaaaaggatcagttgcggctaattttactggcctgatgtgcttcttagttagaaacttaggatggtattcttgaaactgtttttggatttttattatatagaaagagtattatttttgtactccaccagcactagtgtaagcatataggagttcaaattgaagccctcgcgtctttgtcattgattatatccaaagtcttggagagcaagttgagcagatcacagatgtttctaagcttttgacatgtgattttgccatgttttcaggtttgtagctcaccttgccttatagcttgacttatagtgatgttagttacatggagctagtattaacctgaaaatactgaggaaatgtcattctttttcccattgtagtacttcatgttaatagaaagggaaagaggtttagaccttacgccatctacaaagattatttgttcacaactattttgttcgtttcttttgtacatgcaattatcttagcctatttagggatcattataatggactaaagtcatgtaatacacatggataaacttggttgactctactgaaattgaaaggtatttatgtttccttgttttgggagatctagattcagaaaccttatgctttgttgtggcttactggtgcaatcatgaagctcaagaacaattaatttcagagaatcgagaaagtagaaaaattgatagattttctatggcacttgtttgggatattatttgagttaattaccagctggaccagagtatataacatttaggttcaagagcataattttgatttcgagattttccggaatgggctgttggaatgtcctagagttttattttgtgaattgagtcttaatttttcagtccttagtggggaaaatattaatgctcttagttctttatggaagtccaaatcattaacaggatcctaatggacaagcttaatcaatttaagacaatcacataccctgtgaaatgatacttatgcactatatgggggggtatgcaccacatactatctccgtctttttatgttaataaccttcagtcttctaaatcattccatttttctacctctataatctttcttttggttaactgagggtattcagtttaaacccaaaacctgatgaaaccattttaactcaataattttgttatttatgtttttggttttagtttctttaacattcatgttcaacccacccaaccaaccctaaatctctaaatgaaggggttattttttcttttcttttcttttcccaactattacagctcagcttctccttttatactggtgtgagacctaaccaatcaaccaaagttcaatgatttatttgctgaattcagacaattgcgaacaagttcaataatcaaaccaattccttcatgtaagaccttacttttttatcgatgtatcgttttacaggctgtttgaaatgatcatccccattggaagatgacaaggttttcactaatcattaggctcatgatgccgagagctttaggtcaaagtgtagcactgtcctgcttcttttactaacattgacatttctatcattttgggcaagtggagtttctttttttgaatttgttcatggtcatgatacaaataataagatcctgtatcacttatgttcctcctcatcccctgattgaagaagacttcgaatggttgcaatataatttatttattgtgcatgtctgaaatgcatcaggttcaaaggctacacagtggggtttctcttgttttttggatttctccagctagtaaacagtagacaataaggaatatctttcatgcctgacaattcggcttcattaagagacagttgtcagttgaaatgcatttgaatctcatgtcatatctgaagacaattgataatgtccacttggttgtatgcatcattggcataattttatgttaaatgtggacttaaatctgcccttctctttcaggagaacc

SEQ ID NO: 6650 - DNA, 1770 bp, Ricinus communis
  Intron number 1 from transcript 30099.m001627 (locus 30099 .t000006) derived from phytozome v7.0 (chr-ID 30099; pos 2 4581 to 26350)
cttgtatgtatctatgagtttgttctttttttcttaaaaatcttattactttatgtttgtgtttatgtttgttagtgttttcttttctttttaatttttgttaagttaaggactttaagctattagatttgatttgttattattattattattattattattattattatttcttgaccttgttgatctcgcatatgcacccttatagattgatgtgttagttgctaagaaaatgatgtaacttattagaaaaagaacaaattctgacaaattggaaattcggattgtgagtattagaaatctactatcttttgtttattgccaataactattttgtttttagttattgagaaagggaatgaaagaaaagaacttgccaatttgttttctgggtttctatcagtttgctaaattgtagtttaaattattttagctcttttcttgtagttaaccatattaattagaatgatgatttcagagtttgcaagtattaggctatcaaaactctggttgtgcaagccacctctcaaatattaatttgcgttttttttttatttaattgcaaaaatagacaaagaaggaaaatagttcctgataattctgagtactgaattatgtgtttactagttttccttgatggatgcaagatatgggaaaaggatagaacagaatgaggttgaattatttctgttttctttagtatgcttacatagaatattctacggtgaagagaatattagatataaactatgagaatacgttcttctattcactggttgcctgactacactctttgcactcatttatttatgttatgttgcttatagattgttggcaaacccagttcaattttcttttctttaaaattccatcctctctttttgtctctctgtggttgttgagaaaatgttaaaaggtaaatgaaaataagcaggtacgctggttgcaaagaaaagttaatttttttggagaaaatagaaattttttaaatatgaaataaacaaattcttcctagtagttatctcggaggatatgctgaaaattcatttccttttcagttttccttttttatactgctattgattagaatttaacagattttaagctttgaatagtgccctcctattgatctttaatcattgctagctgatagaaaattcagactcagaaatcttcatcactgcttggttagttatatttcttcctaaccgcatgatttgagcttgagtaagaatagtgtagataatcacgttttcttccttaaattgggtatttctccatttcttttaatgttgatggcagcaaatgtagtacttgtggctgtaaatatatgagcactaaaggtaataccatctcaagctagcactcggactctccaattaattttagtgtttatatgcgagaggtgtttatcagtttatggatggaaggaatgcatgttattatcctgttgtataagtattctcaaactacagaactgcaaatgagccagtttccagctaaagactgggaggtgaacttgtttaaaatgtttagaattgggttctagaatccatgtctattttatttaagttctgtataatgtaaaaggaaataggattttgcagactgtccatatcataccatcatacaggagtctctgtcaaaagggctcacttttccattcttctttctatattgacaagatgtatttattcatagttttaattaatgtgctttgactatgccatcacagttgaaagaaagaagtgagaaacttgagaattggag

SEQ ID NO: 6651 - DNA, 2049 bp, Ricinus communis
  Intron number 1 from transcript 29920.m000101 (locus 29920 .t000002) derived from phytozome v7.0 (chr-ID 29920; pos 3 9636 to 41684 reverse strand)
ctcttgttaagctcttaaaggtacgcattttttacttctttgcttcaaattcttaacctttcttcttgaattttcttgcttgcttgttttttgtctgtgtttttgctgttgctataagttgaagctgaattgttagtttttaagcttgaaaggatggaaatttgatgtttcggtttggtttttagggtcaaaacatgatgtttggagaagctagttgctttttggaggttatattgtttataattaatgaaatttgattaaattagggtttcttttgtaatacttaatgttctttctagggtttgtagataaaagggataaatggaacggagtcaaatggatttatggagtacaattaggttaatttttgaaatcctgttaagataaactaatactctgtcaagattcaaaattttgaagtattagctgctttcattcatttttcttttttcaaagaaaaatactttcttcttttggggtggatttgatgttggggaaggacatccatagtggtgaacttatacaattttaaaagacatgaatttttactacttgtgtgtagttcttagggttctaggaggcaatgtagggctttaagtgaaaaggtagggtttcattaggcctgggatggggtggccttggaggcgtttaatggtttatattgggggaaaagttctgaaataaaagaaaatggagtttagagacattgaacttattttttactgtacaatcactttatctctttgtggagacctataattaaacagaatcttcattgcaattactcaatgtgatattagtagatactttgttagcaactgggtgtagaaaaatttgactgttgttgttcatcacaggtaaatatcatccatggcgactcagcttagcatttaactttaagcatagtagcataaatccaattcttgcataaaatcaccaaatctaaaattttgtttgtatattgaggtcggttctgcttctagttgttcgcagtttaaagggtgatctgccaaaacatctatcaatggcctgtaatctagagttaaaaaaaaaaagtaaagaaaaagcacttattttgtttttggggtccagtttgcatgtcttacaataaaatagctttcatagactgcctcgttagaattcaggaaagattctgcctggcttgtgttgttgtttaaatttattaaaagatatctataaatttttactaaaatttggaatctataagttttgtatttttgtgccacatattgagtatatactagttgctgcattaaaaaaaaaaaattaagtgctaagtttgaggtatgtgagtaaaatttattctcaaccattgtgttaaaagattagtatttattggctcgaagctggttggttctcaaagcaatgcatgtatacttacttttatgagtgaacagtaaccatggtcaaagagccacctaatgattacatctcctttcttgtgccttatgctatatttcttccatgtgacttaaatggctacatctgttgaaactaagtctttatgcatagtgtccctccctcctttcatctattccaacaaattaatcttgctaagctgcataagatttaggctacgtttattttcactcatatctttttgcaactgaaataacctgaatttaccagttaaatgaacattagttttgtttctctatgtcccaaagctgctgggactgaaaccaggcttcttttttattttcactcatcccatctttaatatctgatattcatatttttgtcgtctaggaccattttttcctttttattatttttatttttttatctttaggtaattgtctgttgtgaatttttctacatttcgtgattatgtgtcttattgggtctgtggtcacgacactgttttgctgtactcattatcataggtgggctaagagtaatacttcatgatagttgcaatattgttgatgcttgtgcttgaatttctagaattaaggtgcaatattgggtatgttgttcttgtttatatacttgctaaatttttctttgcctgcagcaagctgctgc

SEQ ID NO: 6652 - DNA, 3289 bp, Ricinus communis
  Intron number 4 from transcript 30060.m000516 (locus 30060 .t000005) derived from phytozome v7.0 (chr-ID 30060; pos 3 5771 to 39059 reverse strand)
ttctgtttcgaggaaatcctgctgcagctgcagtggtactgttcacataccttcaacatttttttttcttttttatcatacagttacatgatgtcagcatgattctatacaaatttaataatccaaaattgagtggctaaactttcctatatccagttcattggaattgttacaagaatttataagtgaagatctaggcttagtagtagaaagaattcatgagaacagagaaagcaagggtcatttagcagcaagaaccagaaaggaagaaatcaaaataaagtaaaatttacaaacaacaggatcttcaagtctgatattataatttcataagaagcagctatacgctacttaaagtcatgagatttgcatgataagatgttctattgttgtatgtctgtttaactggaaaagtttttcatatgtggtttgtgaacttaaacttagatattcaatgtgaaaagtaattctctctctatgtattcatcaatgattgttcacctatatatacaagttatatctctaatataggaattcaaatcaaatactaactcctaagtgaatccctaattattctcctattatgtatagtacactcctaattaatatgaaataggtgtaacactccacctcaagctagagcatagatattgatcatgcccagcttgttacagagataatcaaccctaaccagggggcctttataaaaatatctcccaattgttctcctgttttcatgtatcttgtagaaatcaatccctgctgaatcttttcacgaactaaatgacgatcaatctcaatatgcttagttcgttcatgaaagaccggattagatgcaatctgaagtgcagcttggttgtcacaccataacttagctggtactgagatcttaagacccactttagttaggagctgatatatccacattatctcattcacagacttggccatggctctatactctgattctgcactcgaatgcgagataacattttgtttcttgcttttccgtgaaatcaaatttcctccaacaaacacacaatagcctgaagtagatcttcgatcttctttgcaccctgcctagttagcatctgaaaaacagtcaatcttagcatgaccatggttgatatactggattcctcgcctaggtactcctttcaagtaatacaaaatttgctctacaactttccaattattgatagttggaaaagacatttactgacttactacgctgacagaataggcaatatcaggacaagtcacagtaagatagtttaacttcccaactaatcttctgtatctctcaggatcttcaaacaattcaccatcttttgtaagctgcaaattaggaaccattgaagtactacatggcttaacctccaatttctctgtctcaaataataagttaagtacatacttcctttgagataagaaaatcccttttttactcgttacttcaacacctaaaaaatactttagagctcctaaattctttgtatgaaattgaccatgaagaaaagatttgagtgatgaaatcccactggtatcacttccagtaatgacaatttcatcaacataaacaaccaataaatgataccagctgcagattgcttatagaaaacaaaatgattcgacttgcttttcttcatgccaaactgttcaatagcttgactaaactttccaaaccaggcttggggactttgtttcaatccatacaaggatttataaagacgacaaactttctcattctccccctgtgcaacaaagctaggtggttgctccatataaacttcctcctgaaggtcactatgaaaaaatgcatttttaatgtctaactgatgaagaggccaattatgtgtggctgctagagaaatgaataacctgacagaagtaagtttagcaacatgagaaaaagtgtcagaataatcaactccatatatttgagcatatcctttagcaacaagtcgagcctttaacctagcaatagtcccatctagattaactttaactgcaaatacccatttacatccaatagcctttttacctgcaggcaaatttaccaaggtctaagtaccattttcatctaaagcattcatctctccaatcatagcattacgccatccagggtgagatagaacttcatgaacagttttaggaatagaaatagaatcaagagaagcaataaaagagcaagaggatggtgacaaatgattatatgacacaaaataggatattggataagtgcattaacatttacctttatgtagggcaataggaagatcatcattagaactggaagtcggatctgatgaagaaggaactggcgcagtacatggagcaggaggacttagaacaggaacatgaacaggatccagagcaggatcaggaggttgttgacgacgagaataaacttctttataggaggcttaattggagcagagggaggaagattagtaacagtataaattagtaaatcatcatccttcccctgatggacagaacctaaagatgaggcaaatagtgtttgttctagaaaggtaatatcagctgacacaagatatttattaagactaggacaataacatctatagcctttttgtacaatagagtacccaagaagatacatttgagagatctgggatcaagttatcgtaaatataaaataactatttaatagtatagaatatcaaaaataacaaatgcatgtcatatcgtaacttttaaaaggacagatctaatttcaaaatttaccaaattactccagaaaaaaattaaagtaattaaaatttcaaatcacgggtattacacctgtgcttctaactagcgttattagccattagatttccacttcttactgcaattgaattggcaatatttataatttgcggttgccttagttgaaaaggcatcgagaatttatcaaaagctgcagaatccttcaacaatggtattcttttggaccccataatagaagattttctatgttaactatgaagactggttttggcttgtttgaactcggtccatgtttgacatttaaggtcatgcaagtaatccttcactataaaaattggaagtcataaggagtcttctgcaaaaaagggacacgttaatattgttttagtccttcgaatgattaggggtgaaagtttatttgatttatattttagcattgattaagaagatgaactcacacttgaagaaacaaaatcttatcattaaacgacaagggaaaagggaaaattaacaatgtaagtattgtttttaggtagagtttgttggtggtcct

SEQ ID NO: 6653 - DNA, 5175 bp, Ricinus communis
  Intron number 4 from transcript 29889.m003383 (locus 29889 .t000149) derived from phytozome v7.0 (chr-ID 29889; pos 7 88877 to 794051)
aggaagagaaggtcataagtgtagcgcacagcaaggtaaagaatcagctccttctagtattgtacagacaaacgcagagacaagaaaactgttgaagaaaatagaatagggtcagggacatggtctcaagactgcacaagctggattgcttgtgcaggcttctcatccctgaccaaaggtgaaagggaaaggtcacttctaccttcccttcttagaaagtagccattagaacatgtaccaagcatcagtgtatatattctcatctcacttgtaaaatgaactaagagttcataatcttttgtaattaatcatcatagttcaacaatccaaaattctacatggtatcagagctggtatagccagtcatcacctaccaagccacaaatttcacattccagcattcaaaaacaatggctcacaacaaaaccaccaaaatcaccaacattgtgctgcaaggcagtcacaactattttgagtggtcaaaatcaattttcattgccctcagtgctagaaaaaaaattggatacatcacaggtagcaaacaaaaaccaaaatcagtaatcctagaagcaccaacagaagaagaattagagaaaatagaggagtggcaatcatctgaccatttggtcatgtccatgctcaccaacgcaatggaaagtaaaattgctcggctgtgtatccttatggagacatcaaaagcaatgtggaaaaaaataaagactctctaggccatcaaaataacttcgcaaacattttcaagctaaagcaggaattgtcccagatcgcttaagggaccaaaaattccatagaatactcgacagaaatactaaccaagtaggaggagttacaaaactacctcccaccatcaaatgatccgaaagaattacagagaagagcggaacatgatttaatttacacttacctgaggggtctggattcaagctatgagggcttgttatcgcagatcctgcttgcccctcaactgccctcaatcgaagccgtaatatacgattcagcgtgaggaaaccagaaggaactcgatgaacgatgttccagaaactaccgataatcaggcctactccacccgccgcgaccaagatcgacagaggggaggagtcagcaccatcgaacgatgtgaccactgtaagaagcagggtcaccatcgtgacggctgctggcacctccaccctcaactgcgaccagcacgggggtgggaaggtccgggagcctgaaagaaatgaggaagaaggttcggagaaatgagggatgaaaaccctaggagaaggggtgcgtttctggggcgtcatatgccgaaaattatatgacgccccgacccgaaacctgacccggctacatagggctccaccgagccaaaacccgacccgactcagaaacccgatccaaccactcaacccggccttagcaacccttagatcaggtccattcatcttcatctgggcttggcccaggtttgcccatgtatctacaactgggctgggccctagtttgctttaggcccatctgccttcttcaatacaacctgcctaccaggcccatccgactcagcaggcccgtcaggcctaaatacaggacattgtgtcccagctccaagccttggcccagcaaccacacgggttcggaccctctcaacccgatgggtcaggttcggttcaatttaattttcaatcgcttaaaaataatactagatctaatcaaaatgtctggattattgactcaggtgctactgatcacatgacttgggatcctgcaaaattacaaaaaaattgctagagtagagattcccagcatgtgacagtggccaatggaaatcaagttaaaattcaaagatatggcacctcaaacttatttaattcctctctttcgaatattttacttttgcctgattttaaatctaatctgttatctgttggtaagatcactcgcgacttaaattgtaatgttattttctcaccatcctcagtcattttttaggatcgaatttccgggaagacggttggtgaaggatacctagaaaatggcctatactatttttctgatcctccccagaaatgcttagcatccaccaaaacccccaagacatgctcatgcatcggaggcttgggcatccctccgatcatgttctcaacaaattattttgtttcaacttggattctagccattgggatatatgcaaattttctaagcacactcggctaccattttccttgtcttcaagcatgtctgaaaaagcttttgaattaatacattccgatgtttggggacctgcccctgttacctcatataatcattttcaatattttgttacctttattgatgattattctcgcactacctggctctatttattaaaaggcaaaaatgaagctttttcacaattccaagagttttaccattttatcaaaaaccagtataatgcacacttaaaaaattttctctccgataatggtacggagtacataaatcaaaatttctctacctttttaaacaacatggcattactcatcaaaccacctgtgttaatactcccgagcaaaacgacatttctgagcgaaagaatcgccatctcctcaatgtcacccgtactctcttgttccaatataatgttccctctattttttggtcggatgccctcctaactgctacctaccttattaatagactatcctctgtcaccttaaatcatatgagccccttggaggtccttaaaggtcggaagattgacttaggtaacctacgggtcttggggtgcgtgtgctatgtccacgtcactcgccaacacaaacttgacaatagctcggttaaaacacttttcctcggatattcctccacccaaaaaggatacaagtgttatgatccgttgactcacaaaacctatgtctctcgggatgtcaccttcctcgagactgagtcctactatatcaaccccaccagtgttgacttttattccctttttctgcttaactctgatatttctcttagtagctttaatcaatgtcccctccaggagcagccacctgtcgtctcaaggctaattccttcagggggagatagcctctcacaagaagccctatgtcacgaagtcacagaagaagcaattgccttgagacgctctagtcgacaaaccagaccgcctgtgaaatttagagactttgtgtctcatacggtgacgtatcctattcagaattttatttcatataatgttgtatctaaccaatatcgcaattatctatgtcagatctcaaatcactctgaacctacacgcttctacgaagctaatgccgatcctaagtggtgtaaggctatggaagaagaacttctagcccttgaaaagaatggcacatggagcattgtatcccttccatcaaataaaaaaccagtgggatgcaagtggatatacaagatcaagtacaatagtgatggaactattgacagatacaaggccagacttgtagcccaaggcttcactcaaacctatggagttgattatcaagagactttcgctccagtggccaagatgaacacagttaagatcttactctcaatagcaatcaatcaaggctggaacctattccaaatggatgtcaagaacgcctttctttaagaaaatttagcaaaagaagtttacatgactattccccctggatataagtcaaactcagactcctccctggtatataagctcaagaaagcaatctatggcctgaaataatctccaagggcatggtatgctaaactcagctattttttgttaagcattaattttaataagtgtgattctgattcatccatgtttgttagacacactcacacctacaccgttattcttttggtatatgttgataacatcataataactgggaacgataatcaagagatagagaatgtcaaacaaagtctaaaaaaggaatttgacattaaaaacctaggccagctatcatacttcctaggtatagaaatagcaaaatccagcaaaggtttattcctatcccaaaggaaatatacccttgatctattaaagaaaactgaaaaaataggagctaaacctgccatcaccccaatggaaaacaaaattaaactcaatttagaagacggagaacctctgatcaacataggacactatcagcgtttagtaggaaaattgatttatttaactgtcactagacctgacatttcttttgcagttagtgtgataagtcagtttatgcatgcccctcgcactagccatctagaagccattgatcggatcctcagataccttaaaggaacacccggacaaagaatctggatgaagagaaataactctactaatacagtcggtttctcggatgcggattgggctggaagctgtgatagaaagtcaaccactggattctgtgtattcgtcggagaaaacttggtaacatggaaaagcaaaaaatagagcatagttgctagatcgagtgccgaagctgaataccgtacaatggcatccacggctagcgaactcatttggatcaagcaagttctcaagacatgaaagttgaaatcaaggagcctatgaaaatattttgtgacaatcaagctgcccggcacatagcttcgaatccagtgtttcacgaaaggaccaagcacattgaagtcaattgtcatttcatcagagcaaatgttcaaaaaggggaaattgaaacgccttatgtcaagagtcaagatcaattagcagacatatttacaaaagctcttgacaaacagaatcatcagtcaattctcagcaagatgggttcaataaacctatatgaacccagcttgagggggagtgttgaagaaaatagaatagggtcaggggacacggtctcagagactgcacaagttggattgcttgtgcaggcttctcatccctgaccaaaggtgaaagggagcatttgcaggaaaggtcacttctaccttcccttctcagaaagtagccgttagaacatgaaccaagcatcagtgtatatattctcatctcacttgtaaaataaactaagaattcctaatcttttgtaattaatcatcatagttcaacaatccaaaattccacaaaaacctagtaagacagaactctatctcaatccaatttcaaagtaatgagaaataagtttcacatgcaattaatatgcagttggttatataggtagg

SEQ ID NO: 6654 - DNA, 1304 bp, Ricinus communis
  Intron number 3 from transcript 30174.m008725 (locus 30174 .t000122) derived from phytozome v7.0 (chr-ID 30174; pos 2 534972 to 2536275 reverse strand)
atcttctggttaggacttactttgatccgaacgaggttagccaatttcttcctttccatgcctcattgttttgtgttctctttgagctttgtggaatgtgtaatgtgacatgtatatcaactgcatgttaacttctctaacttttataatgatccattgcttgcttgtcggtggatagtgcttaatcttattatagacatgactcatgctttacctcattacattaagattacattgatgtgcatatttgcagaattttgtttcttgtcctagtatttcttttgcatccagctgagggtctgaaacatattttgtttgaactgtgaaatattgattatcaaaatcatctgcagaatactgttatttgtctatcataattccttcatattttggtcgtcatttagagtagtgttaagaggatattgttttgagggatgaaattcgttgccatatgacaaagttgtgggaggtgagttgataatcaggaatagcttcgcttgatattagtctgtcttcctttaaaagtatggggactagagaagggaagtttaggtctagatgtcatgttggtggtctccgaagaagaccatgatgaattggaaggcttttgcataaagaaaggactgctgcagggatgtggatatttttttgattgataagaatctctaatgtctgaaactgactctactcaatatatcaagattggctcaaaatacaaacttgggcttctttagctaccatgccgaagttaatacttctgtctaaattatgtatgcgtaaatttgctttgatatggcagaaaatgatctctttctagttgcaatttctttttcctcgtgttgaaaataaagttatctttgtgtgtgcatgtatattttgtaaatgttgaacagtatagaggatggccaaattggttatgttgctgtgtggcataggttttttccttaataaacgaaaaagtaggtatctccaaatgcttcagtggatttttttaggtgattaatattagggtttccaggaaaaagaattaagaaaaggtagtttcttttctggtattttattgcacttccctggttgaattctttgtctatcttaattcaattggctcaatattttttacatttgcttatatcagactgagggaatgaatcctttcagtgagtctaaaactggttttctattgcttaagttttgcctatgtaattcactgcatttttgttgtttcatttaacgagtaatactttgctaagattggaaccatattgataggcttaccaagattcaaccaaggaaaaacgccgttc

SEQ ID NO: 6655 - DNA, 1032 bp, Ricinus communis
  Intron number 3 from transcript 29586.m000615 (locus 29586 .t000020) derived from phytozome v7.0 (chr-ID 29586; pos 1 53256 to 154287 reverse strand)
aagtctggtggagaagtgaaggtctgtcttttttttttttttttttttgttgattattcaattttctactttgtgcatgctaattaggatctaattttgcaagaaaatcataaccttaaatcttgtttaaataagaagaaaatggatttaagatatgcacatatctcttaactaatttgaacacccttttgtgcatataagcaaatgtctttcttcttgtactttgagaatttttaaagatggaattctccgaatttagatctctttcagcattataaggcagaaaccccggttacaagactattaacctaatgacataaaaaagattatactcatttgtctttgctttaactggaaaaacttatcatcatgttgtggttggttcttaagaaaaaaggatggggttatggaattctatttagccctttaaattgagtatcaaattttcgttcttttcttgtgatgatgagaaatagtatattttacatatccaaatgattcagtaattgatctctaaaattggtcgtgtttgactcaattctttgtctgaatttattttatttataaattaattttggtgcttaagatactatatattaaatagaatatttttgctaaaacttttattcaaattaagtaaaatttaattaatatttcagtttttaaaaattatccttatatatatatatatatatataatttaagtgttttttctaaaaagaaaaaaagaaaaaaagttaaaataattaagtaaagtagttgaagaaaagcgagaaatagagagaatttagcgaaaaatgatgttcaaataaaaacattcttatcgtaataaagaaaagttcataaatttaatatttatttaaatattttttatcaaaatcgctggaatttaatttagtaatacttaattacataaatttttatttataccagacactgcattttagaaataaattggagaaaaaaccttctattttaggttgttattgacaaataattggtagttaatatgtgagtgaatgtgattgttag

SEQ ID NO: 6656 - DNA, 1285 bp, Ricinus communis
  Intron number 3 from transcript 29912.m005539 (locus 29912 .t000265) derived from phytozome v7.0 (chr-ID 29912; pos 1 682164 to 1683448)
aacttgggttcttttttttcaagattccaatcaaggttagttctttctttctttattcctttttctttaaacattgtcctaaaagtaaaaaagtatgattctttttgtgttgcatgtcttctggccttgatttgattttattgtaattgtatactaggggtgagaattcctatcaagattagttctttatttttctctaaacatctttaaaaagataaaaaaaattgattcttttgtttaaaatttgttctggatttgatttgattgatttaattgtgtgctagtgaactagggctgttaagggcatcagaacttttcaagcaaaaatgtaggtattggtgagctaagcggagctgaaatctagtataattactttaagactgattgcagcggaaattaggaaattataggcattggtattcagtgtattgcttctatgtgtgcccgatctgagctcatcatatgttaggaactgaagggtgcaataatgatatactataattgagagcacttcaaaagttttggggttgaagaatagttaatataagcttgccctgatgcaaaaattcttaaagctttaaaactccggcgggataaggtaaaatggtcaatgagatcgaatgcataaaacagcttctggaaacattctttttcataatggagcaaatcgattatttggggtgaatgtatcggtgattattataaaaatacagatcagtgtggatggagtttttagtggccatccaattctgaaaaatatatagctacaaacaggcatgccgcccatacttgcttatgcatcaaaactggtaaaaagaacaaaagggaaaagataagaaaaggaaactgcttaaaataaagcctcaaatcagtagcctatagggcactatttcatttctcacgtaaatgggccattttgatgagaatgatgaataaataataagattggataagcgtattatccatctatattaaggatgcagtaaattgtgtatctatcagccagcagcatatatgtaaaatctgttcagtaatgttcaaaggcaggtcaatctgctgtgttcgtttgcacttttgcatttaagctttttgtgttaactacctgaatgaatttttggtagtactgttgagttgcaagcagtaaacctcatctcatcattattctatggttgtatctgttacagtgttgcatcttttattttctcaattctgcaacattgatgatatagcagctgtcttgccgagtctaatttatgttcttgaaaatgttccaggcaaaagtatc

SEQ ID NO: 6657 - DNA, 4450 bp, Ricinus communis
  Intron number 7 from transcript 30195.m000311 (locus 30195 .t000005) derived from phytozome v7.0 (chr-ID 30195; pos 2 89911 to 294360)
ggtatgtcattcttttttgctatctttctatttgttgtttaagattgaacagatgtataaaatctttatacttgataattatacttcttccagttttatttgctattataagtttgaatatgcatgaaagcttgataactatgatgtaggtcacttttttaattttccaactgtgcctatatggtgggttacagagaagaaacatttaggtattacggatttatgacataggcttaaattttattttctatttcttaaaatttaaaatggacataggcttaaaatttaaaatgaacatttaggtattactgatttatgacataggcttaagttttattttctatttcttaaaatttaaaatggacataggcttaaagtttgaaatgacatttttcaattgggttattgcattgatatggtaattaaagattgatgacctaaaataacaatgaccacatagaaaaatggccatagttattatcatttgaaatttaccctagaaagtggtgacaaactatttaggatgacaattggtgtttaaataacttagttggtccatgaaagatagatatgttaattttattttcagatttttccaatatttgcagtcttttagaagcttaaagatgataaacaattgggcaggtggtgtgctagatgtaagttttactaagatctagaaatgatcgggggaatatagtgctgttcgctttaggagattgttttataaaatcttgattttcaaagttgcacatgctattgtcatattaagcttgccagcctcattatgagattttgggattgcaatctactatagatttaaggcatgataatcatagttattcaaggtgcaaggcgcacaaagctgtaaaggggtcctggagcctaggtgcaaggcatacttgcaggcttgatctggcagacacaaggcacaaaaataaaaaaatttaaaaaaaaattaatactaaaaacatataatcatgacaaagaaacacataaaacttaacaaaaaaggtttctaaattcaaaacagataaggttcctaatactagtaatgcttatcaaattaatcatcttcaagattaatagtcttcactatcatcatcattcattgtcatcaaattccagttgatcacttcgaattttctctattccttcatattcttcaaaatcaatttcttcctcgtctctaagtactaaaggagggttagctctcatatgagaagatgcctttgtcttttccatttgtttaggcctaacacttgcagaagaggatatgacatttttgcttgtagtacgagacacctcctcttcaactccagtaggtctagcaacctggctggttggaagagccctgcaacttctttgtgatcactttctatggaagagattggcaacttctatgagtcccgcttccttctttcttttggtcattactcatcttctttgccttatgtctccttttcttataatcttcttttcttttgattttttttaattgaaagaatttggtgtgttatggcctatcataagccatttttaaaattaaaaagaatggctatatttttcctccactttatttaaacaaatatcgacaagataatcaatttgttacaaaggcatgcctttagggcgcctcgtttgcaagtcaaggcgcatcaaggtgtgcacctttctaacattgccaacctctggctggctaaggcgcaagggcatgcacctgttgcaccttacatgtcaagcgtgccttagcaagtatgatgattatacatattgaaaaatctattcgattttctgcttgggggtcaattttggagttttatttttattaatttgtattattctcttaagattttggaaattatagacaaaaaggaaatttatatgcatatttatatactagcaatttgcttatgctattgcatgattattttatttattttatgctttgtatattatataaaatttaatttataataatattagtataaaatataaattttacttttatctttataatatttctatttacatctatattagtcatttataaaaatcataataatatagttttgtgaaatttttttatttattatatgctaaggcgaataaacatgagaagtatatatatttatcaactttatttttgtatctatttcattgtactaataagttctcatacgtccatataataattatttttaaaaattcagattgttagaaaagctgctatttattttttattttttattattattactttttaatatcagatacacatagattgaaacttttttctaattattatattcaaccaataaattctcaaccgtgtcataaatttcttttaactttttttttatgatccaaatttataatttttattcttttactattttattattgttttttatttttataaatattaatatagatatatattttattagaaagataataagatttatcattaatatgttgtagcaatgataattattataattattttttttgaaacataatagttttatatttaaataagtcataaatttttactgtattcattattagtatttaagatcacatttaatttttttataaatattataattaacacttctataaatatgtcatgtgtcattttctcattagaagacaagaaaacctagaacttatgatgtaaatttctgggaacactgtgtttgactcatttgaaactgtgaacaactttagccccaatgtattctgtgtaatcatttatatgttgcaacacctatagaactgagttatctgttgaataaaacataataggtttttattaaacaatgggtattttgttttacgccttgttctttagtcatgtcctttgcacgtgaatattagtagctggactcattattgttcacataatagaaaataaaataactactaaaataaaaataaaaataaatgtttttagtgtaattaaattaataaaatttttaaatagaatatttatttaaacttcagttataaaatagattaatgtgttcatagtttgaatccggttgtaatttatatccaactccaattctaatccacctaattatatatttgatattttaatcaaattgccaaatttaagtaaaaacataaaataaatacttatattaaataacaattaatgcttgctaattctttctctaaattttagtaataatcttaagttgttaatataaatacagaaaataaagtgataattaatttcttataagaataattttaaattaaactatgatttgtccaaggatgcaccataaataggatgaatgtatatgtaatacatacaaatttacgttttttatatattttttggacctctaaaattagacttatacgtaatgattgaaaatcccacagagttaaacttctagaattagacttaatattaatagttaggctcgttattgtctatataatataaaataaaagaactactaagttttaaataaaaataaatatttttcgtataacaaattgaaaaaatagcttttttaaaaatgtttatttaagttttagattgatgaatttactatttaaatgcaatcttaatgtaatgttgtcaactgtaccaaagattttttttttcttatatagtaattactatttatctactcacatgataaaatctgttaaaataaaaggaatagttaataaaaatggtaattattgagtgattgttattctctacagtagatataaaatacacctttcttttagttttgttttctataattccttaattataattatctagagttaattattatatagtgaagagtaaaagtaaacaaattttggattttaatgtacgcatgtatcttagaaacatgagtttcaaatgtgataattcttttctaaattttaatatttattctaatttaattatttattgtaactttttgtttataatattttagagtcctatctttatacaaattttatccttataatactactatttattatttttcctatttaattttatttaattagtaaaaaactaaatcaaccaatcttaataatacaggcccttttagtaagtttgtctgtcccccttccttcacacttttatagatgttatgatatgactatttattattttttctatttaattatatttaattagttaaagaccagatcgaccaatcttaacaatacatgtcctttcaataaatttgcatgtcccctttcccttcgcacttttatatatgttatactatgatatgtgatgtcatgtattcattgattgtagaggataatgaagttaattctcttgaaaatttaatgtttcgatgggctatgattctccttccttctttcatcttcaagtatctccttgtcatttcttgatatctttgattagttgtattcaggtagaagcaaaagatcccgccactggtgtttcata

SEQ ID NO: 6658 - DNA, 3702 bp, Ricinus communis
  Intron number 5 from transcript 29675.m000392 (locus 29675 .t000005) derived from phytozome v7.0 (chr-ID 29675; pos 5 0711 to 54412)
tttagccaccctgatattgccgctgaggagccgtaatatttgttatagtaaatgttctttattttaaaaataaaatttttataataagagcatttaattatcaaaaataaaatttttatttaaaatccaataaattcttcatattttatttttttatcttatttttatttttataagcattaatagttataatatttgtttcttttttattttattttttagtaataaaaaaaataaaattataaatacaaatgaaattaaaagtatagaaacttgtaatatatttattaaatatagagtgtagattgaaatttgactttctatatataaaatcatattgactctctattttacatttaaaaataaaaaataattaaaatattattttttgatatcactttaaaataaaatatttgataaatataaaaagtgcattaaaaatattctaacactctcattatgagatatatatatatatatatatatatatatatatatatatatatatatttacatataaattttaaaattaataaattttatatataatacatacaagaatgcgagttaaatatttaattaacaaatgattgtcataaaagaaatatactctaaaataatttcactatcaacctcaagcattgcgttttaactctatatagcacataaattaagaagtttaggtagatcgactcatttaatacagaatataattttactttaaattttctggtggccaatataagaaaatttttacttgtatttagtaaattttacatttatttatactaataacttctaaaattttagatttagttaaaagagatatacgattagagttttttctaatttaactaaaattatgaattcaaattttaaatatgcattcacattaaaaaattttaaaatagtactttatcattcgtaaaagttttatttaacacattttaaaatattctaaattactaaataaaaaaattaaaagaaaataaatcataaatgtcaaagtgacaaattcaaaaaaatatatagataactaatattctttttaaatattctttctaatagtcaattattacataaaatcttttaacttttattaattattaaataatgaaattatttaatcattccatgaggtataaagttcatattaattaataaattttaatatactaaatattaaatataagagatttaaccatatataccaaaaagtaatggttaatgtattaaatgattggaccctttaaccgacatgtgaaacctgaaagattttggatacttgcgaggtgcattgactatagacgcatgaattattgaaggacctgcttgaaatgttgatgagtgtgttaaaaatagatttagaggtttcttaattaataagttttttcgtattttttataccctgattcaaattaattttttaaaaatatcaatttacctattcttttttaaaataagatgtaattactattcaccccctatgtttttatattgtactaattatttttaaatatttaaaaaatatattttttttatttttttatttataattttatactaaatgtattttctatcagaatttccgttaaatctgttaaccaggtttgattttatgtaaaaaattcaatattagtgctatataaaaataatgaactaatattctttaattactctaatttttagcataaattaaattttaataaaatctaaatatcttaaaaagtaaatatattaattaaaatattaaaaattcataaatttaattctaaattattaaaataaaatagatatcattattattattaattttgttatagtagaattgtaactttgataagaagtttgaggatcaaattataatttttttatcaatttagttctttaatcatattgatttttaaaatgcaaagggattttaatataataaataaaatatagggggcaatttgtatattacacaaaaaaatcaaggtgtaaataatacaaaactaaaaataataattaacgatttttctaatgaaaattttgatggaatgaatttttaatttaaaattataaaatataaaaaataaaaatattttttttttaaatattagaaggcaactagtataatatagaaagtcacaaggaataaatagtaattatcccttaaaataattattttttatttaaaaaagaaggtgcctttgcaactgcaatgcgacaatgttgctaaaagtaaaaattttgtaatttgagtttgctttctatttgtttaaaaataaaaaacgtataatcatatttatgaattatttttaaggtatgcaaaaatgtgtagattattaatgaaatggtttctgctatgttccttttctttgcaataaggatcttctttggtctatggataattttgatagtattcgtataaagttttacaatagtataattatttgtaattattgagaaataaattttaagtattaatcaaatgtacggttgagacttctctttttgtttcaacaattgggaatacttgcaaacaacaaagcaaatgcattttgaggtatagttggaattgctgcgaggtgataaaggaatatgtttaggattttttaacttaataaataattttattattttttcgctaactgatttattaaattttttggaactaaattttttgtttgaaagtaatttcaaaattaaaaagagtaaaagaaaataaatatgttccaacttaatatgtcattatttagattcatcttatgaaattatatcagtaataaaaattgattcgactttaaacactttaaacaagatcatacgatttaaagaatgagtccaatttaatttaaatttaaatgatttaaaatctaaatatttttaatttttaaacttgtttttcattataaaaataaaaataacttgaagtaatatagattttactaacttttaaagtaattaaacaaacagtaatcaactcaaaatgaatagaaaaagaaactctaaaaaactagataaagtatcttattccattgaaaacaaaataaaaaaattaatgttccataaaataaatcttaaaagttattatcatatatttaaatataaaaataaatttttctattatattaataaaatactaggctaagcatttggctttttaaaaaggaaaaataaagctttattaataatccaaacagctctcagcatacaataactcctgtaaacatggaggaataaaaaaagaacaaaagaccaacatgtaaataagacgccctagccatctcatgagcaatcttattagctaggctaagcattgttctcttaaatttgctttgaatttttaataagtttaaatataagttcaaatttggattattaaatatttttaaattaatacaaacattaaaacaataaatcaaactcgaaacgttttacgaattggaaaataaagtaatccatattttaaaaatagcttgctctcatttacctacccaagtgcaaaatacagtcagcccttttgtaacactgttaagtgttaggtttagccatcgtgaccaactccactgcttaataagttgttttaaaacaattagttgttcatatgcttgtatgtgattaatcaataaaactctctcacttgcatgattttttaatttaaaagagaaaagtaaattaaggataatggtggctaatctttctatcatgtggtcaggt

SEQ ID NO: 6659 - DNA, 2686 bp, Ricinus communis
  Intron number 10 from transcript 30136.m001047 (locus 3013 6.t000043) derived from phytozome v7.0 (chr-ID 30136; pos 1098048 to 1100733 reverse strand)
aggagaactccccaagttttaagcttgcgcaggtaatagacagttcaaaatttctgtgtacaaaaggtcactgtattactgttttgttggttaacaaagctcaatcaccaaagcttcttcacagctatgtgctcttcggggatgcattatccaataaatgtttttcccatggagtcatttggatgtctgctcttggacgtggtagttttttttctgttatctgtatgtgcatacaccattggctttctttatctttattagtttttaaaaaatggaaatagcttatgtttcttgattgaactctgaaactaaggaatgtatgctaggacaggagggaataaaataaaaatagacgactgcatgcatgctagaagaattgtggttcataggtgctaatttctttaagcgccctttgggactacttttcccaaactgcttttccaaaaaaagaaagaattttgttttttattttatttttgaattctcaaaactactttccgaaagatacaggtaaattgatgcatttcctaaaggcgggtttggcaagatcagtttatagaaaaaattaaaacagtcaatctattaaattagaaactttctaaacttactttttctttaacacccaacaacaatccggaacatgctatataccatgtcttacaccttatagataactctagggtttgactcggttcttgtaaattgtatatgttgtatttgacatgcatcaaagtaggaaaggcaaacatcagtgaattatgcatcaaagtaggaaaggcaaacatcagtgagttatctaagatagtatctggtgaatgggaggtggaagggagaggagtggggaagtgtttggcatcatctttttgtttttggtttgcataatttggaagtgtgttaggttgagaaaaccataacattatggttttcttaggttgtggcaatcttttttttttcttcaatttatgacatgaagtgttgaaactagttatggtaatgatacaaaactgtcttgacaatgaactacagaaaaccaaaaacatggataataaaggctgttaactattggtatttgtagtgtctggttttatttggtttcccctctttggaggttgtgcctcttaagaatacccccgagcatggaaacaagagtcagtggatatggttttagtcaacttgattaaggacaagcctggttaaaatgaaattgttccttagactggagctagtcggtacttggtaggttagtctgttattccatggttctgaaaaatttcatggaactgggcttgcatgacactgttagacatgcttttcctcgaacaaaaccacaacaagtcatgtaatttaggtaagtgaaagattcataagatgaaaaagtgttcaatgtaataccggcccatctacctccgctgcatactccttagcttgaactttcatctttgattctttgtacctaaatgttgaggtttatcccgtagaggttctctattgttttcaatcttagtccatttggatcctaaccccatatttcggagccttacaacctggggacatgaaaagaccaaaagatctttgacaattccaaagaaggttttcctgtatgttcatcgttaaatattgctggatcccaatgtcaaatagctgccaagaagcacaagccaaaaaacacaaataaaagtaaagcaccaggtacaatattaaattcaggtgcccattgggttacaactaaattgatgtaagctcacttggaagtctgttttgtgttcttattttatttattccttgggtggacgggaggggatgtcatttgagttgttaatcaggatgctgtgcatttaaactaggactcttaatgggtcagttgggtatcaggcttagcctgattagaaaagcaagtggaaggctgcgttaccctcctgcaaccctcaagtgttggagaactttgttcattggtttccccccttgtcaagaagattttctaatttctgctttttaccagtgaagaaaaatcagaactgatgacatctggatttttcctagaataggactgatatgctaagtattaatttcaactaaatttagctgattttaaatatgccactccaacagaagctcgtcaggagtaaggggggcttataatctagtactgtaaaacaaaattatacaaagagaacgctgtacaattatttttccttttcatttccccctcctgtacatgtattcactaaaagttctgaaaggcaaatggagattagatgcatggtttaggagttgggtttctgttgcatcctttaaaatttcagtttgaaaactttgttttgagttagaggattcattttctcattatgctggatatttttggaagcatatggattttgtcctgccctataatactcctttaacttagtgggtgcatatttttttgtaggctgtttgcagcttgtttctgtattttttcatcaaatgggctaatcaattatgtagggacaatattattgtgttaattcttgtccgctccttattttatagtattatttttagacgagggaagaaagtgatccaagttactaatattcatgttctgcgttccacatgaagaatttcagtctgattcttctgactggatactttattagctaattaattgatttaccttttttctcttcagaggaattttgtagaaagt

SEQ ID NO: 6660 - DNA, 1739 bp, Ricinus communis
  Intron number 9 from transcript 29759.m000278 (locus 29759 .t000003) derived from phytozome v7.0 (chr-ID 29759; pos 9 1332 to 93070)
acactgaggtaatctatcggattgtttttggtcttggtagtttgtgcttaacaaagctgcttgactcatgttttctatgtatggataaggttgcaactcatgattaagtgaacttttgattttacatgttattattctgcatatttatcatgatgctttatgtctttcctgatttaattttgagatgatggagcagagattatttgaggattggggctataaggttgtataaggtgacagtcatcacaactgctcaaggtttcttgatatgcattatctatggtcactttgtttttaataaggtaaaagtttaccttgttggaatccatcttatggtgagaaagaaagtcgagtttaagtaattagagaaagcaccttctttaggtattctgcgggatttaatatatgctgggtttggaagttcgacaagttggtagccttgagctattgcaattgtttagggattagaatttggttgtagctaagtattattaaataaagtttatcttatcactatagtatttttatgaacagttgtttatctacaactttagcggttaagtttttgctcaaacccttaatggagttattttaattggaggttgacatgagtttccctttaagagaaccctgttcttctatccttgcaattactatcttctcgttcaatttgtctccacaggcattttgattattttatatttctgcacatcatgaataactttgcaaaatcttcttttgttgttctttctccaataaaagtgtcgatgatgccaaattgtcacttaataatgctcctgagcatataaacacatgcatgtttagtttgttgctgagaaaacagagtatctggtgctacttggcttcacaagcgagaagcagtcttctttgtatctttatttgtagttttgacttagttgtcccaacaattgtggtttagcttggttgttccacaaacatggtgccacgtatttacactacactcatgcagaatttattgatttaaacagcttatgtgttgcaacacaaattttttgcactcagcccacaaccacaaagcaaaataattatgccagaagtgtgcgacaaacagtgaagataattaatataataaaattaggtaatgcggatatgataaaggagtctgcataacaagtcacaactatagtgtagcttactcacatctaaggtgtagtgtggctttacaagtatagttggcctgactatctgactagctatcagatcgaaattagagcgaagtagaatcaatctaacagccaaccttggatcagatcagtcattccaccaattgtacttaaaaatcacttactgcctattttacttcccttagttagaagtcactgaaaaagactttcgactgggtcattcatgtttcaaatattattgatcagcatttctcatcactcaccatgagattggctattgacatttgtaaacttgatataatcagttgatatgcagtccggtgcacttgagcatctatctgccatccagattttgtataacagaaaaatctcaaaattagcaaacatttttttatcatcatcaatattctcatactttgcatgtaagattgcttacatggttgatatgaagattgaacaataatgtattaaagaataacaattatatgtaattgtttttgtaagttcctattttgatgagttggaatcacaagattgtgaattatggtttattaacaggttcgtccagtgcca

SEQ ID NO: 6661 - DNA, 205 bp, Ricinus communis
  Intron number 1 from transcript 30204.m001760 (locus 30204 .t000029) derived from phytozome v7.0 (chr-ID 30204; pos 1 84314 to 184518 reverse strand)
gcccctgccaagatcttctggcgcactgtccgcgggtctctctcttaacttactcgtcttgtttggaatagttcattctcaagacttgaatcgaattcgtagatttcatttctttcaaattgaattgaatttattgagtaaatcgaattcaaacttgttgcaattcttagactgatgattttggttttggtatatttggggcaga

SEQ ID NO: 6662 - DNA, 2082 bp, Ricinus communis
  Intron number 2 from transcript 29877.m000483 (locus 29877 .t000021) derived from phytozome v7.0 (chr-ID 29877; pos 1 76353 to 178434)
tccagctgtgcctgctgagaaaagaaagcttagtgggtcttgcactttgagtttttttttttttttaattatccttctgctatatcccttttgctaatatactcacttataccaatattataatttacttttgctgttagaatttcatgcgttataaattgactcatgggttatgaggtttcaaattatcttgcatctatcatgcctatcagtagttagtaatggcatccaggttttgattatttctctattatctgaacgatgctacattttagtactttgtttaatggttcatgcaaaagcatactcataccataaactgaattctagaagacctagttttcatgatgtatattgagtttaatgcttgtcttgctcaggtattggtggcctttgtcatataggagatgatttagacattgtaccatgtctagattggaaaaataagtaccatgtctagattggaaaaataattatctaaattaaactgaaggaatgcgtggtttatctgagaccgtgatcaaccttcttttttttttctttttttcctttttagtgccctgtagttgagtctcagctgtgcaatcacaaaagtagttataactggtaaattgcaagccctgctagcattatatctgatgtatctggagctgtctgtgatatttatttatatcgttcatgatatttaaaatgaatttgagaaacttttgtttctaactatatccatgctggtgtagatttacggcatatagatgcttattcttgtggcaaacagaaatttttttcttgatcgttttagttctttcttctttttggattttttcgtgattattttttcatatatgttattgtaagtagaataatttgcagtgcctgaatatttgtaaccctcaatttaaagttgtatccatgtaattagtaattataagtggataatgaaacagtttggagtctccttagtccatgttcttagaaaaaagcagtttttatctctctttcaactagcaaattgtgcatttgaattttttgaaaaccttttgaaagcagtggtctttcttttccatcagtggcttcattgaaacctggccttctcagagttttattgttataggcaaacttcaggtaaatgtataggtttcattttatgctcttaattctgaaaagggaacattgtcaatgtttaaggtgctttcgaagaggccatgtttggctgttcttttagacttctagcatttgctggagtacaagtacctcatatcaacatagttagtcaagttgcttgttaagagtatcttggactaaacaaatagatttcagcttgtagttttgggccatttatgtgctaattttttaagctgaaagacaagttctactgcactgcaataacacctgctgtgatgtatggtagtgagtgattggcaatgaaggggcagcaagttgctaaaaatggttgaagtcccaaatgagtagtgggttaggaaaaaatggggctggtaattacagagaatgtagattgagatggtatgggcatgtgaatcgctgacctattgatgctctggttagaaaggtcgactatgttaaggttggtggagttgagcaaggaaggggaggcctaaactagggaaaaaagtgtagaagatgatctggtggctatctttccgaagatagatctcaaaatcatttggaggggagaaagaggatccttatagcctaccccaattaacttggtattaaggcttagttgagttgaatcgagttatgtgctaaattcttaaagttgacttttgtagtccggcttatacagtctgttgtggcttttgctcaagtgaagcttatgtatatagtatggatttgattctggatgtttgtgggataatattctcataagttttacctagacaacaacattttggttgttattttattaattaagtcatgtctgttgtttgtcaaggcaaaattttattataaaaatttacttgtgtgtgtttttacttatgagagctaggctctcatgtttatttggcgtcctgtgtgttattggcagatcaagctgttggaagcactgagccggtaaagagg

SEQ ID NO: 6663 - DNA, 6104 bp, Ricinus communis
  Intron number 2 from transcript 29804.m001536 (locus 29804 .t000067) derived from phytozome v7.0 (chr-ID 29804; pos 9 46475 to 952578 reverse strand)
aatcctgcttcagaaatcaaggtaaaccattcatcaaaataatgctccaacttgctgctgctctaagttttctggcatccataaaagccatgtcatttgacattagttccattgatttactttgaaattgggaatcaacagccagaaaataaaaaatgatatgaaaagaaatgcaccctttaagtaacagaagaagagaatattggacggaaaaagatatattgaagtttccagcacaagtgcagtgatttctaatttaacaagcaataacaagtcgctccccttttattttgaaaagttaccagcatctatcagaaaccattagcttaaaattcgtccgaaagtttaagctattaggtgagctctcgacaacatctttatatctcttaacacatcccgcaaacaaatgctaatacttaaagcatgaaaaattgtactgaactatttttagcaaaaaaagaaaaaagaataagacaataaaacatcaaaatttctcattgcctctttttatcaagctttgcaatgcttccattgaaaccctacaataccaccaaattgttattgttgtgacagaaaaaaaaggtaaccagaaaatgtctagcgtgaatttgttaagaaaaaaacacagatgagtcattctgagtcgtcagaaagtcattttgattgctaattgtgaatgtgaaaatttgagtatgctacaaaattgaagaggcggtgacattcctcaaaggaaaccattacaactacgaaatacaatacgtacttgaacaattcaattaatcaatatcgagaagatcttttcctcttttctccagccatgtcttcgcagaagtcttacgatcagttgttcctttttcccttatgcaggaccttagagtagaagatttgaacatccaatgaagaaaaatgtactttttaagttaaaagtttgaactgtcaaaaagagattacatattcatctaaattttaagtcctacatgaatatctttatgaaccaacccaataatctctatacaaaaaaaacagtaacagtaaccactgcaatgcccttttgcccatatttgaagtaaagtccacttcacaattatcagaactctaatccttcatttaacacagcaaacttagttctcacttaaatcaccaatattaagattcatctggctaacaccaaaaatatcagtttctcatacctcaccattaaaacggaattatctgtcgagtttcctccagctcacatagcatacagaatgttcatcattatatttagataaataattttgaataataatattgttcagtcaccttatctaattcccaattgtttggttttggaaacatcttattttcattcgttctatattgttaatgctggatttttttgagctgtttataataccaaccaaatcatgtttaaccctttcagaagggatttatttgattgaaagcttgcagaagttttagtatttaggttatttaggatttgattccttttttcatattctaaggcaaagtaggttaaactagaacatgtaatttctgaaacattttggtattgtacggcgaagaataaaagaacatttaagatttatttctaagaacaagctcagatgagagaaactttacctaaatatgccacatggatgaaagattgtagagtagaattttaaggttaaggccctattctcctcaaaacatcttcatgggctaggctggttttaatgaatatgtagatgtaatcagaaaaagagaaacattgacttcagaacttcaccaaaggcaaaggtagaatttagtcattcaatcatatgtagtctaattgttagtgaaggaagcaggatcatctctgatatgatattatgaaaacatacacacttctagaagaggaccttttccaataagtacaacaggaaaactaggaatacccggagtgctgaagattttttggctattgaggatgatgcattttaaactcatacaggctgtgaagatagcttgatctcgtcccttgagatgttggaagtggttcctcccctagggtggttttgtcctgtacatagctcacctaattagctgtaaaacaccccatttctagtgcaaaaacgaaaactcctccacctcctcctcctcctcctcctctctctctctctctcgtacgaaacctctgaatatgattagtgaaatcaaaaagggtatcttgtggaaaaccatcgaccctgtccatcttgtagaactcgattcctatgaagagacattacaatctatctatcaagatccaagccatatatgcatctcatcaacaatcagtatatttggatattccagatctatatcatctccttcagtactagcactgagtggatccgtgttccagcatggacacatctattttttccaccaactttccttctattcgaggatcctattccaatacccctgttcatattcaatatctccgacaaaagttcatcttgagtaaaatgagaagctagaacaagaaagacataaaagaagttcaaagataactttaatgtaaaggtgtttggaaaacttcccagatatatatgcacaggttaataggtcttcatatagcctaagatgatttacacatggagaacattgcacaaatgatctcactgaaaacctcatatcatgttgcagtcctcattacctggaagagaggataccaaaagatacaaaatcatttatgagaggcatccgtctcttaacatgaacatggacacaggttataaagatcagaaccctattcggaaaaaaagggatgaaccagaaatgttagctttactgctatcattaacctaaagctactaaacattatagcttgctggacaacttgtaccagttaattcacccaccacaacaatgacaagacattaagcttaaacttgcaccactgacaaagtcaattgagtacatgatatgtgtgaatatcctacagttcattttcacaagatttggaagcaaattctttggcacaaaacagttctagaaactcaaaacttatgatatgtgatatataaactaatgcttgaagttcaatcccagagaatccaacttcacttactattgtttctaacaacacactctgcaggttctcttctgtcaagcccatggcaatctctgcaataccacttcacatcaatcatctagaaagcgcacaagctctgcgacctaatttgacaatcatgttagacatctaaattcatcgttcaatactacatttaggtcagtatgtgaatacttgaggctattaatacttcctactgacaaattcaactactccttatatattcgagtattctatcactgtagggactttagttatcaaattttgcactttataataaaaaaggtatcaaatctttaatttgtagctaaatggtcactgaatttaaatttttaataatgccataagtttttgcaataagtgtaaggacaaaatatatagacggtatctttttgttataaagtataaaatttagtaaccatttatttatatgcgtcggaaagatttattggtgttattaaatttaaaatccatttatttacaaataaaaaaatttagtatctttttattacaaagtgcaaagtttagtgactattaatataatttacttaggactttattcaagaacaaaatttagtgcaaagatagagacactgcacatagaaacaaagttggataaaaattaagtatattagcaagcaggtaaaaatgttaagtgaagataggctaagaaagatgcaattcaaatagtttttcaagctcgttgttaaaagatccataaatcagcataaagtctttagggcttgaagttgctagagagcaaaagatagagaaggacctcaaatgacctagatgaagtactgaaaaagaaggtaggtactcccctttctacaaaaatatccctatattatgctacttcaagagccactttagtttctaaagcattctgattccaacgtctttgaaataagagtgttcagccaagaattcactatacatcaacaattcctctaacatcaattgttataatcgctatattatcaaagttaaaacactatcgttgtgtttaaaagggaaattccaatcctatatcaacttgtgccaaatcaaatcctcaatagccatccatatgctcgaccaaacaatttaaaaggctactcaatctaggtcacgcaaacatcatatatctaccattctatcaacatcaggagtctggtttcttgcatcatttataaatgcaatgggtctttataatgtgtgtcgaacctaaacatatttgacctcactctttaaatccaactaacactacaaaattttacttctcatgaaaatcccaaaatccatattatcccaatctcttgaaaccgaaaatggggtagtgactccattccatggaaaatcaaagacacttgatctaagactatatcttttcttttcattcttagttgacttaaaacaagaaggcaatagaaaaagtaaaagaatgtcaacaattatacaacatcaagaatgtaatgtaccattgtatatctcattaggatgctagtgcctaaatagggcaatttgccaccctatatactgaatttgtaaagagccttaaactatttgttaaccccaatgactgtaagagtggctaattttagtttgagttcccaaacaagcaacataaaagaatgaaagaagagatgcaagcaaaaatacctttaaagtcatatgcaataaagaatcatcttaaattcaatcgaaagctgtcaattctctatttatttcattttttaatatgttttactaagtacataaatattaaattatttaaagctcgaatctacataaattactattaaaggaggggttgggcctatccatgtggcgtaaaagttaactcctaaatattagtactaacttgtttaggctcttataaatatataaaatccaaaatcatttttcagactcttccattcaaagctctaacattcttgttagagtcaaactatagtatgacctagaatcatagtctactaggtgagtcgtgaaatttagtagtggcttgtatggattctagaactaattctaaccaacttcccatgatatagcacttagctccacacaatactcaatttcatacccaaactggcatgtttctcaaatactattaataaagtctgagttgcatgagttactaacctaataacataggcgaggtttggaagcccaacacggcctttagttattcatttagtaatttatgcaggcttaagctttacaattgaaaggtaatgctcaagagtggttattataaaaacttttcatgcttccataaattaagaagtactaaaagtgggataaattgaataatcaatcagtaaaactagtaaatgaactcgtatgaagcactcttctaactttatgaccataaaaatattaacaacaaatatgaagtagattctgattagttgaactaaagattagagtaaccggtgctttttttaattatatcataatgggaaataccggtagattaattaaaaacccactcttcttcccaccaatcctttgaatttggaaagaacaaataaggtgagcccacaagataagttggcgttatttgtttgcttcctccatatatatcttttataccgaactaaaaaaaaaaaggtaattttcctccctacgccatttatcttttttttctttccatccattattccccccttaaccaaatacaataaaataaaaagcactccaacaaatgatcaactcaaaactccattaggtcatgataggtgttttacctttaaattaaacaaccattctccaaaatatcaaccattgcaaggtaaagagcattttcaacaaatattttaaaatgtacacagaaattcaagttacatcataaataaatttatgattgtgtcaaatgcccatcatttttatggcaatgcccaaattctccatcaattatttcttatctttaatgtctttaattcccttttaggtatatcattgctatcttatatataatgtgctccatattgtttctatagttttggcagagggaggctgcaagcttaaggaagga

SEQ ID NO: 6664 - DNA, 1227 bp, Ricinus communis
  Intron number 2 from transcript 29863.m001042 (locus 29863 .t000002) derived from phytozome v7.0 (chr-ID 29863; pos 2 1836 to 23062)
tctacaagctccaggtttcacgttaacccaacgccctaaacttgtattcacgctaattgattgtcacacttctgttgctttttcttagtttaataattgataagaagacaagactgaagggctcagctgtcattttcaattttttttttagttaaagcccaagaaagaatttgaattgctaacttgtgttcatgctaacccattgtgaccattttgttatttttctctttctattttgtgtgtgtgtgattactaatccaactgcaagatcgaggttttcatttttttatatgttattacttttagttaaagcccaagaaagaattggaactgctaacttgtatgttgctagtctttgtgttagatgctttttgtggcatgatagctactgagctgactttttgtagtggatacaaatgagtttgaagcataaacaggttaaattatatgaatgcggagatggttttttattttttattgagtagttaattgaattgagtaaaagaaaatgaaatgaagctgtttgcaatctgataaagtgaagtttgtacattgcaagtgctatggctgtatcttgagggtttttctcatcacatcatagagcaggtgttttttgatttgatttgtggagacctgcacccaatgatgaagtgacaaagttcagtatgactaatgagagttagattttttaatgaaatacaagaaagtcaaaaagagcttctacaggtagaaattattgaaaatagcttggaatgaataagaatgttatatgtggtgtgtgatttgacatgattaatacagtaatggacgaggttggtgaatatttgaacttgattttaggttaggaattctgcatatgatatgaattggtgaaagagtatggaaattaccccaggggcatttgcgggattctttagcttttaatattcgttggtggattgtctccctaatctcagagattttatggtaaaaagtttgatagttcgtaattacaataaagttgcaatccatgaaagatgtttatatttttccctcgtctttctttgttatgtaacttttttcatgccaatggtactatgctgccagaattagcagggcttttattattaatatttgtttttgaccgttcttttatatttccaacattctgttacgaatcaatcttttaatatgtgacgatacagctggtaagctcagtttggtttgttctccttttcatagatccca

SEQ ID NO: 6665 - DNA, 1911 bp, Ricinus communis
  Intron number 26 from transcript 28842.m000951 (locus 2884 2.t000046) derived from phytozome v7.0 (chr-ID 28842; pos 448403 to 450313)
aggaaggaatatatactgtccgcttttgcattcaggtaatttatacatcattcctctcagcaattatttgacactctttgcgctagaaaatcataattgcattttggtcgtcttgtgtgggcatgatgataaaattgttttaatatctttaaggaaaaagaatatacattacatgttttcttgttcttgttatctgtttattatttatattttggaatactttatttcaataactggtcaacttttctgatggagtcaatgtggggccttctttttttttttttttttttttatcaccctcccatgttaacacagtgagcggtagggaaagttgtttaatctgtcaaggtaattatgactaaagtccataagtgctacaatctgtgcttaaatctttgaaatagagggtgtcttctgtaatctgagatatgcatttgctggagggggctggacaacatgagataagacaacatggcacaactactccagaaaaggccaaaatgatagcagtcatttacatgcagaaaaagaactacctatctttccattttacattttgcaaactttgaaggaatgggctttgtgcacaatactgattgttcagctatcctttctcatgcttgaagtatagtaattgatagacattagaaaatcacaaaaacacctaacaatatgccaaaaagatatagttttgtttctaaatataaatggtagtactttatttcaaaaaccaaaagaaaaacacagaatttgtattaacagatatttatgtacatctctgtgtctatatatttaaatagtgataaataaatttatgaaatataaaaataagaaaattcagtaaaagtctcagtctacaatttcatggatattggtttatactttttcctataaggcactttctaaatattgattttattatttgtaccatgggactgaacggggaagtttgtccaggggaggggaaatggcaaagagagtggactggactggacaagaatccacttttgtgttccattggcgtatggaatataggacactggagaattctccagtccagtgaagtctattgaactaaatacaccctcagtgtaggaaaaacatataaagagtcttgtggagttcgctgtagggatgaaaaattagtctggacaaattaccttgttagaataaaaccctgatgcaattttttttgatggagaagtttcttttagctgtctaggaagatggaaagtgtctcctattaggtaggtaattggccatgccaattgtgctcgatttttaatgtaccagatgaggtgtatcttacaggtgaaatgcatttctatttgatgggcttctcttgggcgtcacataaaaattcacagcgcttgctctgggccttggttcaagtagttgagggggcagcttttggatgaatataagatcttacatattaattagcttagttacgttctaccgctgttacctaacttgtgacttgttttgctttgcacatctgaatcccttttcttctcttctttcctgatgttgcatagctccttttgagattgcacgaagaaaaaggtttggttagaagacttctaatttcctttttctgtctttttcttttgcaaatctgagacatctgttagtggcctagacaggtacagaacctggcctacgccttattggatgtttaatgatactaatggttagtagatgaactttgggatttaagagcaaatatttgcttgttaatggaaaaaaattgtcccttatcacttcttgccacctctttggttctgtagtgggaaagatataaggtgagtcgttccacttctatgcattccctgttacgatttctgtgtttcaatctcattctcggttttgtcgactccatgtagggcgagtgggttccagttgttgttg

SEQ ID NO: 6666 - DNA, 6568 bp, Ricinus communis
  Intron number 4 from transcript 29716.m000307 (locus 29716 .t000010) derived from phytozome v7.0 (chr-ID 29716; pos 9 8616 to 105183 reverse strand)
agagttcatacctttattgggcatacaaggttagtattaaatcaacattagctttgatctttttcctttcctaatctatttatttttttaaagttatgagattcttaattttctccttttcctttctattaagtgtttcattgtttttcatttaaatggttaaacatattacaatcatttacatttattcctcatgccaccttggtgttatatacagtcattacttacccttgattcaacaccttgttagaaaattataaaagccgtgatcttgaaaatttaagctaccaatcaatatccttccaacatgatgtagtttatatgtgcgatggggaagagtgagatagaaaaaagtataagcaaagtgtgctggataaacattctagagagaaaattttcttacattgaactttcaaattttggatagtaagctaatatcttgacagaaattttaagaatttaaaagatcgtacaccctttctacaagtaaagaagagattagcatgtgaaggtaaggtttcacttctcacgtgttccattctctgatctcttgaaagttttcttacaataggacaacaagctaatattgccagatattttaccaattaagtattcctttctataagaagagagaaattagtatgcgaaggcttgaacttctcacatatttcaatatttgatctcttggaagttgcaggtagaaaagaagaaaaaatacagaaaagaagcttatgattttgttggtgttttactctggacctttctacatcgcatcagacttcttaagtttgagatgcaatgtatacaaagtacaatatattggacaaccatttgcacaaaactttttgacactttgatgttgcgcttttctcatgatgattacattgacttataagatgttgcaaatttaaaaggaatcagcaataggagggaaaatagatagaaatttggcaattccgttggtagcttctaaatggatggacatgatgatacaaaaactatatgttctatagtccacttaccatattctccatggctttaagattgattatattgggatatatgattgaaaacagtgaacaaaaatataagaaggctgaattaatttttctatattgatgtacagctatttgaagagcttaactaagaacaaaaaaggcagctaatctccctaattaaggagaaatatactattcaactaactaccctaatatagaagaaactaaatattaattcctaagattactaatacagatcttaagcctctaaatatagagtataacaaatatggtacataatcacaattatttacgagatctttcaacactccctctcaagctggcatgaagacatcactcatggcaagcttgctaactagattctcgtgttgcaccttgggaagaccttttgttagtatatctgctgtttggctagcagtgggtttgtaggacatacatatcacaccactatctatcttctccttgatgaaatgtttgtcaacttctacatgtttggttctgtcatgtagaactgattatgagctatagagattgcagccttgttgtcacagtaaactttaatagctgctggtataagaatcttcaattcttctaggagtctttttgtctataacacttcacagaatccatatgccacaaagcagaattctgcttcaacactactccttgccaccacactttgtttttactttttcaagtaactagatttctgcctacaaaggtacaataacctgaggtggatcttctatcatttacatctcctgcccaatctgcatttgtgtaggcctctattaaaagatgttctccttttttgaacaaaagtccttttctaggagttcttttgatccaaatgagtaagtccaggtgaatgcatgaattgactcacaacactcactgcaaaagctatgtcaggtcgagtgtgagccaaatagattagtcgccctaccaatctttgataacgttctttatccattaccttattagttgctgctgttttcaactttacattaggttcgattgacgtatctgctgccttacaacctgtcattcctgtttctttgagtaaatcaagcacatacttgcgttggttgacaaaaattccctccttggatcttgcaaactccatcccgaggaaatatttcagctttcccgagtccttaatgtcaaattcggcttcaagtttcctcttcaagttgctaatctcaagagaatcatcccctgtcaatcaaaatagctactttagctttgatgtaatgtttgaaaaacagggtgtgataagcttggctttgagagaaaccatgtctcttgataacatcaccaaaacgctcaaaccaagctctagaagactgctttaatccatatagagacctttttaatttgcacactttgccttttccaaggttttcttcaaatccgggtggcaggtccatatatacttcttgcaattttccatttaaaaatgcattctttacgtcaaattgatgaagtggccaggtgaagttaactgcaagagaaagaagtactctaatagagttaattttagcaacaggagcaaaagtctcttagtaatcaataccatgagtttgagtaaatccttttgctactagtcttgctttgtatctttccacacttccatcagctttaaacttcaccgtgaacacccatttgcacccaaccgtctttttgtctttgggtagttcaatgaaagtccaagtgttatttcttttaagagcatttatttcttccatcacagctaatctccaactcgggtcacctaatgcttcctgaatagttcttgaaacaagcatattagaaatcctagacacaaatgctcttatgattttttgacagttttttatatgacaagtattgtgcgataggatgtttagtgcatgttcggattccttttcttaaagcaactagaagatcaagatcaaaaggagtggaagtagagggaaggttactctgagttgtagggccattattcggcaaagctgattgaacatttgctgaaggaataactgatgctgttttaattttatggaatttcttcctagtataaacctgcagctcatgttgaggattatgatccactggattatgatttgttggaagtgcttctccccctgtctctgataaagtaacatctggcaaagtaggattaataatgctaaccctagtttccatatcaaaattagttaaagaaatggataaagtttcctaaaaattattttctttaactaagttctccccttgaagaaaatttttttgaaaaaaagagtgatcctcgacaaacctgacatccatgctctcaaaaaatttctttgtgactggattaaaacatttgtacccatgtttattagaagcataaccaataagaacacattttcagctttgagatcaagttttgagcgaaacacatttgggacatgcatatagcaaacacacccaaaaacctttgaagggggatctgttgttatcttagatatggaaaaataatttttcaaaacttgtaaaggtgtttgaaatttcagaactcgagatggcattctgtttattaaataacaagaggttaggagtgcattactccaaagatatttaggaacatttatggaaaatataagtgcctgagcaacttcaagtaaatgcctattttttcttttagcaatatcattttgttgtgatgtgtcacgacaagtggattgatgcagaatacctttttccaaaataaatgttctcaaatatttgttgaaatatttggtcccattatccgttcttagaatgccaatttttgtttgaaattgatttttaaatcgttgttcaacttcagatttcttttccaacaaataaacctagcaaactcgtgtgtgatcatcaataaatgtttcaaaccactttttccagaaagtgtgttaactttggatgggctccaaacatcactatgcaacaaataaaatggttttgaagcagaatatggttttattggaaacaaaacacgatgacttttagctaaattacaagcttcacaatgaagttttgaacaatcaatacctttaaataatttaggaaataaagatttgagatatggaaagttaggatgccctaatcttttatgccataacataacttgatcatagacaaagtttgaacttgtactacctaacacatgagttgttttattcccagaaccagttccatcaagtagtacaacccatttatttctctagtagttccaatcatcttccccgagttccagtcctgaaaaacacaattggaaggagaaaaaagaatggaataatcagagtttttagacaatttgctaacggaaagaagattacatgcaagttttggaatatgtaaaactgatttcaaagagattttttctgaaattttaatatttcctttgcctgcaataggtgaaaaactgccttcagctattttgattttttcggaaccggaacatggataatacgagtcaaacaattgagaacagcttgtcatatgattagatgctcctgaatctatgatccaaggagtagtacttcctagaacaaatagagccaaagaattactacctgtttgtgccatagaaccgataggagaattagatgatgagcaagatttcagcagtttaagaagatgacttctctttactaaatggagatgactcggcctcatttgctgtaggtgtgctatgttcaccagattttttttccttaccattaggtggtttaccatgcaacttccagcatttttcgcgagtatggcgtggctttctacaatagtcacattgcaggttgtttttgtcttctgaacactggttgtgagaagttctactgcttgcttgagcttcaggaatagctagcgctaatccttccatggatgcggttgaacttgcagttctctttccgaacatcacatgtcttcgactctcttctctccttacctccgcaaaatcttcaccaattggaggcaggggatttcttccaaatattcggccacagacctcatcatattcaacatttagacctgcaagaaatttgaagattcggccagtatccactatcatcttgtactggttgcagtcatcatttgatttccactcataatcattgaataagtccaggtcctgccaaatccgtttaagagaattgaaatactttgtcacagaattctcaccttggcaaattttcccaagtcgtagggtcaactcgtaaacttggattgatttccaaaatcagagtacatttctaagacattgtcccataattccttggctgtagagtaacataggtagtttgcacttatctcttcagtcatggaattgaccaaccatgtaattaccattgagttttcagcatcccaaatggtataagttttgtcattcatgtcagtttctttatgatctcttgcaaaagaaaaaagagttgctaaggaaaaaaataaggattgacatttgaagccccacacgctgctttgtttaacaagcgtcgccgagggcaggaaagcaagccaagtctgaaggcagaagccgaacgagaatgaataccacacagaagagtcaagaccaggctgctcagtatcacctgtgatatagccaatctttcctcttcctcggaggtacatgcgaacagattgtgaccatcgaagaaaattatcaccatttagtcggattgtactaatctgaatgggatggttttcggatgtatttctctgaggttcgggctgagatggctgaagaggttggcttgtcccagacgtgactttagacattttcgagataaaaagaaaaaagattcagacctaggatttttggctttgataccatgtaaacagtgaacaataatataagaaggctgaattaacttttctatattgatgtacagctatttaaagagcttaactagaaacaaaaaaggcagctaatctccctaattaaggagaaatataccattcaactaactaccctaatatagaagaaaataaatattgattcctaagattactaatacaactcataaacttctaaatatagagtataacaaatattgtacataatcacaattatttacgagatctttcaacaatgacatttaagtgtgacaccagcagagttgttcccatatcatttcagtgttgtagttagttgaatggtcagcatctcgatcttgcaacaaacaggttgtaggctttgaggcttgagaagagtcagtgatgtaatattgttttagaataggattttctcttgagtttgtttcttgaactggaatactgcaacaaggatccctataatatcgttaagcctggttttattgcaaatagtaaaagttttaccaaagagaaaattggggttgctaaagtagatgtacaatacggttgctgggcctaagaacctcgtaaggcagtaggcagtgatttttgccattttccatgttgttgaaggagtagactagtagttgttgttattctttcagtctttgaatgttatccacattcttttgggatgatttgcagaacaacattccagtcttctgtccaggtttaacaga

SEQ ID NO: 6667 - DNA, 743 bp, Ricinus communis
  Intron number 1 from transcript 30147.m013850 (locus 30147 .t000121) derived from phytozome v7.0 (chr-ID 30147; pos 2 922598 to 2923340)
cgcgtttgggctgggacgtgcctctagtccctaaggtatacgcttttgttcttctaatttcttcatttgttcttaggttttgtagatctggtcaatttcgttagattctgtggtataatagactagttaaggtttgatcgctgtcttctgttcatatattcttttctcttcgagtagatgttaatcttctcttttttttatcgtcccgtttcttgaagtttagcctaaaggttaaagttttattgttttctgttgttttagcttctaggataacagatctggacttttattgctgtatatttgtctgatttttcttaggttttaattaaatactggattctggtttacgattgcaagaatttcttaatttagagtttatatgtatagatctttatgtataattcatacttgaaatgttataagttaacaaatttttgtgtggctagctcaaaagatttttctttcttctgtttaggtaaaagaacctgaataatgctttttattgatttgctaaaacatttatgttacacgcatgcatgtatggtataatccagtatatgtggtgtttctaatatgatcttgtagatttgtatctatgaaatctttttattttatctaatgagtatatggctattagtgaaggggatgatacccaagggtgtcaaggtttcaggtgaaaaaaattttgatttaatttattgagtggtgcataaatgagtggctgtgtgtaggctcaggtagga

SEQ ID NO: 6668 - DNA, 2082 bp, Ricinus communis
  Intron number 1 from transcript 30146.m003437 (locus 30146 .t000014) derived from phytozome v7.0 (chr-ID 30146; pos 9 2736 to 94817 reverse strand)
catcagtgttctacaggcgacaaatcccaagtcaggtattcgcagttctcttctttatctgtttatgggtgttgttctatgtttattttactggatactgtaattagttttggtgcttaactaatagtgttcagtttttttttttaatggatggtaactggacggtcaatcttgatattttttctttgctgttgagtgcttcatgttcttttcaaggatatttcttggttggtcggcatgataaaatttaaatctgaaattttgtctcagtttgtagtttgtgattctgaagttgtagaattgtttcagtccttttcttattaattatttccttgtttgcattttgattgaattaatgagaaagcagtggcaaccgagtgtgcttagaaaatgtagcaattgagttaagggcattaatatggggttcgtgggtcgtggaatagatggtaaatatggattgaattatttccccctgaaattttgtagctttcttaatgctgataagaaagccttctccatatcaagaagggaagctaactctttagattggagaactactgcggctgacctattataaagaaataaactcgtctgtgtttcttaagtattaggaatcttattgaaaacataactcgtgtgttctttctttctttacctatgtagaagagaggcaaaaatcatgatgactttgttattgaatggttctatatgtgcattatggaccaaaagttaactgtgactgaagaacctgatcattaaataaatttaggtatagttcttcatgcatccttcaaagtcccttaaagcttgacatatttctctattagtataattttgtaatttaaataacttcagcaattttttagtaacaatttaactgtgccacaaatgaatatgaatagttatatttgagttttcttggataattagtatcatgacctcaagctagcataacaaaatccatattccattttaagagtaagctggaagtttataagtccctttatttatgagtttctttgtcctgtcatttgttcacttgtaatatctgcagcaaaactcttttccatgaagcatgctggcaaggatagtgaaaatgtatttatcaatatggttctggagttttactggtcctatttatgagatctagtgatgcttgtagattttaaatgtttgactttcttttcttttataggagtggaggacttattatgcatttattctagatgagaaaccattcagatgcctttatacatagtttatatctctggatattcaattatgataatttaatgaaatttaagaatagttcttgttataccaaactaatagctcgcatttttattctgcaacaatgaggaggatacttgttgtaactgtttgttgatgatcatggcatgcatttgatagctattccaactaaagatattaactatgcaagatctgctaatgctatttgtttttcattggcatccaaaatcagcttggcataggtgatccgtcactttttacgctaatctattgtgcatgatttcataatctagaaaaggttttctcatggttcctgtccacaaagagaagaaaattgggagctgactttttggattcagcgagagagatgaggagggacaaaattgttttgcttcgtgaatcataacatatttgctaacatagattaggctgccattctagtgataggaatggacaagaaatgtcagattcagcaaataacaaatatcatccaatgtgcttgtagaatatgtttgctgtctggtggatacctttttctaatggctgctctgtttctattctgtatttctaaagagaaacgtatagagaaccgaatgtgtatgtaagtcttttgggcatagatactgattttgaaaattgcagcctgtctattgaaaactttctgcaaaaagtgattgattgtgtgtttagagcatgcaattaaattgttggacactgataatttcttggctggaactttgattctaaatggctgcttcgtcatatcactgtagttgtgcactgttgtttgaaatgtgatagttcttgtaatctccctgtgcagatagtaga

SEQ ID NO: 6669 - DNA, 1126 bp, Ricinus communis
  Intron number 8 from transcript 29839.m000431 (locus 29839 .t000005) derived from phytozome v7.0 (chr-ID 29839; pos 1 22226 to 123351)
gaatcgttctgaagaaacacctcaggtatgtttgatgcttgccttcttattggggaaggatatattacaatttaggagatcaaattatatgcctggtatcaaaagattttagaggatgaaatatagcatattctgcaagacagtcattagttaaaactctttaagtgaaaatctatattattaacttgagccatgcatgattatagtaagattaagagattgcattttttcctgattaattttggtgtttgaccatgttaatttttggaagcttgacagggaaatagtgaagttttagttagcagaataagctgtctcagaggtacctggggaatgaactgtagatataaaagttctgtcccatgcacttttgtatatgacacttgatgtttagaagtactaaagtagcatgagttacaagcttacaccatggaagtcaatatataattcagtttctttttctctttttctaagaaagaagggttaggactataagctacttgtgcttcaattccattgtccaattatcatgattttctgtgaaacatgtcagcgcctcattctgtattgtttgtagttcctgtacggggttctctcatcagatcagatcaagtattggccctaaaatcgtggtgtcatattgcttcacatttgagcgacctaatcatagttggcacctcaatttcatgcaaagcatgcttttcaagatttgctgatatatgcttactcgttggggggtccttcccttgctgttgttaactcgttagtttctgttgatttgggcttttggaaaatgcaaaatgctttcagaatgcccagagatgaagctgcttctctactgtggcaattgttgttctaaactgctaattgccattacttccaaagaaccatgttatattactggttgtagaaacattgaatgtcatatctcttggttggatccagtcccgccattcagccatgagttatgatattatgtgatagcactttttagtctttcagccactcttattataaaaattaatacatagatggtctagagtcatactgattgaacattacatcttgcatgtgagatattgcaatggctaattgtgagaaaattaacaggtggcttatacctttg

SEQ ID NO: 6670 - DNA, 6037 bp, Ricinus communis
  Intron number 16 from transcript 29453.m000063 (locus 2945 3.t000002) derived from phytozome v7.0 (chr-ID 29453; pos 35185 to 41221)
agcgtgttgctgctgttcagaaaacagtagggagtgtaagtgtatcttaacaaaatggaccgaattgtcctctcttcttgagaagatctttcattatataggcaagactgccatctatacaaggaaactagagctgtacatgttaatgacatagagtaatcctaggaagccatatatggtaagctaagtctcctctcctatttataagaatatgagtgatcctaggaagctatgtatggtaagctaaatctcgtttcctatttataagagtattacagcctaaattaatggcttaattacagaaataatttaattgttgaccccatttttggctttctatagacatcccccctcaaattgatgcgggttatctacaagcatcaatttgttggcaagaaagttatgtctatgctgtgtgagagccttagtgaaaatatctgcgacttgaagattgcttgacacatggggaagagaaatagtctgagcctcaaaggcctcactgatgaagtggcaatcaacctcgatatgtttagggtgctcatagaagatgggattggcagaaatgtgaatcgcactagtattatctgcatgaagaggagtaggactgtgctgagcaaaaccaagctcagctaatagactgcgaagccactgtatctcagcacaagtttgggacatagctctatatttggactcagtagaagagttagaaacacgatcttgtttcttgcttttccaggaaataagggctggaccaagaaacatacaccatcccgtagtagaacacctagtgtcactacaccgggcataatcagcattgctatatgccataagatcaagtgaggtagcagccagatagaaaaggccttggaaatttatgccattaacatagcgaattattcttcgaactgcagccatatgtaggtgcctaggagaagctatgaactgactaacctgttaaaccgcataagagatatcaggtctagtgatggtaagatagaccaggcagccaactagagtacgataggctgcagggtctgataataagttaccttcatctttccgcagcttgagattaagttccataagagtagcaagaggagtagagtcttggagactagcaaccatcaccaagtcctaagcatacttatgctgagacaaaaagataccatgcaaacccgtagtaatttctataccaagaaagtatatgagagaacccaggtccttcatgaaaaataagtcttgtaaatgttgctttagttgagatattagaattgaatcaatacctgtgatgattatgttatcgacataaactaagagaatgacaatgccaagctcagttcggcgaagaaacaaagatgcatgatacttgcttttgaaaaaatcaaacttgagtaaggtgagttaaatttctcgtaccatgcacgaggggcctgccatagaccatataaggagcgtctcaatttgcacactgcagaagtagagttagaaattaaaccagccggaggatgcatataaacttcttccttgagatcgccgtgaagaaaggcgtatttcacatccatttggtgcaaactccaagtttgtgaagcaacaatagctaaaattatgcgaatagtagtcatttttgctaccggagcaaaagtctcatcgtaattaactccatattcttaattattgccaagagctactaatcgggccttatacctatccaaactcccatcagattttaccttaatcgaatatatccatttacatccaagtggagtcacaccagcaggacaatcaaccacttcccaaatctcattagcttcaagagtacatatttcttcctgcatggcctactgccagcatttctctttgattgcctttgagtaactagtaggaatagtaatagaagatatagtggcagagaggacagaagtagaggtacctatcttagatgatgggaatccatatcgatcaggtggatcaataactctagatgagcgatataagggagcagatggcacgacaggtgcggaagggggcagcactagaggtctgtgctgatatactgtacttggcttgaacctttcaacttgagtactaggagcactagaagggtcatcaaaagaaagcagtaattcaaaaaaaggctttggtgattgagacataggaaaaaaccattgattttcaaaaaaaataacacatttctcgagacatgaacacgataggagtttggatcatggcatagataacctttttgtgtgacactataccctaagaaggcacaacagacagattgggcagataatttatttttgtccaatggaggaagattgaacaagatgcataaaacaaacacacccaaaagtgtaaagatttgtataagtaggatggtgatgatgaagtctgaaatttggggactcaaaatcccaaacttgggaagggagtctatttaaaagaaaggttgttgtggtgagtgcttctaaccaaaacttagaaggaaaagatgacgactctttcattcagttactccgttttgttgcggagaacaagaatgttgagaaataatccctttagtttgcagaaaagattggaattcatgagacatatattccccacctgagtcagactgaagaatttttatagtagttgaaaattgattttgtactagagctaaaaatagtttgaacatggaatatacttctaatttatgacgcaggaaataaacccatgtatatctgttgtagtcatcgataaaggtcacaatatatttgtattggacatgagagatggtaggactaataccccaaacatcaccatgaattatctcaaagcttatgttgctctactaccttcagatggaaagggtaaaatcttacttttgctaagtttacaagttgcataatcaagaaacatattgggagaagaatgcacttgattattaaacagaccagatttcaacaaataagatagaatcctagagttaggatgaccaagacgcttatgccattacttcatttgacactttagagctattactaagtaaagctaatactagggaagaagataagttgtgcgaaataggtagtttcaaagaaaatagacgtccatgcttaggcccttcgctatcaactgctctgacatctgatcctgcacaacgcaaccatcatgagtaaaatggacatcataattttggtccacaagttgaccaacagatactaaatttgtaaagagattaggtggtacaaaaacatctttaaaggaaggagatacatcaccaactgccacaacgggtagattactaccgttagctatttgaatatgtgaggagccacaatattttctgatattacttaacccatgcgaagaattaatcatatgattagaggcacctgagtctacgatccaagaagaaaataaagaaccagtaccttgaagtccaagaactgaaaatgcatgcacaataatatcttatattgtctcatgagttaaaggtgctgaaggttgtaaagcaatggcaagaattgttgtagcagcagaagaaacagcaggctgcaaagcaccagaagtaacgacaacatgataagccttgttggagcgtggagaatgagtagacactctttaatgatgtgccttgaccacttgcagtagttataaaacttctcagtacagttaggagcaatatggcctttttttttacagctatagtattgggtggtactcatgttgcgaccctttcccttaccatcggcagcataggcaactgagatagtattagaagctacaggagcttgctccatactattctgagtattgatacgttgttcctcacacgagttctccaaaacaaatctccaaagatggaataggatctctattcactagagaggcacgaacagattcaaaatcaggccgcaacttcattagaaattgatctctttgactggttttgtgtacttgtactgccaccaattcttctgcagggactttggctgtaacaagttctgaatgatcattccacaaagtcaaaaaattagagaagtattcttgaattgatagatccccttgagaatagttagcaatggctaattcaagctggaaacgtctagcattattatcttggttgtagacttgcttgagataatcccacatggcctttgcagacctatgcggacgtaaagaaagaatcagatgtggctcctagaaacaagaatccaggtcattatttgattagctttctcagcgcaagttgctgtgtctgctgtaatagatccttctttggtgctgccatctatatggccccataattccttacctttgagaaatgtctccaattgaaacttccacgtagcataatttttccctgggaacttcacacagatatgatctaatttctccataatcactaaggctatgattgagaaagctaaggtttcttaggtgtaggctctggtaccataacaaaatggatcgaattatcctctcttcttaagatctttcattatatatgcaagactgccatctatacaaggaaactagagctgtacatgttaattacatagagtgatattaggaagctatgtatggtaagctaaatctcctcccccatttataagaatatgagtgatcctaggaagctatgtatggtaagctaaatctcctcccctatttataagaatatttagagcctaaattaatggcttcattacagaaggaatttagttgttgaccccatttatggctttccattgacatatctcacttacaaaccaatggtagctttgcagattaaatttatgttcatctggctttgagattgcattgactagactattcactaaattggtatagcttttagggggaaatggtgtaaattggcttggattagaagatattaaacaactagctagtatttagttataaaaaaactgcaagttagaactgtctcgaaggacatttcagcatgttgctgctgttcataagagagtagggagtctaagtgcatcttgcttactagcccgtcgtagtttcgctgattaaacatatgttcatttttctctgagattgtatgtagactagtcagtgcatagatatagcttttaggtggaaaatggtgttagcttggttaagatatgaaataactacctagaatttaacaatcaaacatccaaatcctcttattgctgtgttaagtgttttatccccttgttgattaatctgctcggattaattttcttgcaatgtaaaacttgctttatgttgtatgcaataggtaaaatttcaactcattagccacttaaataaaatcaaatagaaagctaaagtcttactgttctaggagtccaaattatgtcgaactctttgtttctgattgggtcatttcctgtttgaaatgtatggaaagatgcttgcaactggaggattggtgggttgaagggaagaggaggggtttgaatgatgtttgtagttaatgatactatatttctgaatctcaatgcaaagccttttctctttgtatggtttgaactgtacatttaaccagttaattgcatcttcaactcttgataacatgatacttgcttccacttgtgtctaaaacttgtatagtaataagagaattcaccttcatttaccttggctgttataaccttctgtcaaactcacgagaattattaatctagcctgtttgactacttatgttgcttttgatgcaagaaattgctcaattagtacttcaacatgacaactaaactggttattagattcctgtatggttgtgtttgtacgtgcagatactggaagctctagattagctggcagatacttgtgttcacacatctagatttttgggagttggttttcttgcctcatatagagttaaacataggcgatttgctctggctcctaaattgtgatttattttgttaatatttcatatttttaaagaaaaagtttgagtatgtgttgatgggcatgtttccttgctctctcatgtccacctcttgaccaatcaacaggcagtagctgctggaagtcttataaaccttgcaac

SEQ ID NO: 6671 - DNA, 2270 bp, Ricinus communis
  Intron number 7 from transcript 28582.m000318 (locus 28582 .t000003) derived from phytozome v7.0 (chr-ID 28582; pos 2 2626 to 24895)
aaattgcgcttagagcacctagcaaactaattgatgtaagcatcaaggtctttagtttctttacatggatatttcctttaggttaacacaaatatttattattatctttttaaaatctttttcctaacacaaaattatttcctgtttatttgtgcacatgtatgcttccatgtgtttaggtatgtgcattttaaaacgttcttttaaaggacataaatttatgtgtaagcagaagtcatttgtgaatgcagcttattctgaaaaaaataaagagtaaaatagtggtaatgattaacctagaattgggtgactcatttttgaaatgcatgagtagaatccctatcctgatagcatatctgtaaatttgtttcagaaattgatactcggatttgcagtctcgaactatataacatgaacttgcttaatttactcaattaagcatttatcccaaattagtaggacttgctttggtggacaatctttttcaagattgattacactacaagtctatgctgcatttataagaaaaactattgctgctacatcctattttacaccctggatcattattgacctctcgtctcttcacttcaataacttggacatgttcaaccttccagattgccgcatctattggtctattctggacatgttcatctcattttactcttctctctctcggcttaacttatccaaatttctattatattcactcatatttatcttagcattctcatatctgcccatgaatatgttgttttcttcactgtaacaattgttatcataatcggttgaagttcagtcttataaacttcttcttcaacttatctaggattatacaattgcttaaaacctcacctgcttattatttcaatccttagagttacactgtccaagctcctaccattctttttcttttcttttttgtgaataacacaataatgaatatatgatgccctttgttaaagttgaactggaacaaagattttctagatttaataacctcttggtttggagagagtattttgttaatcatgaacataaagtaattagtactccatgggatatcctatggaggttgtccaatttgaaacttgaaaacgcaaattttactattgattcaaaaaggattcaagtttttaaaagaggtcttcattatagggttaagcataacaaattgtaggattcgttcctttggttatattttgggctacttggagagtgctgaatttacaggctttttaggaatataggtggacacctaatattaaattttgtccatgtccatgtaggtagattcattcctttgtccatgtgttttaggtagatacctaatattaaatttttggatgagggaaattttttgtgtaggccatttttctttttgtaactttactaatatttttactataggctcataaattatatacctctggcatgaagcatgcttttggtatctttttaaaatagcttttcaaaggaaataaatcatggattgaagtagctctacccaataattcttgtgtgtgaaatagtgttttaaggagtaacttttgggcacaatgtcgttttaactcttatatgaatgtgttaagtaaattcactcaaaacacacatgcatacatgggagcaaaatacattaatttttatctggttcagttacatgcgtatctccacgaatccactgtcatttcactatgaagaggttacaattgcctttcaaaacagttagttttgttgtttatatagaagtacaggagaaaacaaaagataacaaaagttctgaagagaaaaacaaacgtactatattgcgcttgagtccttattatgggctggagaaagtatttctgtatgtcacaactgtctttatattttgtagttttacagaggtagtaacttgttgtggcaagacctcttctaaataagacggtcttgaaaaacttgtttaataccaaggcctctctccctcttagacaccattatcaatgattatccttatgaactttatttggaggaaaatgatccaggctgggatcaaggtttaattttgtttgagtagatttgagcataaacaactgtagctggttattcaacattgttttaccaacaattgatagaactttttccgtaaagtgtcttagtatctgaaaataggttatcacattcttgattgttcacaccctttctcaatcagagatttaaattccctctctgtctctctgaaatataatactatatctccagggtcggttggctgtttgtaacctagc

SEQ ID NO: 6672 - DNA, 2231 bp, Ricinus communis
  Intron number 7 from transcript 30179.m000563 (locus 30179 .t000012) derived from phytozome v7.0 (chr-ID 30179; pos 9 7016 to 99246 reverse strand)
ctggtttgcattgtgcctccataatcggtaagtgcaatgctataattgactgcgttaaatagatcgttggcaatataatgtgctgttacccattttattgacaaatgatataagtacattgggataatatcaacttcaggcaagagttccttattcaggggagttgaaaaggagtagggaaaaccaagaaattgatagtctattgggaagtcaaaacagcaagctgatatcattaattaataacaggatttgcttgtgaaagaaaagaggatgtttgaaagtaataaatttgtagcccaatctgcactttttgacagcttaggctcaattaattttgtaagcccatataaaatgaatactcaattgggatgaggaatgtgatattatcattattctccattaacaaagcgaaaatttgcatcaagttgtgtttgattccgtgcaaagcatggatggatgaaatcaaggctgtttgtgcctcaacatttcaaaaattctggcttcttcttcaaacagctgaaaatgatgtggacaaggagaagaaatttggaattgttttggtatgatttaggtcttttaggcttctgctatgtttttgagtatttataatatgttatttgcaggaaagaagagtttctccctgtttgtgtgatttatttggtattgctactaaaagttgcatatggactaattctaaaagtgttaggagtatcaagagtctccatgcattactcaaataatgagtgcagaattattttacaaattctcttggagtctagtttaaagtctatgtcttcttcaacaagccagccaaaaattcaaatataatatttattgatctcttgctttgaaagttctgacttattccctatatcaattagcatagaagaggcctaactctgttgaaatttactgtttgcagtaccaaaacatgcattgcaaaaagcactataacctcaatatatcaatcattcccagaaaagcctatacaagcataaaagcacaattttcttttatgacttcttcaatggattcttttaccacttttgacagttatttagcttctgctggttgtcctacattatagtgatacaaaatcctaaaagccaatagaatttttgcgtttttccatgtgttgggcatacaaattgcaacttgaagacaatgtctattgggaactattttaatttgagtgtttctgtgcatatcttctgaaatttggcaaagtatacagttggatcctcacttctaagaaatgatttaaatggttctcgacttcttaatttcaattttccgtggttcttccattatagtgctgtatgcttcagttagaatcacatttacttctgaaattctacagtttcttacatgttttatgccaaaacttaacaaatatttctatgcctcaatttgccctctttcaaatagaaatattgtcaaacaggagtattactgcaggtttgttttcttttcattaaaattaaaagttaaaaaaggtcaacgacccttattacgtagaacaactttctcgtcccctaaaagttaaatgaggtatacaagtacatgcttaccacaattctattaggtaactctgcccttaagttaattgagctgggtgaaatggtgcaatttgaagtcattctgtagatatacagctaatctgaaatgctcttaatcctttctcaaagactttagctgattgactgttttggataaacccacttgaaaaaatattcttagctatttagcctgaagtacatcggtactcaaatgcatgaactgaaagtcaactttcttctcaaggaatgttggatgcttctttcttctcctttgctgtaagcctttaaacagttgtgcttgtaattgtttgtaccccatcttgtgctttgtaatgttcatgctaggttttgatgtctgtatttgtgccctgtatgttaatgaatgtatgtctgaacatgtttgtgatggttttgagataggagtcaatagtccaaggtgtgtaagttatagttatccgaatgctcataatattttgaaattcatatccagctgacatctgtagatataatcatttgtatgcatatatgctcgtcgatgtcgactcgttgatatgtacagttataattgataaatcaggtcaactattcattttatcctttcatttatagttcttaagtgtttctttgtcatctccaggggggattgtaaacaactcactgcgcccacaaatc

SEQ ID NO: 6673 - DNA, 627 bp, Ricinus communis
  Intron number 18 from transcript 29868.m000341 (locus 2986 8.t000005) derived from phytozome v7.0 (chr-ID 29868; pos 56944 to 57570 reverse strand)
ggtcccctcccactattgttgcaagaacagtgagttcattttccattttcctctttcctatgtgcttacagcattgtcaaactgttctgatatataatgtaaagaaaataagataaacaatgacttgaaattaaaaaaagaagacagaaaaaagagaagcaacctgaaggaagaaaaaccttattgaaatgcaagagtaaatagaggaagaagacgaattgtttcttgtgtgttgtattgagcaatttacatgtatatatacaagatggattgaccaaaataggaaggtcaactactaatcaaatccctatatcaaatccccataattaagctattttatactaatatgattctctataatctatactgatatgtacaggctgtaaaaatttatataatctcaatttaagtcatcttaacatctatatgtattcactaagaaacgtttgttacatccttctttttgcatgtgtgcattatgtctctcatatcatgacctatctaaagctaactatttctagtagtacaatttgagctgttgtttatggttccctgaattgctatttaaaaaattgtcttgtatgatctccaggtgcccttaaaggtcaaccgtggacctgtagttga

SEQ ID NO: 6674 - DNA, 4210 bp, Ricinus communis
  Intron number 5 from transcript 29801.m003225 (locus 29801 .t000170) derived from phytozome v7.0 (chr-ID 29801; pos 9 06030 to 910239 reverse strand)
ctgttcaggtgaaatttcttcttttctgtttccctatttgtaacaattcaagggaaagtgacgattcaaatcctgatcccttctgcattgaaggctggaattttttgctttacggaaaatattattgttgttgtaaaattaattgcactgttttcctctttttgttatcttttgcgagtgttcttgaagggatggattgtgggtttggcaggttttgcaagctgattactgttcaaaacataagatgaagttatatagtaatttcataaatggtgtaatcataattgttttataatgaactgactgtgcatgaatttgtgttcttgaatttggattatacgcctttcttagcaaattcttaacagtttgggttatacacaatcgagtgtacaattaagaattcaagttcccaaatgtacccttgttcattgagatgtctggacttattaatctttctataggtccccttgttctttgagggttgagatgtgctctcttgtatatataaggtggaaggttaggagcatttggaatttatagtggagatctatggttgcaaagaccctagtaattgagtagcaaatcaaacttttgcaagaagaatcagcctcaggtgaggggccttgacaagcaattgcagtttgatggatttgtgatcacctagaatcagcgactttttggctgaaagatttgtatcataccaagatgcttgcgaatagtatttagtaggttagaacttcatcactgctaggggatatttcaaggagatttgtgaggtttatcaagtagatgataatcaatggctgcctgatgcagcaaggtgaaaaacagaacgctcatgcaacttgtagtgttctaatattgattatgtggtggtgaaaacataatggctatccacttccatctagagtttttagatagaaggaatgggatagatgaaaagatttgctatcccattgtattgaggcatgcacttataggaagggttgtgctttatagtaatgattgactgcttacttacaactcttattaggattgggcccagatccagcaaaaaaaaattctcatgtgggcttattcaacacgagcatgtttgatggaatcaattatgggcctagttattctaatcttcctcatgaatcatgaacaaatccaacctagcatatgttgctttgttttgtaacgctgatgaatcatatagctaggtaagtagcttagacccaaccaaaaaaagaaaaaaaaaggaagcaaagctcaatacattcagctgctaactaaatgagagcttcgctccagtgagattaattatactttagctcaaaaatacaaaaaatgattctggcttttctctttgagctacctcaaggtaaatacttacacccaagaccatatttagtaaccttttaaatccctctttgattagcaagctaatcctggataaaggtggcatgtagatttattagattacaggaacctagctttttggtagctggccttaggcaatggaggttatatgttcaagttccattttaggcaagaagggtggaacaagttcagttttgactttagatcaagcttgatgattataggtgtgagcaaaaagatgcagtcaactttgatgggcatatttttcgggaaagttaaggatgttaggtggtttagatgtggagtttctagaagtgccttcatcatttgggtggttaagaatcttattgccagaaaattcatagaaaaataaaatccccactaatttgttttccattaagaagttgcactggaaaaatcttatttcctggataacctattcactacaattgacctagaaatcatgctaagaagctattctaggaaattaaacaatgagatctatgttcatgttttcgaggcttttgtagataggaaaagggtgagtctcaataattacaatagtcttattgtaggaaactgactagttaaaccatttgcttgcattttttatactagtatagaaacaattgaccactttaaatttattcgcaagttggaaagttaatgtaatcttgatggttaacaataacattaaataccttttattagataaataaaagttctttttggtttttgggggacatatttttggaaaacatttgtaaatttgtttgtttggtgtttggggtgtttaagaaaattggttcacgagaatggtttaaagttaaataacgacgttatgagttgttaagatttaaagttacgttattagacataatgaatatgattattatggctgatcaaaggacgattgttgaatccttataaattgaaattttaatggtgcgatacttatttttatcacgatttttaaccatttaactttttttttttttaaaaaaaagcatgcacttaaagttataaaaaagtgaaaccacatgattttttttgtacttgtccctaaaaagtacatttcatagatattattttatgaaataaactaagcctaaatttcaaacaaagattggataacttgtcaatccacttgtgaagtatatagtaagtacgtggccaggaatcacactttcttcattctcaataaattataggtctaaactaaaaaagaacatctagttatgaatttctctttcattcttgtctagaattgcaaatttaattatcttcaagaaaaggaaagaagaaagaaagcactcggatagtggttggtacttccaacttcaaagaaattgacttggataataaaacactgttgtaattagagtctgtgtagcatcaaaaagagctttttcatctaattgtatgattttgtacttttcctttttgaatatccttttgtattttcagttttcataacgagcttgtttccaaataatttaaaaactataaaattaggaaacatgttaaagaacacacagtctcattttcgctttgcattttagccaaatcaatgtttaacttagttgtttaaaagctcatctggatattccacccgttactgccaatgtctcttgcccatatttcatcaaaaactgtctttaactttcgtaaaatttggccatttttcatccttttctggtagattctttccctgctctacagcagcataggctactattcttgtatctgataccaaaaaaactgatgcagcagaactctgctacaaggtatgttatattcgaggactaatttgaaatacttgatttgtttgctaaattagcagctgaaagggttaagagcatggatgtattgcttacatagttggaagcaacaaatagtgaatacctacagaagcaaagaaactaaacaatgaataacctgctattggattagaatacgaaaaagttataggaaataaagggggatgagaagataaaataatttagcactacaaatacatgtacctctgtacatgtttataagtgacacttccttctaaaatgtcatgactggttcattagcctcagatttttctgtaagtgattcacaggtgattcaaggaaagctagtagcttagaagaagctgattaggcacaatatattttaaaaggtgctaggatccttggaggatagctttccaaattacaatatccttttgtctggaaatatagaaattaaaatgcattctccaaaatctgatgaaaggaatataatttcctttcctcttagcgaagcactttaagctgttacatgaaatctgcattaacaaattatttcactgaaggctatagcacttatggattaaccatcaattccagcattctgaaactggatatgacattaagttgggcctgcatttgagtttgtaattgtgacctatttaaccatgctgcatgtatgcacactgggggtgcatcaactgatttccctctccttctactcactattcaaaactgtggttaggaatttgaaaattttagaaacaactttactttggcatgttaatgcatatggaatgagatgaaggtggagaggtttctatggtgcattttttatgatcttggaatgccatggaaataagtttgttaccgcatgctcctctatcaaaaagctgaatacttggtacatttttattttgctagcaagggcctgtgcactgctacattattcacaaatcaggctacaattatggctaatacaatacgctaccatattttttatatatatttttaaatttatcaggtttcaaacttattttctgttgtttaattgatttcagattgct
